United States Patent Application Publication US 2023/0026259 A1 - sequence listing, part 65

SEQ ID NO: 163705 - DNA, 1105 bp, Homo sapiens
  Payload ID: 12242
  Gene Symbol: PON3
  Gene Name: paraoxonase 3
  Uniprot ID: Q15166
  ENST ID: ENST00000265627
  CDS Start-End: 12-1076
accccgagaccatggggaagctcgtggcgctggtcctgctgggggtcggcctgtccttagtcggggagatgttcctggcgtttagagaaagggtgaatgcctctcgagaagtggagccagtagaacctgaaaactgccaccttattgaggaacttgaaagtggctctgaagatattgatatacttcctagtgggctggcttttatctccagtggattaaaatatccaggcatgccaaactttgcgccagatgaaccaggaaaaatcttcttgatggatctgaatgaacaaaacccaagggcacaagcgctagaaatcagtggtggatttgacaaagaattatttaatccacatgggatcagtattttcatcgacaaagacaatactgtgtatctttatgttgtgaatcatccccacatgaagtccactgtggagatatttaaatttgaggaacaacaacgttctctggtatacctgaaaactataaaacatgaacttctcaaaagtgtgaatgacattgtggttcttggaccagaacagttctatgccaccagagaccactattttaccaactccctcctgtcattttttgagatgatcttggatcttcgctggacttatgttcttttctacagcccaagggaggttaaagtggtggccaaaggattttgtagtgccaatgggatcacagtctcagcagaccagaagtatgtctatgtagctgatgtagcagctaagaacattcacataatggaaaaacatgataactgggatttaactcaactgaaggtgatacagttgggcaccttagtggataacctgactgtcgatcctgccacaggagacattttggcaggatgccatcctaatcctatgaagctactgaactataaccctgaggaccctccaggatcagaagtacttcgcatccagaatgttttgtctgagaagcccagggtgagcaccgtgtatgccaacaatggctctgtgcttcagggcacctctgtggcttctgtgtaccatgggaaaattctcataggcaccgtatttcacaaaactctgtactgtgagctctagactctagatagtaaaaaaaaaaaaaaaaa

SEQ ID NO: 163706 - DNA, 1127 bp, Homo sapiens
  Payload ID: 12242
  Gene Symbol: PON3
  Gene Name: paraoxonase 3
  ENST ID: ENST00000442770
  CDS Start-End: 14-154
gcaccccgagaccatggggaagctcgtggcgctggtcctgctgggggtcggcctgtccttagtcggggagatgttcctggcgtttagggttgggttttatcttctacagagaaagggtgaatgcctctcgagaagtggagccagtagaacctgaaaactgccaccttattgaggaacttgaaagtggctctgaagatattgatatacttcctagtgggctggcttttatctccagtggattaaaatatccaggcatgccaaactttgcgccagatgaaccaggaaaaatcttcttgatggatctgaatgaacaaaacccaagggcacaagcgctagaaatcagtggtggatttgacaaagaattatttaatccacatgggatcagtattttcatcgacaaagacaatactgtgtatctttatgttgtgaatcatccccacatgaagtccactgtggagatatttaaatttgaggaacaacaacgttctctggtatacctgaaaactataaaacatgaacttctcaaaagtgtgaatgacattgtggttcttggaccagaacagttctatgccaccagagaccactattttaccaactccctcctgtcattttttgagatgatcttggatcttcgctggacttatgttcttttctacagcccaagggaggttaaagtggtggccaaaggattttgtagtgccaatgggatcacagtctcagcagaccagaagtatgtctatgtagctgatgtagcagctaagaacattcacataatggaaaaacatgataactgggatttaactcaactgaaggtgatacagttgggcaccttagtggataacctgactgtcgatcctgccacaggagacattttggcaggatgccatcctaatcctatgaagctactgaactataaccctgaggaccctccaggatcagaagtacttcgcatccagaatgttttgtctgagaagcccagggtgagcaccgtgtatgccaacaatggctctgtgcttcagggcacctctgtggcttctgtgtaccatgggaaaattctcataggcaccgtatttcacaaaactctgtactgtgagctctagactctagatagtaaaaaaaaaaaaaaa

SEQ ID NO: 163707 - DNA, 1049 bp, Homo sapiens
  Payload ID: 12242
  Gene Symbol: PON3
  Gene Name: paraoxonase 3
  ENST ID: ENST00000456855
  CDS Start-End: 14-199
gcaccccgagaccatggggaagctcgtggcgctggtcctgctgggggtcggcctgtccttagtcggggagatgttcctggcgtttagagaaagggtgaatgcctctcgagaagtggagccagtagaacctgaaaactgccaccttattgaggaacttgggattaaaatatccaggcatgccaaactttgcgccagatgaaccaggaaaaatcttcttgatggatctgaatgaacaaaacccaagggcacaagcgctagaaatcagtggtggatttgacaaagaattatttaatccacatgggatcagtattttcatcgacaaagacaatactgtgtatctttatgttgtgaatcatccccacatgaagtccactgtggagatatttaaatttgaggaacaacaacgttctctggtatacctgaaaactataaaacatgaacttctcaaaagtgtgaatgacattgtggttcttggaccagaacagttctatgccaccagagaccactattttaccaactccctcctgtcattttttgagatgatcttggatcttcgctggacttatgttcttttctacagcccaagggaggttaaagtggtggccaaaggattttgtagtgccaatgggatcacagtctcagcagaccagaagtatgtctatgtagctgatgtagcagctaagaacattcacataatggaaaaacatgataactgggatttaactcaactgaaggtgatacagttgggcaccttagtggataacctgactgtcgatcctgccacaggagacattttggcaggatgccatcctaatcctatgaagctactgaactataaccctgaggaccctccaggatcagaagtacttcgcatccagaatgttttgtctgagaagcccagggtgagcaccgtgtatgccaacaatggctctgtgcttcagggcacctctgtggcttctgtgtaccatgggaaaattctcataggcaccgtatttcacaaaactctgtactgtgagctctagactctagatagtaaaaaaaaaaaaaaa

SEQ ID NO: 163708 - DNA, 1000 bp, Homo sapiens
  Payload ID: 12242
  Gene Symbol: PON3
  Gene Name: paraoxonase 3
  ENST ID: ENST00000418617
  CDS Start-End: 14-154
gcaccccgagaccatggggaagctcgtggcgctggtcctgctgggggtcggcctgtccttagtcggggagatgttcctggcgtttagggttgggttttatcttctacagagaaagggtgaatgcctctcgagaagtggagccagtagaacctgaaaactgccaccttattgaggaacttgaaagtggctctgaagatattgatatacttcctagtgggctggcttttatctccagtggattaaaatatccaggcatgccaaactttgcgccagatgaaccaggaaaaatcttcttgatggatctgaatgaacaaaacccaagggcacaagcgctagaaatcagtggtggatttgacaaagaattatttaatccacatgggatcagtattttcatcgacaaagtgtgaatgacattgtggttcttggaccagaacagttctatgccaccagagaccactattttaccaactccctcctgtcattttttgagatgatcttggatcttcgctggacttatgttcttttctacagcccaagggaggttaaagtggtggccaaaggattttgtagtgccaatgggatcacagtctcagcagaccagaagtatgtctatgtagctgatgtagcagctaagaacattcacataatggaaaaacatgataactgggatttaactcaactgaaggtgatacagttgggcaccttagtggataacctgactgtcgatcctgccacaggagacattttggcaggatgccatcctaatcctatgaagctactgaactataaccctgaggaccctccaggatcagaagtacttcgcatccagaatgttttgtctgagaagcccagggtgagcaccgtgtatgccaacaatggctctgtgcttcagggcacctctgtggcttctgtgtaccatgggaaaattctcataggcaccgtatttcacaaaactctgtactgtgagctctagactctagatagtaaaaaaaaaaaaaaa

SEQ ID NO: 163709 - DNA, 1053 bp, Homo sapiens
  Payload ID: 12242
  Gene Symbol: PON3
  Gene Name: paraoxonase 3
  ENST ID: ENST00000451904
  CDS Start-End: 14-826
gcaccccgagaccatggggaagctcgtggcgctggtcctgctgggggtcggcctgtccttagtcggggagatgttcctggcgtttagagaaagggtgaatgcctctcgagaagtggagccagtagaacctgaaaactgccaccttattgaggaacttgaaagtggctctgaagatattgatatacttcctagtgggctggcttttatctccagtggattaaaatatccaggcatgccaaactttgcgccagatgaaccaggaaaaatcttcttgatggatctgaatgaacaaaacccaagggcacaagcgctagaaatcagtggtggatttgacaaagaattatttaatccacatgggatcagtattttcatcgacaaagacaatactgtgtatctttatgttgtgaatcatccccacatgaagtccactgtggagatatttaaatttgaggaacaacaacgttctctggtatacctgaaaactataaaacatgaacttctcaaaagtgtgaatgacattgtggttcttggaccagaacagttctatgccaccagagaccactattttaccaactccctcctgtcattttttgagatgatcttggatcttcgctggacttatgttcttttctacagcccaagggaggttaaagtggtggccaaaggattttgtagtgccaatgggatcacagtctcagcagaccagaagtatgtctatgtagctgatgtagcagctaagaacattcacataatggaaaaacatgataactgggatttaactcaactgaaggagacattttggcaggatgccatcctaatcctatgaagctactgaactataaccctgaggaccctccaggatcagaagtacttcgcatccagaatgttttgtctgagaagcccagggtgagcaccgtgtatgccaacaatggctctgtgcttcagggcacctctgtggcttctgtgtaccatgggaaaattctcataggcaccgtatttcacaaaactctgtactgtgagctctagactctagatagtaaaaaaaaaaaaaaa

SEQ ID NO: 163710 - DNA, 894 bp, Homo sapiens
  Payload ID: 12242
  Gene Symbol: PON3
  Gene Name: paraoxonase 3
  ENST ID: ENST00000427422
  CDS Start-End: 12-749
accccgagaccatggggaagctcgtggcgctggtcctgctgggggtcggcctgtccttagtcggggagatgttcctggcgtttagagaaagggtgaatgcctctcgagaagtggagccagtagaacctgaaaactgccaccttattgaggaacttgaaagtggctctgaagatattgatatacttcctagtgggctggcttttatctccagtggattaaaatatccaggcatgccaaactttgcgccagatgaaccaggaaaaatcttcttgatggatctgaatgaacaaaacccaagggcacaagcgctagaaatcagtggtggatttgacaaagaattatttaatccacatgggatcagtattttcatcgacaaagacaatactgtgtatctttatgttgtgaatcatccccacatgaagtccactgtggagatatttaaatttgaggaacaacaacgttctctggtatacctgaaaactataaaacatgaacttctcaaaagtgtgaatgacattgtggttcttggaccagaacagttctatgccaccagagaccactattttaccaactccctcctgtcattttttgagatgatcttggatcttcgctggacttatgttcttttctacagcccaagggaggttaaagtggtggccaaaggattttgtagtgccaatgggatcacagtctcagcagaccagaagtacttcgcatccagaatgttttgtctgagaagcccagggtgagcaccgtgtatgccaacaatggctctgtgcttcagggcacctctgtggcttctgtgtaccatgggaaaattctcataggcaccgtatttcacaaaactctgtactgtgagctctagactctagatagtaaaaaaaaaaaaaaaaa

SEQ ID NO: 163711 - DNA, 2407 bp, Homo sapiens
  Payload ID: 12243
  Gene Symbol: PSPC1
  Gene Name: paraspeckle component 1
  Uniprot ID: Q8WXF1
  ENST ID: ENST00000338910
  CDS Start-End: 161-1732
cgtgagttgggggaggacgggttgccgactcgcctacctagcggtctcttgattgtcgatattttgttggcataggtttatgtagagacgtatacatatatatagacacactgtctataaatctaggcctgtatccggtgtccgaggcgaactcagtaagatgatgttaagaggaaacctgaagcaagtgcgcattgagaaaaacccggcccgccttcgcgccctggagtccgcggtgggcgagagcgagccggcggccgcggcagccatggcgctcgctcttgccggggagccggcaccgcccgcgcccgcgcctccagaggaccacccggacgaggagatggggttcactatcgacatcaagagtttcctcaagccgggcgagaagacgtacacgcagcgctgccgcctcttcgtgggaaatctgcccaccgacatcacggaggaggacttcaagaggctcttcgaacgctatggcgagcccagcgaagtcttcatcaaccgggaccgtggcttcggcttcatccgcttggaatccagaaccctggctgaaattgcaaaagcagagctggacggcaccattctcaagagcagacctctacggattcgcttcgctacacatggagcagccttgactgtcaagaacctttctccagttgtttccaatgagctgctagagcaagcattttctcagtttggtccagtagagaaagctgttgtggttgtggatgatcgcggtagagctacaggaaaaggttttgtagagtttgcagcaaaacctcctgcacgaaaggctctggaaagatgtggtgatggggcattcttgctaacaacgacccctcgtccagtcattgtggaacccatggagcagtttgatgatgaagatggcttgccagagaagctgatgcagaaaactcaacaatatcataaggaaagagaacaaccaccacgttttgctcaacctgggacatttgaatttgagtatgcatctcgatggaaggctcttgatgaaatggaaaagcagcagcgtgagcaggttgatagaaacatcagagaagccaaagagaaactggaggcagaaatggaagcagctaggcatgaacaccaattaatgctaatgaggcaagatctaatgaggcgtcaagaagaactcagacgcttggaagaactcagaaaccaagagttgcaaaaacggaagcaaatacaactaagacatgaagaggagcatcggcggcgtgaggaagaaatgatccgacacagagaacaggaggaactgaggcgacagcaagagggctttaagccaaactacatggaaaatagagaacaggaaatgagaatgggtgatatgggtccccgtggagcaataaacatgggagatgcgtttagcccagcccctgctggtaaccaaggtcctcctccaatgatgggtatgaatatgaacaacagagcaactatacctggcccaccaatgggtcctggtcctgccatgggaccagaaggagccgcaaatatgggaactccaatgatgccagataatggagcagtgcacaatgacagatttcctcaaggaccaccatctcagatgggttcacctatggggagtagaacaggttctgaaacccctcaagcaccaatgagtggtgtaggtcctgtgagtggtggtcctggtggctttggtagaggaagtcaagggggcaactttgaaggccctaataagcgtcgtagatattaaacattcgttcattcctggctatctagaaaaaaaaaagtcagtggtatgcctttatacttttacctgttatctggaagaaatggttttattgttaatgtatgtagacttaaaagtttttttttttttgtaaaacttgaggtttttgtatttttctttattcatgagctttgtagattagaatggtaatgatgctcatcattttgaatgttgaaatgtgtttgtgactttagctaaatataagtattccatagtactgtgaaatctatgtagttaatctcaataaagaaatcattttggataatttaaaactgttattagtggtattctcttacggtcttactaaactttgctgtaacagtaatgctttggttgctttaactaatcctatcattaaaaatgaaaatgattttgctttttaatttgcgcaagtagcactaaagatagaagcttaattaatgaaagctaatgtcaataaggggtagatagagtagtatatgtgggggtgggagggtatgggagtttaatttgtataaaccactgatgttctgtgaaatcggaatttccagctacatttcatatagcttctgaatattcaggtattctgagacagattattaaggatatctttgtcctgtgctgatttttccaaataaatctttttcatcttgaaaaaaa

SEQ ID NO: 163712 - DNA, 866 bp, Homo sapiens
  Payload ID: 12243
  Gene Symbol: PSPC1
  Gene Name: paraspeckle component 1
  ENST ID: ENST00000427943
  CDS Start-End: 121-866
ggcggaggggtgggacttgcaccggcgtctcttcttctaactgcagtttgtggcagcgccattttgaatgtgcagctgcagcgggcgcctgtatccggtgtccgaggcgaactcagtaagatgatgttaagaggaaacctgaagcaagtgcgcattgagaaaaacccggcccgccttcgcgccctggagtccgcggtgggcgagagcgagccggcggccgcggcagccatggcgctcgctcttgccggggagccggcaccgcccgcgcccgcgcctccagaggaccacccggacgaggagatggggttcactatcgacatcaagagtttcctcaagccgggcgagaagacgtacacgcagcgctgccgcctcttcgtgggaaatctgcccaccgacatcacggaggaggacttcaagaggctcttcgaacgctatggcgagcccagcgaagtcttcatcaaccgggaccgtggcttcggcttcatccgcttggaatccagaaccctggctgaaattgcaaaagcagagctggacggcaccattctcaagagcagacctctacggattcgcttcgctacacatggagcagccttgactgtcaagaacctttctccagttgtttccaatgagctgctagagcaagcattttctcagtttggtccagtagagaaagctgttgtggttgtggatgatcgcggtagagctacaggaaaaggttttgtagagtttgcagcaaaacctcctgcacgaaaggctctggaaagatgtggtgatggggcattcttgctaacaacgacccctcgtccagtcattgtggaacccatggagcagtttgatgatgaagatggcttgccagagaagctgat

SEQ ID NO: 163713 - DNA, 1709 bp, Homo sapiens
  Payload ID: 12243
  Gene Symbol: PSPC1
  Gene Name: paraspeckle component 1
  Uniprot ID: Q8WXF1
  ENST ID: ENST00000492741
  CDS Start-End: 186-1367
attttgaatgtgcagctgcagcgggcgtgagttgggggaggacgggttgccgactcgcctacctagcggtctcttgattgtcgatattttgttggcataggtttatgtagagacgtatacatatatatagacacactgtctataaatctaggcctgtatccggtgtccgaggcgaactcagtaagatgatgttaagaggaaacctgaagcaagtgcgcattgagaaaaacccggcccgccttcgcgccctggagtccgcggtgggcgagagcgagccggcggccgcggcagccatggcgctcgctcttgccggggagccggcaccgcccgcgcccgcgcctccagaggaccacccggacgaggagatggggttcactatcgacatcaagagtttcctcaagccgggcgagaagacgtacacgcagcgctgccgcctcttcgtgggaaatctgcccaccgacatcacggaggaggacttcaagaggctcttcgaacgctatggcgagcccagcgaagtcttcatcaaccgggaccgtggcttcggcttcatccgcttggaatccagaaccctggctgaaattgcaaaagcagagctggacggcaccattctcaagagcagacctctacggattcgcttcgctacacatggagcagccttgactgtcaagaacctttctccagttgtttccaatgagctgctagagcaagcattttctcagtttggtccagtagagaaagctgttgtggttgtggatgatcgcggtagagctacaggaaaaggttttgtagagtttgcagcaaaacctcctgcacgaaaggctctggaaagatgtggtgatggggcattcttgctaacaacgacccctcgtccagtcattgtggaacccatggagcagtttgatgatgaagatggcttgccagagaagctgatgcagaaaactcaacaatatcataaggaaagagaacaaccaccacgttttgctcaacctgggacatttgaatttgagtatgcatctcgatggaaggctcttgatgaaatggaaaagcagcagcgtgagcaggttgatagaaacatcagagaagccaaagagaaactggaggcagaaatggaagcagctaggcatgaacaccaattaatgctaatgaggcaagatctaatgaggcgtcaagaagaactcagacgcttggaagaactcagaaaccaagagttgcaaaaacggaagcaaatacaactaagacatgaagaggagcatcggcggcgtgaggaagaaatgatccgacacagagaacaggaggaactgaggcgacagcaagagggctttaagccaaactacatggaaaatggtgataaaagaaaatgtggctgaagttacccgaagttcagcttgcagtgtaattcagaagagttaagaccagaagtactggaatcatacttcctttcaggtcaaaacattttgtgggaaatatcctgttcgtgacctaggagaaacaagacagaaaacaaatctttcttcatttatgaatttcttactccatacaagcagtttatggatgtctgggcaatcatagcacttgccatttaaaaacatgctacaggggcacattttctgtggttaaaaatgatctccagaataagtgtaaactgcagttttcctttgcattgagggttttggctttttatttgtaaattaaatcaagatgttacccac

SEQ ID NO: 163714 - DNA, 1647 bp, Homo sapiens
  Payload ID: 12243
  Gene Symbol: PSPC1
  Gene Name: paraspeckle component 1
  Uniprot ID: Q8WXF1
  ENST ID: ENST00000471658
  CDS Start-End: 161-1342
cgtgagttgggggaggacgggttgccgactcgcctacctagcggtctcttgattgtcgatattttgttggcataggtttatgtagagacgtatacatatatatagacacactgtctataaatctaggcctgtatccggtgtccgaggcgaactcagtaagatgatgttaagaggaaacctgaagcaagtgcgcattgagaaaaacccggcccgccttcgcgccctggagtccgcggtgggcgagagcgagccggcggccgcggcagccatggcgctcgctcttgccggggagccggcaccgcccgcgcccgcgcctccagaggaccacccggacgaggagatggggttcactatcgacatcaagagtttcctcaagccgggcgagaagacgtacacgcagcgctgccgcctcttcgtgggaaatctgcccaccgacatcacggaggaggacttcaagaggctcttcgaacgctatggcgagcccagcgaagtcttcatcaaccgggaccgtggcttcggcttcatccgcttggaatccagaaccctggctgaaattgcaaaagcagagctggacggcaccattctcaagagcagacctctacggattcgcttcgctacacatggagcagccttgactgtcaagaacctttctccagttgtttccaatgagctgctagagcaagcattttctcagtttggtccagtagagaaagctgttgtggttgtggatgatcgcggtagagctacaggaaaaggttttgtagagtttgcagcaaaacctcctgcacgaaaggctctggaaagatgtggtgatggggcattcttgctaacaacgacccctcgtccagtcattgtggaacccatggagcagtttgatgatgaagatggcttgccagagaagctgatgcagaaaactcaacaatatcataaggaaagagaacaaccaccacgttttgctcaacctgggacatttgaatttgagtatgcatctcgatggaaggctcttgatgaaatggaaaagcagcagcgtgagcaggttgatagaaacatcagagaagccaaagagaaactggaggcagaaatggaagcagctaggcatgaacaccaattaatgctaatgaggcaagatctaatgaggcgtcaagaagaactcagacgcttggaagaactcagaaaccaagagttgcaaaaacggaagcaaatacaactaagacatgaagaggagcatcggcggcgtgaggaagaaatgatccgacacagagaacaggaggaactgaggcgacagcaagagggctttaagccaaactacatggaaaatggtgataaaagaaaatgtggctgaagttacccgaagttcagcttgcagtgtaattcagaagagttaagaccagaagtactggaatcatacttcctttcagtcttgccacttgcctagtgaggcttttccgaacctggaaggagacgtctagaaatcccaactttgctgtgtaaggaccattagctgcaagtcagtggaagtctatagaaagcagtgtgaattccatagtggtcttgacttcttagcaaggatttgggataagtctaaaacttcagacttaaagctttgaagcatgttaactgcatgaaatattaaacatttcgaacttc

SEQ ID NO: 163715 - DNA, 2013 bp, Homo sapiens
  Payload ID: 12243
  Gene Symbol: PSPC1
  Gene Name: paraspeckle component 1
  Uniprot ID: Q8WXF1
  ENST ID: ENST00000619300
  CDS Start-End: 138-1709
gttccggcgccggctttggcggaggggtgggacttgcaccggcgtctcttcttctaactgcagtttgtggcagcgccattttgaatgtgcagctgcagcgggcgcctgtatccggtgtccgaggcgaactcagtaagatgatgttaagaggaaacctgaagcaagtgcgcattgagaaaaacccggcccgccttcgcgccctggagtccgcggtgggcgagagcgagccggcggccgcggcagccatggcgctcgctcttgccggggagccggcaccgcccgcgcccgcgcctccagaggaccacccggacgaggagatggggttcactatcgacatcaagagtttcctcaagccgggcgagaagacgtacacgcagcgctgccgcctcttcgtgggaaatctgcccaccgacatcacggaggaggacttcaagaggctcttcgaacgctatggcgagcccagcgaagtcttcatcaaccgggaccgtggcttcggcttcatccgcttggaatccagaaccctggctgaaattgcaaaagcagagctggacggcaccattctcaagagcagacctctacggattcgcttcgctacacatggagcagccttgactgtcaagaacctttctccagttgtttccaatgagctgctagagcaagcattttctcagtttggtccagtagagaaagctgttgtggttgtggatgatcgcggtagagctacaggaaaaggttttgtagagtttgcagcaaaacctcctgcacgaaaggctctggaaagatgtggtgatggggcattcttgctaacaacgacccctcgtccagtcattgtggaacccatggagcagtttgatgatgaagatggcttgccagagaagctgatgcagaaaactcaacaatatcataaggaaagagaacaaccaccacgttttgctcaacctgggacatttgaatttgagtatgcatctcgatggaaggctcttgatgaaatggaaaagcagcagcgtgagcaggttgatagaaacatcagagaagccaaagagaaactggaggcagaaatggaagcagctaggcatgaacaccaattaatgctaatgaggcaagatctaatgaggcgtcaagaagaactcagacgcttggaagaactcagaaaccaagagttgcaaaaacggaagcaaatacaactaagacatgaagaggagcatcggcggcgtgaggaagaaatgatccgacacagagaacaggaggaactgaggcgacagcaagagggctttaagccaaactacatggaaaatagagaacaggaaatgagaatgggtgatatgggtccccgtggagcaataaacatgggagatgcgtttagcccagcccctgctggtaaccaaggtcctcctccaatgatgggtatgaatatgaacaacagagcaactatacctggcccaccaatgggtcctggtcctgccatgggaccagaaggagccgcaaatatgggaactccaatgatgccagataatggagcagtgcacaatgacagatttcctcaaggaccaccatctcagatgggttcacctatggggagtagaacaggttctgaaacccctcaagcaccaatgagtggtgtaggtcctgtgagtggtggtcctggtggctttggtagaggaagtcaagggggcaactttgaaggccctaataagcgtcgtagatattaaacattcgttcattcctggctatctagaaaaaaaaaagtcagtggtatgcctttatacttttacctgttatctggaagaaatggttttattgttaatgtatgtagacttaaaagtttttttttttttgtaaaacttgaggtttttgtatttttctttattcatgagctttgtagattagaatggtaatgatgctcatcattttgaatgttgaaatgtgtttgtgactttagctaaatataagtattccatagtactgtgaaatctatgtagttaatctcaataaagaaatcattttggataattt

SEQ ID NO: 163716 - DNA, 422 bp, Homo sapiens
  Payload ID: 12243
  Gene Symbol: PSPC1
  Gene Name: paraspeckle component 1
  ENST ID: ENST00000635562
  CDS Start-End: 1-102
gaagaaatgatccgacacagagaacaggaggaactgaggcgacagcaagagggctttaagccaaactacatggaaaattatgtctgccatttcctaaggtgataaaagaaaatgtggctgaagttacccgaagttcagcttgcagtgtaattcagaagagttaagaccagaagtactggaatcatacttcctttcaggtcaaaacattttgtgggaaatatcctgttcgtgacctaggagaaacaagacagaaaacaaatctttcttcatttatgaatttcttactccatacaagcagtttatggatgtctgggcaatcatagcacttgccatttaaaaacatgctacaggggcacattttctgtggttaaaaatgatctccagaataagtgtaaactgcagttttcctttgcattgagggt

SEQ ID NO: 163717 - DNA, 1139 bp, Homo sapiens
  Payload ID: 12244
  Gene Symbol: PTMS
  Gene Name: parathymosin
  Uniprot ID: P20962
  ENST ID: ENST00000309083
  CDS Start-End: 330-638
ggcagctctgctggtgcgggggcggcgagcccgggatcgagctaccgcggccgagcgcgccggccaccgcctgcaccgcccttccgcccgccctccggacggccgcagccctgcgggtctccgctccagacccacccccgccccaccccgcgcgcctctgccgcctcttccagagacccagcttgccgagcggccgccgctgccgctgtcgccgccgccgccgccaccgcgccaggttccggccgcggccaccctccgccgtccagggcccctccgtctcggccccgggaccccggctccccgccagccccggccccggccccggcaccatgtcggagaaaagcgtggaggcagcggccgagttgagcgccaaggacctgaaggagaagaaggagaaggtggaggagaaggcaagccggaaagagcgaaagaaagaagtggtggaggaggaggagaacggggctgaggaggaagaagaagaaactgccgaggatggagaggaggaagatgaaggggaagaagaagatgaggaagaagaagaagaggatgatgaagggcccgcgctgaagagagctgccgaagaggaggatgaagcggatcccaaacggcagaagacagaaaatggggcatcggcgtgagcccctgccaacaggctggggttgggaggcctctctgggcctggaggtgggggtgggggcagccaagtccagccactcttcacctggctccctgctctgggccctgcaccagagctgccaccctcttctttctccccagccttctcatttccgcctctccagacactgcgccctccaccctcactctgccattgttccacctcctgacctgctccatctgagctctccagctggcccccaattgctcctctctctctttgctctctttctccctcccctaccagcctcattcttcctccggtagcctctcccacctaacctctgcatcccccagcctcatgtcctgccccatccctatcctgcctgatccctggatctccctcagatcccctcttctcagacagcgccaggccggggtggggccggggttggggccgagccccacagctgcccccctcccctccctttttgtataatttaataaagaaatggtcgcgcttc

SEQ ID NO: 163718 - DNA, 773 bp, Homo sapiens
  Payload ID: 12244
  Gene Symbol: PTMS
  Gene Name: parathymosin
  ENST ID: ENST00000389462
  CDS Start-End: 332-646
gcggcagctctgctggtgcgggggcggcgagcccgggatcgagctaccgcggccgagcgcgccggccaccgcctgcaccgcccttccgcccgccctccggacggccgcagccctgcgggtctccgctccagacccacccccgccccaccccgcgcgcctctgccgcctcttccagagacccagcttgccgagcggccgccgctgccgctgtcgccgccgccgccgccaccgcgccaggttccggccgcggccaccctccgccgtccagggcccctccgtctcggccccgggaccccggctccccgccagccccggccccggccccggcaccatgtcggagaaaagcgtggaggcagcggccgagttgagcgccaaggacctgaaggagaagaaggagaaggtggaggagaaggcaagccggaaagagcgaaagaaagaagtggtggaggctccagtcccattggtggtgatggtgggcaaggcatgcagccagcctgaggctactccctctcctggtccccacaggaggaggagaacggggctgaggaggaagaagaagaaactgccgaggatggagaggaggaagatgaaggggaagaagaagatgaggaagaagaagaagaggatgatgaagggcccgcgctgaagagagctgccgaagaggaggatgaagcggatcccaaacggcagaagacagaaaatggggcatcggcgtgagcccctgccaacaggctggggttgggaggcctctctgggcctggaggtgggggtgg

SEQ ID NO: 163719 - DNA, 501 bp, Homo sapiens
  Payload ID: 12244
  Gene Symbol: PTMS
  Gene Name: parathymosin
  ENST ID: ENST00000540874
  CDS Start-End: 331-501
cggcagctctgctggtgcgggggcggcgagcccgggatcgagctaccgcggccgagcgcgccggccaccgcctgcaccgcccttccgcccgccctccggacggccgcagccctgcgggtctccgctccagacccacccccgccccaccccgcgcgcctctgccgcctcttccagagacccagcttgccgagcggccgccgctgccgctgtcgccgccgccgccgccaccgcgccaggttccggccgcggccaccctccgccgtccagggcccctccgtctcggccccgggaccccggctccccgccagccccggccccggccccggcaccatgtcggagaaaagcgtggaggcagcggccgagttgagcgccaaggacctgaaggagaagaaggagaaggtggaggagaaggcaagccggaaagagcgaaagaaagaagtggtggaggctccagtcccattggtggtgatggtgggcaaggcatgcagccagcctgaggct

SEQ ID NO: 163720 - DNA, 1150 bp, Homo sapiens
  Payload ID: 12244
  Gene Symbol: PTMS
  Gene Name: parathymosin
  Uniprot ID: P20962
  ENST ID: ENST00000619580
  CDS Start-End: 332-640
gcggcagctctgctggtgcgggggcggcgagcccgggatcgagctaccgcggccgagcgcgccggccaccgcctgcaccgcccttccgcccgccctccggacggccgcagccctgcgggtctccgctccagacccacccccgccccaccccgcgcgcctctgccgcctcttccagagacccagcttgccgagcggccgccgctgccgctgtcgccgccgccgccgccaccgcgccaggttccggccgcggccaccctccgccgtccagggcccctccgtctcggccccgggaccccggctccccgccagccccggccccggccccggcaccatgtcggagaaaagcgtggaggcagcggccgagttgagcgccaaggacctgaaggagaagaaggagaaggtggaggagaaggcaagccggaaagagcgaaagaaagaagtggtggaggaggaggagaacggggctgaggaggaagaagaagaaactgccgaggatggagaggaggaagatgaaggggaagaagaagatgaggaagaagaagaagaggatgatgaagggcccgcgctgaagagagctgccgaagaggaggatgaagcggatcccaaacggcagaagacagaaaatggggcatcggcgtgagcccctgccaacaggctggggttgggaggcctctctgggcctggaggtgggggtgggggcagccaagtccagccactcttcacctggctccctgctctgggccctgcaccagagctgccaccctcttctttctccccagccttctcatttccgcctctccagacactgcgccctccaccctcactctgccattgttccacctcctgacctgctccatctgagctctccagctggcccccaattgctcctctctctctttgctctctttctccctcccctaccagcctcattcttcctccggtagcctctcccacctaacctctgcatcccccagcctcatgtcctgccccatccctatcctgcctgatccctggatctccctcagatcccctcttctcagacagcgccaggccggggtggggccggggttggggccgagccccacagctgcccccctcccctccctttttgtataatttaataaagaaatggtcgcgcttctgtttttaa

SEQ ID NO: 163721 - DNA, 813 bp, Homo sapiens
  Payload ID: 12245
  Gene Symbol: PTH
  Gene Name: parathyroid hormone
  Uniprot ID: P01270
  ENST ID: ENST00000282091
  CDS Start-End: 116-463
aaaagtcaccatttaaggggtctgcagtccaattcatcagttgtctttagtttactcagcatcagctactaacatacctgaacgaagatcttgttctaagacattgtatgtgaagatgatacctgcaaaagacatggctaaagttatgattgtcatgttggcaatttgttttcttacaaaatcggatgggaaatctgttaagaagagatctgtgagtgaaatacagcttatgcataacctgggaaaacatctgaactcgatggagagagtagaatggctgcgtaagaagctgcaggatgtgcacaattttgttgcccttggagctcctctagctcccagagatgctggttcccagaggccccgaaaaaaggaagacaatgtcttggttgagagccatgaaaaaagtcttggagaggcagacaaagctgatgtgaatgtattaactaaagctaaatcccagtgaaaatgaaaacagatattgtcagagttctgctctagacagtgtagggcaacaatacatgctgctaattcaaagctctattaagatttccaagtgccaatatttctgatataacaaactacatgtaatccatcactagccatgataactgcaattttaattgattattctgattccacttttattcatttgagttattttaattatcttttctattgtttattctttttaaagtatgttattgcataatttataaaagaataaaattgcacttttaaacctctcttctaccttaaaatgtaaaacaaaaatgtaatgatcataagtctaaataaatgaagtatttctcactc

SEQ ID NO: 163722 - DNA, 799 bp, Homo sapiens
  Payload ID: 12245
  Gene Symbol: PTH
  Gene Name: parathyroid hormone
  Uniprot ID: P01270
  ENST ID: ENST00000529816
  CDS Start-End: 146-493
ccttttagtatccaattatctgaaacttaagaagagtgtgcaccgcccaatgggtgtgtgtatgtgctgctttgaacctatagttgagatccagagaattgggagtgacatcatctgtaacaataaaagagcctctcttgtgaagatgatacctgcaaaagacatggctaaagttatgattgtcatgttggcaatttgttttcttacaaaatcggatgggaaatctgttaagaagagatctgtgagtgaaatacagcttatgcataacctgggaaaacatctgaactcgatggagagagtagaatggctgcgtaagaagctgcaggatgtgcacaattttgttgcccttggagctcctctagctcccagagatgctggttcccagaggccccgaaaaaaggaagacaatgtcttggttgagagccatgaaaaaagtcttggagaggcagacaaagctgatgtgaatgtattaactaaagctaaatcccagtgaaaatgaaaacagatattgtcagagttctgctctagacagtgtagggcaacaatacatgctgctaattcaaagctctattaagatttccaagtgccaatatttctgatataacaaactacatgtaatccatcactagccatgataactgcaattttaattgattattctgattccacttttattcatttgagttattttaattatcttttctattgtttattctttttaaagtatgttattgcataatttataaaagaataaaattgcacttttaaacctctcttctaccttaaaatgtaaaacaaa

SEQ ID NO: 163723 - DNA, 2123 bp, Homo sapiens
  Payload ID: 12246
  Gene Symbol: PTH1R
  Gene Name: parathyroid hormone 1 receptor
  Uniprot ID: Q03431
  ENST ID: ENST00000313049
  CDS Start-End: 204-1985
cgctgctcgctcgctcgctcgctcgctcgccctcagcgcatgggccccgcgccgggccccggggcctcgggccgccgggacgccggggtcccataggccggggcgtgggcggggcggccagcctgacgcagctctgcaccccctaccaccaccagggccggcggcggcggctgccccgagggacgcggccctaggcggtggcgatggggaccgcccggatcgcacccggcctggcgctcctgctctgctgccccgtgctcagctccgcgtacgcgctggtggatgcagatgacgtcatgactaaagaggaacagatcttcctgctgcaccgtgctcaggcccagtgcgaaaaacggctcaaggaggtcctgcagaggccagccagcataatggaatcagacaagggatggacatctgcgtccacatcagggaagcccaggaaagataaggcatctgggaagctctaccctgagtctgaggaggacaaggaggcacccactggcagcaggtaccgagggcgcccctgtctgccggaatgggaccacatcctgtgctggccgctgggggcaccaggtgaggtggtggctgtgccctgtccggactacatttatgacttcaatcacaaaggccatgcctaccgacgctgtgaccgcaatggcagctgggagctggtgcctgggcacaacaggacgtgggccaactacagcgagtgtgtcaaatttctcaccaatgagactcgtgaacgggaggtgtttgaccgcctgggcatgatttacaccgtgggctactccgtgtccctggcgtccctcaccgtagctgtgctcatcctggcctactttaggcggctgcactgcacgcgcaactacatccacatgcacctgttcctgtccttcatgctgcgcgccgtgagcatcttcgtcaaggacgctgtgctctactctggcgccacgcttgatgaggctgagcgcctcaccgaggaggagctgcgcgccatcgcccaggcgcccccgccgcctgccaccgccgctgccggctacgcgggctgcagggtggctgtgaccttcttcctttacttcctggccaccaactactactggattctggtggaggggctgtacctgcacagcctcatcttcatggccttcttctcagagaagaagtacctgtggggcttcacagtcttcggctggggtctgcccgctgtcttcgtggctgtgtgggtcagtgtcagagctaccctggccaacaccgggtgctgggacttgagctccgggaacaaaaagtggatcatccaggtgcccatcctggcctccattgtgctcaacttcatcctcttcatcaatatcgtccgggtgctcgccaccaagctgcgggagaccaacgccggccggtgtgacacacggcagcagtaccggaagctgctcaaatccacgctggtgctcatgcccctctttggcgtccactacattgtcttcatggccacaccatacaccgaggtctcagggacgctctggcaagtccagatgcactatgagatgctcttcaactccttccagggattttttgtcgcaatcatatactgtttctgcaatggcgaggtacaagctgagatcaagaaatcttggagccgctggacactggcactggacttcaagcgaaaggcacgcagcgggagcagcagctatagctacggccccatggtgtcccacacaagtgtgaccaatgtcggcccccgtgtgggactcggcctgcccctcagcccccgcctactgcccactgccaccaccaacggccaccctcagctgcctggccatgccaagccagggaccccagccctggagaccctcgagaccacaccacctgccatggctgctcccaaggacgatgggttcctcaacggctcctgctcaggcctggacgaggaggcctctgggcctgagcggccacctgccctgctacaggaagagtgggagacagtcatgtgaccaggcgctgggggctggacctgctgacatagtggatggacagatggaccaaaagatgggtggttgaatgatttcccactcagggctggggccaagaggaaaaacagggaaaaaaagaaaaaaaaaagaaaaaggaaa

SEQ ID NO: 163724 - DNA, 2063 bp, Homo sapiens
  Payload ID: 12246
  Gene Symbol: PTH1R
  Gene Name: parathyroid hormone 1 receptor
  ENST ID: ENST00000428220
  CDS Start-End: 204-1205
cgctgctcgctcgctcgctcgctcgctcgccctcagcgcatgggccccgcgccgggccccggggcctcgggccgccgggacgccggggtcccataggccggggcgtgggcggggcggccagcctgacgcagctctgcaccccctaccaccaccagggccggcggcggcggctgccccgagggacgcggccctaggcggtggcgatggggaccgcccggatcgcacccggcctggcgctcctgctctgctgccccgtgctcagctccgcgtacgcgctggtggatgcagatgacgtcatgactaaagaggaacagatcttcctgctgcaccgtgctcaggcccagtgcgaaaaacggctcaaggaggtcctgcagaggccagccagcataatggaatcagacaagggatggacatctgcgtccacatcagggaagcccaggaaagataaggcatctgggaagctctaccctgagtctgaggaggacaaggaggcacccactggcagcaggtaccgagggcgcccctgtctgccggaatgggaccacatcctgtgctggccgctgggggcaccaggtgaggtggtggctgtgccctgtccggactacatttatgacttcaatcacaaaggccatgcctaccgacgctgtgaccgcaatggcagctgggagctggtgcctgggcacaacaggacgtgggccaactacagcgagtgtgtcaaatttctcaccaatgagactcgtgaacgggaggtgtttgaccgcctgggcatgatttacaccgtgggctactccgtgtccctggcgtccctcaccgtagctgtgctcatcctggcctactttaggcggctgcactgcacgcgcaactacatccacatgcacctgttcctgtccttcatgctgcgcgccgtgagcatcttcgtcaaggacgctgtgctctactctggcgccacgcttgatgaggctgagcgcctcaccgaggaggagctgcgcgccatcgcccaggcgcccccgccgcctgccaccgccgctgccggctacgcgggctgcagggtggctgtgaccttcttcctttacttcctggccaccaactactactggattctggtggaggggctgtacctgcacagcctcatcttcatggccttcttctcagagaagaagtacctgtggggcttcacagtcttcggctggggtgctgggacttgagctccgggaacaaaaagtggatcatccaggtgcccatcctggcctccattgtgctcaacttcatcctcttcatcaatatcgtccgggtgctcgccaccaagctgcgggagaccaacgccggccggtgtgacacacggcagcagtaccggaagctgctcaaatccacgctggtgctcatgcccctctttggcgtccactacattgtcttcatggccacaccatacaccgaggtctcagggacgctctggcaagtccagatgcactatgagatgctcttcaactccttccagggattttttgtcgcaatcatatactgtttctgcaatggcgaggtacaagctgagatcaagaaatcttggagccgctggacactggcactggacttcaagcgaaaggcacgcagcgggagcagcagctatagctacggccccatggtgtcccacacaagtgtgaccaatgtcggcccccgtgtgggactcggcctgcccctcagcccccgcctactgcccactgccaccaccaacggccaccctcagctgcctggccatgccaagccagggaccccagccctggagaccctcgagaccacaccacctgccatggctgctcccaaggacgatgggttcctcaacggctcctgctcaggcctggacgaggaggcctctgggcctgagcggccacctgccctgctacaggaagagtgggagacagtcatgtgaccaggcgctgggggctggacctgctgacatagtggatggacagatggaccaaaagatgggtggttgaatgatttcccactcagggctggggccaagaggaaaaacagggaaaaaaagaaaaaaaaaagaaaaaggaaaa

SEQ ID NO: 163725 - DNA, 692 bp, Homo sapiens
  Payload ID: 12246
  Gene Symbol: PTH1R
  Gene Name: parathyroid hormone 1 receptor
  ENST ID: ENST00000422115
  CDS Start-End: 1-549
tacaccgaggtctcagggacgctctggcaagtccagatgcactatgagatgctcttcaactccttccagggattttttgtcgcaatcatatactgtttctgcaatggcgagaacacccctgaggacattctgaaagcagagaagtctttccagatgatgcaggtacaagctgagatcaagaaatcttggagccgctggacactggcactggacttcaagcgaaaggcacgcagcgggagcagcagctatagctacggccccatggtgtcccacacaagtgtgaccaatgtcggcccccgtgtgggactcggcctgcccctcagcccccgcctactgcccactgccaccaccaacggccaccctcagctgcctggccatgccaagccagggaccccagccctggagaccctcgagaccacaccacctgccatggctgctcccaaggacgatgggttcctcaacggctcctgctcaggcctggacgaggaggcctctgggcctgagcggccacctgccctgctacaggaagagtgggagacagtcatgtgaccaggcgctgggggctggacctgctgacatagtggatggacagatggaccaaaagatgggtggttgaatgatttcccactcagggctggggccaagaggaaaaacagggaaaaaaagaaaaaaaaaagaaaaaggaaaaggaa

SEQ ID NO: 163726 - DNA, 1914 bp, Homo sapiens
  Payload ID: 12246
  Gene Symbol: PTH1R
  Gene Name: parathyroid hormone 1 receptor
  ENST ID: ENST00000427125
  CDS Start-End: 334-1914
gagggggtgggggcgggagaggcccgggagggcgcgggggagggaagaggcgcccggccggggagaaggggagcggcagacgccgaggcgagggatgcgcgcggcgggcggtggctccgagcggcggccgggcggggggcgctggaggccaggccggccagcggggggtatcccgagagctccatgaagtccccccggggccgcggacggggcgctggcttggggaggctgtcgggggggccccgacatccatggcaaggcgggggccgcggcggcgcgctcggaggccggcggcggcggctgccccgagggacgcggccctaggcggtggcgatggggaccgcccggatcgcacccggcctggcgctcctgctctgctgccccgtgctcagctccgcgtacgcgctggtggatgcagatgacgtcatgactaaagaggaacagatcttcctgctgcaccgtgctcaggcccagtgcgaaaaacggctcaaggaggtcctgcagaggccagccagcataatggaatcagacaagggatggacatctgcgtccacatcagggaagcccaggaaagataaggcatctgggaagctctaccctgagtctgaggaggacaaggaggcacccactggcagcaggtaccgagggcgcccctgtctgccggaatgggaccacatcctgtgctggccgctgggggcaccaggtgaggtggtggctgtgccctgtccggactacatttatgacttcaatcacaaaggccatgcctaccgacgctgtgaccgcaatggcagctgggagctggtgcctgggcacaacaggacgtgggccaactacagcgagtgtgtcaaatttctcaccaatgagactcgtgaacgggaggtgtttgaccgcctgggcatgatttacaccgtgggctactccgtgtccctggcgtccctcaccgtagctgtgctcatcctggcctactttaggcggctgcactgcacgcgcaactacatccacatgcacctgttcctgtccttcatgctgcgcgccgtgagcatcttcgtcaaggacgctgtgctctactctggcgccacgcttgatgaggctgagcgcctcaccgaggaggagctgcgcgccatcgcccaggcgcccccgccgcctgccaccgccgctgccggctacgcgggctgcagggtggctgtgaccttcttcctttacttcctggccaccaactactactggattctggtggaggggctgtacctgcacagcctcatcttcatggccttcttctcagagaagaagtacctgtggggcttcacagtcttcggctggggtctgcccgctgtcttcgtggctgtgtgggtcagtgtcagagctaccctggccaacaccgggtgctgggacttgagctccgggaacaaaaagtggatcatccaggtgcccatcctggcctccattgtgctcaacttcatcctcttcatcaatatcgtccgggtgctcgccaccaagctgcgggagaccaacgccggccggtgtgacacacggcagcagtaccggaagctgctcaaatccacgctggtgctcatgcccctctttggcgtccactacattgtcttcatggccacaccatacaccgaggtctcagggacgctctggcaagtccagatgcactatgagatgctcttcaactccttccagggattttttgtcgcaatcatatactgtttctgcaatggcgaggtacaagctgagatcaagaaatcttggagccgctggacactggcactggacttcaagcgaaaggcacgcagcgggagcagcagctatagctacggccccatggtgtcccacacaagtgtgaccaatgtcggcccccgtgtgggactcggcctgcccctcagcccccgcctactgcccactgccacc

SEQ ID NO: 163727 - DNA, 2123 bp, Homo sapiens
  Payload ID: 12246
  Gene Symbol: PTH1R
  Gene Name: parathyroid hormone 1 receptor
  Uniprot ID: Q03431
  ENST ID: ENST00000449590
  CDS Start-End: 204-1985
ccacagaagctgctcagggactatccatggcctccccgtggccaacttgagtctgctctgcagctttaggcccgacttggaaggcccatgggctgcagatgaggaaactgaggtccagacagccgaagagtggtagtgtccaggacacacaactgggccggcggcggcggctgccccgagggacgcggccctaggcggtggcgatggggaccgcccggatcgcacccggcctggcgctcctgctctgctgccccgtgctcagctccgcgtacgcgctggtggatgcagatgacgtcatgactaaagaggaacagatcttcctgctgcaccgtgctcaggcccagtgcgaaaaacggctcaaggaggtcctgcagaggccagccagcataatggaatcagacaagggatggacatctgcgtccacatcagggaagcccaggaaagataaggcatctgggaagctctaccctgagtctgaggaggacaaggaggcacccactggcagcaggtaccgagggcgcccctgtctgccggaatgggaccacatcctgtgctggccgctgggggcaccaggtgaggtggtggctgtgccctgtccggactacatttatgacttcaatcacaaaggccatgcctaccgacgctgtgaccgcaatggcagctgggagctggtgcctgggcacaacaggacgtgggccaactacagcgagtgtgtcaaatttctcaccaatgagactcgtgaacgggaggtgtttgaccgcctgggcatgatttacaccgtgggctactccgtgtccctggcgtccctcaccgtagctgtgctcatcctggcctactttaggcggctgcactgcacgcgcaactacatccacatgcacctgttcctgtccttcatgctgcgcgccgtgagcatcttcgtcaaggacgctgtgctctactctggcgccacgcttgatgaggctgagcgcctcaccgaggaggagctgcgcgccatcgcccaggcgcccccgccgcctgccaccgccgctgccggctacgcgggctgcagggtggctgtgaccttcttcctttacttcctggccaccaactactactggattctggtggaggggctgtacctgcacagcctcatcttcatggccttcttctcagagaagaagtacctgtggggcttcacagtcttcggctggggtctgcccgctgtcttcgtggctgtgtgggtcagtgtcagagctaccctggccaacaccgggtgctgggacttgagctccgggaacaaaaagtggatcatccaggtgcccatcctggcctccattgtgctcaacttcatcctcttcatcaatatcgtccgggtgctcgccaccaagctgcgggagaccaacgccggccggtgtgacacacggcagcagtaccggaagctgctcaaatccacgctggtgctcatgcccctctttggcgtccactacattgtcttcatggccacaccatacaccgaggtctcagggacgctctggcaagtccagatgcactatgagatgctcttcaactccttccagggattttttgtcgcaatcatatactgtttctgcaatggcgaggtacaagctgagatcaagaaatcttggagccgctggacactggcactggacttcaagcgaaaggcacgcagcgggagcagcagctatagctacggccccatggtgtcccacacaagtgtgaccaatgtcggcccccgtgtgggactcggcctgcccctcagcccccgcctactgcccactgccaccaccaacggccaccctcagctgcctggccatgccaagccagggaccccagccctggagaccctcgagaccacaccacctgccatggctgctcccaaggacgatgggttcctcaacggctcctgctcaggcctggacgaggaggcctctgggcctgagcggccacctgccctgctacaggaagagtgggagacagtcatgtgaccaggcgctgggggctggacctgctgacatagtggatggacagatggaccaaaagatgggtggttgaatgatttcccactcagggctggggccaagaggaaaaacagggaaaaaaagaaaaaaaaaagaaaaaggaaa

SEQ ID NO: 163728 - DNA, 2070 bp, Homo sapiens
  Payload ID: 12246
  Gene Symbol: PTH1R
  Gene Name: parathyroid hormone 1 receptor
  Uniprot ID: Q03431
  ENST ID: ENST00000418619
  CDS Start-End: 150-1931
ggcagaagagtatgatcctggcagaggaagcagcaaggacaaagatgaggaaactgaggtccagacagccgaagagtggtagtgtccaggacacacaactgggccggcggcggcggctgccccgagggacgcggccctaggcggtggcgatggggaccgcccggatcgcacccggcctggcgctcctgctctgctgccccgtgctcagctccgcgtacgcgctggtggatgcagatgacgtcatgactaaagaggaacagatcttcctgctgcaccgtgctcaggcccagtgcgaaaaacggctcaaggaggtcctgcagaggccagccagcataatggaatcagacaagggatggacatctgcgtccacatcagggaagcccaggaaagataaggcatctgggaagctctaccctgagtctgaggaggacaaggaggcacccactggcagcaggtaccgagggcgcccctgtctgccggaatgggaccacatcctgtgctggccgctgggggcaccaggtgaggtggtggctgtgccctgtccggactacatttatgacttcaatcacaaaggccatgcctaccgacgctgtgaccgcaatggcagctgggagctggtgcctgggcacaacaggacgtgggccaactacagcgagtgtgtcaaatttctcaccaatgagactcgtgaacgggaggtgtttgaccgcctgggcatgatttacaccgtgggctactccgtgtccctggcgtccctcaccgtagctgtgctcatcctggcctactttaggcggctgcactgcacgcgcaactacatccacatgcacctgttcctgtccttcatgctgcgcgccgtgagcatcttcgtcaaggacgctgtgctctactctggcgccacgcttgatgaggctgagcgcctcaccgaggaggagctgcgcgccatcgcccaggcgcccccgccgcctgccaccgccgctgccggctacgcgggctgcagggtggctgtgaccttcttcctttacttcctggccaccaactactactggattctggtggaggggctgtacctgcacagcctcatcttcatggccttcttctcagagaagaagtacctgtggggcttcacagtcttcggctggggtctgcccgctgtcttcgtggctgtgtgggtcagtgtcagagctaccctggccaacaccgggtgctgggacttgagctccgggaacaaaaagtggatcatccaggtgcccatcctggcctccattgtgctcaacttcatcctcttcatcaatatcgtccgggtgctcgccaccaagctgcgggagaccaacgccggccggtgtgacacacggcagcagtaccggaagctgctcaaatccacgctggtgctcatgcccctctttggcgtccactacattgtcttcatggccacaccatacaccgaggtctcagggacgctctggcaagtccagatgcactatgagatgctcttcaactccttccagggattttttgtcgcaatcatatactgtttctgcaatggcgaggtacaagctgagatcaagaaatcttggagccgctggacactggcactggacttcaagcgaaaggcacgcagcgggagcagcagctatagctacggccccatggtgtcccacacaagtgtgaccaatgtcggcccccgtgtgggactcggcctgcccctcagcccccgcctactgcccactgccaccaccaacggccaccctcagctgcctggccatgccaagccagggaccccagccctggagaccctcgagaccacaccacctgccatggctgctcccaaggacgatgggttcctcaacggctcctgctcaggcctggacgaggaggcctctgggcctgagcggccacctgccctgctacaggaagagtgggagacagtcatgtgaccaggcgctgggggctggacctgctgacatagtggatggacagatggaccaaaagatgggtggttgaatgatttcccactcagggctggggccaagaggaaaaacagggaaaaaaagaaaaaaaaaagaaaaaggaaaa

SEQ ID NO: 163729 - DNA, 1947 bp, Homo sapiens
  Payload ID: 12246
  Gene Symbol: PTH1R
  Gene Name: parathyroid hormone 1 receptor
  Uniprot ID: Q03431
  ENST ID: ENST00000430002
  CDS Start-End: 67-1848
ggagcggcagacgccgagggccggcggcggcggctgccccgagggacgcggccctaggcggtggcgatggggaccgcccggatcgcacccggcctggcgctcctgctctgctgccccgtgctcagctccgcgtacgcgctggtggatgcagatgacgtcatgactaaagaggaacagatcttcctgctgcaccgtgctcaggcccagtgcgaaaaacggctcaaggaggtcctgcagaggccagccagcataatggaatcagacaagggatggacatctgcgtccacatcagggaagcccaggaaagataaggcatctgggaagctctaccctgagtctgaggaggacaaggaggcacccactggcagcaggtaccgagggcgcccctgtctgccggaatgggaccacatcctgtgctggccgctgggggcaccaggtgaggtggtggctgtgccctgtccggactacatttatgacttcaatcacaaaggccatgcctaccgacgctgtgaccgcaatggcagctgggagctggtgcctgggcacaacaggacgtgggccaactacagcgagtgtgtcaaatttctcaccaatgagactcgtgaacgggaggtgtttgaccgcctgggcatgatttacaccgtgggctactccgtgtccctggcgtccctcaccgtagctgtgctcatcctggcctactttaggcggctgcactgcacgcgcaactacatccacatgcacctgttcctgtccttcatgctgcgcgccgtgagcatcttcgtcaaggacgctgtgctctactctggcgccacgcttgatgaggctgagcgcctcaccgaggaggagctgcgcgccatcgcccaggcgcccccgccgcctgccaccgccgctgccggctacgcgggctgcagggtggctgtgaccttcttcctttacttcctggccaccaactactactggattctggtggaggggctgtacctgcacagcctcatcttcatggccttcttctcagagaagaagtacctgtggggcttcacagtcttcggctggggtctgcccgctgtcttcgtggctgtgtgggtcagtgtcagagctaccctggccaacaccgggtgctgggacttgagctccgggaacaaaaagtggatcatccaggtgcccatcctggcctccattgtgctcaacttcatcctcttcatcaatatcgtccgggtgctcgccaccaagctgcgggagaccaacgccggccggtgtgacacacggcagcagtaccggaagctgctcaaatccacgctggtgctcatgcccctctttggcgtccactacattgtcttcatggccacaccatacaccgaggtctcagggacgctctggcaagtccagatgcactatgagatgctcttcaactccttccagggattttttgtcgcaatcatatactgtttctgcaatggcgaggtacaagctgagatcaagaaatcttggagccgctggacactggcactggacttcaagcgaaaggcacgcagcgggagcagcagctatagctacggccccatggtgtcccacacaagtgtgaccaatgtcggcccccgtgtgggactcggcctgcccctcagcccccgcctactgcccactgccaccaccaacggccaccctcagctgcctggccatgccaagccagggaccccagccctggagaccctcgagaccacaccacctgccatggctgctcccaaggacgatgggttcctcaacggctcctgctcaggcctggacgaggaggcctctgggcctgagcggccacctgccctgctacaggaagagtgggagacagtcatgtgaccaggcgctgggggctggacctgctgacatagtggatggacagatggaccaaaagatgggtggttgaatgatttcccactcagggctggggccaagagg

SEQ ID NO: 163730 - DNA, 459 bp, Homo sapiens
  Payload ID: 12247
  Gene Symbol: PTH2
  Gene Name: parathyroid hormone 2
  Uniprot ID: Q96A98
  ENST ID: ENST00000270631
  CDS Start-End: 103-405
gtaggggactgtgcgggaagctgggggtggatgcatggtggggcccggggttctgggccgggatgcagccctactgagcccctttctggttctccacaggtgatggagacccgccaggtgtccaggagccctcgggttcggctgctgctgctgctgctgctgctgctggtggtgccctggggcgtccgcactgcctcgggagtcgccctgcccccggtcggggtcctcagcctccgccccccaggacgggcctgggcggatcccgccacccccaggccgcggaggagcctggcgctggcggacgacgcggccttccgggagcgcgcgcggttgctggccgccctcgagcgccgccactggctgaactcgtacatgcacaagctgctggtgttggatgcgccctgagcgcgctgcccgtccccatcttaataaagaccatgccctgcgctccggactgcg

SEQ ID NO: 163731 - DNA, 2713 bp, Homo sapiens
  Payload ID: 12248
  Gene Symbol: PTH2R
  Gene Name: parathyroid hormone 2 receptor
  Uniprot ID: P49190
  ENST ID: ENST00000272847
  CDS Start-End: 214-1866
cgcgccgcggcgcagcagcacgcgggttctgagaagcgcgtggctccggcgacaagaccccaagcaccctcggccggtggcccgggcccgaccaccccagctgcgcgtcgttactggccacaagtttgctctgggccagccaagttggcaacttggaagcttctcccgggctctggaggagggtccctgcttcttcctacagccgttccgggcatggccgggctgggggcgtcgctccacgtctggggttggctaatgctcggcagctgcctcctggccagagcccagctggattctgatggcaccattactatagaggagcagattgtccttgtgctgaaagcgaaagtacaatgtgaactcaacatcacagctcaactccaggagggagaaggtaattgtttccctgaatgggatggactcatttgttggcccagaggaacagtggggaaaatatcggctgttccatgccctccttatatttatgacttcaaccataaaggagttgctttccgacactgtaaccccaatggaacatgggattttatgcacagcttaaataaaacatgggccaattattcagactgccttcgctttctgcagccagatatcagcataggaaagcaagaattctttgaacgcctctatgtaatgtataccgttggctactccatctcttttggttccttggctgtggctattctcatcattggttacttcagacgattgcattgcactaggaactatatccacatgcacttatttgtgtctttcatgctgagagctacaagcatctttgtcaaagacagagtagtccatgctcacataggagtaaaggagctggagtccctaataatgcaggatgacccacaaaattccattgaggcaacttctgtggacaaatcacaatatatcgggtgcaagattgctgttgtgatgtttatttacttcctggctacaaattattattggatcctggtggaaggtctctacctgcataatctcatctttgtggctttcttttcggacaccaaatacctgtggggcttcatcttgataggctgggggtttccagcagcatttgttgcagcatgggctgtggcacgagcaactctggctgatgcgaggtgctgggaacttagtgctggagacatcaagtggatttatcaagcaccgatcttagcagctattgggctgaattttattctgtttctgaatacggttagagttctagctaccaaaatctgggagaccaatgcagttgggcatgacacaaggaagcaatacaggaaactggccaaatcgacactggtcctggtcctagtctttggagtgcattacatcgtgttcgtatgcctgcctcactccttcactgggctcgggtgggagatccgcatgcactgtgagctcttcttcaactcctttcagggtttctttgtgtctatcatctactgctactgcaatggagaggttcaggcagaggtgaagaagatgtggagtcggtggaacctctccgtggactggaaaaggacaccgccatgtggcagccgcagatgcggctcagtgctcaccaccgtgacgcacagcaccagcagccagtcacaggtggcggccagcacacgcatggtgcttatctctggcaaagctgccaagatcgccagcagacagcctgacagccacatcactttacctggctatgtctggagtaactcagagcaggactgcctgccacactctttccacgaggagaccaaggaagatagtgggaggcagggagatgatattctaatggagaagccttccaggcctatggaatctaacccagacactgaaggatgccaaggagaaactgaggatgttctctgaatggacatttgtggctgactttcatgggctggtccaatggctggttgtgtgagagggcttggctgatactcctatgcttgagttcaaaggctgaaaattcagttaaggtgttacttaataatagtttttaggctccatgaattggctcctgtaaatactaacgacatgaaaatgcaagtgtcaatggagtagtttattaccttctattggcatcaagttttcctctaaattaatgtatggtatttgctctgtgattgttcatttttttctgctacttttgggtagaaaaaagattcaattgcttggctgtagctttctctcatatatatcaccctaaatataatgaagatcttttagtgtgtatcattttccttttagaaactagtattctcttatttcttactttaatgtacttctatcactgcatttattttgcctgtgcataggagcaattaggatctaaaaaaatatatgggaagataaaagatctaagaacaagtacttgctggaaaattagttggctggacattgataaaataatgcatttataacaattacatgtgtttctgggaacaaggaaaatttctcaaaaaagaatatttcacacatcccttcttttgaatggcctctttgtgaccagccagacctcaggtcttcactctttcttctttgtaaactatgtcatgtggaaagatttcctcagttagtgagcttgtgtctgcaaattgattttgtttgtaatgtattttgatagcaaatcatgctgcatctatatctttttcttgtttgagctgttactacattgtacatggcatgtgggatcaattaaaaatttgttttaaaaata

SEQ ID NO: 163732 - DNA, 811 bp, Homo sapiens
  Payload ID: 12248
  Gene Symbol: PTH2R
  Gene Name: parathyroid hormone 2 receptor
  ENST ID: ENST00000419079
  CDS Start-End: 1-164
actccttcactgggctcgggtgggagatccgcatgcactgtgagctcttcttcaactcctttcagggtttctttgtgtctatcatctactgctactgcaatggagagattgggaggctgctgtgtatggataagatacctgctacagccagcttgacaccatgagaaggacaagagaattgcagagacacatatccaggattctgatccagttgaggcactgaaataatctagaaccaccttcaaatttcttataaagagagctatgctattaggatttaattaaatggatgccaacagcaagtaaaccatctccaaagatgccatgaagctctcctaattgcaggaaaatatcagaggcacttgatttgagtctttcaagtacggaaataacaaattcagtctcaacagacctatagtgaatgagaatgattgtcacataatgtgtagagaaaatggaagaatcaaaggcaagggaaacctgtacagtggagacacaaagggtcactggcagatttcaaatgatccaagacatcctcaagacattgagatctgctggttggagatcttagtgcccaaggaagaatgcttgcaaaaggagatggaacagtgtttctgttgcattggccactgagaatatctggttattttgaatttgtcacagtctgcagctaaaaggcgaacaggaaaagaagagatcacgaatcaagctgaaaaagtaaagcattctgtgagttgtggaatggaaattgcctcaaccatctcaccacttgatgacacttgtaatttcagtgacccaattcaaggcaaga

SEQ ID NO: 163733 - DNA, 2472 bp, Homo sapiens
  Payload ID: 12248
  Gene Symbol: PTH2R
  Gene Name: parathyroid hormone 2 receptor
  ENST ID: ENST00000617735
  CDS Start-End: 783-2102
gtgctccgagggaccacaggtccactacgtgaggggaggcttccctcccacaggaactcacacctgtgggcaggaagccgggaggcccgccccctgcctgggttcctgcaggggaaggcgagggtggctggatagagcgtaccctgagaggtggttgggcaggaggctgggctggtggccagctgcgcagggagaccgggaggtggcagatctgcggggcgcccagtcacttcctccacgttctcgtgctgggcgggaggagcggatggggcttgggaggcagcctgctctccagtccctatccacccacaggttttttgggtcggagaggaattatctgataaaattcctgggttaatatttttaaaaacggagagtttttaaaaatgatttttttccctcgaaaatgacctttttatgcttcgaagcagtttgtcaccagcatagtgctttttcttttctcttctttttctacgataaatgaaagcatttcttcaagaaaaaggcacaggttccttgaacagctggattctgatggcaccattactatagaggagcagattgtccttgtgctgaaagcgaaagtacaatgtgaactcaacatcacagctcaactccaggagggagaaggtaattgtttccctgaatgggatggactcatttgttggcccagaggaacagtggggaaaatatcggctgttccatgccctccttatatttatgacttcaaccataaaggagttgctttccgacactgtaaccccaatggaacatgggattttatgcacagcttaaataaaacatgggccaattattcagactgccttcgctttctgcagccagatatcagcataggaaagcaagaattctttgaacgcctctatgtaatgtataccgttggctactccatctcttttggttccttggctgtggctattctcatcattggttacttcagacgattgcattgcactaggaactatatccacatgcacttatttgtgtctttcatgctgagagctacaagcatctttgtcaaagacagagtagtccatgctcacataggagtaaaggagctggagtccctaataatgcaggatgacccacaaaattccattgaggcaacttctgtggacaaatcacaatatatcgggtgcaagattgctgttgtgatgtttatttacttcctggctacaaattattattggatcctggtggaaggtctctacctgcataatctcatctttgtggctttcttttcggacaccaaatacctgtggggcttcatcttgataggctgggggtttccagcagcatttgttgcagcatgggctgtggcacgagcaactctggctgatgcgaggtgctgggaacttagtgctggagacatcaagtggatttatcaagcaccgatcttagcagctattgggctgaattttattctgtttctgaatacggttagagttctagctaccaaaatctgggagaccaatgcagttgggcatgacacaaggaagcaatacaggaaactggccaaatcgacactggtcctggtcctagtctttggagtgcattacatcgtgttcgtatgcctgcctcactccttcactgggctcgggtgggagatccgcatgcactgtgagctcttcttcaactcctttcagggtttctttgtgtctatcatctactgctactgcaatggagaggttcaggcagaggtgaagaagatgtggagtcggtggaacctctccgtggactggaaaaggacaccgccatgtggcagccgcagatgcggctcagtgctcaccaccgtgacgcacagcaccagcagccagtcacaggtggcggccagcacacgcatggtgcttatctctggcaaagctgccaagatcgccagcagacagcctgacagccacatcactttacctggctatgtctggagtaactcagagcaggactgcctgccacactctttccacgaggagaccaaggaagatagtgggaggcagggagatgatattctaatggagaagccttccaggcctatggaatctaacccagacactgaaggatgccaaggagaaactgaggatgttctctgaatggacatttgtggctgactttcatgggctggtccaatggctggttgtgtgagagggcttggctgatactcctatgcttgagttcaaaggctgaaaattcagttaaggtgttacttaataatagtttttaggctccatgaattggctcctgtaaatactaacgacatgaaaatgcaagtgtcaatggagtagtttattaccttctattggcatcaagttttcctctaaattaatgtatggtatttgctctgtgattgttcatttttttctgctacttttgggtagaaaaaagattcaattgcttggctgtagctttctctcatatatatcaccctaaatataatgaagatcttttagtgtgtatcatttt

SEQ ID NO: 163734 - DNA, 1872 bp, Homo sapiens
  Payload ID: 12249
  Gene Symbol: PTHLH
  Gene Name: parathyroid hormone-like hormone
  Uniprot ID: P12272
  ENST ID: ENST00000201015
  CDS Start-End: 323-850
cctgcatctttttggaaggattctttttataaatcagaaagtgttcgaggttcaaaggtttgcctcggagcgtgtgaacattcctccgctcggttttcaactcgcctccaacctgcgccgcccggccagcatgtctccccgcccgtgaagcggggctgccgcctccctgccgctccggctgccactaacgacccgccctcgccgccacctggccctcctgatcgacgacacacgcacttgaaacttgttctcagggtgtgtggaatcaactttccggaagcaaccagcccaccagaggaggtcccgagcgcgagcggagacgatgcagcggagactggttcagcagtggagcgtcgcggtgttcctgctgagctacgcggtgccctcctgcgggcgctcggtggagggtctcagccgccgcctcaaaagagctgtgtctgaacatcagctcctccatgacaaggggaagtccatccaagatttacggcgacgattcttccttcaccatctgatcgcagaaatccacacagctgaaatcagagctacctcggaggtgtcccctaactccaagccctctcccaacacaaagaaccaccccgtccgatttgggtctgatgatgagggcagatacctaactcaggaaactaacaaggtggagacgtacaaagagcagccgctcaagacacctgggaagaaaaagaaaggcaagcccgggaaacgcaaggagcaggaaaagaaaaaacggcgaactcgctctgcctggttagactctggagtgactgggagtgggctagaaggggaccacctgtctgacacctccacaacgtcgctggagctcgattcacggtaacaggcttctctggcccgtagcctcagcggggtgctctcagctgggttttggagcctcccttctgccttggcttggacaaacctagaattttctccctttatgtatctctatcgattgtgtagcaattgacagagaataactcagaatattgtctgccttaaagcagtacccccctaccacacacacccctgtcctccagcaccatagagaggcgctagagcccattcctctttctccaccgtcacccaacatcaatcctttaccactctaccaaataatttcatattcaagcttcagaagctagtgaccatcttcataatttgctggagaagtgtgtttcttccccttactctcacacctgggcaaactttcttcagtgtttttcatttcttacgttctttcacttcaagggagaatatagaagcatttgatattatctacaaacactgcagaacagcatcatgtcataaacgattctgagccattcacactttttatttaattaaatgtatttaattaaatctcaaatttattttaatgtaaagaacttaaattatgttttaaacacatgccttaaatttgtttaattaaatttaactctggtttctaccagctcatacaaaataaatggtttctgaaaatgtttaagtattaacttacaaggatataggtttttctcatgtatctttttgttcattggcaagatgaaataatttttctagggtaatgccgtaggaaaaataaaacttcacatttatgtggcttgtttatccttagctcacagattgaggtaataatgacactcctagactttgggatcaaataacttagggccaagtcttgggtctgaatttatttaagttcacaacctagggcaagttactctgcctttctaagactcacttacatcttctgtgaaatataattgtaccaacctcatagagtttggtgtcaactaaatgagattatatgtggactaaatatctgtcatatagtaaacactcaataaattgcaacatatt

SEQ ID NO: 163735 - DNA, 1674 bp, Homo sapiens
  Payload ID: 12249
  Gene Symbol: PTHLH
  Gene Name: parathyroid hormone-like hormone
  Uniprot ID: P12272
  ENST ID: ENST00000395868
  CDS Start-End: 390-917
aagcaaccagcccaccagaggaggtagacagacagctatgtatatatatgtgggtttcgctacaagtggctctggaacgaaagggcctggttcgcaaagaagctgacttcagagggggaaactttcttcttttaggaggcggttagccctgttccacgaacccaggagaactgctggccagattaattagacattgctatgggagacgtgtaaacacactacttatcattgatgcatatataaaaccattttattttcgctattatttcagaggaagcgcctctgatttgtttcttttttccctttttgctctttctggctgtgtggtttggagaaagcacagttggagtagccggttgctaaataagtcccgagcgcgagcggagacgatgcagcggagactggttcagcagtggagcgtcgcggtgttcctgctgagctacgcggtgccctcctgcgggcgctcggtggagggtctcagccgccgcctcaaaagagctgtgtctgaacatcagctcctccatgacaaggggaagtccatccaagatttacggcgacgattcttccttcaccatctgatcgcagaaatccacacagctgaaatcagagctacctcggaggtgtcccctaactccaagccctctcccaacacaaagaaccaccccgtccgatttgggtctgatgatgagggcagatacctaactcaggaaactaacaaggtggagacgtacaaagagcagccgctcaagacacctgggaagaaaaagaaaggcaagcccgggaaacgcaaggagcaggaaaagaaaaaacggcgaactcgctctgcctggttagactctggagtgactgggagtgggctagaaggggaccacctgtctgacacctccacaacgtcgctggagctcgattcacggtaacaggcttctctggcccgtagcctcagcggggtgctctcagctgggttttggagcctcccttctgccttggcttggacaaacctagaattttctccctttatgtatctctatcgattgtgtagcaattgacagagaataactcagaatattgtctgccttaaagcagtacccccctaccacacacacccctgtcctccagcaccatagagaggcgctagagcccattcctctttctccaccgtcacccaacatcaatcctttaccactctaccaaataatttcatattcaagcttcagaagctagtgaccatcttcataatttgctggagaagtgtgtttcttccccttactctcacacctgggcaaactttcttcagtgtttttcatttcttacgttctttcacttcaagggagaatatagaagcatttgatattatctacaaacactgcagaacagcatcatgtcataaacgattctgagccattcacactttttatttaattaaatgtatttaattaaatctcaaatttattttaatgtaaagaacttaaattatgttttaaacacatgccttaaatttgtttaattaaatttaactctggtttctaccagctcatacaaaataaatggtttctgaaaatgtttaagtattaacttacaaggatataggtttttctcatgtatctttttgttcattggcaagatgaaataatttttctagggtaatgccgtaggaaaaataaaacttcacattta

SEQ ID NO: 163736 - DNA, 1318 bp, Homo sapiens
  Payload ID: 12249
  Gene Symbol: PTHLH
  Gene Name: parathyroid hormone-like hormone
  Uniprot ID: P12272
  ENST ID: ENST00000395872
  CDS Start-End: 310-843
ggaaggattctttttataaatcagaaagtgttcgaggttcaaaggtttgcctcggagcgtgtgaacattcctccgctcggttttcaactcgcctccaacctgcgccgcccggccagcatgtctccccgcccgtgaagcggggctgccgcctccctgccgctccggctgccactaacgacccgccctcgccgccacctggccctcctgatcgacgacacacgcacttgaaacttgttctcagggtgtgtggaatcaactttccggaagcaaccagcccaccagaggaggtcccgagcgcgagcggagacgatgcagcggagactggttcagcagtggagcgtcgcggtgttcctgctgagctacgcggtgccctcctgcgggcgctcggtggagggtctcagccgccgcctcaaaagagctgtgtctgaacatcagctcctccatgacaaggggaagtccatccaagatttacggcgacgattcttccttcaccatctgatcgcagaaatccacacagctgaaatcagagctacctcggaggtgtcccctaactccaagccctctcccaacacaaagaaccaccccgtccgatttgggtctgatgatgagggcagatacctaactcaggaaactaacaaggtggagacgtacaaagagcagccgctcaagacacctgggaagaaaaagaaaggcaagcccgggaaacgcaaggagcaggaaaagaaaaaacggcgaactcgctctgcctggttagactctggagtgactgggagtgggctagaaggggaccacctgtctgacacctccacaacgtcgctggagctcgattcacggaggcattgaaattttcagcagagaccttccaaggacatattgcaggattctgtaatagtgaacatatggaaagtattagaaatatttattgtctgtaaatactgtaaatgcattggaataaaactgtctcccccattgctctatgaaactgcacattggtcattgtgaatattttttttttgccaaggctaatccaattattattatcacatttaccataatttattttgtccattgatgtatttattttgtaaatgtatcttggtgctgctgaatttctatattttttgtaacataatgcactttagatatacatatcaagtatgttgataaatgacacaatgaagtgtctctattttgtggttgattttaatgaatgcctaaatataattatccaaattgattttcctttgtgcatgtaaaaataacagtattttaaatttgtaaagaatgtctaataaaatataatctaattacatcatga

SEQ ID NO: 163737 - DNA, 1891 bp, Homo sapiens
  Payload ID: 12249
  Gene Symbol: PTHLH
  Gene Name: parathyroid hormone-like hormone
  Uniprot ID: P12272
  ENST ID: ENST00000535992
  CDS Start-End: 348-875
cgccagcccgcctgcgccctcgctcgccccgcgcgcgttcctagggcgccacctctttgcgactagctcacttctccggcaggtttgcctcggagcgtgtgaacattcctccgctcggttttcaactcgcctccaacctgcgccgcccggccagcatgtctccccgcccgtgaagcggggctgccgcctccctgccgctccggctgccactaacgacccgccctcgccgccacctggccctcctgatcgacgacacacgcacttgaaacttgttctcagggtgtgtggaatcaactttccggaagcaaccagcccaccagaggaggtcccgagcgcgagcggagacgatgcagcggagactggttcagcagtggagcgtcgcggtgttcctgctgagctacgcggtgccctcctgcgggcgctcggtggagggtctcagccgccgcctcaaaagagctgtgtctgaacatcagctcctccatgacaaggggaagtccatccaagatttacggcgacgattcttccttcaccatctgatcgcagaaatccacacagctgaaatcagagctacctcggaggtgtcccctaactccaagccctctcccaacacaaagaaccaccccgtccgatttgggtctgatgatgagggcagatacctaactcaggaaactaacaaggtggagacgtacaaagagcagccgctcaagacacctgggaagaaaaagaaaggcaagcccgggaaacgcaaggagcaggaaaagaaaaaacggcgaactcgctctgcctggttagactctggagtgactgggagtgggctagaaggggaccacctgtctgacacctccacaacgtcgctggagctcgattcacggtaacaggcttctctggcccgtagcctcagcggggtgctctcagctgggttttggagcctcccttctgccttggcttggacaaacctagaattttctccctttatgtatctctatcgattgtgtagcaattgacagagaataactcagaatattgtctgccttaaagcagtacccccctaccacacacacccctgtcctccagcaccatagagaggcgctagagcccattcctctttctccaccgtcacccaacatcaatcctttaccactctaccaaataatttcatattcaagcttcagaagctagtgaccatcttcataatttgctggagaagtgtgtttcttccccttactctcacacctgggcaaactttcttcagtgtttttcatttcttacgttctttcacttcaagggagaatatagaagcatttgatattatctacaaacactgcagaacagcatcatgtcataaacgattctgagccattcacactttttatttaattaaatgtatttaattaaatctcaaatttattttaatgtaaagaacttaaattatgttttaaacacatgccttaaatttgtttaattaaatttaactctggtttctaccagctcatacaaaataaatggtttctgaaaatgtttaagtattaacttacaaggatataggtttttctcatgtatctttttgttcattggcaagatgaaataatttttctagggtaatgccgtaggaaaaataaaacttcacatttatgtggcttgtttatccttagctcacagattgaggtaataatgacactcctagactttgggatcaaataacttagggccaagtcttgggtctgaatttatttaagttcacaacctagggcaagttactctgcctttctaagactcacttacatcttctgtgaaatataattgtaccaacctcatagagtttggtgtcaactaaatgagattatatgtggactaaatatctgtcatatagtaaacactcaataaattgcaa

SEQ ID NO: 163738 - DNA, 890 bp, Homo sapiens
  Payload ID: 12249
  Gene Symbol: PTHLH
  Gene Name: parathyroid hormone-like hormone
  Uniprot ID: P12272
  ENST ID: ENST00000539239
  CDS Start-End: 68-601
ggagagtccagactgacactcgggtcccattcccttctgttgcaggtcccgagcgcgagcggagacgatgcagcggagactggttcagcagtggagcgtcgcggtgttcctgctgagctacgcggtgccctcctgcgggcgctcggtggagggtctcagccgccgcctcaaaagagctgtgtctgaacatcagctcctccatgacaaggggaagtccatccaagatttacggcgacgattcttccttcaccatctgatcgcagaaatccacacagctgaaatcagagctacctcggaggtgtcccctaactccaagccctctcccaacacaaagaaccaccccgtccgatttgggtctgatgatgagggcagatacctaactcaggaaactaacaaggtggagacgtacaaagagcagccgctcaagacacctgggaagaaaaagaaaggcaagcccgggaaacgcaaggagcaggaaaagaaaaaacggcgaactcgctctgcctggttagactctggagtgactgggagtgggctagaaggggaccacctgtctgacacctccacaacgtcgctggagctcgattcacggaggcattgaaattttcagcagagaccttccaaggacatattgcaggattctgtaatagtgaacatatggaaagtattagaaatatttattgtctgtaaatactgtaaatgcattggaataaaactgtctcccccattgctctatgaaactgcacattggtcattgtgaatattttttttttgccaaggctaatccaattattattatcacatttaccataatttattttgtccattgatgtatttattttgtaaatgtatcttggtgctgctgaatttctatattttttgtaacataa

SEQ ID NO: 163739 - DNA, 1544 bp, Homo sapiens
  Payload ID: 12249
  Gene Symbol: PTHLH
  Gene Name: parathyroid hormone-like hormone
  Uniprot ID: P12272
  ENST ID: ENST00000545234
  CDS Start-End: 542-1075
ctgctttctaataattgcctttagtgggaacagaagtctcctttcaagaagcttttaattcattttaagatttaattttatgttttctgaagaacaacaaaaaatatttctggaaaagactgctgagaagatttccctctttcagccagaagagcagagagaagattgtaaatcaaggaaaagatttcccccttcagatctaacgattacattagggctcctgcatctttttggaaggattctttttataaatcagaaagtgttcgaggttcaaaggtttgcctcggagcgtgtgaacattcctccgctcggttttcaactcgcctccaacctgcgccgcccggccagcatgtctccccgcccgtgaagcggggctgccgcctccctgccgctccggctgccactaacgacccgccctcgccgccacctggccctcctgatcgacgacacacgcacttgaaacttgttctcagggtgtgtggaatcaactttccggaagcaaccagcccaccagaggaggtcccgagcgcgagcggagacgatgcagcggagactggttcagcagtggagcgtcgcggtgttcctgctgagctacgcggtgccctcctgcgggcgctcggtggagggtctcagccgccgcctcaaaagagctgtgtctgaacatcagctcctccatgacaaggggaagtccatccaagatttacggcgacgattcttccttcaccatctgatcgcagaaatccacacagctgaaatcagagctacctcggaggtgtcccctaactccaagccctctcccaacacaaagaaccaccccgtccgatttgggtctgatgatgagggcagatacctaactcaggaaactaacaaggtggagacgtacaaagagcagccgctcaagacacctgggaagaaaaagaaaggcaagcccgggaaacgcaaggagcaggaaaagaaaaaacggcgaactcgctctgcctggttagactctggagtgactgggagtgggctagaaggggaccacctgtctgacacctccacaacgtcgctggagctcgattcacggaggcattgaaattttcagcagagaccttccaaggacatattgcaggattctgtaatagtgaacatatggaaagtattagaaatatttattgtctgtaaatactgtaaatgcattggaataaaactgtctcccccattgctctatgaaactgcacattggtcattgtgaatattttttttttgccaaggctaatccaattattattatcacatttaccataatttattttgtccattgatgtatttattttgtaaatgtatcttggtgctgctgaatttctatattttttgtaacataatgcactttagatatacatatcaagtatgttgataaatgacacaatgaagtgtctctattttgtggttgattttaatgaatgcctaaatataattatccaaattgattttcctttgtgcatgtaaaaataacagtattttaaatttgtaaagaatgtctaataaaatataatctaattaca

SEQ ID NO: 163740 - DNA, 854 bp, Homo sapiens
  Payload ID: 12249
  Gene Symbol: PTHLH
  Gene Name: parathyroid hormone-like hormone
  Uniprot ID: P12272
  ENST ID: ENST00000538310
  CDS Start-End: 1-630
atgcagcggagactggttcagcagtggagcgtcgcggtgttcctgctgagctacgcggtgccctcctgcgggcgctcggtggagggtctcagccgccgcctcaaaagagctgtgtctgaacatcagctcctccatgacaaggggaagtccatccaagatttacggcgacgattcttccttcaccatctgatcgcagaaatccacacagctgaaatcagagctacctcggaggtgtcccctaactccaagccctctcccaacacaaagaaccaccccgtccgatttgggtctgatgatgagggcagatacctaactcaggaaactaacaaggtggagacgtacaaagagcagccgctcaagacacctgggaagaaaaagaaaggcaagcccgggaaacgcaaggagcaggaaaagaaaaaacggcgaactcgctctgcctggttagactctggagtgactgggagtgggctagaaggggaccacctgtctgacacctccacaacgtcgctggagctcgattcacgtacagcacttctgtggggtttgaaaaaaaaaaaggaaaacaacagaagaacacatcatatgcaactaatgatctcattatttaagagtcccctgttacttctttagtcatttcctttgactctgctacagataggattataggatgatgcttcaaaggggaccttgaacctattcaccattatttgtctctttaagctggcaaacccatcattaaatagcacataaaatagcaatcatatgggataagtagtacagcttcagtaatcaatgggcagtggcactagaaaaatcttgagcacagtgaatgacctatcctgcaaacatctaat

SEQ ID NO: 163741 - DNA, 746 bp, Homo sapiens
  Payload ID: 12249
  Gene Symbol: PTHLH
  Gene Name: parathyroid hormone-like hormone
  ENST ID: ENST00000542963
  CDS Start-End: 231-746
tctccggcaggtttgcctcggagcgtgtgaacattcctccgctcggttttcaactcgcctccaacctgcgccgcccggccagcatgtctccccgcccgtgaagcggggctgccgcctccctgccgctccggctgccactaacgacccgccctcgccgccacctggccctcctgatcgacgacacacgcacttgaaacttgttctcagggtcccgagcgcgagcggagacgatgcagcggagactggttcagcagtggagcgtcgcggtgttcctgctgagctacgcggtgccctcctgcgggcgctcggtggagggtctcagccgccgcctcaaaagagctgtgtctgaacatcagctcctccatgacaaggggaagtccatccaagatttacggcgacgattcttccttcaccatctgatcgcagaaatccacacagctgaaatcagagctacctcggaggtgtcccctaactccaagccctctcccaacacaaagaaccaccccgtccgatttgggtctgatgatgagggcagatacctaactcaggaaactaacaaggtggagacgtacaaagagcagccgctcaagacacctgggaagaaaaagaaaggcaagcccgggaaacgcaaggagcaggaaaagaaaaaacggcgaactcgctctgcctggttagactctggagtgactgggagtgggctagaaggggaccacctgtctgacacctccacaacgtcgctggagctc

SEQ ID NO: 163742 - DNA, 457 bp, Homo sapiens
  Payload ID: 12249
  Gene Symbol: PTHLH
  Gene Name: parathyroid hormone-like hormone
  ENST ID: ENST00000534890
  CDS Start-End: 125-457
acccgccctcgccgccacctggccctcctgatcgacgacacacgcacttgaaacttgttctcagggtgtgtggaatcaactttccggaagcaaccagcccaccagaggaggtagacagacagctatgtcccgagcgcgagcggagacgatgcagcggagactggttcagcagtggagcgtcgcggtgttcctgctgagctacgcggtgccctcctgcgggcgctcggtggagggtctcagccgccgcctcaaaagagctgtgtctgaacatcagctcctccatgacaaggggaagtccatccaagatttacggcgacgattcttccttcaccatctgatcgcagaaatccacacagctgaaatcagagctacctcggaggtgtcccctaactccaagccctctcccaacacaaagaaccaccccgtccgatttgggtctgatgatgagggcagatac

SEQ ID NO: 163743 - DNA, 1619 bp, Homo sapiens
  Payload ID: 12250
  Gene Symbol: PACRG
  Gene Name: PARK2 co-regulated
  Uniprot ID: Q96M98
  ENST ID: ENST00000337019
  CDS Start-End: 225-1115
agatctatctggaggagtttctgtggagccagccaccctcaccaggtgccttccattagagtttaatgctttgctgcggtttcctgaaagagccccacagagagtgggtctcgatgggtcctgaaccgcaccacaaccggccagtgagacctcctgctcacatccgtaaagcccactgattcttttactacactttttatgagaacaagacattttctaggaagatggtggcagaaaaagagaccctgagcttaaacaaatgcccagacaagatgccgaagaggaccaagctgctggcacaacagccgctcccggtgcaccagcctcactctctggtttctgagggtttcacagtcaaagccatgatgaaaaactcagtcgtgagaggccctccagctgcaggggcatttaaagaaagaccaaccaagcccacagcatttcgaaaattctatgagcgaggtgacttcccaattgcccttgagcatgattcgaaaggaaacaaaatcgcctggaaggtagaaattgagaagctggattaccatcattatctgcctctgttttttgatgggctttgtgaaatgacatttccctatgagttttttgctcggcaaggaatccacgacatgctggaacacggtgggaacaagatcctacctgtccttccacagctcattatcccgataaaaaatgccttgaacctccgaaaccgacaggtcatctgtgtcactctcaaggtcctccagcatctggttgtgtcagctgagatggtgggcaaggccttggtgccttattaccgtcaaatcctccctgtcctgaacatctttaagaatatgaatgggtcttactctttgcccaggctggagtgcagtggcgcgatcatggctcgttgcaacctcgaccacctgggctcaagtgatcctcccacctcagcctctcaagtagctgagattatagtgaactccggagacggcattgactacagccagcagaagagggagaacattggggacttgatccaggagacactggaggccttcgagcgctacggaggagaaaatgcctttatcaacattaagtacgtggtcccaacctacgagtcttgcttgctaaactaacagtggcagcagctgggacttgaaacctcccgttggtgttgggatcatctgtctctgttgcttttagcatctcattccttgtgacttccacagctttcttttctacagctgctaaaatagtggcttatgggccattggactgttagccctattgagagcaaggctttccaatacataaatagtgtctgtttcttagattacaatagtgtactgtgcttatttgttctaagagaagaattgcttctttatacagctccgacagaagcaggagtccgagttaaaccttcagttgtatagacaataaactataattttcatatgcaattcagcaattgctgttctgtgtgtgcctgccctgggggtgatgtcagaggttgtaagggaagagtttatgctgactgcttactaggtgtttgtcatggaagagaagcatgggttcagcagtgcctctctagcagctgtgcggaataatgtgctttgacattcaataaaactgttgaatct

SEQ ID NO: 163744 - DNA, 1373 bp, Homo sapiens
  Payload ID: 12250
  Gene Symbol: PACRG
  Gene Name: PARK2 co-regulated
  Uniprot ID: Q96M98
  ENST ID: ENST00000366888
  CDS Start-End: 276-1049
gtgttgaccagtcgcttagcaaccgggaggcttacctttggaagcttgttgcagctctagccaaggtcctgccctcttcccgccccgcccctagggtccagctcccttcacctaggagctgccaaacatctggatcaacctgggcactacgaggggttgaatttctaccattatcgcgccttttgatatttttttccagacctcctgctcacatccgtaaagcccactgattcttttactacactttttatgagaacaagacattttctaggaagatggtggcagaaaaagagaccctgagcttaaacaaatgcccagacaagatgccgaagaggaccaagctgctggcacaacagccgctcccggtgcaccagcctcactctctggtttctgagggtttcacagtcaaagccatgatgaaaaactcagtcgtgagaggccctccagctgcaggggcatttaaagaaagaccaaccaagcccacagcatttcgaaaattctatgagcgaggtgacttcccaattgcccttgagcatgattcgaaaggaaacaaaatcgcctggaaggtagaaattgagaagctggattaccatcattatctgcctctgttttttgatgggctttgtgaaatgacatttccctatgagttttttgctcggcaaggaatccacgacatgctggaacacggtgggaacaagatcctacctgtccttccacagctcattatcccgataaaaaatgccttgaacctccgaaaccgacaggtcatctgtgtcactctcaaggtcctccagcatctggttgtgtcagctgagatggtgggcaaggccttggtgccttattaccgtcaaatcctccctgtcctgaacatctttaagaatatgaatgtgaactccggagacggcattgactacagccagcagaagagggagaacattggggacttgatccaggagacactggaggccttcgagcgctacggaggagaaaatgcctttatcaacattaagtacgtggtcccaacctacgagtcttgcttgctaaactaacagtggcagcagctgggacttgaaacctcccgttggtgttgggatcatctgtctctgttgcttttagcatctcattccttgtgacttccacagctttcttttctacagctgctaaaatagtggcttatgggccattggactgttagccctattgagagcaaggctttccaatacataaatagtgtctgtttcttagattacaatagtgtactgtgcttatttgttctaagagaagaattgcttctttatacagctccgacagaagcaggagtccgagttaaaccttcagttgtatagacaataaactataattttcatatgcaa

SEQ ID NO: 163745 - DNA, 1503 bp, Homo sapiens
  Payload ID: 12250
  Gene Symbol: PACRG
  Gene Name: PARK2 co-regulated
  Uniprot ID: Q96M98
  ENST ID: ENST00000366889
  CDS Start-End: 225-998
agatctatctggaggagtttctgtggagccagccaccctcaccaggtgccttccattagagtttaatgctttgctgcggtttcctgaaagagccccacagagagtgggtctcgatgggtcctgaaccgcaccacaaccggccagtgagacctcctgctcacatccgtaaagcccactgattcttttactacactttttatgagaacaagacattttctaggaagatggtggcagaaaaagagaccctgagcttaaacaaatgcccagacaagatgccgaagaggaccaagctgctggcacaacagccgctcccggtgcaccagcctcactctctggtttctgagggtttcacagtcaaagccatgatgaaaaactcagtcgtgagaggccctccagctgcaggggcatttaaagaaagaccaaccaagcccacagcatttcgaaaattctatgagcgaggtgacttcccaattgcccttgagcatgattcgaaaggaaacaaaatcgcctggaaggtagaaattgagaagctggattaccatcattatctgcctctgttttttgatgggctttgtgaaatgacatttccctatgagttttttgctcggcaaggaatccacgacatgctggaacacggtgggaacaagatcctacctgtccttccacagctcattatcccgataaaaaatgccttgaacctccgaaaccgacaggtcatctgtgtcactctcaaggtcctccagcatctggttgtgtcagctgagatggtgggcaaggccttggtgccttattaccgtcaaatcctccctgtcctgaacatctttaagaatatgaatgtgaactccggagacggcattgactacagccagcagaagagggagaacattggggacttgatccaggagacactggaggccttcgagcgctacggaggagaaaatgcctttatcaacattaagtacgtggtcccaacctacgagtcttgcttgctaaactaacagtggcagcagctgggacttgaaacctcccgttggtgttgggatcatctgtctctgttgcttttagcatctcattccttgtgacttccacagctttcttttctacagctgctaaaatagtggcttatgggccattggactgttagccctattgagagcaaggctttccaatacataaatagtgtctgtttcttagattacaatagtgtactgtgcttatttgttctaagagaagaattgcttctttatacagctccgacagaagcaggagtccgagttaaaccttcagttgtatagacaataaactataattttcatatgcaattcagcaattgctgttctgtgtgtgcctgccctgggggtgatgtcagaggttgtaagggaagagtttatgctgactgcttactaggtgtttgtcatggaagagaagcatgggttcagcagtgcctctctagcagctgtgcggaataatgtgctttgacattcaataaaactgttgaatcta

SEQ ID NO: 163746 - DNA, 415 bp, Homo sapiens
  Payload ID: 12250
  Gene Symbol: PACRG
  Gene Name: PARK2 co-regulated
  ENST ID: ENST00000542936
  CDS Start-End: 1-383
tacctgtccttccacagctcattatcccgataaaaaatgccttgaacctccgaaaccgacaggtcatctgtgtcactctcaaggtcctccagcatctggttgtgtcagctgagatggtgggcaaggccttggtgccttattaccgtcaaatcctccctgtcctgaacatctttaagaatatgaatgtaacccatcgacaaagaagtgaattgtcctccatgttagcgaagtggggaggtccagacttgctccttgtctttctaccattttctaccatcattgtatgtaaaagtctaatcttcattttaagtcagtttatgcttcccagactaaactctgcaacaaataatatgaatgtcacacatttcatcatttgtaattaattccaaactaaataaaacaaggagttgtgaaa

SEQ ID NO: 163747 - DNA, 907 bp, Homo sapiens
  Payload ID: 12250
  Gene Symbol: PACRG
  Gene Name: PARK2 co-regulated
  ENST ID: ENST00000541974
  CDS Start-End: 1-187
aggccctccagctgcaggggcatttaaagaaagaccaaccaagcccacagcatttcgaaaattctatgagcgaggtgacttcccaattgcccttgagcatgattcgaaaggaaacaaaatcgcctggaagattctaggaatgaaaaattacaaaaccacatcaccttggcccttaagtaacagatgaaaactactgacagacggcagcgaatcatgtcttccaatgaatagcagaataatgctggaaattggaaaaattcaatgtcaaggtagaaattgagaagctggattaccatcattatctgcctctgttttttgatgggctttgtgaaatgacatttccctatgagttttttgctcggcaaggaatccacgacatgctggaacacggtgggaacaagatcctacctgtccttccacagctcattatcccgataaaaaatgccttgaacctccgaaaccgacaggtcatctgtgtcactctcaaggtcctccagcatctggttgtgtcagctgagatggtgggcaaggccttggtgccttattaccgtcaaatcctccctgtcctgaacatctttaagaatatgaatgtgaactccggagacggcattgactacagccagcagaagagggagaacattggggacttgatccaggagacactggaggccttcgagcgctacggaggagaaaatgcctttatcaacattaagtacgtggtcccaacctacgagtcttgcttgctaaactaacagtggcagcagctgggacttgaaacctcccgttggtgttgggatcatctgtctctgttgcttttagcatctcattccttgtgacttccacagctttcttttctacagctgctaaaatagtggcttatgggccattggactgttagccctattga

SEQ ID NO: 163748 - DNA, 545 bp, Homo sapiens
  Payload ID: 12250
  Gene Symbol: PACRG
  Gene Name: PARK2 co-regulated
  ENST ID: ENST00000534958
  CDS Start-End: 1-376
tgagcatgattcgaaaggaaacaaaatcgcctggaaggtagaaattgagaagctggattaccatcattatctgcctctgttttttgatgggctttgtgaaatgacatttccctatgagttttttgctcggcaaggaatccacgacatgctggaacacggtgggaacaagatcctacctgtccttccacagctcattatcccgataaaaaatgccttgaacctccgaaaccgacaggtcatctgtgtcactctcaaggtcctccagcatctggttgtgtcagctgagatggtgggcaaggccttggtgccttattaccgtcaaatcctccctgtcctgaacatctttaagaatatgaatggctgggctcctccgtaggttctcctgccaacaagcgagacagaaaggaggcggcagctgggggaactcagccttccttcccaccacacctgcaccttgctgagccactgctcccaagacgaggcacagaattcccagagcagcctggcttcaacctactcatttggtgttctttaaattaaaaaaa

SEQ ID NO: 163749 - DNA, 360 bp, Homo sapiens
  Payload ID: 12250
  Gene Symbol: PACRG
  Gene Name: PARK2 co-regulated
  ENST ID: ENST00000621363
  CDS Start-End: 1-360
agctggaaggtagaaattgagaagctggattaccatcattatctgcctctgttttttgatgggctttgtgaaatgacatttccctatgagttttttgctcggcaaggaatccacgacatgctggaacacggtgggaacaagatcctacctgtccttccacagctcattatcccgataaaaaatgccttgaacctccgaaaccgacaggtcatctgtgtcactctcaaggtcctccagcatctggttgtgtcagctgagatggtgggcaaggccttggtgccttattaccgtcaaatcctccctgtcctgaacatctttaagaatatgaatggtgagtctgctccaggcatagactattca

SEQ ID NO: 163750 - DNA, 279 bp, Homo sapiens
  Payload ID: 12250
  Gene Symbol: PACRG
  Gene Name: PARK2 co-regulated
  ENST ID: ENST00000611387
  CDS Start-End: 1-279
gggtcttactctttgcccaggctggagtgcagtggcgcgatcatggctcgttgcaacctcgaccacctgggctcaagtgatcctcccacctcagcctctcaagtagctgagattatagtgaactccggagacggcattgactacagccagcagaagagggagaacattggggacttgatccaggagacactggaggccttcgagcgctacggaggagaaaatgcctttatcaacattaagtacgtggtcccaacctacgagtcttgcttgctaaactaa

SEQ ID NO: 163751 - DNA, 1937 bp, Homo sapiens
  Payload ID: 12251
  Gene Symbol: PACRGL
  Gene Name: PARK2 co-regulated-like
  Uniprot ID: Q8N7B6
  ENST ID: ENST00000295290
  CDS Start-End: 297-962
cggcgcgaccaggttcaggggcgggccgcgcggagcctcatttccccaaacgcaggcgctcggtggcggtagccgcggttgttggccgaccgagtgccggtcataagccccccccggtggggggcagctggtgtgcggatcgcggcgggagagaggcgcggtaggaacgggtccccggagccgtgaaccgcgggtacagtttgttacaggaacaactttttgacgtgaaggaagatagaaatttagccataaaattccatccaaaacttccactgaattggagtgaaagggaagcaatgcagaaatcagagggctctggaggtacacagttgaaaaacagagcaacaggtaactatgatcaaaggacatcatcaagcacacagttaaaacacaggaatgcagttcagggaagcaaatcctcattgtcaaccagttctccagagtctgcaagaaaacttcatcctagaccaagtgataaactgaaccctaaaacaattaatccgtttggtgaacagtcacgagtgccttctgcatttgcagctatttactctaaaggaggtattccttgcagattggtacatggttcagtaaaacacagattacagtgggaatgtcctcctgaaagtctttcatttgatccacttcttattactttagctgagggtctgagagagactaagcatccatacacttttgtgtcaaaggagggttttagagaattacttttggtcaaaggtgctcctgaaaaagctattcctttgctacctagactgattcctgtgctaaaggcagctctggtccattcggatgatgaagtgtttgaaagaggattgaatgctctagttcagctaagtgtcgttgttggtccttctctaaacgaccatctgaagcatctgcttacaagcgggagccttagcatcatcaaatctaaaattccaacatactgctccatatgctgttgaagaagggagccaacaaaaattgttttttctacctgttgacgtgtcaagcactaactgtgggtactcatttattttattcttttgtaaatcacagccaccattcattatttactaggttaagatgaatagacactgaatcaaagttattcatcaacaaaaaagaacagttactaatggaaagttattaaaataagttctataagagtacaattttgaggtttattttttgtatttttattatttgtgcgaagaaccattattgagtttgcaagataagatgtatttgtattttctagtgtctttttatttataacaacacttttttggcaatcagtttgtagctgtgcccttatttttatagatagtttgccatttcttgggtttaatgtttaacaaggctatagaagtttaaaatagtggacaaatgtttgtgaatacacttttaaaaaattgttttaaaagagaaaagcggtcttgctttgttgcccagactggagtgcagtggcataatcatagctcaccgcaagcctcaaatttttgtgctcagatgatccttttcatctcagcctcctgattagctgggactataggcgtgtgccaccatgcccagctaattttgaaatttgcttgtagagatgggatctcactctgttgtccaggctggtctcagaattctggtgagtgatcctcccacagtggacttccaaagtgctgggattacaggtgtgagccaccatgcctggccccatgaatacactactaatattatttgtaaatatgtattttataatgtacaatgcttggaaaattttcagagtattctagtttaaaaaattttttctaattctgtaaattctattacaagtatgttgtttattacaactcattacaactacctaaattttaggtgttaactgtatttaagtaaatgtgttatttttgcatttcatagccagaaaatactgatgttcactt

SEQ ID NO: 163752 - DNA, 2073 bp, Homo sapiens
  Payload ID: 12251
  Gene Symbol: PACRGL
  Gene Name: PARK2 co-regulated-like
  Uniprot ID: Q8N7B6
  ENST ID: ENST00000360916
  CDS Start-End: 392-1057
attgcgcggcgcgaccaggttcaggggcgggccgcgcggagcctcatttccccaaacgcaggcgctcggtggcggtagccgcggttgttggccgaccgagtgccggtcataagccccccccggtggggggcagctggtgtgcggatcgcggcgggagagaggcgcggtaggaacgggtccccggagccgtgaaccgcgggtacaggtgtcctgtctgcgctctctgccaagccggcttgcttcctgatctgttgctagggccgctggaccccgttgctaaggacccttgagatcgtgagcgcttggagtgtacccctcctttcctggggtagagggtcagtcgagagtagccttcgttaaccttaattgaaactggagtgaaagggaagcaatgcagaaatcagagggctctggaggtacacagttgaaaaacagagcaacaggtaactatgatcaaaggacatcatcaagcacacagttaaaacacaggaatgcagttcagggaagcaaatcctcattgtcaaccagttctccagagtctgcaagaaaacttcatcctagaccaagtgataaactgaaccctaaaacaattaatccgtttggtgaacagtcacgagtgccttctgcatttgcagctatttactctaaaggaggtattccttgcagattggtacatggttcagtaaaacacagattacagtgggaatgtcctcctgaaagtctttcatttgatccacttcttattactttagctgagggtctgagagagactaagcatccatacacttttgtgtcaaaggagggttttagagaattacttttggtcaaaggtgctcctgaaaaagctattcctttgctacctagactgattcctgtgctaaaggcagctctggtccattcggatgatgaagtgtttgaaagaggattgaatgctctagttcagctaagtgtcgttgttggtccttctctaaacgaccatctgaagcatctgcttacaagcgggagccttagcatcatcaaatctaaaattccaacatactgctccatatgctgttgaagaagggagccaacaaaaattgttttttctacctgttgacgtgtcaagcactaactgtgggtactcatttattttattcttttgtaaatcacagccaccattcattatttactaggttaagatgaatagacactgaatcaaagttattcatcaacaaaaaagaacagttactaatggaaagttattaaaataagttctataagagtacaattttgaggtttattttttgtatttttattatttgtgcgaagaaccattattgagtttgcaagataagatgtatttgtattttctagtgtctttttatttataacaacacttttttggcaatcagtttgtagctgtgcccttatttttatagatagtttgccatttcttgggtttaatgtttaacaaggctatagaagtttaaaatagtggacaaatgtttgtgaatacacttttaaaaaattgttttaaaagagaaaagcggtcttgctttgttgcccagactggagtgcagtggcataatcatagctcaccgcaagcctcaaatttttgtgctcagatgatccttttcatctcagcctcctgattagctgggactataggcgtgtgccaccatgcccagctaattttgaaatttgcttgtagagatgggatctcactctgttgtccaggctggtctcagaattctggtgagtgatcctcccacagtggacttccaaagtgctgggattacaggtgtgagccaccatgcctggccccatgaatacactactaatattatttgtaaatatgtattttataatgtacaatgcttggaaaattttcagagtattctagtttaaaaaattttttctaattctgtaaattctattacaagtatgttgtttattacaactcattacaactacctaaattttaggtgttaactgtatttaagtaaatgtgttatttttgcatttcatagccagaaaatactgatgttcacttaaagatattcagcaattaaaatgttaaaacttgtacatgca

SEQ ID NO: 163753 - DNA, 1720 bp, Homo sapiens
  Payload ID: 12251
  Gene Symbol: PACRGL
  Gene Name: PARK2 co-regulated-like
  Uniprot ID: Q8N7B6
  ENST ID: ENST00000444671
  CDS Start-End: 369-740
ggggcgggccgcgcggagcctcatttccccaaacgcaggcgctcggtggcggtagccgcggttgttggccgaccgagtgccggtcataagccccccccggtggggggcagctggtgtgcggatcgcggcgggagagaggcgcggtaggaacgggtccccggagccgtgaaccgcgggtacaggtgtcctgtctgcgctctctgccaagccggcttgcttcctgatctgttgctagggccgctggaccccgttgctaaggacccttgagatcgtgagcgcttggagtgtacccctcctttcctggggtagagggtcagtcgagagtagccttcgttaaccttaattgaaactggagtgaaagggaagcaatgcagaaatcagagggctctggaggtacacagttgaaaaacagagcaacaggtaactatgatcaaaggacatcatcaagcacacagttaaaacacaggaatgcagttcagggaagcaaatcctcattgtcaaccagttctccagagtctgcaagaaaacttcatcctagaccaagtgataaactgaaccctaaaacaattaatccggtccattcggatgatgaagtgtttgaaagaggattgaatgctctagttcagctaagtgtcgttgttggtccttctctaaacgaccatctgaagcatctgcttacaagcgggagccttagcatcatcaaatctaaaattccaacatactgctccatatgctgttgaagaagggagccaacaaaaattgttttttctacctgttgacgtgtcaagcactaactgtgggtactcatttattttattcttttgtaaatcacagccaccattcattatttactaggttaagatgaatagacactgaatcaaagttattcatcaacaaaaaagaacagttactaatggaaagttattaaaataagttctataagagtacaattttgaggtttattttttgtatttttattatttgtgcgaagaaccattattgagtttgcaagataagatgtatttgtattttctagtgtctttttatttataacaacacttttttggcaatcagtttgtagctgtgcccttatttttatagatagtttgccatttcttgggtttaatgtttaacaaggctatagaagtttaaaatagtggacaaatgtttgtgaatacacttttaaaaaattgttttaaaagagaaaagcggtcttgctttgttgcccagactggagtgcagtggcataatcatagctcaccgcaagcctcaaatttttgtgctcagatgatccttttcatctcagcctcctgattagctgggactataggcgtgtgccaccatgcccagctaattttgaaatttgcttgtagagatgggatctcactctgttgtccaggctggtctcagaattctggtgagtgatcctcccacagtggacttccaaagtgctgggattacaggtgtgagccaccatgcctggccccatgaatacactactaatattatttgtaaatatgtattttataatgtacaatgcttggaaaattttcagagtattctagtttaaaaaattttttctaattctgtaaattctattacaagtatgttgtttattacaactcattacaactacctaaattttaggtgttaactgtatttaagtaaatgtgttatttttgcatttcatagccagaaaatactgatgttcacttaaaga

SEQ ID NO: 163754 - DNA, 620 bp, Homo sapiens
  Payload ID: 12251
  Gene Symbol: PACRGL
  Gene Name: PARK2 co-regulated-like
  ENST ID: ENST00000504630
  CDS Start-End: 346-620
tttccccaaacgcaggcgctcggtggcggtagccgcggttgttggccgaccgagtgccggtcataagccccccccggtggggggcagctggtgtgcggatcgcggcgggagagaggcgcggtaggaacgggtccccggagccgtgaaccgcgggtacaggtgtcctgtctgcgctctctgccaagccggcttgcttcctgatctgttgctagggccgctggaccccgttgctaaggacccttgagatctttgttacaggaacaactttttgacgtgaaggaagatagaaatttagccataaaattccatccaaaacttccactgaattggagtgaaagggaagcaatgcagaaatcagagggctctggaggtacacagttgaaaaacagagcaacaggtaactatgatcaaaggacatcatcaagcacacagttaaaacacaggaatgcagttcagggaagcaaatcctcattgtcaaccagttctccagagtctgcaagaaaacttcatcctagaccaagtgataaactgaaccctaaaacaattaatccgtttggtgaacagtcacgagtgccttctgcatttgcagctatttactctaaaggaggtattccttgcag

SEQ ID NO: 163755 - DNA, 573 bp, Homo sapiens
  Payload ID: 12251
  Gene Symbol: PACRGL
  Gene Name: PARK2 co-regulated-like
  ENST ID: ENST00000514663
  CDS Start-End: 267-573
atttccccaaacgcaggcgctcggtggcggtagccgcggttgttggccgaccgagtgccggtcataagccccccccggtggggggcagctggtgtgcggatcgcggcgggagagaggcgcggtaggaacgggtccccggagccgtgaaccgcgggtacagaaacttgtgttgttccccctccaggagcttctcaaaacagaagtcaggcacaatattaaatacttgttgaatgatcacagaagtacaatagagtgaaagggaagcaatgcagaaatcagagggctctggaggtacacagttgaaaaacagagcaacaggtaactatgatcaaaggacatcatcaagcacacagttaaaacacaggaatgcagttcagggaagcaaatcctcattgtcaaccagttctccagagtctgcaagaaaacttcatcctagaccaagtgataaactgaaccctaaaacaattaatccgtttggtgaacagtcacgagtgccttctgcatttgcagctatttactctaaaggaggtattccttgcagattggtacatggttcagtaaaacacagattac

SEQ ID NO: 163756 - DNA, 647 bp, Homo sapiens
  Payload ID: 12251
  Gene Symbol: PACRGL
  Gene Name: PARK2 co-regulated-like
  ENST ID: ENST00000511089
  CDS Start-End: 196-647
gtggcggtagccgcggttgttggccgaccgagtgccggtcataagccccccccggtggggggcagctggtgtgcggatcgcggcgggagagaggcgcgtttgttacaggaacaactttttgacgtgaaggaagatagaaatttagccataaaattccatccaaaacttccactgaattggagtgaaagggaagcaatgcagaaatcagagggctctggaggtacacagttgaaaaacagagcaacaggtaactatgatcaaaggacatcatcaagcacacagttaaaacacaggaatgcagttcagggaagcaaatcctcattgtcaaccagttctccagagtctgcaagaaaacttcatcctagaccaagtgataaactgaaccctaaaacaattaatccgggtctgagagagactaagcatccatacacttttgtgtcaaaggagggttttagagaattacttttggtcaaaggtgctcctgaaaaagctattcctttgctacctagactgattcctgtgctaaaggcagctctggtccattcggatgatgaagtgtttgaaagaggattgaatgctctagttcagctaagtgtcgttgttggtccttctctaaacgaccatctgaagcatctgcttacaagcgt

SEQ ID NO: 163757 - DNA, 556 bp, Homo sapiens
  Payload ID: 12251
  Gene Symbol: PACRGL
  Gene Name: PARK2 co-regulated-like
  ENST ID: ENST00000511160
  CDS Start-End: 514-556
tttccccaaacgcaggcgctcggtggcggtagccgcggttgttggccgaccgagtgccggtcataagccccccccggtggggggcagctggtgtgcggatcgcggcgggagagaggcgcggtaggaacgggtccccggagccgtgaaccgcgggtacaggtgtcctgtctgcgctctctgccaagccggcttgcttcctgatctgttgctagggccgctggaccccgttgctaaggacccttgagatcgtgagcgcttggagtgtacccctcctttcctggggtagaggtctctttcagatacccaaatccacccatgccaaagtcctccagtctgctctccgtatccgtggttgggtcaaatctatagatgtggaacccgcatatacggagagccaactgtaatttgtcgttaagtttgttacaggaacaactttttgacgtgaaggaagatagaaatttagccataaaattccatccaaaacttccactgaattggagtgaaagggaagcaatgcagaaatcagagggctctggaggtacacagttgaaaaaca

SEQ ID NO: 163758 - DNA, 936 bp, Homo sapiens
  Payload ID: 12251
  Gene Symbol: PACRGL
  Gene Name: PARK2 co-regulated-like
  ENST ID: ENST00000506951
  CDS Start-End: 163-420
aaacgcaggcgctcggtggcggtagccgcggttgttggccgaccgagtgccggtcataagccccccccggtggggggcagctggtgtgcggatcgcggcgggagagaggcgcggtaggaacgggtccccggagccgtgaaccgcgggagtgaaagggaagcaatgcagaaatcagagggctctggaggtacacagttgaaaaacagagcaacaggtaactatgatcaaaggacatcatcaagcacacagttaaaacacaggaatgcagttcagggaagcaaatcctcattgtcaaccagttctccagagtctgcaagaaaacttcatcctagaccaagtgataaactgaaccctaaaacaattaatccgattggtacatggttcagtaaaacacagattacagtgggaatgtcctcctgaaagtctttcatttgatccacttcttattactttagctgagggtctgagagagactaagcatccatacacttttgtgtcaaaggagggttttagagaattacttttggtcaaaggtgctcctgaaaaagctattcctttgctacctagactgattcctgtgctaaaggcagctctggtccattcggatgatgaagtgtttgaaagaggattgaatgctctagttcagctaagtgtcgttgttggtccttctctaaacgaccatctgaagcatctgcttacaagcgttttggtatcagcatgatgctggcctcataaaatgagttagggaggattccctctttttctattgattggaatagtttcagaagaatggtacaagctcctccttgtacctctggtggaattcagctgtgaatccatctggtcctggactttttttggttgctttccaagagattaatggacaagaaattcaaagagccaatcaccagcgcattacaaaagctagagcaacat

SEQ ID NO: 163759 - DNA, 564 bp, Homo sapiens
  Payload ID: 12251
  Gene Symbol: PACRGL
  Gene Name: PARK2 co-regulated-like
  ENST ID: ENST00000513861
  CDS Start-End: 138-564
atttccccaaacgcaggcgctcggtggcggtagccgcggttgttggccgaccgagtgccggtcataagccccccccggtggggggcagctggtgtgcggatcgcggcgggagagaggcgcggagtgaaagggaagcaatgcagaaatcagagggctctggaggtacacagttgaaaaacagagcaacaggtaactatgatcaaaggacatcatcaagcacacagttaaaacacaggaatgcagttcagggaagcaaatcctcattgtcaaccagttctccagagtctgcaagaaaacttcatcctagaccaagtgataaactgaaccctaaaacaattaatccgggtctgagagagactaagcatccatacacttttgtgtcaaaggagggttttagagaattacttttggtcaaaggtgctcctgaaaaagctattcctttgctacctagactgattcctgtgctaaaggcagctctggtccattcggatgatgaagtgtttgaaagaggattgaatgctctagttcagctaagtgtcgttgttggtccttctctaaacgacc

SEQ ID NO: 163760 - DNA, 915 bp, Homo sapiens
  Payload ID: 12251
  Gene Symbol: PACRGL
  Gene Name: PARK2 co-regulated-like
  ENST ID: ENST00000513590
  CDS Start-End: 306-915
tttccccaaacgcaggcgctcggtggcggtagccgcggttgttggccgaccgagtgccggtcataagccccccccggtggggggcagctggtgtgcggatcgcggcgggagagaggcgcggtaggaacgggtccccggagccgtgaaccgcgggtacaggtgtcctgtctgcgctctctgccaagccggcttgcttcctgatctgttgctagggccgctggaccccgttgctaaggacccttgagatcgtgagcgcttggagtgtacccctcctttcctggggtagagggagtgaaagggaagcaatgcagaaatcagagggctctggaggtacacagttgaaaaacagagcaacaggtaactatgatcaaaggacatcatcaagcacacagttaaaacacaggaatgcagttcagggaagcaaatcctcattgtcaaccagttctccagagtctgcaagaaaacttcatcctagaccaagtgataaactgaaccctaaaacaattaatccgtttggtgaacagtcacgagtgccttctgcatttgcagctatttactctaaaggaggtattccttgcagattggtacatggttcagtaaaacacagattacagtgggaatgtcctcctgaaagtctttcatttgatccacttcttattactttagctgagggtctgagagagactaagcatccatacacttttgtgtcaaaggagggttttagagaattacttttggtcaaaggtgctcctgaaaaagctattcctttgctacctagactgattcctgtgctaaaggcagctctggtccattcggatgatgaagtgtttgaaagaggattgaatgctctagttcagctaagtgtcgttgttggtccttctctaaacgaccatctgaagcatctgcttacaagcg

SEQ ID NO: 163761 - DNA, 848 bp, Homo sapiens
  Payload ID: 12251
  Gene Symbol: PACRGL
  Gene Name: PARK2 co-regulated-like
  ENST ID: ENST00000503747
  CDS Start-End: 332-613
ggcgctcggtggcggtagccgcggttgttggccgaccgagtgccggtcataagccccccccggtggggggcagctggtgtgcggatcgcggcgggagagaggcgcggtaggaacgggtccccggagccgtgaaccgcgggtacaggtgtcctgtctgcgctctctgccaagccggcttgcttcctgatctgttgctagggccgctggaccccgttgctaaggacccttgagatcgtgagcgcttggagtgtacccctcctttcctggggtagagggtcagtcgagagtagccttcgttaaccttaattgaaactggagtgaaagggaagcaatgcagaaatcagagggctctggaggtacacagttgaaaaacagagcaacaggtaactatgatcaaaggacatcatcaagcacacagttaaaacacaggaatgcagttcagggaagcaaatcctcattgtcaaccagttctccagagtctgcaagaaaacttcatcctagaccaagtgataaactgaaccctaaaacaattaatccgtttggtgaacagtcacgagtgccttctgcatttgcagctatttactctaaaggaggtattccttgcagggtctgagagagactaagcatccatacacttttgtgtcaaaggagggttttagagaattacttttggtcaaaggtgctcctgaaaaagctattcctttgctacctagactgattcctgtgctaaaggcagctctggtccattcggatgatgaagtgtttgaaagaggattgaatgctctagttcagctaagtgtcgttgttggtccttctctaaacgaccatctgaagcatctgcttacaag

SEQ ID NO: 163762 - DNA, 580 bp, Homo sapiens
  Payload ID: 12251
  Gene Symbol: PACRGL
  Gene Name: PARK2 co-regulated-like
  ENST ID: ENST00000509469
  CDS Start-End: 171-580
atttccccaaacgcaggcgctcggtggcggtagccgcggttgttggccgaccgagtgccggtcataagccccccccggtggggggcagctggtgtgcggatcgcggcgggagagaggcgcggtaggaacgggtccccggagccgtgaaccgcgggagtgaaagggaagcaatgcagaaatcagagggctctggaggtacacagttgaaaaacagagcaacaggtaactatgatcaaaggacatcatcaagcacacagttaaaacacaggaatgcagttcagggaagcaaatcctcattgtcaaccagttctccagagtctgcaagaaaacttcatcctagaccaagtgataaactgaaccctaaaacaattaatccgtttggtgaacagtcacgagtgccttctgcatttgcagctatttactctaaaggaggtattccttgcagattggtacatggttcagtaaaacacagattacagtgggaatgtcctcctgaaagtctttcatttgatccacttcttattactttagctgagggtctgagagagactaagcatccatacacttttgtgtcaaagga

SEQ ID NO: 163763 - DNA, 625 bp, Homo sapiens
  Payload ID: 12251
  Gene Symbol: PACRGL
  Gene Name: PARK2 co-regulated-like
  ENST ID: ENST00000510700
  CDS Start-End: 579-625
gcgggccgcgcggagcctcatttccccaaacgcaggcgctcggtggcggtagccgcggttgttggccgaccgagtgccggtcataagccccccccggtggggggcagctggtgtgcggatcgcggcgggagagaggcgcggtaggaacgggtccccggagccgtgaaccgcgggtacaggtgtcctgtctgcgctctctgccaagccggcttgcttcctgatctgttgctagggccgctggaccccgttgctaaggacccttgagatcgtgagcgcttggagtgtacccctcctttcctggggtagagggtcagtcgagagtagccttcgttaaccttaattgaaactggttcgcttctccccatcactgcccctttacaccatcctctacatgttatttaatgaaaaaccacttgaaagggttaccaaggataagatttttaaagcttgctttcacaaacaactcatgctccaggcttgtcagtggcatgcttccagtctctttcagatacccaaatccacccatgccaaagtcctccagtctgctctccgtatccgtggttgggtcaaatctatagatgtggaacccgcatatacggagagccaactgtaatttgtcgttaag

SEQ ID NO: 163764 - DNA, 1373 bp, Homo sapiens
  Payload ID: 12251
  Gene Symbol: PACRGL
  Gene Name: PARK2 co-regulated-like
  Uniprot ID: Q8N7B6
  ENST ID: ENST00000467997
  CDS Start-End: 328-993
ctcggtggcggtagccgcggttgttggccgaccgagtgccggtcataagccccccccggtggggggcagctggtgtgcggatcgcggcgggagagaggcgcggtaggaacgggtccccggagccgtgaaccgcgggtacaggtgtcctgtctgcgctctctgccaagccggcttgcttcctgatctgttgctagggccgctggaccccgttgctaaggacccttgagatcgtgagcgcttggagtgtacccctcctttcctggggtagagggtcagtcgagagtagccttcgttaaccttaattgaaactggagtgaaagggaagcaatgcagaaatcagagggctctggaggtacacagttgaaaaacagagcaacaggtaactatgatcaaaggacatcatcaagcacacagttaaaacacaggaatgcagttcagggaagcaaatcctcattgtcaaccagttctccagagtctgcaagaaaacttcatcctagaccaagtgataaactgaaccctaaaacaattaatccgtttggtgaacagtcacgagtgccttctgcatttgcagctatttactctaaaggaggtattccttgcagattggtacatggttcagtaaaacacagattacagtgggaatgtcctcctgaaagtctttcatttgatccacttcttattactttagctgagggtctgagagagactaagcatccatacacttttgtgtcaaaggagggttttagagaattacttttggtcaaaggtgctcctgaaaaagctattcctttgctacctagactgattcctgtgctaaaggcagctctggtccattcggatgatgaagtgtttgaaagaggattgaatgctctagttcagctaagtgtcgttgttggtccttctctaaacgaccatctgaagcatctgcttacaagcgggagccttagcatcatcaaatctaaaattccaacatactgctccatatgctgttgaagaagggagccaacaaaaattgttttttctacctgttgacgtgtcaagcactaactgatttctgttgtgtgtctaggtgacgagttctaatttaatgcaattttctgctcaataaaagacaagataattatgtcctaaaaatcaatggtccttctgatggagtttggatttcttctggcaagcacttgaagacagtggaaagttttaaagaagaggagtgaagccactggctttgactgggtgagagaaagaagcaaaggcaaaggaatgtccagctaggcagaaaactggataaaatgacgaaaagagaaactgtctacaaaagcatctatggttctggttttactcaactgtgttcttaagcactcaataaatatttg

SEQ ID NO: 163765 - DNA, 981 bp, Homo sapiens
  Payload ID: 12251
  Gene Symbol: PACRGL
  Gene Name: PARK2 co-regulated-like
  ENST ID: ENST00000510051
  CDS Start-End: 247-981
attgcgcggcgcgaccaggttcaggggcgggccgcgcggagcctcatttccccaaacgcaggcgctcggtggcggtagccgcggttgttggccgaccgagtgccggtcataagccccccccggtggggggcagctggtgtgcggatcgcggcgggagagaggcgcgtctctttcagatacccaaatccacccatgccaaagtcctccagtctgctctccgtatccgtggttgggtcaaatctatagatgtggaacccgcatatacggagagccaactgtaatttgtcgttaagtttgttacaggaacaactttttgacgtgaaggaagatagaaatttagccataaaattccatccaaaacttccactgaattggagtgaaagggaagcaatgcagaaatcagagggctctggaggtacacagttgaaaaacagagcaacaggtaactatgatcaaaggacatcatcaagcacacagttaaaacacaggaatgcagttcagggaagcaaatcctcattgtcaaccagttctccagagtctgcaagaaaacttcatcctagaccaagtgataaactgaaccctaaaacaattaatccgtttggtgaacagtcacgagtgccttctgcatttgcagctatttactctaaaggaggtattccttgcagattggtacatggttcagtaaaacacagattacagtgggaatgtcctcctgaaagtctttcatttgatccacttcttattactttagctgagggtctgagagagactaagcatccatacacttttgtgtcaaaggagggttttagagaattacttttggtcaaaggtgctcctgaaaaagctattcctttgctacctagactgattcctgtgctaaaggcagctctggtccattcggatgatgaagtgtttgaaagaggattgaatgctctagttcagctaagtgtcgttgttggtccttctctaaacgaccatctg

SEQ ID NO: 163766 - DNA, 577 bp, Homo sapiens
  Payload ID: 12251
  Gene Symbol: PACRGL
  Gene Name: PARK2 co-regulated-like
  ENST ID: ENST00000505160
  CDS Start-End: 561-577
aaacgcaggcgctcggtggcggtagccgcggttgttggccgaccgagtgccggtcataagccccccccggtggggggcagctggtgtgcggatcgcggcgggagagaggcgcggtaggaacgggtccccggagccgtgaaccgcgggtacaggtgtcctgtctgcgctctctgccaagccggcttgcttcctgatctgttgctagggccgctggaccccgttgctaaggacccttgagatcgtgagcgcttggagtgtacccctcctttcctggggtagagggtcagtcgagagtagccttcgttaaccttaattgaaactgttcttacaggttcgcttctccccatcactgcccctttacaccatcctctacatgttatttaatgaaaaaccacttgaaagggttaccaaggataagatttttaaagcttgctttcacaaacaactcatgctccaggcttgtcagtggcatgcttccagtctctttcagatacccaaatccacccatgccaaagtcctccagtctgctctccgtatccgtggttgggtcaaatctatagatgtggaacccgcatat

SEQ ID NO: 163767 - DNA, 1233 bp, Homo sapiens
  Payload ID: 12251
  Gene Symbol: PACRGL
  Gene Name: PARK2 co-regulated-like
  Uniprot ID: Q8N7B6
  ENST ID: ENST00000506702
  CDS Start-End: 176-841
tttccccaaacgcaggcgctcggtggcggtagccgcggttgttggccgaccgagtgccggtcataagccccccccggtggggggcagctggtgtgcggatcgcggcgggagagaggcgcggtaggaacgggtccccggagccgtgaaccgcgggtacaggagtgaaagggaagcaatgcagaaatcagagggctctggaggtacacagttgaaaaacagagcaacaggtaactatgatcaaaggacatcatcaagcacacagttaaaacacaggaatgcagttcagggaagcaaatcctcattgtcaaccagttctccagagtctgcaagaaaacttcatcctagaccaagtgataaactgaaccctaaaacaattaatccgtttggtgaacagtcacgagtgccttctgcatttgcagctatttactctaaaggaggtattccttgcagattggtacatggttcagtaaaacacagattacagtgggaatgtcctcctgaaagtctttcatttgatccacttcttattactttagctgagggtctgagagagactaagcatccatacacttttgtgtcaaaggagggttttagagaattacttttggtcaaaggtgctcctgaaaaagctattcctttgctacctagactgattcctgtgctaaaggcagctctggtccattcggatgatgaagtgtttgaaagaggattgaatgctctagttcagctaagtgtcgttgttggtccttctctaaacgaccatctgaagcatctgcttacaagcgggagccttagcatcatcaaatctaaaattccaacatactgctccatatgctgttgaagaagggagccaacaaaaattgttttttctacctgttgacgtgtcaagcactaactgatttctgttgtgtgtctaggtgacgagttctaatttaatgcaattttctgctcaataaaagacaagataattatgtcctaaaaatcaatggtccttctgatggagtttggatttcttctggcaagcacttgaagacagtggaaagttttaaagaagaggagtgaagccactggctttgactgggtgagagaaagaagcaaaggcaaaggaatgtccagctaggcagaaaactggataaaatgacgaaaagagaaactgtctacaaaagcatctatggttctggttttactcaactgtgttcttaagcactcaataaatatttgttaaaagagtga

SEQ ID NO: 163768 - DNA, 1582 bp, Homo sapiens
  Payload ID: 12251
  Gene Symbol: PACRGL
  Gene Name: PARK2 co-regulated-like
  Uniprot ID: Q8N7B6
  ENST ID: ENST00000503585
  CDS Start-End: 392-1138
attgcgcggcgcgaccaggttcaggggcgggccgcgcggagcctcatttccccaaacgcaggcgctcggtggcggtagccgcggttgttggccgaccgagtgccggtcataagccccccccggtggggggcagctggtgtgcggatcgcggcgggagagaggcgcggtaggaacgggtccccggagccgtgaaccgcgggtacaggtgtcctgtctgcgctctctgccaagccggcttgcttcctgatctgttgctagggccgctggaccccgttgctaaggacccttgagatcgtgagcgcttggagtgtacccctcctttcctggggtagagggtcagtcgagagtagccttcgttaaccttaattgaaactggagtgaaagggaagcaatgcagaaatcagagggctctggaggtacacagttgaaaaacagagcaacaggtaactatgatcaaaggacatcatcaagcacacagttaaaacacaggaatgcagttcagggaagcaaatcctcattgtcaaccagttctccagagtctgcaagaaaacttcatcctagaccaagtgataaactgaaccctaaaacaattaatccgtttggtgaacagtcacgagtgccttctgcatttgcagctatttactctaaaggaggtattccttgcagattggtacatggttcagtaaaacacagattacagtgggaatgtcctcctgaaagtctttcatttgatccacttcttattactttagctgagggtctgagagagactaagcatccatacacttttgtgtcaaaggagggttttagagaattacttttggtcaaaggtgctcctgaaaaagctattcctttgctacctagactgattcctgtgctaaaggcagctctggtccattcggatgatgaagtgtttgaaagaggattgaatgctctagttcagctaagtgtcgttgttggtccttctctaaacgaccatctgaagcatctgcttacaagcctttccaagagattaatggacaagaaattcaaagagccaatcaccagcgcattacaaaagctagagcaacatggtggaagtgggagccttagcatcatcaaatctaaaattccaacatactgctccatatgctgttgaagaagggagccaacaaaaattgttttttctacctgttgacgtgtcaagcactaactgtgggtactcatttattttattcttttgtaaatcacagccaccattcattatttactaggttaagatgaatagacactgaatcaaagttattcatcaacaaaaaagaacagttactaatggaaagttattaaaataagttctataagagtacaattttgaggtttattttttgtatttttattatttgtgcgaagaaccattattgagtttgcaagataagatgtatttgtattttctagtgtctttttatttataacaacacttttttggcaatcagtttgtagctgtgcccttatttttatagatagtttgccatttcttgggtttaatgtttaacaaggctatagaagtttaaaatagtggacaaatgtttgtgaatacactttt

SEQ ID NO: 163769 - DNA, 1394 bp, Homo sapiens
  Payload ID: 12251
  Gene Symbol: PACRGL
  Gene Name: PARK2 co-regulated-like
  Uniprot ID: Q8N7B6
  ENST ID: ENST00000471979
  CDS Start-End: 249-995
aggcttcagattggaagaatagattacctcctggatagttaagaggagattggaattagctctcaatgagaacctggaatgaaaaacacatgagcaatctacaagaatgaaggataaatgactgaggaccagaaagaccaaagtacgtatatcctagcagatgacaacagaggaccagatgccacactcctccaagcctcatcctctcaacacaattccaaggagagaaagggagtgaaagggaagcaatgcagaaatcagagggctctggaggtacacagttgaaaaacagagcaacaggtaactatgatcaaaggacatcatcaagcacacagttaaaacacaggaatgcagttcagggaagcaaatcctcattgtcaaccagttctccagagtctgcaagaaaacttcatcctagaccaagtgataaactgaaccctaaaacaattaatccgtttggtgaacagtcacgagtgccttctgcatttgcagctatttactctaaaggaggtattccttgcagattggtacatggttcagtaaaacacagattacagtgggaatgtcctcctgaaagtctttcatttgatccacttcttattactttagctgagggtctgagagagactaagcatccatacacttttgtgtcaaaggagggttttagagaattacttttggtcaaaggtgctcctgaaaaagctattcctttgctacctagactgattcctgtgctaaaggcagctctggtccattcggatgatgaagtgtttgaaagaggattgaatgctctagttcagctaagtgtcgttgttggtccttctctaaacgaccatctgaagcatctgcttacaagcctttccaagagattaatggacaagaaattcaaagagccaatcaccagcgcattacaaaagctagagcaacatggtggaagtgggagccttagcatcatcaaatctaaaattccaacatactgctccatatgctgttgaagaagggagccaacaaaaattgttttttctacctgttgacgtgtcaagcactaactgatttctgttgtgtgtctaggtgacgagttctaatttaatgcaattttctgctcaataaaagacaagataattatgtcctaaaaatcaatggtccttctgatggagtttggatttcttctggcaagcacttgaagacagtggaaagttttaaagaagaggagtgaagccactggctttgactgggtgagagaaagaagcaaaggcaaaggaatgtccagctaggcagaaaactggataaaatgacgaaaagagaaactgtctacaaaagcatctatggttctggttttactcaactgtgttcttaagcactcaataaatatttgttaaaagagtgattaactg

SEQ ID NO: 163770 - DNA, 681 bp, Homo sapiens
  Payload ID: 12251
  Gene Symbol: PACRGL
  Gene Name: PARK2 co-regulated-like
  ENST ID: ENST00000506745
  CDS Start-End: 428-681
atttccccaaacgcaggcgctcggtggcggtagccgcggttgttggccgaccgagtgccggtcataagccccccccggtggggggcagctggtgtgcggatcgcggcgggagagaggcgcggtaggaacgggtccccggagccgtgaaccgcgggtacaggtgtcctgtctgcgctctctgccaagccggcttgcttcctgatctgttgctagggccgctggaccccgttgctaaggacccttgagatcgtgagcgcttggagtgtacccctcctttcctggggtagagggtcagtcgagagtagccttcgttaaccttaattgaaactgtttgttacaggaacaactttttgacgtgaaggaagatagaaatttagccataaaattccatccaaaacttccactgaattggagtgaaagggaagcaatgcagaaatcagagggctctggaggtacacagttgaaaaacagagcaacaggtaactatgatcaaaggacatcatcaagcacacagttaaaacacaggaatgcagttcagggaagcaaatcctcattgtcaaccagttctccagagtctgcaagaaaacttcatcctagaccaagtgataaactgaaccctaaaacaattaatccgtttggtgaacagtcacgagtgccttctgcatttgcagctatttactc

SEQ ID NO: 163771 - DNA, 580 bp, Homo sapiens
  Payload ID: 12251
  Gene Symbol: PACRGL
  Gene Name: PARK2 co-regulated-like
  ENST ID: ENST00000514292
  CDS Start-End: 265-580
tttccccaaacgcaggcgctcggtggcggtagccgcggttgttggccgaccgagtgccggtcataagccccccccggtggggggcagctggtgtgcggatcgcggcgggagagaggcgcggtaggaacgggtccccggagccgtgaaccgcgggtacaggtgtcctgtctgcgctctctgccaagccggcttgcttcctgatctgttgctagggccgctggaccccgttgctaaggacccttgagatcgagtgaaagggaagcaatgcagaaatcagagggctctggaggtacacagttgaaaaacagagcaacaggtaactatgatcaaaggacatcatcaagcacacagttaaaacacaggaatgcagttcagggaagcaaatcctcattgtcaaccagttctccagagtctgcaagaaaacttcatcctagaccaagtgataaactgaaccctaaaacaattaatccggtccattcggatgatgaagtgtttgaaagaggattgaatgctctagttcagctaagtgtcgttgttggtccttctctaaacgaccatctgaagcatctgcttacaagcg

SEQ ID NO: 163772 - DNA, 810 bp, Homo sapiens
  Payload ID: 12251
  Gene Symbol: PACRGL
  Gene Name: PARK2 co-regulated-like
  ENST ID: ENST00000502938
  CDS Start-End: 346-609
tttccccaaacgcaggcgctcggtggcggtagccgcggttgttggccgaccgagtgccggtcataagccccccccggtggggggcagctggtgtgcggatcgcggcgggagagaggcgcggtaggaacgggtccccggagccgtgaaccgcgggtacaggtgtcctgtctgcgctctctgccaagccggcttgcttcctgatctgttgctagggccgctggaccccgttgctaaggacccttgagatcgtgagcgcttggagtgtacccctcctttcctggggtagagggtcagtcgagagtagccttcgttaaccttaattgaaactggagtgaaagggaagcaatgcagaaatcagagggctctggaggtacacagttgaaaaacagagcaacaggtaactatgatcaaaggacatcatcaagcacacagttaaaacacaggaatgcagttcagggaagcaaatcctcattgtcaaccagttctccagagtctgcaagaaaacttcatcctagaccaagtgataaactgaaccctaaaacaattaatccggggagccttagcatcatcaaatctaaaattccaacatactgctccatatgctgttgaagaagggagccaacaaaaattgttttttctacctgttgacgtgtcaagcactaactgtgggtactcatttattttattcttttgtaaatcacagccaccattcattatttactaggttaagatgaatagacactgaatcaaagttattcatcaacaaaaaagaacagttactaatggaaagttattaaaataagttctata

SEQ ID NO: 163773 - DNA, 987 bp, Homo sapiens
  Payload ID: 12251
  Gene Symbol: PACRGL
  Gene Name: PARK2 co-regulated-like
  ENST ID: ENST00000508952
  CDS Start-End: 171-452
atttccccaaacgcaggcgctcggtggcggtagccgcggttgttggccgaccgagtgccggtcataagccccccccggtggggggcagctggtgtgcggatcgcggcgggagagaggcgcggtaggaacgggtccccggagccgtgaaccgcgggagtgaaagggaagcaatgcagaaatcagagggctctggaggtacacagttgaaaaacagagcaacaggtaactatgatcaaaggacatcatcaagcacacagttaaaacacaggaatgcagttcagggaagcaaatcctcattgtcaaccagttctccagagtctgcaagaaaacttcatcctagaccaagtgataaactgaaccctaaaacaattaatccgtttggtgaacagtcacgagtgccttctgcatttgcagctatttactctaaaggaggtattccttgcagggtctgagagagactaagcatccatacacttttgtgtcaaaggagggttttagagaattacttttggtcaaaggtgctcctgaaaaagctattcctttgctacctagactgattcctgtgctaaaggcagctctggtccattcggatgatgaagtgtttgaaagaggattgaatgctctagttcagctaagtgtcgttgttggtccttctctaaacgaccatctgaagcatctgcttacaagcctttccaagagattaatggacaagaaattcaaagagccaatcaccagcgcattacaaaagctagagcaacatggtggaagtgggagccttagcatcatcaaatctaaaattccaacatactgctccatatgctgttgaagaagggagccaacaaaaattgttttttctacctgttgacgtgtcaagcactaactgtgggtactcatttattttattcttttgtaaatcacagccaccattcattatttactaggttaagatgaatagacactgaatcaaagttattcatcaacaaaaaa

SEQ ID NO: 163774 - DNA, 1034 bp, Homo sapiens
  Payload ID: 12251
  Gene Symbol: PACRGL
  Gene Name: PARK2 co-regulated-like
  Uniprot ID: Q8N7B6
  ENST ID: ENST00000502374
  CDS Start-End: 138-740
atttccccaaacgcaggcgctcggtggcggtagccgcggttgttggccgaccgagtgccggtcataagccccccccggtggggggcagctggtgtgcggatcgcggcgggagagaggcgcggagtgaaagggaagcaatgcagaaatcagagggctctggaggtacacagttgaaaaacagagcaacaggtaactatgatcaaaggacatcatcaagcacacagttaaaacacaggaatgcagttcagggaagcaaatcctcattgtcaaccagttctccagagtctgcaagaaaacttcatcctagaccaagtgataaactgaaccctaaaacaattaatccgggtctgagagagactaagcatccatacacttttgtgtcaaaggagggttttagagaattacttttggtcaaaggtgctcctgaaaaagctattcctttgctacctagactgattcctgtgctaaaggcagctctggtccattcggatgatgaagtgtttgaaagaggattgaatgctctagttcagctaagtgtcgttgttggtccttctctaaacgaccatctgaagcatctgcttacaagcgaccctgtgcagctcatgaggttcccaagaccactcttaggtttgatgatttgccagaaggatccatggaactcaggaaagctgttactggctgttatggtttcttacaacacacaaaaaataaagattaaaatcagcaaaggggagccttagcatcatcaaatctaaaattccaacatactgctccatatgctgttgaagaagggagccaacaaaaattgttttttctacctgttgacgtgtcaagcactaactgtgggtactcatttattttattcttttgtaaatcacagccaccattcattatttactaggttaagatgaatagacactgaatcaaagttattcatcaacaaaaaagaacagttactaatggaaagttattaaaataagttctataagagtacaattttgaggtttattttttgtatttttattatttgtgcg

SEQ ID NO: 163775 - DNA, 1142 bp, Homo sapiens
  Payload ID: 12251
  Gene Symbol: PACRGL
  Gene Name: PARK2 co-regulated-like
  Uniprot ID: Q8N7B6
  ENST ID: ENST00000507634
  CDS Start-End: 124-789
aggcgctcggtggcggtagccgcggttgttggccgaccgagtgccggtcataagccccccccggtggggggcagctggtgtgcggatcgcggcgggagagaggcgcggagtgaaagggaagcaatgcagaaatcagagggctctggaggtacacagttgaaaaacagagcaacaggtaactatgatcaaaggacatcatcaagcacacagttaaaacacaggaatgcagttcagggaagcaaatcctcattgtcaaccagttctccagagtctgcaagaaaacttcatcctagaccaagtgataaactgaaccctaaaacaattaatccgtttggtgaacagtcacgagtgccttctgcatttgcagctatttactctaaaggaggtattccttgcagattggtacatggttcagtaaaacacagattacagtgggaatgtcctcctgaaagtctttcatttgatccacttcttattactttagctgagggtctgagagagactaagcatccatacacttttgtgtcaaaggagggttttagagaattacttttggtcaaaggtgctcctgaaaaagctattcctttgctacctagactgattcctgtgctaaaggcagctctggtccattcggatgatgaagtgtttgaaagaggattgaatgctctagttcagctaagtgtcgttgttggtccttctctaaacgaccatctgaagcatctgcttacaagcgggagccttagcatcatcaaatctaaaattccaacatactgctccatatgctgttgaagaagggagccaacaaaaattgttttttctacctgttgacgtgtcaagcactaactgatttctgttgtgtgtctaggtgacgagttctaatttaatgcaattttctgctcaataaaagacaagataattatgtcctaaaaatcaatggtccttctgatggagtttggatttcttctggcaagcacttgaagacagtggaaagttttaaagaagaggagtgaagccactggctttgactgggtgagagaaagaagcaaaggcaaaggaatgtccagctaggcagaaaactggataaaatgacgaaaagagaaactgtctacaaaagcatctatggttctggttttactcaactg

SEQ ID NO: 163776 - DNA, 1773 bp, Homo sapiens
  Payload ID: 12251
  Gene Symbol: PACRGL
  Gene Name: PARK2 co-regulated-like
  ENST ID: ENST00000513459
  CDS Start-End: 289-795
gctcggtggcggtagccgcggttgttggccgaccgagtgccggtcataagccccccccggtggggggcagctggtgtgcggatcgcggcgggagagaggcgcggtaggaacgggtccccggagccgtgaaccgcgggtacaggtgtcctgtctgcgctctctgccaagccggcttgcttcctgatctgttgctagggccgctggaccccgttgctaaggacccttgagatcgtgagcgcttggagtgtacccctcctttcctggggtagagggagtgaaagggaagcaatgcagaaatcagagggctctggaggtacacagttgaaaaacagagcaacaggtaactatgatcaaaggacatcatcaagcacacagttaaaacacaggaatgcagttcagggaagcaaatcctcattgtcaaccagttctccagagtctgcaagaaaacttcatcctagaccaagtgataaactgaaccctaaaacaattaatccgggtctgagagagactaagcatccatacacttttgtgtcaaaggagggttttagagaattacttttggtcaaaggtgctcctgaaaaagctattcctttgctacctagactgattcctgtgctaaaggcagctctggtccattcggatgatgaagtgtttgaaagaggattgaatgctctagttcagctaagtgtcgttgttggtccttctctaaacgaccatctgaagcatctgcttacaagcgggagccttagcatcatcaaatctaaaattccaacatactgctccatatgctgttgaagaagggagccaacaaaaattgttttttctacctgttgacgtgtcaagcactaactgtgggtactcatttattttattcttttgtaaatcacagccaccattcattatttactaggttaagatgaatagacactgaatcaaagttattcatcaacaaaaaagaacagttactaatggaaagttattaaaataagttctataagagtacaattttgaggtttattttttgtatttttattatttgtgcgaagaaccattattgagtttgcaagataagatgtatttgtattttctagtgtctttttatttataacaacacttttttggcaatcagtttgtagctgtgcccttatttttatagatagtttgccatttcttgggtttaatgtttaacaaggctatagaagtttaaaatagtggacaaatgtttgtgaatacacttttaaaaaattgttttaaaagagaaaagcggtcttgctttgttgcccagactggagtgcagtggcataatcatagctcaccgcaagcctcaaatttttgtgctcagatgatccttttcatctcagcctcctgattagctgggactataggcgtgtgccaccatgcccagctaattttgaaatttgcttgtagagatgggatctcactctgttgtccaggctggtctcagaattctggtgagtgatcctcccacagtggacttccaaagtgctgggattacaggtgtgagccaccatgcctggccccatgaatacactactaatattatttgtaaatatgtattttataatgtacaatgcttggaaaattttcagagtattctagtttaaaaaattttttctaattctgtaaattctattacaagtatgttgtttattacaactcattacaactacctaaattttaggtgttaactgtatttaagtaaatgtgttatttttgcatttcatagccagaaaatactgatgttcacttaaa

SEQ ID NO: 163777 - DNA, 223 bp, Homo sapiens
  Payload ID: 12251
  Gene Symbol: PACRGL
  Gene Name: PARK2 co-regulated-like
  ENST ID: ENST00000506457
  CDS Start-End: 1-205
gtttggtgaacagtcacgagtgccttctgcatttgcagctatttactctaaaggaggtattccttgcagattggtacatggttcagtaaaacacagattacagtgggaatgtcctcctgaaagtctttcatttgatccacttcttattactttagctgaggtaaatatgccatctcttgaatatttatcagaaaataaacattaaaaattgcattaaatgcta

SEQ ID NO: 163778 - DNA, 860 bp, Homo sapiens
  Payload ID: 12251
  Gene Symbol: PACRGL
  Gene Name: PARK2 co-regulated-like
  ENST ID: ENST00000514485
  CDS Start-End: 494-860
ccaggttcaggggcgggccgcgcggagcctcatttccccaaacgcaggcgctcggtggcggtagccgcggttgttggccgaccgagtgccggtcataagccccccccggtggggggcagctggtgtgcggatcgcggcgggagagaggcgcgggccgctggaccccgttgctaaggacccttgagatcgtgagcgcttggagtgtacccctcctttcctggggtagagggtcagtcgagagtagccttcgttaaccttaattgaaactgtctctttcagatacccaaatccacccatgccaaagtcctccagtctgctctccgtatccgtggttgggtcaaatctatagatgtggaacccgcatatacggagagccaactgtaatttgtcgttaagtttgttacaggaacaactttttgacgtgaaggaagatagaaatttagccataaaattccatccaaaacttccactgaattggagtgaaagggaagcaatgcagaaatcagagggctctggaggtacacagttgaaaaacagagcaacaggtaactatgatcaaaggacatcatcaagcacacagttaaaacacaggaatgcagttcagggaagcaaatcctcattgtcaaccagttctccagagtctgcaagaaaacttcatcctagaccaagtgataaactgaaccctaaaacaattaatccgtttggtgaacagtcacgagtgccttctgcatttgcagctatttactctaaaggaggtattccttgcagattggtacatggttcagtaaaacacagattacagtgggaatgtcctcctgaaagtctttcatttgatccacttcttattactttagctgagg

SEQ ID NO: 163779 - DNA, 543 bp, Homo sapiens
  Payload ID: 12251
  Gene Symbol: PACRGL
  Gene Name: PARK2 co-regulated-like
  ENST ID: ENST00000515339
  CDS Start-End: 307-543
atttccccaaacgcaggcgctcggtggcggtagccgcggttgttggccgaccgagtgccggtcataagccccccccggtggggggcagctggtgtgcggatcgcggcgggagagaggcgcggtaggaacgggtccccggagccgtgaaccgcgggtacaggtgtcctgtctgcgctctctgccaagccggcttgcttcctgatctgttgctagggccgctggaccccgttgctaaggacccttgagatcgtgagcgcttggagtgtacccctcctttcctggggtagagggagtgaaagggaagcaatgcagaaatcagagggctctggaggtacacagttgaaaaacagagcaacaggtaactatgatcaaaggacatcatcaagcacacagttaaaacacaggaatgcagttcagggaagcaaatcctcattgtcaaccagttctccagagtctgcaagaaaacttcatcctagaccaagtgataaactgaaccctaaaacaattaatccggtccattcggatgatgaagtgtttgaaaga

SEQ ID NO: 163780 - DNA, 543 bp, Homo sapiens
  Payload ID: 12251
  Gene Symbol: PACRGL
  Gene Name: PARK2 co-regulated-like
  ENST ID: ENST00000509625
  CDS Start-End: 441-543
ttccccaaacgcaggcgctcggtggcggtagccgcggttgttggccgaccgagtgccggtcataagccccccccggtggggggcagctggtgtgcggatcgcggcgggagagaggcgcggtaggaacgggtccccggagccgtgaaccgcgggtacaggtgtcctgtctgcgctctctgccaagccggcttgcttcctgatctgttgctagggccgctggaccccgttgctaaggacccttgagatcgtgagcgcttggagtgtacccctcctttcctggggtagagggtcagtcgagagtagccttcgttaaccttaattgaaactgaattggctccaggactccctccctccccccagtctctttcagatacccaaatccacccatgccaaagtcctccagtctgctctccgtatccgtggttgggtcaaatctatagatgtggaacccgcatatacggagagccaactgtaatttgtcgttaagtttgttacaggaacaactttttgacgtgaaggaagatagaaatttagccataaaat

SEQ ID NO: 163781 - DNA, 1276 bp, Homo sapiens
  Payload ID: 12252
  Gene Symbol: PARK2
  Gene Name: parkin RBR E3 ubiquitin protein ligase
  Uniprot ID: O60260
  ENST ID: ENST00000338468
  CDS Start-End: 452-1276
atgatagtgtttgtcaggttcaactccagccatggtttcccagtggaggtcgattctgacaccagcatcttccagctcaaggaggtggttgctaagcgacagggggttccggctgaccagttgcgtgtgattttcgcagggaaggagctgaggaatgactggactgtgcagaattgtgacctggatcagcagagcattgttcacattgtgcagagaccgtggagaaaaggtcaagaaatgaatgcaactggaggcgacgaccccagaaacgcggcgggaggctgtgagcgggagccccagagcttgactcgggtggacctcagcagctcagtcctcccaggagactctgtggggctggctgtcattctgcacactgacagcaggaaggactcaccaccagctggaagtccagggtccatcttgctgggatgatgttttaattccaaaccggatgagtggtgaatgccaatccccacactgccctgggactagtgcagaatttttctttaaatgtggagcacaccccacctctgacaaggaaacatcagtagctttgcacctgatcgcaacaaatagtcggaacatcacttgcattacgtgcacagacgtcaggagccccgtcctggttttccagtgcaactcccgccacgtgatttgcttagactgtttccacttatactgtgtgacaagactcaatgatcggcagtttgttcacgaccctcaacttggctactccctgccttgtgtggctggctgtcccaactccttgattaaagagctccatcacttcaggattctgggagaagagcagtacaaccggtaccagcagtatggtgcagaggagtgtgtcctgcagatggggggcgtgttatgcccccgccctggctgtggagcggggctgctgccggagcctgaccagaggaaagtcacctgcgaagggggcaatggcctgggctgtgggtttgccttctgccgggaatgtaaagaagcgtaccatgaaggggagtgcagtgccgtatttgaagcctcaggaacaactactcaggcctacagagtcgatgaaagagccgccgagcaggctcgttgggaagcagcctccaaagaaaccatcaagaaaaccaccaagccctgtccccgctgccatgtaccagtggaaaaaaatggaggctgcatgcacatgaagtgtccgcagccccagtgcaggctcgagtggtgctggaactgtggctgcgagtggaaccgcgtctgcatgggggaccactggttcgacgtgtag

SEQ ID NO: 163782 - DNA, 1505 bp, Homo sapiens
  Payload ID: 12252
  Gene Symbol: PARK2
  Gene Name: parkin RBR E3 ubiquitin protein ligase
  ENST ID: ENST00000366892
  CDS Start-End: 97-1203
gatttaacccaggagagccgctggtgggaggcgcggctggcgccgctgcgcgcatgggcctgttcctggcccgcagccgccacctacccagtgaccatgatagtgtttgtcaggttcaactccagccatggtttcccagtggaggtcgattctgacaccagcatcttccagctcaaggaggtggttgctaagcgacagggggttccggctgaccagttgcgtgtgattttcgcagggaaggagctgaggaatgactggactgtgcagaattgtgacctggatcagcagagcattgttcacattgtgcagagaccgtggagaaaaggtcaagaaatgaatgcaactggaggcgacgaccccagaaacgcggcgggaggctgtgagcgggagccccagagcttgactcgggtggacctcagcagctcagtcctcccaggagactctgtggggctggctgtcattctgcacactgacagcaggaaggactcaccaccagctggaagtccagcaggtagatcaatctacaacagcttttatgtgtattgcaaaggcccctgtcaaagagtgcagccgggaaaactcagggtacagtgcagcacctgcaggcaggcaacgctcaccttgacccagggtccatcttgctgggatgatgttttaattccaaaccggatgagtggtgaatgccaatccccacactgccctgggactagtgcagaatttttctttaaatgtggagcacaccccacctctgacaaggaaacatcagtagctttgcacctgatcgcaacaaatagtcggaacatcacttgcattacgtgcacagacgtcaggagccccgtcctggttttccagtgcaactcccgccacgtgatttgcttagactgtttccacttatactgtgtgacaagactcaatgatcggcagtttgttcacgaccctcaacttggctactccctgccttgtgtggctggctgtcccaactccttgattaaagagctccatcacttcaggattctgggagaagagcagtacaaccggtaccagcagtatggtgcagaggagtgtgtcctgcagatggggggcgtgttatgcccccgccctggctgtggagcggggctgctgccggagcctgaccagaggaaagtcacctgcgaagggggcaatggcctgggctgtgggtatggacaacgaagaacaaaataagctgcctcagggagaagtgagtgcctcattcaatacatcgttcaaggaaaagtcattggtagcaaagctatagaagaattacagagttccagatgtggaaaaagccctagacgtcattaactccagtgattatcaggatgtggttcacagatttattgtaagatgcctgtgaattcacccgtgcttaatttttttttccctcaattatcaagatagaaaaagtacaactcttaccatgtgggtatgcaagaaatgttagctgttacaaaaaaaatcgcgtataaaaaagttgaaaaccaaat

SEQ ID NO: 163783 - DNA, 1157 bp, Homo sapiens
  Payload ID: 12252
  Gene Symbol: PARK2
  Gene Name: parkin RBR E3 ubiquitin protein ligase
  Uniprot ID: O60260
  ENST ID: ENST00000366894
  CDS Start-End: 333-1157
atgatagtgtttgtcaggttcaactccagccatggtttcccagtggaggtcgattctgacaccagcatcttccagctcaaggaggtggttgctaagcgacagggggttccggctgaccagttgcgtgtgattttcgcagggaaggagctgaggaatgactggactgtgcagcaggtagatcaatctacaacagcttttatgtgtattgcaaaggcccctgtcaaagagtgcagccgggaaaactcagggtacagtgcagcacctgcaggcaggcaacgctcaccttgacccagggtccatcttgctgggatgatgttttaattccaaaccggatgagtggtgaatgccaatccccacactgccctgggactagtgcagaatttttctttaaatgtggagcacaccccacctctgacaaggaaacatcagtagctttgcacctgatcgcaacaaatagtcggaacatcacttgcattacgtgcacagacgtcaggagccccgtcctggttttccagtgcaactcccgccacgtgatttgcttagactgtttccacttatactgtgtgacaagactcaatgatcggcagtttgttcacgaccctcaacttggctactccctgccttgtgtggctggctgtcccaactccttgattaaagagctccatcacttcaggattctgggagaagagcagtacaaccggtaccagcagtatggtgcagaggagtgtgtcctgcagatggggggcgtgttatgcccccgccctggctgtggagcggggctgctgccggagcctgaccagaggaaagtcacctgcgaagggggcaatggcctgggctgtgggtttgccttctgccgggaatgtaaagaagcgtaccatgaaggggagtgcagtgccgtatttgaagcctcaggaacaactactcaggcctacagagtcgatgaaagagccgccgagcaggctcgttgggaagcagcctccaaagaaaccatcaagaaaaccaccaagccctgtccccgctgccatgtaccagtggaaaaaaatggaggctgcatgcacatgaagtgtccgcagccccagtgcaggctcgagtggtgctggaactgtggctgcgagtggaaccgcgtctgcatgggggaccactggttcgacgtgtag

SEQ ID NO: 163784 - DNA, 2514 bp, Homo sapiens
  Payload ID: 12252
  Gene Symbol: PARK2
  Gene Name: parkin RBR E3 ubiquitin protein ligase
  Uniprot ID: O60260
  ENST ID: ENST00000366896
  CDS Start-End: 104-1054
cctggaggatttaacccaggagagccgctggtgggaggcgcggctggcgccgctgcgcgcatgggcctgttcctggcccgcagccgccacctacccagtgaccatgatagtgtttgtcaggttcaactccagccatggtttcccagtggaggtcgattctgacaccagcatcttccagctcaaggaggtggttgctaagcgacagggggttccggctgaccagttgcgtgtgattttcgcagggaaggagctgaggaatgactggactgtgcaggaatttttctttaaatgtggagcacaccccacctctgacaaggaaacatcagtagctttgcacctgatcgcaacaaatagtcggaacatcacttgcattacgtgcacagacgtcaggagccccgtcctggttttccagtgcaactcccgccacgtgatttgcttagactgtttccacttatactgtgtgacaagactcaatgatcggcagtttgttcacgaccctcaacttggctactccctgccttgtgtggctggctgtcccaactccttgattaaagagctccatcacttcaggattctgggagaagagcagtacaaccggtaccagcagtatggtgcagaggagtgtgtcctgcagatggggggcgtgttatgcccccgccctggctgtggagcggggctgctgccggagcctgaccagaggaaagtcacctgcgaagggggcaatggcctgggctgtgggtttgccttctgccgggaatgtaaagaagcgtaccatgaaggggagtgcagtgccgtatttgaagcctcaggaacaactactcaggcctacagagtcgatgaaagagccgccgagcaggctcgttgggaagcagcctccaaagaaaccatcaagaaaaccaccaagccctgtccccgctgccatgtaccagtggaaaaaaatggaggctgcatgcacatgaagtgtccgcagccccagtgcaggctcgagtggtgctggaactgtggctgcgagtggaaccgcgtctgcatgggggaccactggttcgacgtgtagccagggcggccgggcgccccatcgccacatcctgggggagcatacccagtgtctaccttcattttctaattctcttttcaaacacacacacacacgcgcgcgcgcgcacacacactcttcaagtttttttcaaagtccaactacagccaaattgcagaagaaactcctggatccctttcactatgtccatgaaaaacagcagagtaaaattacagaagaagctcctgaatccctttcagtttgtccacacaagacagcagagccatctgcgacaccaccaacaggcgttctcagcctccggatgacacaaataccagagcacagattcaagtgcaatccatgtatctgtatgggtcattctcacctgaattcgagacaggcagaatcagtagctggagagagagttctcacatttaatatcctgccttttaccttcagtaaacaccatgaagatgccattgacaaggtgtttctctgtaaaatgaactgcagtgggttctccaaactagattcatggctttaacagtaatgttcttatttaaattttcagaaagcatctattcccaaagaaccccaggcaatagtcaaaaacatttgtttatccttaagaattccatctatataaatcgcattaatgaaataccaactatgcgtaaatcaacttgtcacaaagtgagaaattatgaaagttaatttgaatgttgaatgtttgaattacagggaagaaatcaagttaatgtactttcattccctttcatgatttgcaactttagaaagaaattgtttttctgaaagtatcaccaaaaaatctatagtttgattctgagtattcattttgcaacttggagattttgctaatacatttggctccactgtaaatttaatagataaagtgcctataaaggaaacacgtttagaaatgatttcaaaatgatattcaatcttaacaaaagtgaacattattaaatcagaatctttaaagaggagcctttccagaactaccaaaatgaagacacgcccgactctctccatcagaagggtttatacccctttggcacaccctctctgtccaatctgcaagtcccagggagctctgcataccaggggttccccaggagagaccttctcttaggacagtaaactcactagaatattccttatgttgacatggattggatttcagttcaatcaaactttcagcttttttttcagccattcacaacacaatcaaaagattaacaacactgcatgcggcaaaccgcatgctcttacccacactacgcagaagagaaagtacaaccactatcttttgttctacctgtattgtctgacttctcaggaagatcgtgaacataactgagggcatgagtctcactagcacatggaggcccttttggatttagagactgtaaattattaaatcggcaacagggcttctctttttagatgtagcactgaaa

SEQ ID NO: 163785 - DNA, 2877 bp, Homo sapiens
  Payload ID: 12252
  Gene Symbol: PARK2
  Gene Name: parkin RBR E3 ubiquitin protein ligase
  Uniprot ID: O60260
  ENST ID: ENST00000366897
  CDS Start-End: 104-1417
cctggaggatttaacccaggagagccgctggtgggaggcgcggctggcgccgctgcgcgcatgggcctgttcctggcccgcagccgccacctacccagtgaccatgatagtgtttgtcaggttcaactccagccatggtttcccagtggaggtcgattctgacaccagcatcttccagctcaaggaggtggttgctaagcgacagggggttccggctgaccagttgcgtgtgattttcgcagggaaggagctgaggaatgactggactgtgcagaattgtgacctggatcagcagagcattgttcacattgtgcagagaccgtggagaaaaggtcaagaaatgaatgcaactggaggcgacgaccccagaaacgcggcgggaggctgtgagcgggagccccagagcttgactcgggtggacctcagcagctcagtcctcccaggagactctgtggggctggctgtcattctgcacactgacagcaggaaggactcaccaccagctggaagtccagcaggtagatcaatctacaacagcttttatgtgtattgcaaaggcccctgtcaaagagtgcagccgggaaaactcagggtacagtgcagcacctgcaggcaggcaacgctcaccttgacccaggaatttttctttaaatgtggagcacaccccacctctgacaaggaaacatcagtagctttgcacctgatcgcaacaaatagtcggaacatcacttgcattacgtgcacagacgtcaggagccccgtcctggttttccagtgcaactcccgccacgtgatttgcttagactgtttccacttatactgtgtgacaagactcaatgatcggcagtttgttcacgaccctcaacttggctactccctgccttgtgtggctggctgtcccaactccttgattaaagagctccatcacttcaggattctgggagaagagcagtacaaccggtaccagcagtatggtgcagaggagtgtgtcctgcagatggggggcgtgttatgcccccgccctggctgtggagcggggctgctgccggagcctgaccagaggaaagtcacctgcgaagggggcaatggcctgggctgtgggtttgccttctgccgggaatgtaaagaagcgtaccatgaaggggagtgcagtgccgtatttgaagcctcaggaacaactactcaggcctacagagtcgatgaaagagccgccgagcaggctcgttgggaagcagcctccaaagaaaccatcaagaaaaccaccaagccctgtccccgctgccatgtaccagtggaaaaaaatggaggctgcatgcacatgaagtgtccgcagccccagtgcaggctcgagtggtgctggaactgtggctgcgagtggaaccgcgtctgcatgggggaccactggttcgacgtgtagccagggcggccgggcgccccatcgccacatcctgggggagcatacccagtgtctaccttcattttctaattctcttttcaaacacacacacacacgcgcgcgcgcgcacacacactcttcaagtttttttcaaagtccaactacagccaaattgcagaagaaactcctggatccctttcactatgtccatgaaaaacagcagagtaaaattacagaagaagctcctgaatccctttcagtttgtccacacaagacagcagagccatctgcgacaccaccaacaggcgttctcagcctccggatgacacaaataccagagcacagattcaagtgcaatccatgtatctgtatgggtcattctcacctgaattcgagacaggcagaatcagtagctggagagagagttctcacatttaatatcctgccttttaccttcagtaaacaccatgaagatgccattgacaaggtgtttctctgtaaaatgaactgcagtgggttctccaaactagattcatggctttaacagtaatgttcttatttaaattttcagaaagcatctattcccaaagaaccccaggcaatagtcaaaaacatttgtttatccttaagaattccatctatataaatcgcattaatgaaataccaactatgcgtaaatcaacttgtcacaaagtgagaaattatgaaagttaatttgaatgttgaatgtttgaattacagggaagaaatcaagttaatgtactttcattccctttcatgatttgcaactttagaaagaaattgtttttctgaaagtatcaccaaaaaatctatagtttgattctgagtattcattttgcaacttggagattttgctaatacatttggctccactgtaaatttaatagataaagtgcctataaaggaaacacgtttagaaatgatttcaaaatgatattcaatcttaacaaaagtgaacattattaaatcagaatctttaaagaggagcctttccagaactaccaaaatgaagacacgcccgactctctccatcagaagggtttatacccctttggcacaccctctctgtccaatctgcaagtcccagggagctctgcataccaggggttccccaggagagaccttctcttaggacagtaaactcactagaatattccttatgttgacatggattggatttcagttcaatcaaactttcagcttttttttcagccattcacaacacaatcaaaagattaacaacactgcatgcggcaaaccgcatgctcttacccacactacgcagaagagaaagtacaaccactatcttttgttctacctgtattgtctgacttctcaggaagatcgtgaacataactgagggcatgagtctcactagcacatggaggcccttttggatttagagactgtaaattattaaatcggcaacagggcttctctttttagatgtagcactgaaa

SEQ ID NO: 163786 - DNA, 4180 bp, Homo sapiens
  Payload ID: 12252
  Gene Symbol: PARK2
  Gene Name: parkin RBR E3 ubiquitin protein ligase
  Uniprot ID: O60260
  ENST ID: ENST00000366898
  CDS Start-End: 104-1501
cctggaggatttaacccaggagagccgctggtgggaggcgcggctggcgccgctgcgcgcatgggcctgttcctggcccgcagccgccacctacccagtgaccatgatagtgtttgtcaggttcaactccagccatggtttcccagtggaggtcgattctgacaccagcatcttccagctcaaggaggtggttgctaagcgacagggggttccggctgaccagttgcgtgtgattttcgcagggaaggagctgaggaatgactggactgtgcagaattgtgacctggatcagcagagcattgttcacattgtgcagagaccgtggagaaaaggtcaagaaatgaatgcaactggaggcgacgaccccagaaacgcggcgggaggctgtgagcgggagccccagagcttgactcgggtggacctcagcagctcagtcctcccaggagactctgtggggctggctgtcattctgcacactgacagcaggaaggactcaccaccagctggaagtccagcaggtagatcaatctacaacagcttttatgtgtattgcaaaggcccctgtcaaagagtgcagccgggaaaactcagggtacagtgcagcacctgcaggcaggcaacgctcaccttgacccagggtccatcttgctgggatgatgttttaattccaaaccggatgagtggtgaatgccaatccccacactgccctgggactagtgcagaatttttctttaaatgtggagcacaccccacctctgacaaggaaacatcagtagctttgcacctgatcgcaacaaatagtcggaacatcacttgcattacgtgcacagacgtcaggagccccgtcctggttttccagtgcaactcccgccacgtgatttgcttagactgtttccacttatactgtgtgacaagactcaatgatcggcagtttgttcacgaccctcaacttggctactccctgccttgtgtggctggctgtcccaactccttgattaaagagctccatcacttcaggattctgggagaagagcagtacaaccggtaccagcagtatggtgcagaggagtgtgtcctgcagatggggggcgtgttatgcccccgccctggctgtggagcggggctgctgccggagcctgaccagaggaaagtcacctgcgaagggggcaatggcctgggctgtgggtttgccttctgccgggaatgtaaagaagcgtaccatgaaggggagtgcagtgccgtatttgaagcctcaggaacaactactcaggcctacagagtcgatgaaagagccgccgagcaggctcgttgggaagcagcctccaaagaaaccatcaagaaaaccaccaagccctgtccccgctgccatgtaccagtggaaaaaaatggaggctgcatgcacatgaagtgtccgcagccccagtgcaggctcgagtggtgctggaactgtggctgcgagtggaaccgcgtctgcatgggggaccactggttcgacgtgtagccagggcggccgggcgccccatcgccacatcctgggggagcatacccagtgtctaccttcattttctaattctcttttcaaacacacacacacacgcgcgcgcgcgcacacacactcttcaagtttttttcaaagtccaactacagccaaattgcagaagaaactcctggatccctttcactatgtccatgaaaaacagcagagtaaaattacagaagaagctcctgaatccctttcagtttgtccacacaagacagcagagccatctgcgacaccaccaacaggcgttctcagcctccggatgacacaaataccagagcacagattcaagtgcaatccatgtatctgtatgggtcattctcacctgaattcgagacaggcagaatcagtagctggagagagagttctcacatttaatatcctgccttttaccttcagtaaacaccatgaagatgccattgacaaggtgtttctctgtaaaatgaactgcagtgggttctccaaactagattcatggctttaacagtaatgttcttatttaaattttcagaaagcatctattcccaaagaaccccaggcaatagtcaaaaacatttgtttatccttaagaattccatctatataaatcgcattaatgaaataccaactatgcgtaaatcaacttgtcacaaagtgagaaattatgaaagttaatttgaatgttgaatgtttgaattacagggaagaaatcaagttaatgtactttcattccctttcatgatttgcaactttagaaagaaattgtttttctgaaagtatcaccaaaaaatctatagtttgattctgagtattcattttgcaacttggagattttgctaatacatttggctccactgtaaatttaatagataaagtgcctataaaggaaacacgtttagaaatgatttcaaaatgatattcaatcttaacaaaagtgaacattattaaatcagaatctttaaagaggagcctttccagaactaccaaaatgaagacacgcccgactctctccatcagaagggtttatacccctttggcacaccctctctgtccaatctgcaagtcccagggagctctgcataccaggggttccccaggagagaccttctcttaggacagtaaactcactagaatattccttatgttgacatggattggatttcagttcaatcaaactttcagcttttttttcagccattcacaacacaatcaaaagattaacaacactgcatgcggcaaaccgcatgctcttacccacactacgcagaagagaaagtacaaccactatcttttgttctacctgtattgtctgacttctcaggaagatcgtgaacataactgagggcatgagtctcactagcacatggaggcccttttggatttagagactgtaaattattaaatcggcaacagggcttctctttttagatgtagcactgaaatccttgctggagggaagagaggggatgaactcaagttttccacatcctgggacacctgtccctcttttcctaactgcctaagataacccatttcttccaaccatctgaggacagtcccgtcgtctcagaggccctgcaccggggagagactgggctctgcagcagccacatcagcattcacagcttcatgtggcttcactgtctgaaaatctaccgactccaacatggccccacggtgacaacagacctgtgacaggaagcccaaagctcacatagaaatggtggacagatcaaagtctctatagtaagggaaaaaaagagaggtggcaggcatgagccccctgcacccagtggctcgtgtccatactgagtccagaccctgatcaaggcctgacttagtgtcactggcagtcccactaaattacacttccttacactggcccgatgcgacaaatcaggtggctcccttctgtcacgtggagcacacagtgttttccatcatccatagctttcttcctgatggtgtttgcattattgcgccttcccaatctgcatgctgcgttgggcttgcggtgcctgaacaaggtttgctcccatgagctcaggcaccctaggatcccctgttagactattaggctgtccagcatggtctcctttcccttcttggtggtggtcttttccctttccagaatagaacagtgattcttaaaataagttagagcaggccgggcgcggtggctcatgcctgtaatcccagcactttgggaggccgaggtgggtggatcacgaggtcaggagttcaagaccagcctggccaagatgatgaaaccccgtctctattaaaaatacaaaaattagctgggcgtggtggcaggcacctgtaatcccagcttcctgggaggctgaggcaggagaatcacttgaacccggggggcagaggttgcagtgagccgagatcacgccactgaactccagcctgggcaacagagtgagactctgtctcaaaaaaaaaaaaaaaacaaaaacaaaaaagcaagatcatccactacacatgaacatgaatcacagtattatttgcacaggaagggtgtaacaaaatatgaatgtatcaaaaaatagaaataaagtctttgcagaaaaagtctgtttttctctgaagtgtgttgagattatctgacaactctaagattgtacttaaattgtcaataaagcatcaaaa

SEQ ID NO: 163787 - DNA, 904 bp, Homo sapiens
  Payload ID: 12252
  Gene Symbol: PARK2
  Gene Name: parkin RBR E3 ubiquitin protein ligase
  Uniprot ID: O60260
  ENST ID: ENST00000479615
  CDS Start-End: 74-730
atgatagaattgtgacctggatcagcagagcattgttcacattgtgcagagaccgtggagaaaaggtcaagaaatgaatgcaactggaggcgacgaccccagaaacgcggcgggaggctgtgagcgggagccccagagcttgactcgggtggacctcagcagctcagtcctcccaggagactctgtggggctggctgtcattctgcacactgacagcaggaaggactcaccaccagctggaagtccagcaggtagatcaatctacaacagcttttatgtgtattgcaaaggcccctgtcaaagagtgcagccgggaaaactcagggtacagtgcagcacctgcaggcaggcaacgctcaccttgacccagggtccatcttgctgggatgatgttttaattccaaaccggatgagtggtgaatgccaatccccacactgccctgggactagtgcagaatttttctttaaatgtggagcacaccccacctctgacaaggaaacatcagtagctttgcacctgatcgcaacaaatagtcggaacatcacttgcattacgtgcacagacgtcaggagccccgtcctggttttccagtgcaactcccgccacgtgatttgcttagactgtttccacttatactgtgtgacaagactcaatgatcggcagtttgttcacgaccctcaacttggctactccctgccttgtgtggtttgccttctgccgggaatgtaaagaagcgtaccatgaaggggagtgcagtgccgtatttgaagcctcaggaacaactactcaggaggctgcatgcacatgaagtgtccgcagccccagtgcaggctcgagtggtgctggaactgtggctgcgagtggaaccgcgtctgcatgggggaccactggttcgacgtgtag

SEQ ID NO: 163788 - DNA, 603 bp, Homo sapiens
  Payload ID: 12252
  Gene Symbol: PARK2
  Gene Name: parkin RBR E3 ubiquitin protein ligase
  ENST ID: ENST00000612540
  CDS Start-End: 1-603
atacaaaatttatctctgagtaaactggagtgcagtggtgcaatctccactcactgcaagctccacctcccaggttcacaccattctcttgcctcagcctcgctggagtggactggtgcgatcttggttcactgcaacgtccacatcccaggttcgagagattctcctgcctcagcctctcaagtagccaggattacaggttatttaagaaagaactcaatctatcaatacccagtaaccatagacagtggtacagtaaagtcaaagattaagcaattaatgatttcagaaacagggatgccaactgagacttttagaattcataggaggggtaaggaagacagaaactgttttactatacagaattgtgacctggatcagcagagcattgttcacattgtgcagagaccgtggagaaaaggtcaagaaatgaatgcaactggaggcgacgaccccagaaacgcggcgggaggctgtgagcgggagccccagagcttgactcgggtggacctcagcagctcagtcctcccaggagactctgtggggctggctgtcattctgcacactgacagcaggaaggactcaccaccagctggaagtcca

SEQ ID NO: 163789 - DNA, 225 bp, Homo sapiens
  Payload ID: 12252
  Gene Symbol: PARK2
  Gene Name: parkin RBR E3 ubiquitin protein ligase
  ENST ID: ENST00000612485
  CDS Start-End: 4-225
acagctggctgtcccaactccttgattaaagagctccatcacttcaggattctgggagaagagcagtacaaccggtaccagcagtatggtgcagaggagtgtgtcctgcagatggggggcgtgttatgcccccgccctggctgtggagcggggctgctgccggagcctgaccagaggaaagtcacctgcgaagggggcaatggcctgggctgtgggtttcccttt

SEQ ID NO: 163790 - DNA, 531 bp, Homo sapiens
  Payload ID: 12252
  Gene Symbol: PARK2
  Gene Name: parkin RBR E3 ubiquitin protein ligase
  ENST ID: ENST00000610470
  CDS Start-End: 1-531
acagctggctgtcccaactccttgattaaagagctccatcacttcaggattctgggagaagagcagtacaaccggtaccagcagtatggtgcagaggagtgtgtcctgcagatggggggcgtgttatgcccccgccctggctgtggagcggggctgctgccggagcctgaccagaggaaagtcacctgcgaagggggcaatggcctgggctgtgggtttgccttctgccgggaatgtaaagaagcgtaccatgaaggggagtgcagtgccgtatttgaagcctcaggaacaactactcaggcctacagagtcgatgaaagagccgccgagcaggctcgttgggaagcagcctccaaagaaaccatcaagaaaaccaccaagccctgtccccgctgccatgtaccagtggaaaaaaatggaggctgcatgcacatgaagtgtccgcagccccagtgcaggctcgagtggtgctggaactgtggctgcgagtggaaccgcgtctgcatgggggaccactggttcgacgtgtag

SEQ ID NO: 163791 - DNA, 261 bp, Homo sapiens
  Payload ID: 12252
  Gene Symbol: PARK2
  Gene Name: parkin RBR E3 ubiquitin protein ligase
  ENST ID: ENST00000615065
  CDS Start-End: 1-261
cagaattgtgacctggatcagcagagcattgttcacattgtgcagagaccgtggagaaaaggtcaagaaatgaatgcaactggaggcgacgaccccagaaacgcggcgggaggctgtgagcgggagccccagagcttgactcgggtggacctcagcagctcagtcctcccaggagactctgtggggctggctgtcattctgcacactgacagcaggaaggactcaccaccagctggaagtccaggtaattgtctgcatgga

SEQ ID NO: 163792 - DNA, 4357 bp, Homo sapiens
  Payload ID: 12253
  Gene Symbol: PDDC1
  Gene Name: Parkinson disease 7 domain containing 1
  Uniprot ID: Q8NB37
  ENST ID: ENST00000319863
  CDS Start-End: 23-685
gacccagcgccgagcccgagccatggcgtccgagcggctccctaacaggcccgcctgtctgctcgtggccagcggcgccgccgaaggtgtgtcggcccagtccttcctccactgtttcacgatggccagcaccgccttcaacctgcaggtggccacccctggggggaaagccatggaatttgtggatgtgactgagagcaatgcacgctgggtgcaagacttccgcctcaaggcttacgccagccccgccaagctcgagtccatcgatggtgcccggtaccatgccctcctgatccccagctgtcctggggccctgaccgacctggccagcagtggctccctggcccgtatcctgcagcacttccactctgagagcaaacccatctgcgccgtcggccacggtgtcgccgccctgtgctgtgccaccaacgaggacagatcctgggtgttcgacagctacagcctgacagggccctctgtgtgtgagctcgtcagggcccccggcttcgcccgcctgccgctcgtggtggaggacttcgtgaaggattcgggcgcctgcttcagtgcaagcgagcctgacgctgtccacgtcgtgctggaccgccacctggtcacaggccagaatgccagctccactgtcccggccgtgcagaacctgctcttcctctgtggcagccggaaatgaacctgctgggtagatgcaccccctgagacagcccaggtgtctccagaggcagccccgtctcaggcttcagggaccccgcctcttccctcctgacaagggccctggatggcagcctggtctggccctgatgggattgttggaggcctcctggaatcagctctgagggggtgtcggctctcctggagggtccaaacccccatcctcctgcatgttctctggtaggaggcagagaaaagaccccacgtgcctggagagctgtgctagctgctaggtggtcctcgggaattccaggctgggttttctagggaggactggttgtcacgtgtggtcactgttgactagacagagtcggctcgggggtcctctgtgtgggtttgccctgctgtggcctgtctgccacccaccacctctttcactgttggtgggggccttgaggggagggcccagccggcgggagctggctcagaactttggccaaaggtgaacggaattttttaggagcagcagcctcctgccccaaggccgaccggcactggcagcactttcctgttgaagaaatcttcctggcgtgtggtttcaaagtgtaagcacctcagtgatgcaccctgtcctaagcattgagaggcacgtttacttgtgaatatgagaccatgagattctcaatgataggaaagtgctgtcccccacggccttgcacagtggcctcgggtagagcggctatcaagagcagacagtggtccagcctgctgggcacctggcctgggctgtggccctccagcgggctgccccctggccccaggttagggcgtccaggagaggcttaggccctctacttcctcacagttccccagtttgagccatcgaaggccttcttcctgcccacctccccgtctcagccacagccgttcccaagcaccagcgtggctcctggtgccagtgacctgccaggaggccccttgtgattataaaaccgttcagttgggccgggcgcagtggctcacacctgtaaccccagcactttgggaggccgaggcgggcggatcacgaggtcaggagatcgagaccatcctggctaacatggtgaaaccccatctctactaaaaaacaaaaatacaaaaagttagcctggcatggtggtgggtgtgtgtagtcccagctacttgggaggctgaggcaggagaatggcgtgaacctgggaggcagagcttgcagtgagctgagatcgtgccactgcactccagcctgggcaatagagtgagactccatctcaaaaaaaaaacgttcagttggctgggcgcggtggctcacgcctgtaatcccagcactttgggaggccaaggtgggtggatcatctgaagtcaggagtttgggaaaagcctggccaacatggtgaaactaaaatacaaaaatgagccgggtgtggtgtcaggcgcctgtattcccagctacttgggaggctgagacgtgagaattgcttgaacctgggaggcggaagttgcagtgagccaagattgcgccattgcactccaacctgggcaatgagtgaaactccgtctcaaaaataaaaaataataaaataaagccgttcaataaggagaatttggaaaaaagtggaagaaggaagcgctgcagccacatccccgccctgaaggctgcgtccctccagtgcctcgcagattagtcaggatgcccacttagcactggccacggggccttgctctgtcccgggtccactctcatccccgtgtggtgatggacctctgtggacaaatgctttttattttatttattttttgagatggagtttgtctctcgtcacccaggctggagtgcagtggcacaatcttggctcactgcaacctctgtctcccgggttcaagcgattctcctgcctcagcctccggagtagctgggattacaggtgtgcgccaccacgcctggctaatttttgtatttttcgtagagaccgagtttcaccatgttggccaggctggtctcgaactcctgacctcaagtgatcctcccgcctcggcctcccaaagtgttaggattacaggcgtgagccactgcgcccggcgtaatttttgtttttagtagagatggggtttcatcatgttggccaggctggtcttgaactcctgacctcaggtgatccatcttcctcagcctcccaaagtgctgggattacaggcgtgagccgccacgtccggctaacaagtacttttttatttttattttattttttggatggagtctcactctgtcgcccaggctggaacacagtggcacgatctcggctcactgcagcctccgcctcccgggttcaagtgattctcctgcctcagcctcccaagtagctaggactacaggtgcacaccaccacacccagctaatttttgtatttttcctttttttttttttttgagatggagtcttgctctgttggcaggctggagtgcagtggcgcgatctcagctcactgcaacctctgcctctgcctcccagattcaagcagttctcctgcctcagcctcccgagtaactgggactacaggtgcatgccactacgcccagctagtttttgtattttcagtagagacggggtttcaccatgttggccaggatggtctcgatctcttgacctcatgatctgcccgcctcggcttcccaaagtgctgggactacaggcaagctcatgtcttaatgtcctagtccatttgggctcctataagaaaatactgtaaactggccgggcacggtggctcacgcctgtaatcccagcactttgggaggctgaggcaggtggatcacctgaggtcaggagttcgagaccagcctggccaagatggtgaaaccccgtctctactaaaaatacagaaattagccgggcgcggtggtgggcgcctgtaatcccatttacttgggaggctgaggcaggagaatcgcttgaacccaggaggcggaggttgcagtgagctgacatcgtgccactgcactctagtctgggtgacagagcaagactccatctcaaaaaaaaaaaaaaagaaaatattgtaaacctagtggcttataaacaacagaaatcagtttcagttttggaggctggaagcccaagatgaaagcaccagtagatgcaacctcttttgtgagggtgatggtcccatgatgaggctgtgcccctgccctgtgaccggatgacctcccaaatgccccacctaataccatccccttgcaggtgaggacttaagcaggtgggttttggggggacgtgctcaggccacagcagggtgcatgaagagccagtgagcctcattgagcccctctggtcagccagatctgacattgagcccagcattgaagatcaaagcaggtggggctttgggatgtgaagtgggttctgacgcggggccccacagacctgtctccgcgtgagctgcctgcaggcccctgcgtcattcctcagctgcgtgcgaggcctctggcttggagagcctccccgctgtgcacagttctctctttgccagggcagggcttggggcagcaccaggctggggcagaggaggaaagcaagaggacagacctccagaagagcagcggagggcgggtgaggatttccccatataccagtgtgtgttcatctacccatgaggaataaaaccatgcagcagcatgc

SEQ ID NO: 163793 - DNA, 3973 bp, Homo sapiens
  Payload ID: 12253
  Gene Symbol: PDDC1
  Gene Name: Parkinson disease 7 domain containing 1
  Uniprot ID: Q8NB37
  ENST ID: ENST00000354286
  CDS Start-End: 27-581
cgcagacccagcgccgagcccgagccatggcgtccgagcggctccctaacaggcccgcctgtctgctcgtggccagcggcgccgccgaaggtgtgtcggcccagtccttcctccactgtttcacgatggccagcaccgccttcaacctgcaggtggccacccctggggggaaagccatggaatttgtggatgtgactgagagcaatgcacgctgggtgcaagacttccgcctcaaggcttacgccagccccgccaagctcgagtccatcgatgaacccatctgcgccgtcggccacggtgtcgccgccctgtgctgtgccaccaacgaggacagatcctgggtgttcgacagctacagcctgacagggccctctgtgtgtgagctcgtcagggcccccggcttcgcccgcctgccgctcgtggtggaggacttcgtgaaggattcgggcgcctgcttcagtgcaagcgagcctgacgctgtccacgtcgtgctggaccgccacctggtcacaggccagaatgccagctccactgtcccggccgtgcagaacctgctcttcctctgtggcagccggaaatgaacctgctgggtagatgcaccccctgagacagcccaggtgtctccagaggcagccccgtctcaggcttcagggaccccgcctcttccctcctgacaagggccctggatggcagcctggtctggccctgatgggattgttggaggcctcctggaatcagctctgagggggtgtcggctctcctggagggtccaaacccccatcctcctgcatgttctctggagcagcagcctcctgccccaaggccgaccggcactggcagcactttcctgttgaagaaatcttcctggcgtgtggtttcaaagtgtaagcacctcagtgatgcaccctgtcctaagcattgagaggcacgtttacttgtgaatatgagaccatgagattctcaatgataggaaagtgctgtcccccacggccttgcacagtggcctcgggtagagcggctatcaagagcagacagtggtccagcctgctgggcacctggcctgggctgtggccctccagcgggctgccccctggccccaggttagggcgtccaggagaggcttaggccctctacttcctcacagttccccagtttgagccatcgaaggccttcttcctgcccacctccccgtctcagccacagccgttcccaagcaccagcgtggctcctggtgccagtgacctgccaggaggccccttgtgattataaaaccgttcagttgggccgggcgcagtggctcacacctgtaaccccagcactttgggaggccgaggcgggcggatcacgaggtcaggagatcgagaccatcctggctaacatggtgaaaccccatctctactaaaaaacaaaaatacaaaaagttagcctggcatggtggtgggtgtgtgtagtcccagctacttgggaggctgaggcaggagaatggcgtgaacctgggaggcagagcttgcagtgagctgagatcgtgccactgcactccagcctgggcaatagagtgagactccatctcaaaaaaaaaacgttcagttggctgggcgcggtggctcacgcctgtaatcccagcactttgggaggccaaggtgggtggatcatctgaagtcaggagtttgggaaaagcctggccaacatggtgaaactaaaatacaaaaatgagccgggtgtggtgtcaggcgcctgtattcccagctacttgggaggctgagacgtgagaattgcttgaacctgggaggcggaagttgcagtgagccaagattgcgccattgcactccaacctgggcaatgagtgaaactccgtctcaaaaataaaaaataataaaataaagccgttcaataaggagaatttggaaaaaagtggaagaaggaagcgctgcagccacatccccgccctgaaggctgcgtccctccagtgcctcgcagattagtcaggatgcccacttagcactggccacggggccttgctctgtcccgggtccactctcatccccgtgtggtgatggacctctgtggacaaatgctttttattttatttattttttgagatggagtttgtctctcgtcacccaggctggagtgcagtggcacaatcttggctcactgcaacctctgtctcccgggttcaagcgattctcctgcctcagcctccggagtagctgggattacaggtgtgcgccaccacgcctggctaatttttgtatttttcgtagagaccgagtttcaccatgttggccaggctggtctcgaactcctgacctcaagtgatcctcccgcctcggcctcccaaagtgttaggattacaggcgtgagccactgcgcccggcgtaatttttgtttttagtagagatggggtttcatcatgttggccaggctggtcttgaactcctgacctcaggtgatccatcttcctcagcctcccaaagtgctgggattacaggcgtgagccgccacgtccggctaacaagtacttttttatttttattttattttttggatggagtctcactctgtcgcccaggctggaacacagtggcacgatctcggctcactgcagcctccgcctcccgggttcaagtgattctcctgcctcagcctcccaagtagctaggactacaggtgcacaccaccacacccagctaatttttgtatttttcctttttttttttttttgagatggagtcttgctctgttggcaggctggagtgcagtggcgcgatctcagctcactgcaacctctgcctctgcctcccagattcaagcagttctcctgcctcagcctcccgagtaactgggactacaggtgcatgccactacgcccagctagtttttgtattttcagtagagacggggtttcaccatgttggccaggatggtctcgatctcttgacctcatgatctgcccgcctcggcttcccaaagtgctgggactacaggcaagctcatgtcttaatgtcctagtccatttgggctcctataagaaaatactgtaaactggccgggcacggtggctcacgcctgtaatcccagcactttgggaggctgaggcaggtggatcacctgaggtcaggagttcgagaccagcctggccaagatggtgaaaccccgtctctactaaaaatacagaaattagccgggcgcggtggtgggcgcctgtaatcccatttacttgggaggctgaggcaggagaatcgcttgaacccaggaggcggaggttgcagtgagctgacatcgtgccactgcactctagtctgggtgacagagcaagactccatctcaaaaaaaaaaaaaaagaaaatattgtaaacctagtggcttataaacaacagaaatcagtttcagttttggaggctggaagcccaagatgaaagcaccagtagatgcaacctcttttgtgagggtgatggtcccatgatgaggctgtgcccctgccctgtgaccggatgacctcccaaatgccccacctaataccatccccttgcaggtgaggacttaagcaggtgggttttggggggacgtgctcaggccacagcagggtgcatgaagagccagtgagcctcattgagcccctctggtcagccagatctgacattgagcccagcattgaagatcaaagcaggtggggctttgggatgtgaagtgggttctgacgcggggccccacagacctgtctccgcgtgagctgcctgcaggcccctgcgtcattcctcagctgcgtgcgaggcctctggcttggagagcctccccgctgtgcacagttctctctttgccagggcagggcttggggcagcaccaggctggggcagaggaggaaagcaagaggacagacctccagaagagcagcggagggcgggtgaggatttccccatataccagtgtgtgttcatctacccatgaggaataaaaccatgcagcagcatgc

SEQ ID NO: 163794 - DNA, 790 bp, Homo sapiens
  Payload ID: 12253
  Gene Symbol: PDDC1
  Gene Name: Parkinson disease 7 domain containing 1
  Uniprot ID: Q8NB37
  ENST ID: ENST00000397472
  CDS Start-End: 10-762
gcccgagccatggcgtccgagcggctccctaacaggcccgcctgtctgctcgtggccagcggcgccgccgaaggtgtgtcggcccagtccttcctccactgtttcacgatggccagcaccgccttcaacctgcaggtggccacccctggggggaaagccatggaatttgtggatgtgactgagagcaatgcacgctgggtgcaagacttccgcctcaaggcttacgccagccccgccaagctcgagtccatcgatggtgcccggtaccatgccctcctgatccccagctgtcctggggccctgaccgacctggccagcagtggctccctggcccgtatcctgcagcacttccactctgagagcaaacccatctgcgccgtcggccacggtgtcgccgccctgtgctgtgccaccaacgaggacagatcctgggtgttcgacagctacagcctgacagggccctctgtgtgtgagctcgtcagggcccccggcttcgcccgcctgccgctcgtggtggaggacttcgtgaaggattcgggcgcctgcttcagtggagcagcagcctcctgccccaaggccgaccggcactggcagcactttcctgttgaagaaatcttcctggcgtgtggtttcaaagtggcagggcttggggcagcaccaggctggggcagaggaggaaagcaagaggacagacctccagaagagcagcggagggcgggtgaggatttccccatataccagtgtgtgttcatctacccatgaggaataaaaccatgcagcagcatgcaaa

SEQ ID NO: 163795 - DNA, 995 bp, Homo sapiens
  Payload ID: 12253
  Gene Symbol: PDDC1
  Gene Name: Parkinson disease 7 domain containing 1
  Uniprot ID: Q8NB37
  ENST ID: ENST00000524550
  CDS Start-End: 14-568
ccgagcccgagccatggcgtccgagcggctccctaacaggcccgcctgtctgctcgtggccagcggcgccgccgaaggtgtgtcggcccagtccttcctccactgtttcacgatggccagcaccgccttcaacctgcaggtggccacccctggggggaaagccatggaatttgtggatgtgactgagagcaatgcacgctgggtgcaagacttccgcctcaaggcttacgccagccccgccaagctcgagtccatcgatgaacccatctgcgccgtcggccacggtgtcgccgccctgtgctgtgccaccaacgaggacagatcctgggtgttcgacagctacagcctgacagggccctctgtgtgtgagctcgtcagggcccccggcttcgcccgcctgccgctcgtggtggaggacttcgtgaaggattcgggcgcctgcttcagtgcaagcgagcctgacgctgtccacgtcgtgctggaccgccacctggtcacaggccagaatgccagctccactgtcccggccgtgcagaacctgctcttcctctgtggcagccggaaatgaacctgctgggtagatgcaccccctgagacagcccaggtgtctccagaggcagccccgtctcaggcttcagggaccccgcctcttccctcctgacaagggccctggatggcagcctggtctggccctgatgggattgttggaggcctcctggaatcagctctgagggggtgtcggctctcctggagggtccaaacccccatcctcctgcatgttctctggtaggaggcagagaaaagaccccacgtgcctggagagctgtgctagctgctaggtggtcctcgggaattccaggctgggttttctagggaggactggttgtcacgtgtggtcactgttgactagacagagtcggctcgggggtcctctgtgtgggtttgccctgctgtggcctgtctgccacccaccacctctttcactgttggtgggg

SEQ ID NO: 163796 - DNA, 756 bp, Homo sapiens
  Payload ID: 12253
  Gene Symbol: PDDC1
  Gene Name: Parkinson disease 7 domain containing 1
  ENST ID: ENST00000526325
  CDS Start-End: 26-586
gcagacccagcgccgagcccgagccatggcgtccgagcggctccctaacaggcccgcctgtctgctcgtggccagcggcgccgccgaaggtgtgtcggcccagtccttcctccactgtttcacgatggccagcaccgccttcaacctgcaggtggccacccctggggggaaagccatggaatttgtggatgtgactgagagcaatgcacgctgggtgcaagacttccgcctcaaggcttacgccagccccgccaagctcgagtccatcgatggtgcccggtaccatgccctcctgatccccagctgtcctggggccctgaccgacctggccagcagtggctccctggcccgtatcctgcagcacttccactctgagagcaaacccatctgcgccgtcggccacggtgtcgccgccctgtgctgtgccaccaacgaggacagatcctgggtgttcgacagctacagcctgacagggggcctgggcctgtctcaggagcccccaccccgctcccgcagccctctgtgtgtgagctcgtcagggcccccggcttcgcccgcctgccgctcgtggtggaggacttcgtgaaggattcgggcgcctgcttcagtgggcagggcttggggcagcaccaggctggggcagaggaggaaagcaagaggacagacctccagaagagcagcggagggcgggtgaggatttccccatataccagtgtgtgttcatctacccatgaggaataaaaccatgcagcagca

SEQ ID NO: 163797 - DNA, 457 bp, Homo sapiens
  Payload ID: 12253
  Gene Symbol: PDDC1
  Gene Name: Parkinson disease 7 domain containing 1
  ENST ID: ENST00000526650
  CDS Start-End: 1-435
aagctcgagtccatcgatggtgcccggtaccatgccctcctgatccccagctgtcctggggccctgaccgacctggccagcagtggctccctggcccgtatcctgcagcacttccactctgagagcaaacccatctgcgccgtcggccacggtgtcgccgccctgtgctgtgccaccaacgaggacagatcctgggtgttcgacagctacagcctgacagggccctctgtgtgtgagctcgtcagggcccccggcttcgcccgcctgccgctcgtggtggaggacttcgtgaaggattcgggcgcctgcttcagtgggcttggggcagcaccaggctggggcagaggaggaaagcaagaggacagacctccagaagagcagcggagggcgggtgaggatttccccatataccagtgtgtgttcatctacccatgaggaataaaaccatgcagcagca

SEQ ID NO: 163798 - DNA, 446 bp, Homo sapiens
  Payload ID: 12253
  Gene Symbol: PDDC1
  Gene Name: Parkinson disease 7 domain containing 1
  ENST ID: ENST00000465313
  CDS Start-End: 1-262
gccctctgtgtgtgagctcgtcagggcccccggcttcgcccgcctgccgctcgtggtggaggacttcgtgaaggattcgggcgcctgcttcagtgcaagcgagcctgacgctgtccacgtcgtgctggaccgccacctggtcacaggccagaatgccagctccactgtcccggccgtgcagaacctgctcttcctctgtggcagccggagcagcagcctcctgccccaaggccgaccggcactggcagcactttcctgttgaagaaatcttcctggcgtgtggtttcaaagtggcagggcttggggcagcaccaggctggggcagaggaggaaagcaagaggacagacctccagaagagcagcggagggcgggtgaggatttccccatataccagtgtgtgttcatctacccatgaggaataaaaccatgcagcagcatgcaaatg

SEQ ID NO: 163799 - DNA, 863 bp, Homo sapiens
  Payload ID: 12253
  Gene Symbol: PDDC1
  Gene Name: Parkinson disease 7 domain containing 1
  ENST ID: ENST00000534603
  CDS Start-End: 22-384
acccagcgccgagcccgagccatggcgtccgagcggctccctaacaggcccgcctgtctgctcgtggccagcggcgccgccgaaggtgtgtcggcccagtccttcctccactgtttcacgatggccagcaccgccttcaacctgcaggtggccacccctggggggaaagccatggaatttgtggatgtgactgagagcaatgcacgctgggtgcaagacttccgcctcaaggcttacgccagccccgccaagctcgagtccatcgatggtgcccggtaccatgccctcctgatccccagctgtcctggggccctgaccgacctggccagcagtggctccctggcccgtatcctgcagcacttccactctgagagcagtaggtgacccctgggacccaggggaggggttggatgtgcagtgtcacaagaaatgggtctcccaccagcagaagagaggtgggaagactccagaacccatctgcgccgtcggccacggtgtcgccgccctgtgctgtgccaccaacgaggacagatcctgggtgttcgacagctacagcctgacagggccctctgtgtgtgagctcgtcagggcccccggcttcgcccgcctgccgctcgtggtggaggacttcgtgaaggattcgggcgcctgcttcagtgcaagcgagcctgacgctgtccacgtcgtgctggaccgccacctggtcacaggccagaatgccagctccactgtcccggccgtgcagaacctgctcttcctctgtggcagccggaaatgaacctgctgggtagatgcaccccctgagacagcccaggtgtctccagaggcagccccgtctcaggcttcagggaccccgcctcttc

SEQ ID NO: 163800 - DNA, 510 bp, Homo sapiens
  Payload ID: 12253
  Gene Symbol: PDDC1
  Gene Name: Parkinson disease 7 domain containing 1
  ENST ID: ENST00000528309
  CDS Start-End: 1-489
tgggtgcaagacttccgcctcaaggcttacgccagccccgccaagctcgagtccatcgatggtgcccggtaccatgccctcctgatccccagctgtcctggggccctgaccgacctggccagcagtggctccctggcccgtatcctgcagcacttccactctgagagcaaacccatctgcgccgtcggccacggtgtcgccgccctgtgctgtgccaccaacgaggacagatcctgggtgttcgacagctacagcctgacagggccctctgtgtgtgagctcgtcagggcccccggcttcgcccgcctgccgctcgtggtggaggacttcgtgaaggattcgggcgcctgcttcagtgggcagggcttggggcagcaccaggctggggcagaggaggaaagcaagaggacagacctccagaagagcagcggagggcgggtgaggatttccccatataccagtgtgtgttcatctacccatgaggaataaaaccatgcagcagcatgcaaa

SEQ ID NO: 163801 - DNA, 949 bp, Homo sapiens
  Payload ID: 12254
  Gene Symbol: PARK7
  Gene Name: parkinson protein 7
  Uniprot ID: Q99497
  ENST ID: ENST00000338639
  CDS Start-End: 155-724
gcagtgtggggctgagggaggccggacggcgcgcgtgcgtgctggcgtgcgttcattttcagcctggtgtggggtgagtggtacccaacgggccggggcgccgcgtccgcaggaagaggcgcggggtgcaggcttgtaaacatataacataaaaatggcttccaaaagagctctggtcatcctggctaaaggagcagaggaaatggagacggtcatccctgtagatgtcatgaggcgagctgggattaaggtcaccgttgcaggcctggctggaaaagacccagtacagtgtagccgtgatgtggtcatttgtcctgatgccagccttgaagatgcaaaaaaagagggaccatatgatgtggtggttctaccaggaggtaatctgggcgcacagaatttatctgagtctgctgctgtgaaggagatactgaaggagcaggaaaaccggaagggcctgatagccgccatctgtgcaggtcctactgctctgttggctcatgaaataggttttggaagtaaagttacaacacaccctcttgctaaagacaaaatgatgaatggaggtcattacacctactctgagaatcgtgtggaaaaagacggcctgattcttacaagccgggggcctgggaccagcttcgagtttgcgcttgcaattgttgaagccctgaatggcaaggaggtggcggctcaagtgaaggctccacttgttcttaaagactagagcagcgaactgcgacgatcacttagagaaacaggccgttaggaatccattctcactgtgttcgctctaaacaaaacagtggtaggttaatgtgttcagaagtcgctgtccttactacttttgcggaagtatggaagtcacaactacacagagatttctcagcctacaaattgtgtctatacatttctaagccttgtttgcagaataaacagggcatttagcaaa

SEQ ID NO: 163802 - DNA, 783 bp, Homo sapiens
  Payload ID: 12254
  Gene Symbol: PARK7
  Gene Name: parkinson protein 7
  Uniprot ID: Q99497
  ENST ID: ENST00000377488
  CDS Start-End: 157-726
tttgactgaccgccagcgtggtggcaacgctgaagcgtccagaatcttctgcctaacctctcgccggcatggaactggctagccgttttattaaactctgttttgcgtggacggtaaaccctccagataatctgcttgtaaacatataacataaaaatggcttccaaaagagctctggtcatcctggctaaaggagcagaggaaatggagacggtcatccctgtagatgtcatgaggcgagctgggattaaggtcaccgttgcaggcctggctggaaaagacccagtacagtgtagccgtgatgtggtcatttgtcctgatgccagccttgaagatgcaaaaaaagagggaccatatgatgtggtggttctaccaggaggtaatctgggcgcacagaatttatctgagtctgctgctgtgaaggagatactgaaggagcaggaaaaccggaagggcctgatagccgccatctgtgcaggtcctactgctctgttggctcatgaaataggttttggaagtaaagttacaacacaccctcttgctaaagacaaaatgatgaatggaggtcattacacctactctgagaatcgtgtggaaaaagacggcctgattcttacaagccgggggcctgggaccagcttcgagtttgcgcttgcaattgttgaagccctgaatggcaaggaggtggcggctcaagtgaaggctccacttgttcttaaagactagagcagcgaactgcgacgatcacttagagaaacaggccgttaggaatccattctcact

SEQ ID NO: 163803 - DNA, 977 bp, Homo sapiens
  Payload ID: 12254
  Gene Symbol: PARK7
  Gene Name: parkinson protein 7
  Uniprot ID: Q99497
  ENST ID: ENST00000377491
  CDS Start-End: 212-781
agaaccggcgcggggcctgggtcggggccgccctcgcttccggcctcccagtcgggccctgtcgctggcgttggatttgactgaccgccagcgtggtggcaacgctgaagcgtccagaatcttctgcctaacctctcgccggcatggaactggctagccgttttattaaactctgttttgcgtggacggcttgtaaacatataacataaaaatggcttccaaaagagctctggtcatcctggctaaaggagcagaggaaatggagacggtcatccctgtagatgtcatgaggcgagctgggattaaggtcaccgttgcaggcctggctggaaaagacccagtacagtgtagccgtgatgtggtcatttgtcctgatgccagccttgaagatgcaaaaaaagagggaccatatgatgtggtggttctaccaggaggtaatctgggcgcacagaatttatctgagtctgctgctgtgaaggagatactgaaggagcaggaaaaccggaagggcctgatagccgccatctgtgcaggtcctactgctctgttggctcatgaaataggttttggaagtaaagttacaacacaccctcttgctaaagacaaaatgatgaatggaggtcattacacctactctgagaatcgtgtggaaaaagacggcctgattcttacaagccgggggcctgggaccagcttcgagtttgcgcttgcaattgttgaagccctgaatggcaaggaggtggcggctcaagtgaaggctccacttgttcttaaagactagagcagcgaactgcgacgatcacttagagaaacaggccgttaggaatccattctcactgtgttcgctctaaacaaaacagtggtaggttaatgtgttcagaagtcgctgtccttactacttttgcggaagtatggaagtcacaactacacagagatttctcagcctacaaattgtgtctatacatttctaagccttg

SEQ ID NO: 163804 - DNA, 1088 bp, Homo sapiens
  Payload ID: 12254
  Gene Symbol: PARK7
  Gene Name: parkinson protein 7
  Uniprot ID: Q99497
  ENST ID: ENST00000493678
  CDS Start-End: 68-637
cgcgcgtgcgtgctggcgtgcgttcattttcagcctggtgtggggcttgtaaacatataacataaaaatggcttccaaaagagctctggtcatcctggctaaaggagcagaggaaatggagacggtcatccctgtagatgtcatgaggcgagctgggattaaggtcaccgttgcaggcctggctggaaaagacccagtacagtgtagccgtgatgtggtcatttgtcctgatgccagccttgaagatgcaaaaaaagagggaccatatgatgtggtggttctaccaggaggtaatctgggcgcacagaatttatctgagtctgctgctgtgaaggagatactgaaggagcaggaaaaccggaagggcctgatagccgccatctgtgcaggtcctactgctctgttggctcatgaaataggttttggaagtaaagttacaacacaccctcttgctaaagacaaaatgatgaatggaggtcattacacctactctgagaatcgtgtggaaaaagacggcctgattcttacaagccgggggcctgggaccagcttcgagtttgcgcttgcaattgttgaagccctgaatggcaaggaggtggcggctcaagtgaaggctccacttgttcttaaagactagagcagcgaactgcgacgatcacttagagaaacaggccgttaggaatccattctcactgtgttcgctctaaacaaaacagtggtaggttaatgtgttcagaagtcgctgtccttactacttttgcggaagtatggaagtcacaactacacagagatttctcagcctacaaattgtgtctatacatttctaagccttgtttgcagaataaacagggcatttagcaaactactgattgtttcttgttttgtctctcatttcttttgtgaaattaaattccgtatcaccttcatttgcagctcttaactgtccatatggcactgaaataaaagaacagtgaccacattttacacagcaaggaggaaaggcatacaaacagaatttaagaggcttgtgattttctctgcttattagctgtgtgtttttaatgtgctattaaaaaataccaatgagg

SEQ ID NO: 163805 - DNA, 624 bp, Homo sapiens
  Payload ID: 12254
  Gene Symbol: PARK7
  Gene Name: parkinson protein 7
  Uniprot ID: Q99497
  ENST ID: ENST00000493373
  CDS Start-End: 57-624
ccggaagtggacctacgtcatgcaggtcagtcggcttgtaaacatataacataaaaatggcttccaaaagagctctggtcatcctggctaaaggagcagaggaaatggagacggtcatccctgtagatgtcatgaggcgagctgggattaaggtcaccgttgcaggcctggctggaaaagacccagtacagtgtagccgtgatgtggtcatttgtcctgatgccagccttgaagatgcaaaaaaagagggaccatatgatgtggtggttctaccaggaggtaatctgggcgcacagaatttatctgagtctgctgctgtgaaggagatactgaaggagcaggaaaaccggaagggcctgatagccgccatctgtgcaggtcctactgctctgttggctcatgaaataggttttggaagtaaagttacaacacaccctcttgctaaagacaaaatgatgaatggaggtcattacacctactctgagaatcgtgtggaaaaagacggcctgattcttacaagccgggggcctgggaccagcttcgagtttgcgcttgcaattgttgaagccctgaatggcaaggaggtggcggctcaagtgaaggctccacttgttcttaaagact

SEQ ID NO: 163806 - DNA, 795 bp, Homo sapiens
  Payload ID: 12254
  Gene Symbol: PARK7
  Gene Name: parkinson protein 7
  ENST ID: ENST00000377493
  CDS Start-End: 59-568
gtgctggcgtgcgttcattttcagcctggtgtggggcttgtaaacatataacataaaaatggcttccaaaagagctctggtcatcctggctaaaggagcagaggaaatggagacggtcatccctgtagatgtcatgaggcgagctgggattaaggtcaccgttgcaggcctggctggaaaagacccagtacagtgtagccgtgatgtggtcatttgtcctgatgccagccttgaagatgcaaaaaaagagtctgctgctgtgaaggagatactgaaggagcaggaaaaccggaagggcctgatagccgccatctgtgcaggtcctactgctctgttggctcatgaaataggttttggaagtaaagttacaacacaccctcttgctaaagacaaaatgatgaatggaggtcattacacctactctgagaatcgtgtggaaaaagacggcctgattcttacaagccgggggcctgggaccagcttcgagtttgcgcttgcaattgttgaagccctgaatggcaaggaggtggcggctcaagtgaaggctccacttgttcttaaagactagagcagcgaactgcgacgatcacttagagaaacaggccgttaggaatccattctcactgtgttcgctctaaacaaaacagtggtaggttaatgtgttcagaagtcgctgtccttactacttttgcggaagtatggaagtcacaactacacagagatttctcagcctacaaattgtgtctatacatttctaagccttgtttgcagaataaacagggcatttagcaaact

SEQ ID NO: 163807 - DNA, 711 bp, Homo sapiens
  Payload ID: 12254
  Gene Symbol: PARK7
  Gene Name: parkinson protein 7
  ENST ID: ENST00000469225
  CDS Start-End: 1-483
ggaaaagacccagtacagtgtagccgtgatgtggtcatttgtcctgatgccagccttgaagatgcaaaaaaagagggaccatatgatgtggtggttctaccaggaggtaatctgggcgcacagaatttatctgagtctgctgctgtgaaggagatactgaaggagcaggaaaaccggaagggcctgatagccgccatctgtgcaggtcctactgctctgttggctcatgaaataggttttggaagtaaagttacaacacaccctcttgctaaagacaaaatgatgaatggaggatgtcaccttttctgtttctactttgcaggtcattacacctactctgagaatcgtgtggaaaaagacggcctgattcttacaagccgggggcctgggaccagcttcgagtttgcgcttgcaattgttgaagccctgaatggcaaggaggtggcggctcaagtgaaggctccacttgttcttaaagactagagcagcgaactgcgacgatcacttagagaaacaggccgttaggaatccattctcactgtgttcgctctaaacaaaacagtggtaggttaatgtgttcagaagtcgctgtccttactacttttgcggaagtatggaagtcacaactacacagagatttctcagcctacaaattgtgtctatacatttctaagccttgtttgcagaataaacagggcatttagcaaacta

SEQ ID NO: 163808 - DNA, 758 bp, Homo sapiens
  Payload ID: 12255
  Gene Symbol: PNKD
  Gene Name: paroxysmal nonkinesigenic dyskinesia
  Uniprot ID: Q8N490
  ENST ID: ENST00000248451
  CDS Start-End: 145-573
gagtagttctcctgggtccgctctgcgggcttctgggagatgtagtttctggtctgtaggcaggacggaaggagcgggggaggccccttacgcaaactacaattcccggcggggagcgcggtgaagcgggggtgggatctgaacatggcggcggtggtagctgctacggcgctgaagggccggggggcgagaaatgcccgcgtcctccgggggattctcgcaggagccacagctaacaaggcttctcataacaggacccgggccctgcaaagccacagctccccagagggcaaggaggaacctgaacccctatccccggagctggaatacattcccagaaagaggggcaagaaccccatgaaagctgtgggactggcctgggccatcggcttcccttgtggtatcctcctcttcatcctcaccaagcgggaagtggacaaggaccgtgtgaagcagatgaaggctcggcagaacatgcggttgtccaacacgggcgagtatgagagccagaggttcagggcttcctcccagagtgccccgtcccctgatgttgggtctggggtgcagacctgaggagcgctgcgaccctcctaggctattgactgttaagtcctcaggtttggcccagattccagttcgtgcctctgaggtccaccagagggcgcatgaagcccaggctgttgccaaaccctaccctgccccacaccaaggagccagccaaaggcaaataaagttattgagtgtttagtagaaaggaa

SEQ ID NO: 163809 - DNA, 2991 bp, Homo sapiens
  Payload ID: 12255
  Gene Symbol: PNKD
  Gene Name: paroxysmal nonkinesigenic dyskinesia
  Uniprot ID: Q8N490
  ENST ID: ENST00000258362
  CDS Start-End: 96-1181
cagagccggcaggcaggttccccgcggggggccggggccgggccgttgcctagcaacgccgagccccgcccggccggcgcgtgcctgcccccagcatggcttggcagggctggcccgcggcgtggcagtgggtcgccggctgctggctcctcctcgtccttgtcctcgtcctacttgtgagcccccgcggctgccgagcgcggcggggcctccgcggtctgctcatggcgcacagccagcggctgctcttccgaatcgggtacagcctgtacacccgcacctggctcgggtacctcttctaccgacagcagctgcgcagggctcggaatcgctaccctaaaggccactcgaaaacccagccccgcctcttcaatggagtgaaggtgcttcccatccctgtcctctcggacaactacagctacctcatcatcgacacccaggcccagctggctgtggctgtggacccttcagaccctcgggctgtgcaggcttccattgaaaaggaaggggtcaccttggtcgccattctgtgtactcacaagcactgggaccacagtggagggaaccgtgacctcagccggcggcaccgggactgtcgggtgtacgggagccctcaggacggcatcccctacctcacccatcccctgtgtcatcaagatgtggtcagcgtgggacggcttcagatccgggccctggctacacctggccacacacaaggccatctggtctacctactggatggggagccctacaagggtccctcctgcctcttctcaggggacctgctcttcctctctggctgtgggcggacctttgagggcaatgcagagaccatgctgagctcactggacactgtgctggggctaggggatgacacccttctgtggcctggtcatgagtatgcagaggagaacctgggctttgcaggtgtggtggagcccgagaacctggcccgggagaggaagatgcagtgggtgcagcggcagcggctggagcgcaagggcacgtgcccatctaccctgggagaggagcgctcctacaacccgttcctgagaacccactgcctggcgctacaggaggctctggggccggggccgggccccactggggatgatgactactcccgggcccagctcctggaagagctccgccggctgaaggatatgcacaagagcaagtgatgcccccagcgcccccagcccagcccactccccgcatggggaggccgccaccaccaacacctcatcatccttctcatcgctaacaccaccacctccatcggcacccaagcgggcatcatccccccacactgctcaggggaggggagggatcaggcgatgagactgtgaggccaaaagaagggggcctgttggaggctgggaaccccgcagcgcgaggctgcctcatcaacggcaagaggaaaggaggggtctcgggacatctccagaccctaccaactgggagggtcccctcctccttccctactcctgggacggcagcaaggacatgggggctgctgttagcttctccgtcaggaggcctcatctcactgtagccctggaacccagggtccatcttgcccttcccccatccatggttgggaaagaagctcagcccctcacagtggcctcaagtgtgatgccttacaaaagcaccactcagatgggcagctggactctggtgtcctgagactctgccctcttcccacagcctccctgccccacccatccctgcaaagccatttttcagacagagccattcctaagaacactgaagggctggaatgctggctggccactctctgcctcagtggcctccctacagcctggaagaaggagggtcctgattgccaaggaaacctcctcattgggctaaggagacactggagtctggagtgtggagccccacagtcttgcaggtcacatgctctccttgcacatctggcctggttgtacccactggcctctgcctctgccctgggccaaaagggcccctccttgccaggggagagacagccacggtcctctttggccgatgctgtattctcattttggcccttgttcttaggcccgtctgcccgccttcctccatctaacctttcctgttttatccgcagcccttttcttctttgagttagtaaagatttattctgtaacctgacactcatctggccctttgcagtttgccagccatattcccatgtgatttcccactggatccaggcccccatccggctggcaggagggggctctgacgtgcaggttggaaatcagaagtctgtgagagcgcgggagtgcatggcagctctgggtcccagacctggcccgacccctctgcttcacctccagctctgctgctcctctactcttgggtcgagatccctttggagccacagcgaggaaccctgtggtcctcaggcaggtgtaccttgagtcagccaggagccctcttttcctgtgtcaaagcctgccctcgggctctgctcacctctggtgaccctccaagatgcccctgccctcagtttcccctcatgatctggcctctgcccccttctctagccacagcctctagtacactttagcaataccaccagactagttagagttccccactcaccaagcaagacatgcagtttcatgcctctgtgccttcgctcatgctgtttcttccgactggaatgccttcccctgctcctcctgccttgtctgcctggcaagttcatctctcacgatcccctcaaaggccccctcctccaggaaggcaacccctgtgcccctcccctccaggctacctctgcactttgtcaatgcttctcttgtggcacttatcacactgtattttacttgtttacatgtttgtctccccttctagactgtgaatccttaagggcatggactgtatcttatgcatctctgtatttctgcgcctagcacggtgcctagcacacagtaggcgctcaataaatgttgaatgaatgaatgatttaatcaa

SEQ ID NO: 163810 - DNA, 3021 bp, Homo sapiens
  Payload ID: 12255
  Gene Symbol: PNKD
  Gene Name: paroxysmal nonkinesigenic dyskinesia
  Uniprot ID: Q8N490
  ENST ID: ENST00000273077
  CDS Start-End: 52-1209
aaactacaattcccggcggggagcgcggtgaagcgggggtgggatctgaacatggcggcggtggtagctgctacggcgctgaagggccggggggcgagaaatgcccgcgtcctccgggggattctcgcaggagccacagctaacaaggcttctcataacaggacccgggccctgcaaagccacagctccccagagggcaaggaggaacctgaacccctatccccggagctggaatacattcccagaaagaggggcaagaaccccatgaaagctgtgggactggcctggtacagcctgtacacccgcacctggctcgggtacctcttctaccgacagcagctgcgcagggctcggaatcgctaccctaaaggccactcgaaaacccagccccgcctcttcaatggagtgaaggtgcttcccatccctgtcctctcggacaactacagctacctcatcatcgacacccaggcccagctggctgtggctgtggacccttcagaccctcgggctgtgcaggcttccattgaaaaggaaggggtcaccttggtcgccattctgtgtactcacaagcactgggaccacagtggagggaaccgtgacctcagccggcggcaccgggactgtcgggtgtacgggagccctcaggacggcatcccctacctcacccatcccctgtgtcatcaagatgtggtcagcgtgggacggcttcagatccgggccctggctacacctggccacacacaaggccatctggtctacctactggatggggagccctacaagggtccctcctgcctcttctcaggggacctgctcttcctctctggctgtgggcggacctttgagggcaatgcagagaccatgctgagctcactggacactgtgctggggctaggggatgacacccttctgtggcctggtcatgagtatgcagaggagaacctgggctttgcaggtgtggtggagcccgagaacctggcccgggagaggaagatgcagtgggtgcagcggcagcggctggagcgcaagggcacgtgcccatctaccctgggagaggagcgctcctacaacccgttcctgagaacccactgcctggcgctacaggaggctctggggccggggccgggccccactggggatgatgactactcccgggcccagctcctggaagagctccgccggctgaaggatatgcacaagagcaagtgatgcccccagcgcccccagcccagcccactccccgcatggggaggccgccaccaccaacacctcatcatccttctcatcgctaacaccaccacctccatcggcacccaagcgggcatcatccccccacactgctcaggggaggggagggatcaggcgatgagactgtgaggccaaaagaagggggcctgttggaggctgggaaccccgcagcgcgaggctgcctcatcaacggcaagaggaaaggaggggtctcgggacatctccagaccctaccaactgggagggtcccctcctccttccctactcctgggacggcagcaaggacatgggggctgctgttagcttctccgtcaggaggcctcatctcactgtagccctggaacccagggtccatcttgcccttcccccatccatggttgggaaagaagctcagcccctcacagtggcctcaagtgtgatgccttacaaaagcaccactcagatgggcagctggactctggtgtcctgagactctgccctcttcccacagcctccctgccccacccatccctgcaaagccatttttcagacagagccattcctaagaacactgaagggctggaatgctggctggccactctctgcctcagtggcctccctacagcctggaagaaggagggtcctgattgccaaggaaacctcctcattgggctaaggagacactggagtctggagtgtggagccccacagtcttgcaggtcacatgctctccttgcacatctggcctggttgtacccactggcctctgcctctgccctgggccaaaagggcccctccttgccaggggagagacagccacggtcctctttggccgatgctgtattctcattttggcccttgttcttaggcccgtctgcccgccttcctccatctaacctttcctgttttatccgcagcccttttcttctttgagttagtaaagatttattctgtaacctgacactcatctggccctttgcagtttgccagccatattcccatgtgatttcccactggatccaggcccccatccggctggcaggagggggctctgacgtgcaggttggaaatcagaagtctgtgagagcgcgggagtgcatggcagctctgggtcccagacctggcccgacccctctgcttcacctccagctctgctgctcctctactcttgggtcgagatccctttggagccacagcgaggaaccctgtggtcctcaggcaggtgtaccttgagtcagccaggagccctcttttcctgtgtcaaagcctgccctcgggctctgctcacctctggtgaccctccaagatgcccctgccctcagtttcccctcatgatctggcctctgcccccttctctagccacagcctctagtacactttagcaataccaccagactagttagagttccccactcaccaagcaagacatgcagtttcatgcctctgtgccttcgctcatgctgtttcttccgactggaatgccttcccctgctcctcctgccttgtctgcctggcaagttcatctctcacgatcccctcaaaggccccctcctccaggaaggcaacccctgtgcccctcccctccaggctacctctgcactttgtcaatgcttctcttgtggcacttatcacactgtattttacttgtttacatgtttgtctccccttctagactgtgaatccttaagggcatggactgtatcttatgcatctctgtatttctgcgcctagcacggtgcctagcacacagtaggcgctcaataaatgttgaatgaatgaatgatttaatcaaga

SEQ ID NO: 163811 - DNA, 978 bp, Homo sapiens
  Payload ID: 12255
  Gene Symbol: PNKD
  Gene Name: paroxysmal nonkinesigenic dyskinesia
  Uniprot ID: Q8N490
  ENST ID: ENST00000436005
  CDS Start-End: 1-978
atgccctcctcagtgcatcataccaagaggcaaatgatgtctatatattgttactggtacagcctgtacacccgcacctggctcgggtacctcttctaccgacagcagctgcgcagggctcggaatcgctaccctaaaggccactcgaaaacccagccccgcctcttcaatggagtgaaggtgcttcccatccctgtcctctcggacaactacagctacctcatcatcgacacccaggcccagctggctgtggctgtggacccttcagaccctcgggctgtgcaggcttccattgaaaaggaaggggtcaccttggtcgccattctgtgtactcacaagcactgggaccacagtggagggaaccgtgacctcagccggcggcaccgggactgtcgggtgtacgggagccctcaggacggcatcccctacctcacccatcccctgtgtcatcaagatgtggtcagcgtgggacggcttcagatccgggccctggctacacctggccacacacaaggccatctggtctacctactggatggggagccctacaagggtccctcctgcctcttctcaggggacctgctcttcctctctggctgtgggcggacctttgagggcaatgcagagaccatgctgagctcactggacactgtgctggggctaggggatgacacccttctgtggcctggtcatgagtatgcagaggagaacctgggctttgcaggtgtggtggagcccgagaacctggcccgggagaggaagatgcagtgggtgcagcggcagcggctggagcgcaagggcacgtgcccatctaccctgggagaggagcgctcctacaacccgttcctgagaacccactgcctggcgctacaggaggctctggggccggggccgggccccactggggatgatgactactcccgggcccagctcctggaagagctccgccggctgaaggatatgcacaagagcaagtga

SEQ ID NO: 163812 - DNA, 3014 bp, Homo sapiens
  Payload ID: 12256
  Gene Symbol: PARPBP
  Gene Name: PARP1 binding protein
  Uniprot ID: Q9NWS1
  ENST ID: ENST00000327680
  CDS Start-End: 46-1785
ccgcacactgaagagtacgtcttcgggtctacccctaatcacataatggctgtgtttaatcagaagtctgtctcggatatgattaaagagtttcgaaaaaattggcgtgctctttgtaactctgagagaactactctatgtggtgcagactccatgctcttggcattgcagctttctatggcggagaacaacaaacagcacagtggagaatttacagtctctctcagtgatgttttattgacatggaaatacttgctccatgagaaattgaacttaccagttgaaaacatggacgtgactgaccattatgaggacgttaggaagatttatgatgatttcttgaagaacagtaatatgttagatctgattgatgtttatcaaaaatgtagggctttgacttctaattgtgaaaattataacacagtatctcctagtcaactactggattttctgtctggcaaacagtatgcagtaggtgatgaaactgatctttctataccaacatcaccaacaagtaaatacaaccgtgataatgaaaaggtgcagctgctagcaaggaaaattatcttttcatatttaaatctgctagtgaattcaaagaatgacctggctgtggcttatattctcaatattcctgatagaggactaggaagagaagccttcactgatttgaaacatgctgctcgagagaaacaaatgtctatctttttggtggccacgtcttttattagaacaatagagcttggagggaaaggatatgcaccaccaccatcagatcctttaaggacacatgtaaagggattgtctaattttattaatttcattgacaaattagatgagattcttggagaaataccaaacccaagcattgcagggggtcaaatactgtcagtgataaagatgcaactgattaaaggccaaaacagcagggatcctttttgcaaagcaatagaggaagttgctcaggatttggatttgaggattaaaaatattatcaattctcaagaaggtgttgtagctcttagcaccactgacatcagtcctgctcggccaaaatctcatgccataaaccatggtactgcatactgtggcagagatactgtgaaagccttattagttcttttggacgaagaagcagctaatgctcctaccaaaaacaaagcagagcttttatatgatgaggaaaacacaatccatcatcatggaacgtctattcttacactttttaggtctcccacacaggtgaataattcgataaaacccctaagagaacgcatctgtgtgtcaatgcaagagaaaaaaattaagatgaagcaaactttaattagatcccaatttgcttgtacttataaagatgactacatgataagcaaggataattggaataatgttaatttagcatcaaagcctttgtgtgttctttacatggaaaatgacctttctgagggtgtaaatccatctgttggaagatcaacaattggaacgagttttggaaatgttcatctggacagaagtaaaaatgaaaaagtatcaagaaaatcaaccagtcagacaggaaataaaagctcaaaaaggaaacaggtggatttggatggtgaaaatattctctgtgataatagaaatgaaccacctcaacataaaaatgctaaaatacctaagaaatcaaatgattcacagaatagattgtacggcaaactagctaaagtagcaaaaagtaataaatgtactgccaaggacaagttgatttctggccaggcaaagttaactcagttttttagactataaatttgtgtcttatatgctttaggtttatgtatctataaaccattcaccaaagacatgcttaatttttaagagatcaaggtgtaaattatgatgatttattattttggtctacagtgtatgtaaggttagtatgttaagcattgtttaaaaatactagtaagtcataattatgcagaattttcacaaagtttaatgcacagagaaagcatatcatttcagttactgatacatcttaacactactttcttttaaaacagacatttaacatacacaagttatagtagcagtatgggcttctcctcccattggcaattaaatgcttttattttcttctgaaaagatgatgtggaccaacaggtatcagacttgccaacaaggtcggtagactcttcccagcatacatctgagcactgaaggaagaagaaagtttaaattgtttaaaggactataattatcacacaaaatttattaagaaaaaaagaatggatctagtataactaattctgagtaaaccaaaatgataataattaattgttgctatttaatcccacatttttggcaggtgtaattgagccatggtcttatttgattttgttatgattgcatccaaattcactttaactcagagttctgtttaatggtggtaggatgtaagaattgaattttgaaaagactactcactgtcaaaatctctccttcctataggaaatttagctgagttttcttcatccccaatttctctcttttcttgtgttgattcagtattctgaactccattctcagctgggaaagctacagatccttttagtgcaagataaggttttatagccagattcagtggcagaccatgatttaagaaattatgtttggagcctgtgttctgtaaagagaaggttgatttggtttttagctatcgtattcggagtggaactataatacaattgtataatattcttgttgatcaattcaaagttactctgcactgtttttgactttttaaaaataccttagatgcaaatttataggagaaaaaacactttcagataagaggtgtttgctgggatggaagaactacctggcatgtaagaaatatcgtcagtcgtcctaatgcatattgtgactgtttgcatatacttctgtttataaaagtatcagttttacttttcagaggatttgtaagaatcatttaaattttcattgaaataaacgacaagtcacattgccactta

SEQ ID NO: 163813 - DNA, 835 bp, Homo sapiens
  Payload ID: 12256
  Gene Symbol: PARPBP
  Gene Name: PARP1 binding protein
  ENST ID: ENST00000392909
  CDS Start-End: 87-521
gactgcggcggccgcgggagggcatcccgttggggatccttccgcacactgaagagtacgtcttcgggtctacccctaatcacataatggctgtgtttaatcagaagtctgtctcggatatgattaaagagtttcgaaaaaattggcgtgctctttgtaactctgagagaactactctatgtggtgcagactccatgctcttggcattgcagctttctatggcggagaacaacaaacagcacagtggagaatttacagtctctctcagtgatgttttattgacatggaaatacttgctccatgagaaattgaacttaccagttgaaaacatggacgtgactgaccattatgaggacgttaggaagatttatgatgatttcttgaagaacagtaatatgttagatctgattgatgtttatcaaaaatgtagggctttgacttctaattgtgaaaattataacacagtatctcctggaaatttccagtgcggggaaaaagtagacaggaaaatatatccctagattgatttctcaaaaatgcactaagtataatcccaatttttgctgaaagtctctttcaaggggtcaactatacagccaccttcagaaagaggaagcttgctgctgtctaggccagatctcttggctcctggggaagatccaccagtgtcagcctcattgactctggagcggcagaagggagagtccctcttagcatggagctggtccctaaacttcagattgcctgggattcccatcacggtccagaagaagagacgagacctgaagaagctggcagctgtcatgcggcaagtgagacaatgggaaagccaccc

SEQ ID NO: 163814 - DNA, 1916 bp, Homo sapiens
  Payload ID: 12256
  Gene Symbol: PARPBP
  Gene Name: PARP1 binding protein
  Uniprot ID: Q9NWS1
  ENST ID: ENST00000392911
  CDS Start-End: 282-1778
gcacactgaagagtacgtcttcgggtctacccctaatcacataatggctgtgtttaatcagaagtctgtctcggatatgattaaagagtttcgaaaaaattggcgtgctctttgtaactctgagagaactactctatgtggtgcagactccatgctcttggcattgcagctttctatggcggagaacaacaaacagtggagaatttacagtctctctcagtgatgttttattgacatggaaatacttgctccatgagaaattgaacttaccagttgaaaacatggacgtgactgaccattatgaggacgttaggaagatttatgatgatttcttgaagaacagtaatatgttagatctgattgatgtttatcaaaaatgtagggctttgacttctaattgtgaaaattataacacagtatctcctagtcaactactggattttctgtctggcaaacagtatgcagtaggtgatgaaactgatctttctataccaacatcaccaacaagtaaatacaaccgtgataatgaaaaggtgcagctgctagcaaggaaaattatcttttcatatttaaatctgctagtgaattcaaagaatgacctggctgtggcttatattctcaatattcctgatagaggactaggaagagaagccttcactgatttgaaacatgctgctcgagagaaacaaatgtctatctttttggtggccacgtcttttattagaacaatagagcttggagggaaaggatatgcaccaccaccatcagatcctttaaggacacatgtaaagggattgtctaattttattaatttcattgacaaattagatgagattcttggagaaataccaaacccaagcattgcagggggtcaaatactgtcagtgataaagatgcaactgattaaaggccaaaacagcagggatcctttttgcaaagcaatagaggaagttgctcaggatttggatttgaggattaaaaatattatcaattctcaagaaggtgttgtagctcttagcaccactgacatcagtcctgctcggccaaaatctcatgccataaaccatggtactgcatactgtggcagagatactgtgaaagccttattagttcttttggacgaagaagcagctaatgctcctaccaaaaacaaagcagagcttttatatgatgaggaaaacacaatccatcatcatggaacgtctattcttacactttttaggtctcccacacaggtgaataattcgataaaacccctaagagaacgcatctgtgtgtcaatgcaagagaaaaaaattaagatgaagcaaactttaattagatcccaatttgcttgtacttataaagatgactacatgataagcaaggataattggaataatgttaatttagcatcaaagcctttgtgtgttctttacatggaaaatgacctttctgagggtgtaaatccatctgttggaagatcaacaattggaacgagttttggaaatgttcatctggacagaagtaaaaatgaaaaagtatcaagaaaatcaaccagtcagacaggaaataaaagctcaaaaaggaaacaggtggatttggatggtgaaaatattctctgtgataatagaaatgaaccacctcaacataaaaatgctaaaatacctaagaaatcaaatgattcacagaatagattgtacggcaaactagctaaagtagcaaaaagtaataaatgtactgccaaggacaagttgatttctggccaggcaaagttaactcagttttttagactataaatttgtgtcttatatgctttaggtttatgtatctataaaccattcaccaaagacatgcttaatttttaagagatcaaggtgtaaattatgatgatttattattttggtctacagtgtatgtaaggttagtatgttaag

SEQ ID NO: 163815 - DNA, 2133 bp, Homo sapiens
  Payload ID: 12256
  Gene Symbol: PARPBP
  Gene Name: PARP1 binding protein
  ENST ID: ENST00000412715
  CDS Start-End: 1-795
gcagactccatgctcttggcattgcagctttctatggcggagaacaacaaacagcacagtggagaatttacagtctctctcagtgatgttttattgacatggaaatacttgctccatgagaaattgaacttaccagttgaaaacatggacgtgactgaccattatgaggacgttaggaagatttatgatgatttcttgaagaacagtaatatgttagatctgattgatgtttatcaaaaatgtagggctttgacttctaattgtgaaaattataacacagtatctcctagtcaactactggattttctgtctggcaaacagtatgcagtaggtgatgaaactgatctttctataccaacatcaccaacaagtaaatacaaccgtgataatgaaaaggtgcagctgctagcaaggaaaattatcttttcatatttaaatctgctagtgaattcaaagaatgacctggctgtggcttatattctcaatattcctgatagaggactaggaagagaagccttcactgatttgaaacatgctgctcgagagaaacaaatgtctatctttttggtggccacgtcttttattagaacaatagagcttggagggaaaggatatgcaccaccaccatcagatcctttaaggacacatgtaaagggattgtctaattttattaatttcattgacaaattagatgagattcttggagaaataccaaacccaagagggtgtaaatccatctgttggaagatcaacaattggaacgagttttggaaatgttcatctggacagaagtaaaaatgaaaaagtatcaagaaaatcaaccagtcagacaggaaataaaagctcaaaaaggaaacaggtggatttggatggtgaaaatattctctgtgataatagaaatgaaccacctcaacataaaaatgctaaaatacctaagaaatcaaatgattcacagaatagattgtacggcaaactagctaaagtagcaaaaagtaataaatgtactgccaaggacaagttgatttctggccaggcaaagttaactcagttttttagactataaatttgtgtcttatatgctttaggtttatgtatctataaaccattcaccaaagacatgcttaatttttaagagatcaaggtgtaaattatgatgatttattattttggtctacagtgtatgtaaggttagtatgttaagcattgtttaaaaatactagtaagtcataattatgcagaattttcacaaagtttaatgcacagagaaagcatatcatttcagttactgatacatcttaacactactttcttttaaaacagacatttaacatacacaagttatagtagcagtatgggcttctcctcccattggcaattaaatgcttttattttcttctgaaaagatgatgtggaccaacaggtatcagacttgccaacaaggtcggtagactcttcccagcatacatctgagcactgaaggaagaagaaagtttaaattgtttaaaggactataattatcacacaaaatttattaagaaaaaaagaatggatctagtataactaattctgagtaaaccaaaatgataataattaattgttgctatttaatcccacatttttggcaggtgtaattgagccatggtcttatttgattttgttatgattgcatccaaattcactttaactcagagttctgtttaatggtggtaggatgtaagaattgaattttgaaaagactactcactgtcaaaatctctccttcctataggaaatttagctgagttttcttcatccccaatttctctcttttcttgtgttgattcagtattctgaactccattctcagctgggaaagctacagatccttttagtgcaagataaggttttatagccagattcagtggcagaccatgatttaagaaattatgtttggagcctgtgttctgtaaagagaaggttgatttggtttttagctatcgtattcggagtggaactataatacaattgtataatattcttgttgatcaattcaaagttactctgcactgtttttgactttttaaaaataccttagatgcaaatttataggagaaaaaacactttcagataagaggtgtttgctgggatggaaga

SEQ ID NO: 163816 - DNA, 2319 bp, Homo sapiens
  Payload ID: 12256
  Gene Symbol: PARPBP
  Gene Name: PARP1 binding protein
  ENST ID: ENST00000457614
  CDS Start-End: 1-195
gcagactccatgctcttggcattgcagctttctatggcggagaacaacaaacagagtcaactactggattttctgtctggcaaacagtatgcagtaggtgatgaaactgatctttctataccaacatcaccaacaagtaaatacaaccgtgataatgaaaaggtactgataaactgtggccacgtcttttattagaacaatagagcttggagggaaaggatatgcaccaccaccatcagatcctttaaggacacatgtaaagggattgtctaattttattaatttcattgacaaattagatgagattcttggagaaataccaaacccaagcattgcagggggtcaaatactgtcagtgataaagatgcaactgattaaaggccaaaacagcagggatcctttttgcaaagcaatagaggaagttgctcaggatttggatttgaggattaaaaatattatcaattctcaagaaggtgttgtagctcttagcaccactgacatcagtcctgctcggccaaaatctcatgccataaaccatggtactgcatactgtggcagagatactgtgaaagccttattagttcttttggacgaagaagcagctaatgctcctaccaaaaacaaagcagagcttttatatgatgaggaaaacacaatccatcatcatggaacgtctattcttacactttttaggtctcccacacaggtgaataattcgataaaacccctaagagaacgcatctgtgtgtcaatgcaagagaaaaaaattaagatgaagcaaactttaattagatcccaatttgcttgtacttataaagatgactacatgataagcaaggataattggaataatgttaatttagcatcaaagcctttgtgtgttctttacatggaaaatgacctttctgagggtgtaaatccatctgttggaagatcaacaattggaacgagttttggaaatgttcatctggacagaagtaaaaatgaaaaagtatcaagaaaatcaaccagtcagacaggaaataaaagctcaaaaaggaaacaggtggatttggatggtgaaaatattctctgtgataatagaaatgaaccacctcaacataaaaatgctaaaatacctaagaaatcaaatgattcacagaatagattgtacggcaaactagctaaagtagcaaaaagtaataaatgtactgccaaggacaagttgatttctggccaggcaaagttaactcagttttttagactataaatttgtgtcttatatgctttaggtttatgtatctataaaccattcaccaaagacatgcttaatttttaagagatcaaggtgtaaattatgatgatttattattttggtctacagtgtatgtaaggttagtatgttaagcattgtttaaaaatactagtaagtcataattatgcagaattttcacaaagtttaatgcacagagaaagcatatcatttcagttactgatacatcttaacactactttcttttaaaacagacatttaacatacacaagttatagtagcagtatgggcttctcctcccattggcaattaaatgcttttattttcttctgaaaagatgatgtggaccaacaggtatcagacttgccaacaaggtcggtagactcttcccagcatacatctgagcactgaaggaagaagaaagtttaaattgtttaaaggactataattatcacacaaaatttattaagaaaaaaagaatggatctagtataactaattctgagtaaaccaaaatgataataattaattgttgctatttaatcccacatttttggcaggtgtaattgagccatggtcttatttgattttgttatgattgcatccaaattcactttaactcagagttctgtttaatggtggtaggatgtaagaattgaattttgaaaagactactcactgtcaaaatctctccttcctataggaaatttagctgagttttcttcatccccaatttctctcttttcttgtgttgattcagtattctgaactccattctcagctgggaaagctacagatccttttagtgcaagataaggttttatagccagattcagtggcagaccatgatttaagaaattatgtttggagcctgtgttctgtaaagagaaggttgatttggtttttagctatcgtattcggagtggaactataatacaattgtataatattcttgttgatcaattcaaagttactctgcactgtttttgactttttaaaaataccttagatgcaaatttataggagaaaaaacactttcagataagaggtgtttgctgggatggaaga

SEQ ID NO: 163817 - DNA, 2212 bp, Homo sapiens
  Payload ID: 12256
  Gene Symbol: PARPBP
  Gene Name: PARP1 binding protein
  ENST ID: ENST00000417507
  CDS Start-End: 1-810
gcagactccatgctcttggcattgcagctttctatggcggagaacaacaaacagcacagtggagaatttacagtctctctcagtgatgttttattgacatggaaatacttgctccatgagaaattgaacttaccagttgaaaacatggacgtgactgaccattatgaggacgttaggaagatttatgatgatttcttgaagaacagtaatatgttagatctgattgatgtttatcaaaaatgtagggctttgacttctaattgtgaaaattataacacagtatctcctagtcaactactggattttctgtctggcaaacagtatgcagtaggtgatgaaactgatctttctataccaacatcaccaacaagtaaatacaaccgtgataatgaaaaggtgcagctgctagcaaggaaaattatcttttcatatttaaatctgctagtgaattcaaagaatgacctggctgtggcttatattctcaatattcctgatagaggactaggaagagaagccttcactgatttgaaacatgctgctcgagagaaacaaatgtctatctttttggtggccacgtcttttattagaacaatagagcttggagggaaaggatatgcaccaccaccatcagatcctttaaggacacatgtaaagggattgtctaattttattaatttcattgacaaattagatgagattcttggagaaataccaaacccaaggtctcccacacaggtgaataattcgataaaacccctaagagaacgcatctgtgtgtcaatgcaagagaaaaaaattaagagggtgtaaatccatctgttggaagatcaacaattggaacgagttttggaaatgttcatctggacagaagtaaaaatgaaaaagtatcaagaaaatcaaccagtcagacaggaaataaaagctcaaaaaggaaacaggtggatttggatggtgaaaatattctctgtgataatagaaatgaaccacctcaacataaaaatgctaaaatacctaagaaatcaaatgattcacagaatagattgtacggcaaactagctaaagtagcaaaaagtaataaatgtactgccaaggacaagttgatttctggccaggcaaagttaactcagttttttagactataaatttgtgtcttatatgctttaggtttatgtatctataaaccattcaccaaagacatgcttaatttttaagagatcaaggtgtaaattatgatgatttattattttggtctacagtgtatgtaaggttagtatgttaagcattgtttaaaaatactagtaagtcataattatgcagaattttcacaaagtttaatgcacagagaaagcatatcatttcagttactgatacatcttaacactactttcttttaaaacagacatttaacatacacaagttatagtagcagtatgggcttctcctcccattggcaattaaatgcttttattttcttctgaaaagatgatgtggaccaacaggtatcagacttgccaacaaggtcggtagactcttcccagcatacatctgagcactgaaggaagaagaaagtttaaattgtttaaaggactataattatcacacaaaatttattaagaaaaaaagaatggatctagtataactaattctgagtaaaccaaaatgataataattaattgttgctatttaatcccacatttttggcaggtgtaattgagccatggtcttatttgattttgttatgattgcatccaaattcactttaactcagagttctgtttaatggtggtaggatgtaagaattgaattttgaaaagactactcactgtcaaaatctctccttcctataggaaatttagctgagttttcttcatccccaatttctctcttttcttgtgttgattcagtattctgaactccattctcagctgggaaagctacagatccttttagtgcaagataaggttttatagccagattcagtggcagaccatgatttaagaaattatgtttggagcctgtgttctgtaaagagaaggttgatttggtttttagctatcgtattcggagtggaactataatacaattgtataatattcttgttgatcaattcaaagttactctgcactgtttttgactttttaaaaataccttagatgcaaatttataggagaaaaaacactttcagataagaggtgtttgctgggatggaaga

SEQ ID NO: 163818 - DNA, 2452 bp, Homo sapiens
  Payload ID: 12256
  Gene Symbol: PARPBP
  Gene Name: PARP1 binding protein
  ENST ID: ENST00000541394
  CDS Start-End: 106-2076
attcagcggcgacagcggcgactgcggcggccgcgggagggcatcccgttggggatccttccgcacactgaagagtacgtcttcgggtctacccctaatcacataatggctgtgtttaatcagaagtctgtctcggatatgattaaagagtttcgaaaaaattggcgtgctctttgtaactctgagagaactactctatgtggtgcagactccatgctcttggcattgcagctttctatggcggagaacaacaaacagcacagtggagaatttacagtctctctcagtgatgttttattgacatggaaatacttgctccatgagaaattgaacttaccagttgaaaacatggacgtgactgaccattatgaggacgttaggaagatttatgatgatttcttgaagaacagtaatatgttagatctgattgatgtttatcaaaaatgtagggctttgacttctaattgtgaaaattataacacagtatctcctgggtcaactatacagccaccttcagaaagaggaagcttgctgctgtctaggccagatctcttggctcctggggaagatccaccagtgtcagcctcattgactctggagcggcagaagggagagtccctcttagcatggagctggtccctaaacttcagattgcctgggattcccatcacggtccagaagaagagacgagacctgaagaagctggcagctgtcatgcggcaaagtcaactactggattttctgtctggcaaacagtatgcagtaggtgatgaaactgatctttctataccaacatcaccaacaagtaaatacaaccgtgataatgaaaaggtgcagctgctagcaaggaaaattatcttttcatatttaaatctgctagtgaattcaaagaatgacctggctgtggcttatattctcaatattcctgatagaggactaggaagagaagccttcactgatttgaaacatgctgctcgagagaaacaaatgtctatctttttggtggccacgtcttttattagaacaatagagcttggagggaaaggatatgcaccaccaccatcagatcctttaaggacacatgtaaagggattgtctaattttattaatttcattgacaaattagatgagattcttggagaaataccaaacccaagcattgcagggggtcaaatactgtcagtgataaagatgcaactgattaaaggccaaaacagcagggatcctttttgcaaagcaatagaggaagttgctcaggatttggatttgaggattaaaaatattatcaattctcaagaaggtgttgtagctcttagcaccactgacatcagtcctgctcggccaaaatctcatgccataaaccatggtactgcatactgtggcagagatactgtgaaagccttattagttcttttggacgaagaagcagctaatgctcctaccaaaaacaaagcagagcttttatatgatgaggaaaacacaatccatcatcatggaacgtctattcttacactttttaggtctcccacacaggtgaataattcgataaaacccctaagagaacgcatctgtgtgtcaatgcaagagaaaaaaattaagatgaagcaaactttaattagatcccaatttgcttgtacttataaagatgactacatgataagcaaggataattggaataatgttaatttagcatcaaagcctttgtgtgttctttacatggaaaatgacctttctgagggtgtaaatccatctgttggaagatcaacaattggaacgagttttggaaatgttcatctggacagaagtaaaaatgaaaaagtatcaagaaaatcaaccagtcagacaggaaataaaagctcaaaaaggaaacaggtggatttggatggtgaaaatattctctgtgataatagaaatgaaccacctcaacataaaaatgctaaaatacctaagaaatcaaatgattcacagaatagattgtacggcaaactagctaaagtagcaaaaagtaataaatgtactgccaaggacaagttgatttctggccaggcaaagttaactcagttttttagactataaatttgtgtcttatatgctttaggtttatgtatctataaaccattcaccaaagacatgcttaatttttaagagatcaaggtgtaaattatgatgatttattattttggtctacagtgtatgtaaggttagtatgttaagcattgtttaaaaatactagtaagtcataattatgcagaattttcacaaagtttaatgcacagagaaagcatatcatttcagttactgatacatcttaacactactttcttttaaaacagacatttaacatacacaagttatagtagcagtatgggcttctcctcccattggcaattaaatgcttttattttcttctgaaaagatgatgtggaccaacaggtatcagacttgccaacaa

SEQ ID NO: 163819 - DNA, 976 bp, Homo sapiens
  Payload ID: 12256
  Gene Symbol: PARPBP
  Gene Name: PARP1 binding protein
  Uniprot ID: Q9NWS1
  ENST ID: ENST00000537257
  CDS Start-End: 46-447
ccgcacactgaagagtacgtcttcgggtctacccctaatcacataatggctgtgtttaatcagaagtctgtctcggatatgattaaagagtttcgaaaaaattggcgtgctctttgtaactctgagagaactactctatgtggtgcagactccatgctcttggcattgcagctttctatggcggagaacaacaaacagcacagtggagaatttacagtctctctcagtgatgttttattgacatggaaatacttgctccatgagaaattgaacttaccagttgaaaacatggacgtgactgaccattatgaggacgttaggaagatttatgatgatttcttgaagaacagtaatatgttagatctgattgatgtttatcaaaaatgtagggctttgacttctaattgtgaaaattataacacagtatctcctgtaagtattttttaaacaattctattttaatcaaattaaaatttagctctatttattttgaattatagtatcaccagttatagtaacttggtaatgtttttgctttgtgaatcatgttaaaaatgggaaaatttagctacctgaaagctacttattacttgaaagaaagattttgtggtaaattttcttggacttgtgttattgttatttagttgctatacggatagcttcttattagatcaaaaatccctaacaaagaaattagtcccaaatgcctgatttctttttgaatcatgtcaaagattgcttttgtattcactttcttgatttaatgtgcatctgttcatttggcatatgttggataaatgattggtgtgactttttctatggattaataatgttattttactacatataggtatcatttattttatgaaaatagtattatgcaatatacatgagataatagactattctttttttgcacaagcatttttttaatggagtataaatgtaaaaattaaatggagtagtatcccttgca

SEQ ID NO: 163820 - DNA, 992 bp, Homo sapiens
  Payload ID: 12256
  Gene Symbol: PARPBP
  Gene Name: PARP1 binding protein
  ENST ID: ENST00000543784
  CDS Start-End: 96-647
gacagcggcgactgcggcggccgcgggagggcatcccgttggggatccttccgcacactgaagagtacgtcttcgggtctacccctaatcacataatggctgtgtttaatcagaagtctgtctcggatatgattaaagagtttcgaaaaaattggcgtgctctttgtaactctgagagaactactctatgtggtgcagactccatgctcttggcattgcagctttctatggcggagaacaacaaacaggtgcagctgctagcaaggaaaattatcttttcatatttaaatctgctagtgaattcaaagaatgacctggctgtggcttatattctcaatattcctgatagaggactaggaagagaagccttcactgatttgaaacatgctgctcgagagaaacaaatgtctatctttttggtggccacgtcttttattagaacaatagagcttggagggaaaggatatgcaccaccaccatcagatcctttaaggacacatgtaaagggattgtctaattttattaatttcattgacaaattagatgagattcttggagaaataccaaacccaagagggtgtaaatccatctgttggaagatcaacaattggaacgagttttggaaatgttcatctggacagaagtaaaaatgaaaaagtatcaagaaaatcaaccagtcagacaggaaataaaagctcaaaaaggaaacaggtggatttggatggtgaaaatattctctgtgataatagaaatgaaccacctcaacataaaaatgctaaaatacctaagaaatcaaatgattcacagaatagattgtacggcaaactagctaaagtagcaaaaagtaataaatgtactgccaaggacaagttgatttctggccaggcaaagttaactcagttttttagactataaatttgtgtcttatatgctttaggtttatgtatctataaaccattcaccaaagacatgcttaatttttaagagatcaa

SEQ ID NO: 163821 - DNA, 4003 bp, Homo sapiens
  Payload ID: 12257
  Gene Symbol: PALB2
  Gene Name: partner and localizer of BRCA2
  Uniprot ID: Q86YC2
  ENST ID: ENST00000261584
  CDS Start-End: 154-3714
gcccgcgtgggtcagctgatcgcgcactgagggtgcgatcccgggctccccattccttcctggggcgcctccccggcccagggccaactgggtcccggtgtcggcaggcctggggtcggcgacggctgctcttttcgttctgtcgcctgcccgatggacgagcctcccgggaagcccctcagctgtgaggagaaggaaaagttaaaggagaaattagcattcttgaaaagggaatacagcaagacactagcccgccttcagcgtgcccaaagagctgaaaagattaagcattctattaagaaaacagtagaagaacaagattgtttgtctcagcaggatctctcaccgcagctaaaacactcagaacctaaaaataaaatatgtgtttatgacaagttacacatcaaaacccatcttgatgaagaaactggagaaaagacatctatcacacttgatgttgggcctgagtcctttaaccctggagatggcccaggaggattacctatacaaagaacagatgacacccaagaacattttccccacagggtcagtgaccctagtggtgagcaaaagcagaagctgccaagcagaagaaagaagcagcagaagaggacatttatttcacaggagagagactgtgtctttggcactgattcactcagattgtctgggaaaagactaaaggaacaggaagaaatcagtagcaaaaatcctgctagatcaccagtaactgaaataagaactcaccttttaagtcttaaatctgaacttccagattctccagaaccagttacagaaattaatgaagacagtgtattaattccaccaactgcccaaccagaaaaaggtgttgatacattcctaagaagacctaatttcaccagggcgactacagttcctttacagactctatcagatagcggtagtagtcagcaccttgaacacattcctcctaaaggtagcagtgaacttactactcacgacctaaaaaacattagatttacttcacctgtaagtttggaggcacaaggcaaaaaaatgactgtctctacagataacctccttgtaaataaagctataagtaaaagtggccaactgcccacaagttctaatttagaggcaaatatttcatgttctctaaatgaactcacctacaataacttaccagcaaatgaaaaccaaaacttaaaagaacaaaatcaaacagagaaatctttaaaatctcccagtgacactcttgatggcaggaatgaaaatcttcaggaaagtgagattctaagtcaacctaagagtcttagcctggaagcaacctctcctctttctgcagaaaaacattcttgcacagtgcctgaaggccttctgtttcctgcagaatattatgttagaacaacacgaagcatgtccaattgccagaggaaagtagccgtggaggctgtcattcagagtcatttggatgtcaagaaaaaagggtttaaaaataaaaataaggatgcaagtaaaaatttaaacctttccaatgaggaaactgaccaaagtgaaattaggatgtctggcacatgcacaggacaaccaagttcaagaacctctcagaaacttctctcattaactaaagtcagctctcccgctgggcccactgaagataatgacttgtctaggaaggcagttgcccaagcacctggtagaagatacacaggaaaaagaaaatcagcctgcaccccagcatcagatcattgtgaaccacttttgccaacttctagcctgtcgattgttaacaggtccaaggaagaagtcacctcacacaaatatcagcacgaaaaattatttattcaagtgaaagggaagaaaagtcgtcatcaaaaagaggattccctttcttggagtaatagtgcttatttatccttggatgatgatgctttcacggctccatttcatagggatggaatgctgagtttaaagcaactactgtcttttctcagtatcacagactttcagttacctgatgaagactttggacctcttaagcttgaaaaagtgaagtcctgctcagaaaaaccagtggagccctttgagtcaaaaatgtttggagagagacatcttaaagagggaagctgtatttttccagaggaactgagtcctaaacgcatggatacagaaatggaggacttagaagaggaccttattgttctaccaggaaaatcacatcccaaaaggccaaactcgcaaagccagcatacaaagacgggcctttcttcatccatattactttatactcctttaaatacggttgcgcctgatgataatgacaggcctaccacagacatgtgttcacctgctttccccatcttaggtactactccagcctttggccctcaaggctcctatgaaaaagcatctacagaagttgctggacgaacttgctgcacaccccaacttgctcatttgaaagactcagtctgtcttgccagtgatactaaacaattcgacagttcaggcagcccagcaaaaccacataccaccctgcaagtgtcaggcaggcaaggacaacctacctgtgactgtgactctgtcccgccaggaacacctccacccattgagtcattcacttttaaagaaaatcagctctgtagaaacacatgccaggagctgcataaacattccgtcgaacagactgaaacagcagagcttcctgcttctgatagcataaacccaggcaacctacaattggtttcagagttaaagaatccttcaggttcctgttccgtagatgtgagtgccatgttttgggaaagagccggttgtaaagagccatgtatcataactgcttgcgaagatgtagtttctctttggaaagctctggatgcttggcagtgggaaaaactttatacctggcacttcgcagaggttccagtattacagatagttccagtgcctgatgtgtataatctcgtgtgtgtagctttgggaaatttggaaatcagagagatcagggcattgttttgttcctctgatgatgaaagtgaaaagcaagtactactgaagtctggaaatataaaagctgtgcttggcctgacaaagaggaggctagttagtagcagtgggaccctttctgatcaacaagtagaagtcatgacgtttgcagaagatggaggaggcaaagaaaaccaatttttgatgccccctgaggagactatactaacttttgctgaggtccaagggatgcaagaagctctgcttggtactactattatgaacaacattgttatttggaatttaaaaactggtcaactcctgaaaaagatgcacattgatgattcttaccaagcttcagtctgtcacaaagcctattctgaaatggggcttctctttattgtcctgagtcatccctgtgccaaagagagtgagtcgttgcgaagccctgtgtttcagctcattgtgattaaccctaagacgactctcagcgtgggtgtgatgctgtactgtcttcctccagggcaggctggcaggttcctggaaggtgacgtgaaagatcactgtgcagcagcaatcttgacttctggaacaattgccatttgggacttacttctcggtcagtgtactgccctcctcccacctgtctctgaccaacattggtcttttgtgaaatggtcgggtacagactctcatttgctggctggacaaaaagatggaaatatatttgtataccactattcataagttagggtaaagtgaaaacacaattttctggatatattgggcctcttagtattttttggagttttaaatataaaggagaatatctgaatgacacttaaaatgattgcttgtttatgtccagacagacttattttttattctaatgatggtagcaccactgatcttggatgtacatttatgtatactttgagaaaaagggttttaggttgatttttgtaatttcccacatttgtacatgtgcttttaaaggtgtacataaagcttcaaatggcaataaatatttattttt

SEQ ID NO: 163822 - DNA, 3963 bp, Homo sapiens
  Payload ID: 12257
  Gene Symbol: PALB2
  Gene Name: partner and localizer of BRCA2
  ENST ID: ENST00000568219
  CDS Start-End: 997-3672
actgagggtgcgatcccgggctccccattccttcctggggcgcctccccggcccagggccaactgggtcccggtgtcggcaggcctggggtcggcgacggctgctcttttcgttctgtcgcctgcccgatggacgagcctcccgggaagcccctcagctttaaaggagaaattagcattcttgaaaagggaatacagcaagacactagcccgccttcagcgtgcccaaagagctgaaaagattaagcattctattaagaaaacagtagaagaacaagattgtttgtctcagcaggatctctcaccgcagctaaaacactcagaacctaaaaataaaatatgtgtttatgacaagttacacatcaaaacccatcttgatgaagaaactggagaaaagacatctatcacacttgatgttgggcctgagtcctttaaccctggagatggcccaggaggattacctatacaaagaacagatgacacccaagaacattttccccacagggtcagtgaccctagtggtgagcaaaagcagaagctgccaagcagaagaaagaagcagcagaagaggacatttatttcacaggagagagactgtgtctttggcactgattcactcagattgtctgggaaaagactaaaggaacaggaagaaatcagtagcaaaaatcctgctagatcaccagtaactgaaataagaactcaccttttaagtcttaaatctgaacttccagattctccagaaccagttacagaaattaatgaagacagtgtattaattccaccaactgcccaaccagaaaaaggtgttgatacattcctaagaagacctaatttcaccagggcgactacagttcctttacagactctatcagatagcggtagtagtcagcaccttgaacacattcctcctaaaggtagcagtgaacttactactcacgacctaaaaaacattagatttacttcacctgtaagtttggaggcacaaggcaaaaaaatgactgtctctacagataacctccttgtaaataaagctataagtaaaagtggccaactgcccacaagttctaatttagaggcaaatatttcatgttctctaaatgaactcacctacaataacttaccagcaaatgaaaaccaaaacttaaaagaacaaaatcaaacagagaaatctttaaaatctcccagtgacactcttgatggcaggaatgaaaatcttcaggaaagtgagattctaagtcaacctaagagtcttagcctggaagcaacctctcctctttctgcagaaaaacattcttgcacagtgcctgaaggccttctgtttcctgcagaatattatgttagaacaacacgaagcatgtccaattgccagaggaaagtagccgtggaggctgtcattcagagtcatttggatgtcaagaaaaaagggtttaaaaataaaaataaggatgcaagtaaaaatttaaacctttccaatgaggaaactgaccaaagtgaaattaggatgtctggcacatgcacaggacaaccaagttcaagaacctctcagaaacttctctcattaactaaagtcagctctcccgctgggcccactgaagataatgacttgtctaggaaggcagttgcccaagcacctggtagaagatacacaggaaaaagaaaatcagcctgcaccccagcatcagatcattgtgaaccacttttgccaacttctagcctgtcgattgttaacaggtccaaggaagaagtcacctcacacaaatatcagcacgaaaaattatttattcaagtgaaagggaagaaaagtcgtcatcaaaaagaggattccctttcttggagtaatagtgcttatttatccttggatgatgatgctttcacggctccatttcatagggatggaatgctgagtttaaagcaactactgtcttttctcagtatcacagactttcagttacctgatgaagactttggacctcttaagcttgaaaaagtgaagtcctgctcagaaaaaccagtggagccctttgagtcaaaaatgtttggagagagacatcttaaagagggaagctgtatttttccagaggaactgagtcctaaacgcatggatacagaaatggaggacttagaagaggaccttattgttctaccaggaaaatcacatcccaaaaggccaaactcgcaaagccagcatacaaagacgggcctttcttcatccatattactttatactcctttaaatacggttgcgcctgatgataatgacaggcctaccacagacatgtgttcacctgctttccccatcttaggtactactccagcctttggccctcaaggctcctatgaaaaagcatctacagaagttgctggacgaacttgctgcacaccccaacttgctcatttgaaagactcagtctgtcttgccagtgatactaaacaattcgacagttcaggcagcccagcaaaaccacataccaccctgcaagtgtcaggcaggcaaggacaacctacctgtgactgtgactctgtcccgccaggaacacctccacccattgagtcattcacttttaaagaaaatcagctctgtagaaacacatgccaggagctgcataaacattccgtcgaacagactgaaacagcagagcttcctgcttctgatagcataaacccaggcaacctacaattggtttcagagttaaagaatccttcaggttcctgttccgtagatgtgagtgccatgttttgggaaagagccggttgtaaagagccatgtatcataactgcttgcgaagatgtagtttctctttggaaagctctggatgcttggcagtgggaaaaactttatacctggcacttcgcagaggttccagtattacagatagttccagtgcctgatgtgtataatctcgtgtgtgtagctttgggaaatttggaaatcagagagatcagggcattgttttgttcctctgatgatgaaagtgaaaagcaagtactactgaagtctggaaatataaaagctgtgcttggcctgacaaagaggaggctagttagtagcagtgggaccctttctgatcaacaagtagaagtcatgacgtttgcagaagatggaggaggcaaagaaaaccaatttttgatgccccctgaggagactatactaacttttgctgaggtccaagggatgcaagaagctctgcttggtactactattatgaacaacattgttatttggaatttaaaaactggtcaactcctgaaaaagatgcacattgatgattcttaccaagcttcagtctgtcacaaagcctattctgaaatggggcttctctttattgtcctgagtcatccctgtgccaaagagagtgagtcgttgcgaagccctgtgtttcagctcattgtgattaaccctaagacgactctcagcgtgggtgtgatgctgtactgtcttcctccagggcaggctggcaggttcctggaaggtgacgtgaaagatcactgtgcagcagcaatcttgacttctggaacaattgccatttgggacttacttctcggtcagtgtactgccctcctcccacctgtctctgaccaacattggtcttttgtgaaatggtcgggtacagactctcatttgctggctggacaaaaagatggaaatatatttgtataccactattcataagttagggtaaagtgaaaacacaattttctggatatattgggcctcttagtattttttggagttttaaatataaaggagaatatctgaatgacacttaaaatgattgcttgtttatgtccagacagacttattttttattctaatgatggtagcaccactgatcttggatgtacatttatgtatactttgagaaaaagggttttaggttgatttttgtaatttcccacatttgtacatgtgcttttaaaggtgtacataaagcttcaaatggcaataaatatttatttttat

SEQ ID NO: 163823 - DNA, 626 bp, Homo sapiens
  Payload ID: 12257
  Gene Symbol: PALB2
  Gene Name: partner and localizer of BRCA2
  ENST ID: ENST00000566069
  CDS Start-End: 1-131
ctactattatgaacaacattgttatttggaatttaaaaactggtcaactcctgaaaaagatgcacattgatgattcttaccaagcttcagtctgtcacaaagcctattctgaaatggttcctggaaggtgacgtgaaagatcactgtgcagcagcaatcttgacttctggaacaattgccatttgggacttacttctcggtcagtgtactgccctcctcccacctgtctctgaccaacattggtcttttgtgaaatggtcgggtacagactctcatttgctggctggacaaaaagatggaaatatatttgtataccactattcataagttagggtaaagtgaaaacacaattttctggatatattgggcctcttagtattttttggagttttaaatataaaggagaatatctgaatgacacttaaaatgattgcttgtttatgtccagacagacttattttttattctaatgatggtagcaccactgatcttggatgtacatttatgtatactttgagaaaaagggttttaggttgatttttgtaatttcccacatttgtacatgtgcttttaaaggtgtacataaagcttcaaatggcaataaatatttatttttatacattctg

SEQ ID NO: 163824 - DNA, 344 bp, Homo sapiens
  Payload ID: 12257
  Gene Symbol: PALB2
  Gene Name: partner and localizer of BRCA2
  ENST ID: ENST00000565038
  CDS Start-End: 1-91
aaagattaagcattctattaagaaaacagtagaagaacaagattgtttgtctcagcaggatctctcaccgcagctaaaacactcagactgaaacagcagagcttcctgcttctgatagcataaacccaggcaacctacaattggtttcagagttaaagaatccttcaggttcctgttccgtagatgtgagtgccatgttttgggaaagagccggttgtaaagagccatgtatcataactgcttgcgaagatgtagtttctctttggaaagctctggatgcttggcagtgggaaaaactttatacctggcacttcgcagaggttccagtattacagatagttcca

SEQ ID NO: 163825 - DNA, 815 bp, Homo sapiens
  Payload ID: 12257
  Gene Symbol: PALB2
  Gene Name: partner and localizer of BRCA2
  ENST ID: ENST00000561514
  CDS Start-End: 547-815
acccttgctcctcccccctcccacaccctcaatctttacttctccccccggacggcctcaagtaaatcttttaagtctggtacttccaggtcctttcgtgtgttaatgtgggtggtggaggaggggcgtatccctaaccaccaaaaaggaatcctatgtatattttttggagaagggaatgttcataaatggtatgatctgaatggttctgcaggttccgtttagctttcctgtcaggacatgtttatctaccttgctttcttttttaagttctagacagtatgttgtagtttggaagtgccctcgttttgtttcttttttcttccttttctgtttttcttcttttttgagacagagtctcactctgccacccatgctggggtgcagtggcgcgatctcggctcactgcaacctccgcttcctgggatcaagcgactctcctgcctcagcctcccgagtagctgggattacacgaacccgccactgcacctggccttggaagtgcccttgcttctttagactgtactttactgatagacttttaggatgtttccagcttgtgctgatgttattcttatcctggcttaccttctggtggagttaaaggagaaattagcattcttgaaaagggaatacagcaagacactagcccgccttcagcgtgcccaaagagctgaaaagattaagcattctattaagaaaacagtagaagaacaagattgtttgtctcagcaggatctctcaccgcagctaaaacactcagaacctaaaaataaaatatgtgtttatgacaagttacacatcaaaacccatct

SEQ ID NO: 163826 - DNA, 2286 bp, Homo sapiens
  Payload ID: 12258
  Gene Symbol: PNO1
  Gene Name: partner of NOB1 homolog
  Uniprot ID: Q9NRX1
  ENST ID: ENST00000263657
  CDS Start-End: 92-850
gcggagctgcaggggtggttggctgaggctggcttctgcgtggtgcagctgcgcacgtgtttcagccggcagcgctttaagatttccggggatggaatccgaaatggaaacgcagagcgccagggcagaggagggctttacccaggtcacccgcaagggtggccgacgggcgaagaaacgacaggctgaacagctgtccgcagcaggagagggcggggatgcgggccgcatggacacagaggaggccaggccggcgaagaggcccgtcttcccacccctctgtggggacgggctcctgagtgggaaagaagaaacaaggaaaattccagtcccagctaacagatacacaccattgaaagaaaactggatgaagatatttactcctattgtggaacatttgggacttcagatacgctttaacttgaaatcaaggaatgtagaaatcaggacttgtaaagaaaccaaggatgttagtgctctgacaaaagcagctgattttgtgaaagcttttattctcggctttcaggtggaggatgcacttgccctcatcaggttggatgacctcttcctagagtcttttgaaattacagatgttaaacccctaaagggagaccatctatccagggcaataggaagaatcgctggcaaaggaggaaaaaccaaattcaccatagagaatgtgacacggacaaggatagttttggctgatgtgaaagttcacatccttggctccttccaaaatatcaagatggcaagaactgccatttgcaacctaatcttgggaaatcctccttccaaggtttatggcaatattcgagctgtggctagcagatcagcagatcgattctgatttcaagtcagagactttttatcttgcctttggactctggtgaaaaatactttacagtggtcggtcacaagaaaccagctgaacaatttcagtcatttgaagcctccgtcccttcttccattctcagccagaagcataaacagaaaagaaagatttaagaggattcacactcaacaggttttaggataatttaaatatcaaaaattgattgttatacttaacacattaggtataatttatcatttatctgaaatcacatgtagcagattgcatagtctgtaatcctctcagagggaaacttcttgtttaaacagctctatatggatttatacttttatatttataaatttataacttcatacaaatttataaacatttctttataaattgtaatttaatagattatctcagaaaaacctctctgaatgatgacccttccttaatactgggtgatgtgtgaatatttgtttgttggcagacagggtctcactttgtcacccaggctagagtgcagtggtgcaatctcagctcactgcagcctctgcctcctgagttcaagtgatcctcctgcttcagcctccctagtagctgggactacaggtatgcaccaccatgcctggctaattttttgtattttttgtagagatggggtttcgccatgttgaccaggctggtcttgaactcctggcctcaagggatccgtccgcctcagcctcccaaagtgctgggattacaggcataagccactgcgcctggccttgatgtgtgaatatttgagaggtcataagcagtggttttggccataccgtattataccatatacatcagtaagagctcatcttggaacctgttttgcagtttcttgcagtttcaaaaattaaagacctacatcacagggttaatgtgaagaaagctttatttttcaaatgagtatttaatgaaagtatacataaccaatgttgggtatacagatgcttctcaacttatgatgggtttaggtccagataagcccactgtgagttgaaaataccaaaagtcaaacatcatagcttagcctaccttaaaagggctccgaacactacattagcctacagttgggcaaaatcgtctaatacaaagcctattttataataaagtatgttgaatatctcatgtaatttttgaagattacattgaaagtgaaaaacagaatggttgggtacttgaaatacagcttctactgaatgaataattctaaagttgaaaaataatagtaagaaccatcataagtctgtttcttctagtaaaggtgaaatgatgaaagaatgcttttttcccacccaaaaaactatgctctataaatgcagattagctagtttctgcctgtttaaatggtattattttatacattacaaaatggaaggaacttactttattaaacttaactttgatacttc

SEQ ID NO: 163827 - DNA, 616 bp, Homo sapiens
  Payload ID: 12258
  Gene Symbol: PNO1
  Gene Name: partner of NOB1 homolog
  ENST ID: ENST00000430742
  CDS Start-End: 19-429
gctttaagatttccggggatggaatccgaaatggaaacgcagagcgccagggcagaggagggctttacccaggtcacccgcaagggtggccgacgggcgaagaaacgacaggctgaacagctgtccgcagcaggagagggcggggatgcgggccgcatggacacagaggaggccaggccggcgaagaggcccgtcttcccacccctctgtggggacgggctcctgagtgggaaagaagaaacaaggaaaattccagtcccagctaacagatacacaccattgaaagaaaactggatgaagatatttactcctattgtggaacatttgggacttcagatacgctttaacttgaaatcaaggaatgtagaaatcaggtgcatgcaggtagttaggcctggagctgttggtttaagaaacatcagcatataaatgataactaagaagattaagtcaggaatcccagggaagactgccttgagagagaagagaagaggacattgggcattgaagggatggacagaagacttgtaaagaaaccaaggatgttagtgctctgacaaaagcagctgattttgtgaaagcttttattctcggctttcaggtggaggatgcactt

SEQ ID NO: 163828 - DNA, 595 bp, Homo sapiens
  Payload ID: 12259
  Gene Symbol: PVALB
  Gene Name: parvalbumin
  Uniprot ID: P20472
  ENST ID: ENST00000216200
  CDS Start-End: 57-389
accagcccagcctttcagtgcaggctccagccctccacccccacccgagttgcaggatgtcgatgacagacttgctgaacgctgaggacatcaagaaggcggtgggagcctttagcgctaccgactccttcgaccacaaaaagttcttccaaatggtcggcctgaagaaaaagagtgcggatgatgtgaagaaggtgtttcacatgctggacaaggacaaaagtggcttcatcgaggaggatgagctgggattcatcctaaaaggcttctccccagatgccagagacctgtctgctaaagaaaccaagatgctgatggctgctggagacaaagatggggacggcaaaattggggttgacgaattctccactctggtggctgaaagctaagaagcactgactgcccctggtcttccacctctctgccctgaacacccaatctcggcccctctcgccaccctcctgcatttctgttcagttcgtttatgttattttttactcccccatcccctgtggccctctaatgacaccattcttctggaaaatgctggagaagcaataaaggttgtaccagtcagactctgcttgctcaggaa

SEQ ID NO: 163829 - DNA, 568 bp, Homo sapiens
  Payload ID: 12259
  Gene Symbol: PVALB
  Gene Name: parvalbumin
  ENST ID: ENST00000406910
  CDS Start-End: 1-320
cgatgacagacttgctgaacgctgaggacatcaagaaggcggtgggagcctttagcgctaccgactccttcgaccacaaaaagttcttccaaatggtcggcctgaagaaaaagagtgcggatgatgtgaagaaggtgtttcacatgctggacaaggacaaaagtggcttcatcgaggaggatgagctgggattcatcctaaaaggcttctccccagatgccagagacctgtctgctaaagaaaccaagatgctgatggctgctggagacaaagatggggacggcaaaattggggttgacgatccagcagatgttgactgagtagcaactctgtgcccggcaatggaagagaattctccactctggtggctgaaagctaagaagcactgactgcccctggtcttccacctctctgccctgaacacccaatctcggcccctctcgccaccctcctgcatttctgttcagttcgtttatgttattttttactcccccatcccctgtggccctctaatgacaccattcttctggaaaatgctggagaagcaataaaggttgtaccagtcaga

SEQ ID NO: 163830 - DNA, 422 bp, Homo sapiens
  Payload ID: 12259
  Gene Symbol: PVALB
  Gene Name: parvalbumin
  ENST ID: ENST00000404171
  CDS Start-End: 63-299
ccgggctccctcagccctccaatggagctaccgactccttcgaccacaaaaagttcttccaaatggtcggcctgaagaaaaagagtgcggatgatgtgaagaaggtgtttcacatgctggacaaggacaaaagtggcttcatcgaggaggatgagctgggattcatcctaaaaggcttctccccagatgccagagacctgtctgctaaagaaaccaagatgctgatggctgctggagacaaagatggggacggcaaaattggggttgacgaattctccactctggtggctgaaagctaagaagcactgactgcccctggtcttccacctctctgccctgaacacccaatctcggcccctctcgccaccctcctgcatttctgttcagttcgtttatgttattttttactcccccatcccctg

SEQ ID NO: 163831 - DNA, 569 bp, Homo sapiens
  Payload ID: 12259
  Gene Symbol: PVALB
  Gene Name: parvalbumin
  Uniprot ID: P20472
  ENST ID: ENST00000417718
  CDS Start-End: 31-363
acttgctctgcccgctcaaacagttgcaggatgtcgatgacagacttgctgaacgctgaggacatcaagaaggcggtgggagcctttagcgctaccgactccttcgaccacaaaaagttcttccaaatggtcggcctgaagaaaaagagtgcggatgatgtgaagaaggtgtttcacatgctggacaaggacaaaagtggcttcatcgaggaggatgagctgggattcatcctaaaaggcttctccccagatgccagagacctgtctgctaaagaaaccaagatgctgatggctgctggagacaaagatggggacggcaaaattggggttgacgaattctccactctggtggctgaaagctaagaagcactgactgcccctggtcttccacctctctgccctgaacacccaatctcggcccctctcgccaccctcctgcatttctgttcagttcgtttatgttattttttactcccccatcccctgtggccctctaatgacaccattcttctggaaaatgctggagaagcaataaaggttgtaccagtcagactctgcttgctcaggaa

SEQ ID NO: 163832 - DNA, 470 bp, Homo sapiens
  Payload ID: 12259
  Gene Symbol: PVALB
  Gene Name: parvalbumin
  ENST ID: ENST00000443735
  CDS Start-End: 167-470
aggctgaggtaggagtggagagagaaagggagcagggcctaggaggtcctgaggtgcaggctggccgctgaaggttcaggatcttcccccacgcggcaggacatccgccaaggttcccagatctgagacggcgcacctcctgcgtgtccttgacggcagttgcaggatgtcgatgacagacttgctgaacgctgaggacatcaagaaggcggtgggagcctttagcgctaccgactccttcgaccacaaaaagttcttccaaatggtcggcctgaagaaaaagagtgcggatgatgtgaagaaggtgtttcacatgctggacaaggacaaaagtggcttcatcgaggaggatgagctgggattcatcctaaaaggcttctccccagatgccagagacctgtctgctaaagaaaccaagatgctgatggctgctggagacaaagatggggacggcaaaattggggttgacg

SEQ ID NO: 163833 - DNA, 595 bp, Homo sapiens; identical to SEQ ID NO: 163828
  Payload ID: 12259
  Gene Symbol: PVALB
  Gene Name: parvalbumin
  Uniprot ID: P20472
  ENST ID: ENST00000620986
  CDS Start-End: 57-389

SEQ ID NO: 163834 - DNA, 422 bp, Homo sapiens; identical to SEQ ID NO: 163830
  Payload ID: 12259
  Gene Symbol: PVALB
  Gene Name: parvalbumin
  ENST ID: ENST00000630974
  CDS Start-End: 63-299

SEQ ID NO: 163835 - DNA, 569 bp, Homo sapiens; identical to SEQ ID NO: 163831
  Payload ID: 12259
  Gene Symbol: PVALB
  Gene Name: parvalbumin
  Uniprot ID: P20472
  ENST ID: ENST00000625893
  CDS Start-End: 31-363

SEQ ID NO: 163836 - DNA, 470 bp, Homo sapiens; identical to SEQ ID NO: 163832
  Payload ID: 12259
  Gene Symbol: PVALB
  Gene Name: parvalbumin
  ENST ID: ENST00000628345
  CDS Start-End: 167-470

SEQ ID NO: 163837 - DNA, 568 bp, Homo sapiens; identical to SEQ ID NO: 163829
  Payload ID: 12259
  Gene Symbol: PVALB
  Gene Name: parvalbumin
  ENST ID: ENST00000627445
  CDS Start-End: 1-320

SEQ ID NO: 163838 - DNA, 4458 bp, Homo sapiens
  Payload ID: 12260
  Gene Symbol: PARVA
  Gene Name: parvin, alpha
  ENST ID: ENST00000334956
  CDS Start-End: 344-1582
acaggcagtagtgctggggcagagcgagctcaccagccgccggctggaagaccccgggagagtagcagggttgggttggttctcagatgtgttttgcgccaggctgtgtggtggggacagagcctgggtaaatgaagctttccggctcgaccgctcccaacctgggcacacacgtcctcctgtcctgcaaggggcagttttggggcatcctccctgcttggggcaacccaggggcgcaaggcgcggccccgggagcgcagctccttccagggcagagggcggcgcgagggagggagcgagggagggagcgagggaagggaaaggcgagcgtgagctgcctcaaatgcttggaataattccgcttccgtttggaaagccgcagcctcagtcccgccgccgcccgctgcgtccgcccagcgccagctccgcgtcccgaccggcccgcggcagcctgcgccgcgccatggccacctccccgcagaagtcgccttctgtccccaagtctcccactcccaagtcgcccccgtcccgcaagaaagatgattccttcttggggaaactcggagggaccctggcccggaggaagaaagccaaggaggtgtccgagctgcaggaggagggaatgaacgccatcaacctgcccctcagcccaattccctttgagctggaccccgaggacacgatgctggaggagaatgaggtgcgaacaatggtggatccaaactcacgcagtgaccccaagcttcaagaactgatgaaggtattaattgactggattaatgatgtgttggttggagaaagaatcattgtgaaagacctagctgaagatttgtatgatggacaagtcctgcagaagcttttcgagaaactggagagtgagaagctaaatgtggctgaggtcacccagtcagagattgctcagaagcaaaaactgcagactgtcctggagaagatcaatgaaaccctgaaacttcctcccaggagcatcaagtggaatgtggattctgttcatgccaagagcctggtggccatcttacacctgctcgttgctctgtctcagtatttccgcgcaccaattcgactcccagaccatgtttccatccaagtggttgtggtccagaaacgagaaggaatcctccagtctcggcaaatccaagaggaaataactggtaacacagaggctctttccgggaggcatgaacgtgatgcctttgacaccttgttcgaccatgccccagacaagctgaatgtggtgaaaaagacactcatcactttcgtgaacaagcacctgaataaactgaacctggaggtcacagaactggaaacccagtttgcagatggggtgtacctggtgctgctcatggggctcctggagggctactttgtgcccctgcacagcttcttcctgaccccggacagctttgaacagaaggtcttgaatgtctcctttgcctttgagctcatgcaagatggagggttggaaaagccaaaaccgcggccagaagacatagtcaactgtgacctgaaatctacactacgagtgttgtacaacctcttcaccaagtaccgtaacgtggagtgaggggctgccctgggcccaccactgcccaagagttcttgctgttggcgtactggaccctcctccgaactgccttaccctgcttattcctgtctcttgcactgtgctctcccacaagtccagctgcaacccagagatagtggaaactgaaattaggaaggaaatcatcaataactcagtgggctgacccatccctcccaggcgctggggaccaacctagcaatgaaggttgggaaggttgttcccttcccggtgccaggtccagatttccctccatgatttgggaaccagcttaggcaaaagagtccccacaagatgaaaataaagatcctagttaccattcaaaggatgctaactgtgtgtcaggccccacactaagtgctctgctctgatatactcaaggccattaatcttcaggactcccattgacgtaggtgtttcattccccttttacagatgaggaaactaaggcttggaggttaaatgacttgccagaagttggaatttttttcctctttgaacataacctctcccttctccctaaaggtaaccactattctgagtccaatcatcaaggttttgcttttctttttagctaagtatgcattcctcaatagtagacagtacaacatgtttataacaagccaattacattatgttctttgcatgttctaaagttgtgtatgtgtgtgcacatctgagcacgtgcacatgtacacctgagccaaaaacacgagaacccactgatctcaccactggggcaagctaggtcagagcttagtgattcacactgaaattggcaaattggatttaacccaattaatagtgtgtgtgtggcaggagtcatgtccctcacatcctttgtacaaatgaaaattactcttaattccttcagatttataataactctgtactttggtttcagggtgacatttgggaaggattttgtttagaattaatggagtggcacattttgcagcctttttgcttgattgcatgtaatggaaatgccctatattttcctgcaaaataagtactaaattcattatcgttaagcaaatgtacaatatgctcaggcaccgcagagagctgggcacgggcccatgtgagcatcactttggaagtagggctcttcaacagggacccttgaactttaaagaaaggaacttctttttgccttctaattgatcatttagactattctggctaagtctgcccacatgtaattaccggctaattcaagcgaggaaaaatgtaagtcatttagaccaaagccaagcagtttctttgcgtgggttactcaagggcttgtggttacttgtatctcctctatgtgaacttgactttgaaagacagagctctagtgtgccagcctgctaagtcctgtaagaatagggaagggcggaggggggtgggcagtgactaggggacgagaagcatggggaaaatatttgcactctaaacatacagagatagaggtggggcttgtggtacttaacacttgtagccatcaactgactgagaccttgggctaaataatcaattgtgctgatattacatctcgttatggaatgttcctaaatatgccaggtagacaccagcccaagtaccctcctccagaagtctgtgactaccttgtcactactttaggcccattccacaaagcccatctctggtttgagaattcattttgatctgtatctacaccacccaaagttaggcctcctataatgtccaaaacattcctttcagcctttttatttcttactgtactgtctcttactgtactgtctatctgcagtaattgaggacccataaaatttagataactacatgtctttgctcttagaattgtcactcagcataatgagcatttaacatacaaaggcaatgtactgttttgtgttgatctatgtaaaagaatacaattcttttttacataattagtgaaattttattttttattaggaaacactaaatagtgtaatatttcttttgcttttaaaaaaattcctggtagcaaatcaagataaataattgcttcattttcttgagcaatactgaagcaggatgaagtaagaggaatgcattcatttaaacatgctttgctttatgaattttgtctcttttttggtctctttttcttatattcaagttacaaatgtacaagtatccttactaagagtgctccttttgtattttacatatatacagtatgaaaatacattggaacactaggaaagtttttaaataacagttctaatttatcagaaaattgtgttttgggattgagttctttgtctcagcccagaatcccaggtcctgggcctggttttctaatgctgtcatctcagttcgatattttactttagaacctggaatctcctacttaatatatgaccatgactttgaaaggcaaaagaggaatcaagaataaataaaacaaacttaatcttcatctttaaaaaaaagaaaaaagaaaccaaaatgagaatcaacacttcataggctcactgggttttcttttcttttctgttaatttaaactcagttatttttaatgcttaatacatacatggtgcaaaatttaaaaagcgcaaataggtatctagtggaaaacctaagcctccctctctcctccggcacccattacctctccctggaggcaactgttttgatccatttcttacacacactgccagagatactctaggcatgtaaagcacaaacatacatataaaatctgcgggcttcaaaaaatataagtaggatgtcatctatactgtcatacactttgttttttatcacttaatgttatatcttggatattgtattaccctgggtattaaaaagaactcctttcacattttaaaataacaa

SEQ ID NO: 163839 - DNA, 897 bp, Homo sapiens
  Payload ID: 12260
  Gene Symbol: PARVA
  Gene Name: parvin, alpha
  ENST ID: ENST00000528916
  CDS Start-End: 270-897
agaggcgagaggcagaatcccgcttgctttgcagcaggtctgtgagtctccagtggcatcgtattaaattatataggcagccacttgtttgcaactgacgcactgagctgagagttgtgccgagcaggaggcattctcttcgggaagcatttgagaagatcctatagcttcacagacctccagttggtctgaaagcagaagggtagaaaccacagggagggggtcagctctgggcagaagatgccatgattgccatgaaatcctagaccatgggctgcggggcactttgccctcaagtgtccgagctgcaggaggagggaatgaacgccatcaacctgcccctcagcccaattccctttgagctggaccccgaggacacgatgctggaggagaatgaggtgcgaacaatggtggatccaaactcacgcagtgaccccaagcttcaagaactgatgaaggtattaattgactggattaatgatgtgttggttggagaaagaatcattgtgaaagacctagctgaagatttgtatgatggacaagtcctgcagaagcttttcgagaaactggagagtgagaagctaaatgtggctgaggtcacccagtcagagattgctcagaagcaaaaactgcagactgtcctggagaagatcaatgaaaccctgaaacttcctcccaggagcatcaagtggaatgtggattctgttcatgccaagagcctggtggccatcttacacctgctcgttgctctgtctcagtatttccgcgcaccaattcgactcccagaccatgtttccatccaagtggttgtggtccagaaacgagaaggaatcctccagtctcggcaaatccaagaggaaataactggtaacacagaggctctttccgggaggcatg

SEQ ID NO: 163840 - DNA, 5429 bp, Homo sapiens
  Payload ID: 12261
  Gene Symbol: PARVB
  Gene Name: parvin, beta
  Uniprot ID: Q9HBI1
  ENST ID: ENST00000338758
  CDS Start-End: 64-1158
ctccccggggcgaccgggcggctccacacgcgctgcgcccgccgccggccccacgcgcggcccatgtcctccgcgccgcgctcgcccaccccgcggccccgcaggatgaagaaggacgagtcgttcctgggcaagctgggcggcaccctggccaggaagcggagggcgcgcgaggtgagtgacctgcaggaagaaggcaagaatgccatcaactcaccgatgtcccccgccctggtggatgttcaccctgaagacacccagcttgaggagaacgaggagcgcacgatgattgaccccacttccaaggaagaccccaagttcaaggaactggtcaaggtcctcctcgactggattaatgacgtgctggtggaggagaggatcattgtgaagcagctggaggaagacctgtatgacggccaggtgctgcagaagctcttggaaaaactggcagggtgcaagctgaatgtggctgaggtgacacagtccgaaatagggcagaaacagaagctgcagacggtgctggaagcagtacatgacctgctgcggccccgaggctgggcgctccggtggagcgtggactcaattcacgggaagaacctggtggccatcctccacctgctggtctctctggccatgcacttcagggcccccatccgccttcctgagcatgtaacggtgcaggtggtggtcgtgcggaaacgggaaggcctgctgcattccagccacatctcggaggagctgaccacaactacagagatgatgatgggccggttcgagcgggatgccttcgacacgctgttcgaccacgccccggataagctcagcgtggtgaagaagtctctcatcacttttgtgaacaagcacctgaacaagctgaatttggaggtgacggaactggagacccagtttgcagatggcgtgtacctggttctgctcatgggccttctggaagactactttgttcctctccaccacttctacctgactccggaaagcttcgatcagaaggtccacaatgtgtccttcgcctttgagctgatgctggacggaggcctcaagaaacccaaggctcgtcctgaagacgtggttaacttggacctcaaatccaccctgagggttctttacaacctgttcaccaagtacaagaacgtggagtgacgggggagctgtggatggtggcaggagtgtcccagcaagaaaggcggcatccgtctgtgccctgtgcctttccagggagccaggcgccatgggcttctggtccaagctgtgttgactgtcatccccaccccacccctacctcacgcctgccccaccccctgcctcttttggttgttgttcttaatctcctctccatgtagttcccagtgggcaagagcctttgaaaatgcaggattctaaacactcgtgcttgcgtttgaagcctcgcgtcactcagtcgcgtgggatgatgagtccgttgttgtctgccttggccgaaagatgaaaaaaagcctgaaccccaacccccagctggttgagagcaccctgcattctgcctcatggtgcagttagcgatcacaggccttcagaagtacaacatcagctcagcaggaacgccggctccccgaggacccaggcttgacgattcaccggggatctcctgggctgggctctccttggaagtgaggccttttattaaaaataaaagggttttgcagtttgaaaaactttaaagtcccagaagcttagatgtgacatgggtgtcctccacccacattcctatcacttcttggtcactcgttttaatgtaggttttgcacaaacatccaagactcaggatggcccagctcccacagtccttgaaaggagctgtctgctggggacgtttcttaatttcttgctgtggttgaggggctgggtctggagatggctctaattgtgctgcttgagacagcttgggtcacagctttccccttcagaggccctttttgggaatgaatgcatctttggaaactttaaaatgaggggggtgcattggttcactggcactgtgtagtaaagtgccacaggggagtggctcagacatcagagaattacatcctcaggcctttcgccttggcttgtagatgccggcttctccccgtgtcttcacatggtctcccctctgtgtgtctgtgtcctcaccgcctcttttattttattttttatttttgtttttattttttgagacagagtctcgctctgtcaccaggctggagtgcagtggtgtgatctcagctcactgcaacctctgcctcccaggttcaagcgattctcctgcctcagcctcccaagtagctggcattacaggcaggtgccaccacacctggctaatttttgtatttttagtagagacggggtttcaccatgttggccaggatggtcttgatctcctgacctcatgatctgcctgcctcagcctcccaaagtgttgggattacaggcgtgagccactgtgcccagcctatttttttttttttttttgagacaagttctcactgtgtcacccaggagtaaagtggtgccatctcagctcactgcagccttgatctcccaggctcaattgatcctcccacctcagcctcccaagtagcggggaccacaagtgcacaccactaggcccatctaatttttgtattttttgtagagatggggtttcaccatgttgcccaggctgttctcaaacccctgggcttgagcgacccacccacctcagcctcccaaagtgctgggattataggcatgagcggacatgcccagcctgcacccctctttttagaagggctgcggtcctattggattagggcccacttatatgacctcatttaatcttgattacctccataaagaccctgtctccaaataccatcacatcagaggtgctggggttaggacttcagcatgtggatttgtggggggcataatttgccttgtaccgggaggatatgaagtgttcatgttactctccctgtagccctgagagcatctcccttagagtatcctataaaaggagtcgctgctcactcagttatgggttgttcaccccctcgctcaccccagctctgcagagaactggggatcccatcggccatgctttctgggctggcctctggtcgcagtcagtccctcgctgtggcgcccccccctcccccagctccttcccagggtgatgacccgctgaccccctggggtgcacctgctgcaaagcagcccccttccttggcatctctcagcattctccgtagtgagcctggcctttctgatcttgttagctttttgtcttcctgccgcagatcagagctttggagtaagttttgatatgaaatcgaatgccaacaccgaagttttagaaaacagtttaatattccctctcagttccggctgttgctaggctggggatgggttcagaatagccattttgatggaggtgatttcccagcaggggaaagaaataattaaaacagcattacggtgtctcttgcgggatgcagtgacattcaaaagccacactgacaaaaagcctggggctggaacgttctgtgctgcctgcatggcatgtacaggaccgcggccccctggagctggtggagtggcccagccttgccctgctcacaggtggacctggagagggcactgtgccttcccagggattgggatttgaaaagaacagagcttggccaggtgcggtggctcacgcctgtaatcccagcactttgggaggctgaggcaggtggatcacttggggtcagaagttcgagaccagcctggccaacatggtgaaaccccatgtctactaaaaatacaaaaattagccatgcatggtatgtatgcctgtaatcccagctattcgggaggctgaggcaggagaattgcatgaacccaggaggtggaagttgcagtgagctgagatcatgccactgcactccagcctgagcaacagagtgagactctgtctcaaaaaaaaaaaagaaagaaaaaagaaaaagaaaagaacagagctgtgattttcagccaaaatgagcagccctggcccattctgtgtcatcagaggggagaggacggttactgtgggagggggcttcagcttctcagggaggtcctggcggcccccatctagtaaaccagtaaacccatgcctatcctcatgcccacgtcacactcttgtgggtttcaagtcgaacagtaaaaggaatcataagatctgtggggaagctacatgggcacttgtgtttcacaacagggacccttaaaggcgatgtttccagcaaaggatgtgattttttttttttttttttttgagataagttctcactgcgttgcccaggctggagtgcagtggtcattcacagacacacacatagcagactacagactacagccttgaactcctgggctcaagtgatccacccacttctgtatcctgagtccctggaacggcaggtgcacaccaccgcacccggcttggatgtgatcttttgtccacattcttttccaattggttcaaaggtgtaggtgtgccttttgcatacctgggaagggccccattaggctcgactcctcatttttctccattcaccatcagtttgagtctgaattcatagcatggcctggacagatgcagcaaggggccagttccaaggcagaattcagggtgaactcgattcctataggcttgggatgaatggctgctgggacatgaggcttgggtgtgagatgccccgtctgctgctgctcttggttcttagttcagagaaattctgggacccttcctcctcccggcaccacgttttcagtgaatggttctttgaagaggaaccctggtccataggaactgagtgaaagcaaggccaagtatgtccacccatggggacaaacgtcccagcacaaaggggtctcaggcctgcaaggcccaagtggacgctcggacaagggcaggaaggtatttgctgattctccttctccatgtgacgtgtctctcaacccacaccagctaggggagcctcccgcagcttcagttcccctttgacgcccacacagtgttatgcaagcaccgagcccagagtcccgctgggccgtggtgtcctaattgtcttggtgacaaagagcaattttattttaaagcaactgaatcctttccccctgttttgtgtgccagtattttactgtcttcttaattgttttaagcaatgtttactttggatttctggatgttatataaaagccacgaaaaccctggccatgctgtttgtcaggcccacctggctgagtgcaggaagcaagcgcttttcaggagctcactgcaacaccgggcaaacacttcttccgccagggatgcggttaggacaatgccacgtggcgtcacagtatgctgttatttattccaataaagacctcgtgagcatgggcctgtc

SEQ ID NO: 163841 - DNA, 1591 bp, Homo sapiens
  Payload ID: 12261
  Gene Symbol: PARVB
  Gene Name: parvin, beta
  Uniprot ID: Q9HBI1
  ENST ID: ENST00000404989
  CDS Start-End: 102-1085
ctgccacgtccctatatgaacggggtgtgtgcccgcctgccctccgacgtccgccggctgtgctggtctgcagagctgccgccagctgcaccctcctcgccatgagtgacctgcaggaagaaggcaagaatgccatcaactcaccgatgtcccccgccctggtggatgttcaccctgaagacacccagcttgaggagaacgaggagcgcacgatgattgaccccacttccaaggaagaccccaagttcaaggaactggtcaaggtcctcctcgactggattaatgacgtgctggtggaggagaggatcattgtgaagcagctggaggaagacctgtatgacggccaggtgctgcagaagctcttggaaaaactggcagggtgcaagctgaatgtggctgaggtgacacagtccgaaatagggcagaaacagaagctgcagacggtgctggaagcagtacatgacctgctgcggccccgaggctgggcgctccggtggagcgtggactcaattcacgggaagaacctggtggccatcctccacctgctggtctctctggccatgcacttcagggcccccatccgccttcctgagcatgtaacggtgcaggtggtggtcgtgcggaaacgggaaggcctgctgcattccagccacatctcggaggagctgaccacaactacagagatgatgatgggccggttcgagcgggatgccttcgacacgctgttcgaccacgccccggataagctcagcgtggtgaagaagtctctcatcacttttgtgaacaagcacctgaacaagctgaatttggaggtgacggaactggagacccagtttgcagatggcgtgtacctggttctgctcatgggccttctggaagactactttgttcctctccaccacttctacctgactccggaaagcttcgatcagaaggtccacaatgtgtccttcgcctttgagctgatgctggacggaggcctcaagaaacccaaggctcgtcctgaagacgtggttaacttggacctcaaatccaccctgagggttctttacaacctgttcaccaagtacaagaacgtggagtgacgggggagctgtggatggtggcaggagtgtcccagcaagaaaggcggcatccgtctgtgccctgtgcctttccagggagccaggcgccatgggcttctggtccaagctgtgttgactgtcatccccaccccacccctacctcacgcctgccccaccccctgcctcttttggttgttgttcttaatctcctctccatgtagttcccagtgggcaagagcctttgaaaatgcaggattctaaacactcgtgcttgcgtttgaagcctcgcgtcactcagtcgcgtgggatgatgagtccgttgttgtctgccttggccgaaagatgaaaaaaagcctgaaccccaacccccagctggttgagagcaccctgcattctgcctcatggtgcagttagcgatcacaggccttcagaagtacaacatcagctcagcaggaacgccggctccccgaggacccaggcttgacgattcaccggggatctcctgggctgggctctccttggaagtg

SEQ ID NO: 163842 - DNA, 1569 bp, Homo sapiens
  Payload ID: 12261
  Gene Symbol: PARVB
  Gene Name: parvin, beta
  Uniprot ID: Q9HBI1
  ENST ID: ENST00000406477
  CDS Start-End: 131-1324
caaaggccctacactttgacgtcctccccatctccggcagctccttaaactaagaactcattttaatttctgaattctccctttttaaagaccagataaatttacctttgggacagttagatgtgcacaaatgcaccatgtgtttaaagatcaccaaagaggagagaaaaggggattccttagtccagagaacaaaaactgcaggaggctggagctgagacgtgggtgttcctgcagctggggcctgtgctcccaggcactcatggcttctctggctggttcacttctccctggctcagacagatcaggagtggaaacatctgaatatgctcaaggaggagtgagtgacctgcaggaagaaggcaagaatgccatcaactcaccgatgtcccccgccctggtggatgttcaccctgaagacacccagcttgaggagaacgaggagcgcacgatgattgaccccacttccaaggaagaccccaagttcaaggaactggtcaaggtcctcctcgactggattaatgacgtgctggtggaggagaggatcattgtgaagcagctggaggaagacctgtatgacggccaggtgctgcagaagctcttggaaaaactggcagggtgcaagctgaatgtggctgaggtgacacagtccgaaatagggcagaaacagaagctgcagacggtgctggaagcagtacatgacctgctgcggccccgaggctgggcgctccggtggagcgtggactcaattcacgggaagaacctggtggccatcctccacctgctggtctctctggccatgcacttcagggcccccatccgccttcctgagcatgtaacggtgcaggtggtggtcgtgcggaaacgggaaggcctgctgcattccagccacatctcggaggagctgaccacaactacagagatgatgatgggccggttcgagcgggatgccttcgacacgctgttcgaccacgccccggataagctcagcgtggtgaagaagtctctcatcacttttgtgaacaagcacctgaacaagctgaatttggaggtgacggaactggagacccagtttgcagatggcgtgtacctggttctgctcatgggccttctggaagactactttgttcctctccaccacttctacctgactccggaaagcttcgatcagaaggtccacaatgtgtccttcgcctttgagctgatgctggacggaggcctcaagaaacccaaggctcgtcctgaagacgtggttaacttggacctcaaatccaccctgagggttctttacaacctgttcaccaagtacaagaacgtggagtgacgggggagctgtggatggtggcaggagtgtcccagcaagaaaggcggcatccgtctgtgccctgtgcctttccagggagccaggcgccatgggcttctggtccaagctgtgttgactgtcatccccaccccacccctacctcacgcctgccccaccccctgcctcttttggttgttgttcttaatctcctctccatgtagttcccagtgggcaagagcctttgaaaatgcaggattctaaacact

SEQ ID NO: 163843 - DNA, 742 bp, Homo sapiens
  Payload ID: 12261
  Gene Symbol: PARVB
  Gene Name: parvin, beta
  ENST ID: ENST00000444029
  CDS Start-End: 160-742
attgtgtgttccgcccatgcgttctgttgtccggggcagcaaagtcgacctgcaccacgtgggtgtttttgttttcttttgttttgttttgttttcttgaaggcctactaagagctgtcggaaactctgcttctgtagaaaagatgagatctcactctgatgcccaggctgaagtgcagtggtgcagtcatagctcactgcagcctcgaactcctggcctccagtgatccttctgcctcagcctcccaaggagcgaggaccacagtgagtgacctgcaggaagaaggcaagaatgccatcaactcaccgatgtcccccgccctggtggatgttcaccctgaagacacccagcttgaggagaacgaggagcgcacgatgattgaccccacttccaaggaagaccccaagttcaaggaactggtcaaggtcctcctcgactggattaatgacgtgctggtggaggagaggatcattgtgaagcagctggaggaagacctgtatgacggccaggtgctgcagaagctcttggaaaaactggcagggtgcaagctgaatgtggctgaggtgacacagtccgaaatagggcagaaacagaagctgcagacggtgctggaagcagtacatgacctgctgcggccccgaggctgggcgctccggtggagcgtggactcaattcacgggaagaacctggtggccatcctccacctgctggtctctctggccatgcacttcagggccccca

SEQ ID NO: 163844 - DNA, 1530 bp, Homo sapiens
  Payload ID: 12261
  Gene Symbol: PARVB
  Gene Name: parvin, beta
  ENST ID: ENST00000619710
  CDS Start-End: 118-987
gctgaatagaacgggcgtggaggcaggaggaggagcaggacgccgggcactgctgatgctgctttcgctggggtgagtgacctgcaggaagaaggcaagaatgccatcaactcaccgatgtcccccgccctggtggatgttcaccctgaagacacccagcttgaggagaacgaggagcgcacgatgattgaccccacttccaaggaagaccccaagttcaaggaactggtcaaggtcctcctcgactggattaatgacgtgctggtggaggagaggatcattgtgaagcagctggaggaagacctgtatgacggccaggtgctgcagaagctcttggaaaaactggcagggtgcaagctgaatgtggctgaggtgacacagtccgaaatagggcagaaacagaagctgcagacggtgctggaagcagtacatgacctgctgcggccccgaggctgggcgctccggtggagcgtggactcaattcacgggaagaacctggtggccatcctccacctgctggtctctctggccatgcacttcagggcccccatccgccttcctgagcatgtaacggtgcaggtggtggtcgtgcggaaacgggaaggcctgctgcattccagccacatctcggaggagctgaccacaactacagagatgatgatgggccggttcgagcgggatgccttcgacacgctgttcgaccacgccccggataagctcagcgtggtgaagaagtttgcagatggcgtgtacctggttctgctcatgggccttctggaagactactttgttcctctccaccacttctacctgactccggaaagcttcgatcagaaggtccacaatgtgtccttcgcctttgagctgatgctggacggaggcctcaagaaacccaaggctcgtcctgaagacgtggttaacttggacctcaaatccaccctgagggttctttacaacctgttcaccaagtacaagaacgtggagtgacgggggagctgtggatggtggcaggagtgtcccagcaagaaaggcggcatccgtctgtgccctgtgcctttccagggagccaggcgccatgggcttctggtccaagctgtgttgactgtcatccccaccccacccctacctcacgcctgccccaccccctgcctcttttggttgttgttcttaatctcctctccatgtagttcccagtgggcaagagcctttgaaaatgcaggattctaaacactcgtgcttgcgtttgaagcctcgcgtcactcagtcgcgtgggatgatgagtccgttgttgtctgccttggccgaaagatgaaaaaaagcctgaaccccaacccccagctggttgagagcaccctgcattctgcctcatggtgcagttagcgatcacaggccttcagaagtacaacatcagctcagcaggaacgccggctccccgaggacccaggcttgacgattcaccggggatctcctgggctgggctctccttggaagtgaggccttttattaaaaataaaagggttttgcagtttg

SEQ ID NO: 163845 - DNA, 1425 bp, Homo sapiens
  Payload ID: 12262
  Gene Symbol: PARVG
  Gene Name: parvin, gamma
  Uniprot ID: Q9HBI0
  ENST ID: ENST00000356909
  CDS Start-End: 221-784
ggaaggggcctggcccggggcggggtgtggagagaggaggaagctcctgccggctgagcgggcctggaggaagtgagcagcggggctcctgcctcccggcctggtccccgaagaccccagaagaacccggaacttgcttccattcggaatccagggaccaccctttgcactcagtaggcctttgttttcctgcgtggaaagcggttgggcttgggaggcgatggagccggagttcttgtacgacctgctgcagctccccaagggggtggagcccccagcggaggaggagctctcaaaaggaggaaagaagaaatacctgccacccacttcccggaaggaccccaaatttgaagaactgcagaaggtgttgatggagtggatcaatgccactcttctccccgagcacattgtggtccgcagcctggaggaggacatgttcgacgggctcatcctacaccacctattccagaggctggcggcgctcaagctggaagcagaggacatcgccctgacagccacaagccagaagcacaagctcacagtggtgctggaggccgtgaaccggagtctgcagctggaggagtggcaggccaagtggagcgtggagagcatcttcaacaaggacctgttgtctaccctgcacctccttgtggccctggccaagcgcttccagcccgacctctccctcccaaccaacgtccaggtggaggtcatcactatcgagagcaccaaaagtggtctgaagtcagagaagttggtggaacagctcactgaatacaggtgagggaaggatgagggcccatgggacgtctttgatgaattatttaagctggctccggagaaagtgaacgcagtgaaagaggccatcgtgaactttgtcaaccagaagctggaccgcctgggcctgtctgtgcagaatctggacacccagtttgcagatggggtcatcttactcttgctgattggacaacttgaaggcttcttcctgcacttaaaggaattctacctcactcccaactctcctgcagaaatgctgcacaacgtcaccctggcgctggagctgctgaaggacgagggcctgctcagctgccctgtcagccctgaagatatcgtgaacaaggatgccaagagcacactgagggtgctctatggtctgttctgcaagcacacgcagaaggcacacagggacaggacgccccatggagccccgaattgaccctcactgcctccaaagcccagagcctgcctgtcagcccagctggagggcccgaggctgcagggtgtcctcccacagtcccgctgtttcctgtgcattcgtgacccgcttccctcccaccctgtctcctgtctccatcgttggattatctttgaacccccttgtgtggatcattttgagccgcctggccttgctcagtttattttaat

SEQ ID NO: 163846 - DNA, 3462 bp, Homo sapiens
  Payload ID: 12262
  Gene Symbol: PARVG
  Gene Name: parvin, gamma
  Uniprot ID: Q9HBI0
  ENST ID: ENST00000422871
  CDS Start-End: 425-1420
ctttgtttggctgctgttttaatctttcatgcatttagcagtcatggatggtgccagcgaaggaacaggtgccagggcgttgtgactccacccagcgctgcttcccgggaccttccaattggacaggagctgggggaagagctggttcacagccctttgtgggggatgggactttgggaaccccaaacttctgctgggaccacaaggagaagagggcagcagagtcacagctgcagagaggaggaagctcctgccggctgagcgggcctggaggaagtgagcagcggggctcctgcctcccggcctggtccccgaagaccccagaagaacccggaacttgcttccattcggaatccagggaccaccctttgcactcagtaggcctttgttttcctgcgtggaaagcggttgggcttgggaggcgatggagccggagttcttgtacgacctgctgcagctccccaagggggtggagcccccagcggaggaggagctctcaaaaggaggaaagaagaaatacctgccacccacttcccggaaggaccccaaatttgaagaactgcagaaggtgttgatggagtggatcaatgccactcttctccccgagcacattgtggtccgcagcctggaggaggacatgttcgacgggctcatcctacaccacctattccagaggctggcggcgctcaagctggaagcagaggacatcgccctgacagccacaagccagaagcacaagctcacagtggtgctggaggccgtgaaccggagtctgcagctggaggagtggcaggccaagtggagcgtggagagcatcttcaacaaggacctgttgtctaccctgcacctccttgtggccctggccaagcgcttccagcccgacctctccctcccaaccaacgtccaggtggaggtcatcactatcgagagcaccaaaagtggtctgaagtcagagaagttggtggaacagctcactgaatacagcacagacaaggacgagcctccaaaggacgtctttgatgaattatttaagctggctccggagaaagtgaacgcagtgaaagaggccatcgtgaactttgtcaaccagaagctggaccgcctgggcctgtctgtgcagaatctggacacccagtttgcagatggggtcatcttactcttgctgattggacaacttgaaggcttcttcctgcacttaaaggaattctacctcactcccaactctcctgcagaaatgctgcacaacgtcaccctggcgctggagctgctgaaggacgagggcctgctcagctgccctgtcagccctgaagatatcgtgaacaaggatgccaagagcacactgagggtgctctatggtctgttctgcaagcacacgcagaaggcacacagggacaggacgccccatggagccccgaattgaccctcactgcctccaaagcccagagcctgcctgtcagcccagctggagggcccgaggctgcagggtgtcctcccacagtcccgctgtttcctgtgcattcgtgacccgcttccctcccaccctgtctcctgtctccatcgttggattatctttgaacccccttgtgtggatcattttgagccgcctggccttgctcagtttattttaataaaagtatttctgggagggattctgggaacttgacagggtcctgaggagggcccttaaacctgcagcctccctcccatggggtgagtgtgtgtcacatcagtctctcatctctgggcccaggctagtgaccgcccagagaggtggcatcactcagggctggggactctcagggacagggcccacagccccagaccccaccttttccagcccagctccccacacccacctgcttctcactcgggaggatgggccccagagtcaccctccagggcaggagcccgaatggctccatagccatgcccccacccaccgggagaagtggattcagtgactgtcaaagcaacccgggctgtgtcctgcagctgccctcgtgagttttgcccaaaagtcacaaagaagcaatcttcgtggttgattagtgggttcaggtcatctccagtctgtcctcgggagctgtgggttcccactcgctccagtgagacttggcattttctgcacataaagaagagtcgtgtgggagaattgcacatagtcagtccagggcatccagagtggggcagagctgatggctgatgggaaccggggaggaggctggcggggaggggtgagattggtggggagggctggggctggccgggaggggtgggactgatggggaggggtgaggctggcggggaggggtgaggctggcggggaggggtgggactggtggggaggagtgaggctagtgggcgggtgaggctggcggggaggggagggtttgtggggacgggtgaggctggcggggaggggtgaggctggtggggagggctggggcctggtggggaggagtgggacttgtggggaggagtgggacttgtggggaggggtgaggctggggagaagggcaaccacagccccaggctgctgctcctccctggaccctgaagaggcctctgggtctggggttttcacagtttgacagctgaggccttggggaggggctttagatgggggttaggggctaggtcatcattgacacccactgggggcgcctaggcagatgtccttcgggggagcaagatgggagccagggacgcagtgccaggtcagccctgggagctggtgtctgggtgtgagaaggccttgaggggtcttcccttcacctagcctcccatctgcctgcccttctcagctcccaattcacagggcaaacccaagcccataagcgtgttccacgtgagcactcagatgcacccctcttcatggatacccaccctacttcccggctgcctctgggaaacgtgcatcctcccacaccaggtacctggagcccagctccttccacctgctcaggtgccccctccattgcgatgccccctccagcacctcaaatcctctcctggagcttctggggacacaggctcagcctctctcagctggcttcatcccaaaagcctgaaatccagccccacttcctggggcctttgagtcctcacttgcttgggccccatccgctgcaggctggctctgcctggctgttccacgtcctcactcttgttctatttgacagcaattaaaaaaaaagtgacttatttaattactgtagctttattgaaaaataacttcccagtttgaagtgtacaatttgatgagttttgacaaatgcatgcagtcatataaccaccaccatcgttatccagacatgggacattcccatcaccatgcaagtttctgcatctgtctgcagccagttcccttctcccagcccctggccctggggaccactgatctgttttctgtcaccatcatttagacttgtctagaatttcttataaactgtatcctatggt

SEQ ID NO: 163847 - DNA, 3523 bp, Homo sapiens
  Payload ID: 12262
  Gene Symbol: PARVG
  Gene Name: parvin, gamma
  Uniprot ID: Q9HBI0
  ENST ID: ENST00000444313
  CDS Start-End: 485-1480
aaactcaccatttcagcccggatggtgaagattccagcttgagagaccagctcgggtctgaagtgtttctctatctactgtgctgagatctctccttctcgaaccctgctatgcctttgcatacgctgttttctccacctgccacgttctcaccccttcttcttccactgcaaactcctatgcagccgtcaaggccccattctcctctggaaagccttcccgatccccttggcaacaaccaccaccaatatttattcactgagcccactttgtgccaagcattgttctagacacggagaggaggaagctcctgccggctgagcgggcctggaggaagtgagcagcggggctcctgcctcccggcctggtccccgaagaccccagaagaacccggaacttgcttccattcggaatccagggaccaccctttgcactcagtaggcctttgttttcctgcgtggaaagcggttgggcttgggaggcgatggagccggagttcttgtacgacctgctgcagctccccaagggggtggagcccccagcggaggaggagctctcaaaaggaggaaagaagaaatacctgccacccacttcccggaaggaccccaaatttgaagaactgcagaaggtgttgatggagtggatcaatgccactcttctccccgagcacattgtggtccgcagcctggaggaggacatgttcgacgggctcatcctacaccacctattccagaggctggcggcgctcaagctggaagcagaggacatcgccctgacagccacaagccagaagcacaagctcacagtggtgctggaggccgtgaaccggagtctgcagctggaggagtggcaggccaagtggagcgtggagagcatcttcaacaaggacctgttgtctaccctgcacctccttgtggccctggccaagcgcttccagcccgacctctccctcccaaccaacgtccaggtggaggtcatcactatcgagagcaccaaaagtggtctgaagtcagagaagttggtggaacagctcactgaatacagcacagacaaggacgagcctccaaaggacgtctttgatgaattatttaagctggctccggagaaagtgaacgcagtgaaagaggccatcgtgaactttgtcaaccagaagctggaccgcctgggcctgtctgtgcagaatctggacacccagtttgcagatggggtcatcttactcttgctgattggacaacttgaaggcttcttcctgcacttaaaggaattctacctcactcccaactctcctgcagaaatgctgcacaacgtcaccctggcgctggagctgctgaaggacgagggcctgctcagctgccctgtcagccctgaagatatcgtgaacaaggatgccaagagcacactgagggtgctctatggtctgttctgcaagcacacgcagaaggcacacagggacaggacgccccatggagccccgaattgaccctcactgcctccaaagcccagagcctgcctgtcagcccagctggagggcccgaggctgcagggtgtcctcccacagtcccgctgtttcctgtgcattcgtgacccgcttccctcccaccctgtctcctgtctccatcgttggattatctttgaacccccttgtgtggatcattttgagccgcctggccttgctcagtttattttaataaaagtatttctgggagggattctgggaacttgacagggtcctgaggagggcccttaaacctgcagcctccctcccatggggtgagtgtgtgtcacatcagtctctcatctctgggcccaggctagtgaccgcccagagaggtggcatcactcagggctggggactctcagggacagggcccacagccccagaccccaccttttccagcccagctccccacacccacctgcttctcactcgggaggatgggccccagagtcaccctccagggcaggagcccgaatggctccatagccatgcccccacccaccgggagaagtggattcagtgactgtcaaagcaacccgggctgtgtcctgcagctgccctcgtgagttttgcccaaaagtcacaaagaagcaatcttcgtggttgattagtgggttcaggtcatctccagtctgtcctcgggagctgtgggttcccactcgctccagtgagacttggcattttctgcacataaagaagagtcgtgtgggagaattgcacatagtcagtccagggcatccagagtggggcagagctgatggctgatgggaaccggggaggaggctggcggggaggggtgagattggtggggagggctggggctggccgggaggggtgggactgatggggaggggtgaggctggcggggaggggtgaggctggcggggaggggtgggactggtggggaggagtgaggctagtgggcgggtgaggctggcggggaggggagggtttgtggggacgggtgaggctggcggggaggggtgaggctggtggggagggctggggcctggtggggaggagtgggacttgtggggaggagtgggacttgtggggaggggtgaggctggggagaagggcaaccacagccccaggctgctgctcctccctggaccctgaagaggcctctgggtctggggttttcacagtttgacagctgaggccttggggaggggctttagatgggggttaggggctaggtcatcattgacacccactgggggcgcctaggcagatgtccttcgggggagcaagatgggagccagggacgcagtgccaggtcagccctgggagctggtgtctgggtgtgagaaggccttgaggggtcttcccttcacctagcctcccatctgcctgcccttctcagctcccaattcacagggcaaacccaagcccataagcgtgttccacgtgagcactcagatgcacccctcttcatggatacccaccctacttcccggctgcctctgggaaacgtgcatcctcccacaccaggtacctggagcccagctccttccacctgctcaggtgccccctccattgcgatgccccctccagcacctcaaatcctctcctggagcttctggggacacaggctcagcctctctcagctggcttcatcccaaaagcctgaaatccagccccacttcctggggcctttgagtcctcacttgcttgggccccatccgctgcaggctggctctgcctggctgttccacgtcctcactcttgttctatttgacagcaattaaaaaaaaagtgacttatttaattactgtagctttattgaaaaataacttcccagtttgaagtgtacaatttgatgagttttgacaaatgcatgcagtcatataaccaccaccatcgttatccagacatgggacattcccatcaccatgcaagtttctgcatctgtctgcagccagttcccttctcccagcccctggccctggggaccactgatctgttttctgtcaccatcatttagacttgtctagaatttcttataaactgtatcctatggta

SEQ ID NO: 163848 - DNA, 309 bp, Homo sapiens
  Payload ID: 12262
  Gene Symbol: PARVG
  Gene Name: parvin, gamma
  ENST ID: ENST00000416291
  CDS Start-End: 231-309
ctccacctgccacgttctcaccccttcttcttccactgcaaactcctatgcagccgtcaaggccccattctcctctggaaagccttcccgatccccttggcaacaaccaccaccaatatttattcactgagcccactttgtgccaagcattgttctagacacggggaccaccctttgcactcagtaggcctttgttttcctgcgtggaaagcggttgggcttgggaggcgatggagccggagttcttgtacgacctgctgcagctccccaagggggtggagcccccagcggaggaggagctctcaaaag

SEQ ID NO: 163849 - DNA, 622 bp, Homo sapiens
  Payload ID: 12262
  Gene Symbol: PARVG
  Gene Name: parvin, gamma
  ENST ID: ENST00000417767
  CDS Start-End: 533-622
gaggaaggggcctggcccggggcggggtgtggaggtgggaggacggcggtgcgggatggagggtggaggccaggctgacagggtgctggtggtgggttgcgggggtcgaccccaggctctggcctatgtagctgccattttggaggtgaacagcctgcggggaaactggcatggtttggggaaggcggggagagggggagaaatgaaagcattgagtttaagtggcctgcagaaccccgggggcccaggcggcacggcgggcgctggggctccgggcagagctttctggaggtttgtggcagcttcactttcacggcatccacccccctcgggccctgccgcagagaggaggaagctcctgccggctgagcgggcctggaggaagtgagcagcggggctcctgcctcccggcctggtccccgaagaccccagaagaacccggaacttgcttccattcggaatccagggaccaccctttgcactcagtaggcctttgttttcctgcgtggaaagcggttgggcttgggaggcgatggagccggagttcttgtacgacctgctgcagctccccaagggggtggagcccccagcggaggaggagctctcaaaaggtgtgtgccca

SEQ ID NO: 163850 - DNA, 999 bp, Homo sapiens
  Payload ID: 12262
  Gene Symbol: PARVG
  Gene Name: parvin, gamma
  Uniprot ID: Q9HBI0
  ENST ID: ENST00000415224
  CDS Start-End: 192-755
cagagaggaggaagctcctgccggctgagcgggcctggaggaagtgagcagcggggctcctgcctcccggcctggtccccgaagaccccagaagaacccggaacttgcttccattcggaatccagggaccaccctttgcactcagtaggcctttgttttcctgcgtggaaagcggttgggcttgggaggcgatggagccggagttcttgtacgacctgctgcagctccccaagggggtggagcccccagcggaggaggagctctcaaaaggaggaaagaagaaatacctgccacccacttcccggaaggaccccaaatttgaagaactgcagaaggtgttgatggagtggatcaatgccactcttctccccgagcacattgtggtccgcagcctggaggaggacatgttcgacgggctcatcctacaccacctattccagaggctggcggcgctcaagctggaagcagaggacatcgccctgacagccacaagccagaagcacaagctcacagtggtgctggaggccgtgaaccggagtctgcagctggaggagtggcaggccaagtggagcgtggagagcatcttcaacaaggacctgttgtctaccctgcacctccttgtggccctggccaagcgcttccagcccgacctctccctcccaaccaacgtccaggtggaggtcatcactatcgagagcaccaaaagtggtctgaagtcagagaagttggtggaacagctcactgaatacaggtgagggaaggatgagggcccatgggacgtctttgatgaattatttaagctggctccggagaaagtgaacgcagtgaaagaggccatcgtgaactttgtcaaccagaagctggaccgcctgggcctgtctgtgcagaatctggacacccagtttgcagatggggtcatcttactcttgctgattggacaacttgaaggcttcttcctgcacttaaaggaattctacctcactcccaactctcctgcag

SEQ ID NO: 163851 - DNA, 820 bp, Homo sapiens
  Payload ID: 12262
  Gene Symbol: PARVG
  Gene Name: parvin, gamma
  ENST ID: ENST00000466375
  CDS Start-End: 70-174
cagggaccaccctttgcactcagtaggcctttgttttcctgcgtggaaagcggttgggcttgggaggcgatggagccggagttcttgtacgacctgctgcagctccccaagggggtggagcccccagcggaggaggagctctcaaaagagctagaacctcttctctccagatgagagacggtgtggattacgatggtgaatactgattgctctcatcctgtgagccttctgagtgcccctactgcaccagcacctcttaccaatagcaactcatttattctcaagggcgggcatcagtgcctgctttatacagatgaggaaactgaggcacaaggggtgacgtgccacagtaacaggaaactcttagcaagtggtggacctgggttctgagcccaaggagggtggtcccagaactgaggttccacacggaccacgcagcgatgcccaccatggagtgatactttgcagggtgtggggctcctgacgtgctcccctcacacgtgtgggtccctttcaaaagtggggtgagcataggatggagcaattcaacgactataggtcgccctttcagtaaagctctgtgtcatgagccctttggggggttggcggccacagttcctgcaacctcccttctaggagatggctcaaaagaaggacatgggcaggtacccagagctgtcaccctctctgtgttctctgaaagaaacaaatgaacaacagcttgcaaggaagcagcgagatgtcccagtggggaagggctttaggtgaactcattggaatttatgtaaccacaaaaacataaatgtgctgacaaagaaaa

SEQ ID NO: 163852 - DNA, 3163 bp, Homo sapiens
  Payload ID: 12263
  Gene Symbol: PASD1
  Gene Name: PAS domain containing 1
  Uniprot ID: Q8IV76
  ENST ID: ENST00000370357
  CDS Start-End: 246-2567
acgctgcctccatgcctgcctcccctctctgccacgcccccaccacgcgctttgcactctggggcccacgcacttccctgaagagtctagaagctgctcctcatttccagactttccgggcgcccaccaggctcccgggctctcaccggagaccacagggaggagcttcaaggtaccccaagtccctgcggcctccagcagtgaagagttccacaagggagtcttcctacgtcactgaataatgaatgaagatgagaggggaaaagagaagagacaaagtcaatccaaaaagctctcaaaggaaattaaactggattccatcatttcctacctatgattacttcaaccaagtgacgctacagttattagatggctttatgattacactgagcacagatggagtgatcatttgtgtggctgaaaacatctcttctcttcttggacatttaccagctgagattgtgggcaaaaaattattaagccttctgcctgatgaagagaaagatgaagtctaccaaaagattattctcaaatttcctttactaaactcagaaacacatattgaattttgctgtcatttaaaaagaggaaatgtcgaacatggtgatagttctgcttacgaaaacgtgaaatttattgtgaatgtaagagatatttgtaatgagtttcctgtggtctttagtggcttgttttccagccacctctgtgctgactttgctgcatgtgttcctcaggaggatcggctttatcttgtgggaaatgtttgcattctcaggactcagctcctgcagcaactttacacttcaaaggcagtcagtgatgaagctgtacttacacaagattcagatgaggaaccttttgtgggagagctcagtagctctcaaggtcaaagaggacacactagcatgaaagccgtgtacgttgaacccgctgctgctgctgctgctgctgctatctcagacgaccaaattgatattgcagaggttgagcagtatggaccacaagaaaacgttcacatgtttgtagattctgattcaacttattgctccagtacagttttcctggatactatgcctgaatctccagccttatccttgcaagactttcgaggtgagcctgaggtgaatccattgtacagggcagacccagtggacctggagttctcggtggatcaggtggactcagtggaccaggagggcccaatggaccagcaggacccagagaacccagttgccccgttggaccaggcaggcctgatggatccagtggatccagaggactcagtggacctgggggctgctggcgcaagtgctcagccattacagccatcatcaccagttgcatatgacatcattagccaggaactggaactgatgaagaagttgaaggagcagctagaagagaggacttggttgctgcatgatgccatccaaaaccagcagaatgcattggaattgatgatggatcaccttcagaagcagccaaacacattacgccacgttgtcattcctgatctccaatcttcggaggcagtgcccaagaaacaacagaaacaacacgctgggcaagtgaagcggcctctcccacatcccaaggacgtcaagtgtttctgtggtttatctttatccaactctctcaaaaacactggggagcttcaggagccttgtgttgccttcaaccagcagcaactggtgcagcaagaacaacacctgaaggagcagcagcggcagctgcgggagcagctgcaacagctgagagagcaaaggaaggtgcagaagcagaagaagatgcaggagaagaagaagctgcaggagcagaaaatgcaggagaagaagaagctgcaggagcagaggcggcaaaagaagaagaagctacaggagcggaagaagtggcaggggcagatgctacagaaagagccagaggaggagcagcagaagcagcagctgcaagagcagccactgaagcataatgtcatcgtggggaatgagagggtgcagatatgcctgcaaaacccacgtgacgtatctgtgcccctctgcaatcaccctgttagatttttacaggcccaacccattgttcctgtccagagagcagctgaacaacagccctctggcttctatcaagatgaaaactgtgggcaacaggaagatgagagtcaaagtttttatcctgaggcgtatcaagggccccccgtgaaccagctgccattgatagatacctcaaactctgaggcaatttcttcttccagcattcctcagtttcccataacttcagactcaaccataagcaccctggagaccccacaggattacatccggctttggcaagagttgtctgattcactcggtcctgttgtccaagtgaacacttggtcttgcgatgagcagggcaccctgcacggccaacccacctaccatcaggtgcaagtttctgaggtaggagtcgagggacctcctgatccacaggctttccaaggccctgctgcataccagccagaccagatgagatctgcggagcagaccagattgatgcctgcagagcaacgtgactcaaataagccgtgctaacagtactttcatgaccagtgatgaggggaaatggggggagggggcaggccaatgaggtctgcatggccaggggaccttcaaggtgcgtaaagtcccttggggtagggtttagtgggtagagacttatttgtttcctgataggttatgtttgtaattgtttgttaagcacagcctgtttcttggaagttatgctgtagaggcagcctgtgatccgtagtatgctagggtgtgacagcagccagccacagctggatctgatgtcttgtctgccccgcccagctttgcatatccatgttctaccacaggaaggtggcctgccaagagtctgctcaaagttttcaacataaagaataaagaaaaaaaaatgccaaagtgcttttcaatctagtaaatctagagggttgttttgtcttagccacaagaattccgaggtcttgaccctgatgatcaacctgcctcccctccatagtcttgttggagaagcccagagagaatgggactccaactaagggaacctgaaatcaactcaatggaggcacttcagagctaaaataattatggcttccttgcttaataaacattttcgttcactgcaa

SEQ ID NO: 163853 - DNA, 4572 bp, Homo sapiens
  Payload ID: 12264
  Gene Symbol: PASK
  Gene Name: PAS domain containing serine/threonine kinase
  Uniprot ID: Q96RG2
  ENST ID: ENST00000234040
  CDS Start-End: 134-4105
gtcgctgtgcgattggtcggtgggataaaagcgcggaagggctcctttccgtggtgtgtagccggcttggcgtgaccctcgcctgatccagttgttagagttggaagcttggcagttggcctcccttcttcccatggaggacgggggcttaacagcctttgaagaggaccagagatgcctttcccagagcctccccttgccagtgtcagcagagggcccagctgcacagaccactgctgagcccagcaggtcgttttcctcagcccacagacacctgagcagaaggaatgggctttccagactctgccagagcaggacagcgctctctgaagacagatggagctcctattgtctatcatcactggctgcccagaatatttgtacaagtaaactgcactgccctgctgcccctgagcacacggacccgtccgaaccgcggggcagtgtgtcctgctgctccctgctgcggggactgtcctcagggtggtcctcacctctgcttccggcccctgtgtgcaaccctaacaaggccatcttcacggtggatgccaagaccacagagatcctggttgctaacgacaaagcttgcgggctcctggggtacagcagccaggacctgattggccagaagctcacgcagttctttctgaggtcagattctgatgtggtggaggccctcagcgaggagcacatggaggccgacggccacgctgcggtggtgtttggcacggtggtggacatcatcagccgtagtggggagaagattccagtgtctgtgtggatgaagaggatgcggcaggagcgccgcctatgctgcgtggtggtcctggagcccgtggagagggtctcgacctgggtcgctttccagagcgatggcaccgtcacgtcatgtgacagtctctttgctcatcttcacgggtacgtgtctggggaggacgtggctgggcagcatatcacagacctgatcccttctgtgcagctccctccttctggccagcacatcccaaagaatctcaagattcagaggtctgttggaagagccagggacggtaccaccttccctctgagcttaaagctgaaatcccaacccagcagcgaggaggcgaccaccggtgaggcggcccctgtgagcggctaccgggcatctgtctgggtgttctgcaccatcagtggcctcatcaccctcctgccggatgggaccatccacggcatcaaccacagcttcgcgctgacactgtttggttacggaaagacggagctcctgggcaagaatatcactttcctgattcctggtttctacagctacatggaccttgcgtacaacagctcattacagctcccagacctggccagctgcctggacgtcggcaatgagagtgggtgtggggagagaaccttggacccgtggcagggccaggacccagctgaggggggccaggatccaaggattaatgtcgtgcttgctggtggccacgttgtgccccgagatgagatccggaagctgatggaaagccaagacatcttcaccgggactcagactgagctgattgctggaggccagctcctttcctgcctctcacctcagcctgctccaggggtggacaatgtcccagaaggaagcctgccagtgcacggtgaacaggcgctgcccaaggaccagcaaatcactgccttggggagagaggaacctgtggcaatagagagccccggacaggatcttctgggagaaagcaggtctgaaccagtggatgtgaagccatttgcttcctgcgaagattctgaagctccagtcccagctgaggatgggggcagtgatgctggcatgtgtggcctgtgtcagaaggcccagctagagcggatgggagtcagtggtcccagcggttcagacctttgggctggggctgccgtggccaagccccaggccaagggtcagctggcggggggcagcctcctgatgcactgcccttgctatgggagtgaatggggcttgtggtggcgaagccaggacttggcccccagcccctctgggatggcaggcctctcgtttgggacacctactctagatgagccgtggctgggagtggaaaacgaccgagaagagctgcagacctgcttgattaaggagcagctgtcccagttgagccttgcaggagccctggatgtcccccacgccgaactcgttccgacagagtgccaggctgtcaccgctcctgtgtcgtcctgcgatctgggaggcagagacctgtgcggtggctgcacgggcagctcctcagcctgctatgccttggccacggacctccctgggggcctggaagcagtggaggcccaggaggttgatgtgaattcgttttcctggaacctcaaggaactctttttcagtgaccagacagaccaaacgtcatcaaattgttcctgtgctacgtctgaactcagagagacaccctcttccttggcagtgggctccgatccagatgtaggcagtctccaggaacaggggtcgtgtgtcctggatgacagggagctgttactactgaccggcacctgtgttgaccttggccaaggccgacggttccgggagagctgtgtgggacatgatccaacagaaccgcttgaggtttgtttggtgtcctctgagcattatgcagcaagcgacagagaaagcccaggacacgttccttccacgttggatgctggccctgaggacacgtgcccatcagcagaggagccaaggctgaacgtccaggtcacctccacgcccgtgatcgtgatgcgcggggctgctggcctgcagcgggagatccaggagggtgcctactccgggagctgctaccatcgagatggcttacggctgagtatacagtttgaggtgaggcgggtggagctccagggccccacacctctgttctgctgctggctggtgaaagacctcctccacagccaacgcgactcagccgccaggacccgcctgttccttgccagcctgcccggctccacccactctaccgctgctgagctcaccggacccagcctggtggaagtgctcagagccagaccctggtttgaggagccccccaaggctgtggaactggaggggttggcggcctgtgagggcgagtactcccaaaagtacagtaccatgagcccgctgggcagtggggccttcggcttcgtgtggactgctgtggacaaggaaaaaaacaaggaggtggtggtgaagtttattaagaaggagaaggtcttggaggattgttggattgaggatcccaaacttgggaaagttactttagagatcgcaattctatccagggtggagcacgccaatatcatcaaggtattggatatatttgaaaaccaagggttcttccagcttgtgatggagaagcacggctccggcctagacctcttcgctttcatcgaccgccaccccaggctggatgagcccctggcgagctacatcttccgacaactagtgtcagcagtgggatacctgcgcttgaaggacatcatccaccgtgacatcaaggatgagaacatcgtgatcgccgaggacttcacaatcaagctgatagactttggctcggccgcctacttggaaaggggaaaattattttatactttttgtgggaccatcgagtactgtgcaccggaagttctcatggggaatccctacagagggccggagctggagatgtggtctctgggagtcactctgtacacgctggtctttgaggagaaccccttctgtgagctggaggagaccgtggaggctgccatacacccgccatacctggtgtccaaagaactcatgagccttgtgtctgggctgctgcagccagtccctgagagacgcaccaccttggagaagctggtgacagacccgtgggtaacacagcctgtgaatcttgctgactatacatgggaagaggtgtttcgagtaaacaagccagaaagtggagttctgtccgctgcgagcctggagatggggaacaggagcctgagtgatgtggcccaggctcaggagctttgtgggggccccgttccaggcgaggctcctaatggccaaggctgtttgcatcccggggatccccgtctgctgaccagctaaacaccaatttcttcctgcttttctccacttggtttggaaaatcacacagttttcaggctccatctgtttggagaaaatacattctgaagcatccccaattcaccttctaaaaactcatgtgcaggtttgataaacaccagaacagaagacagtgatgctgtattattttagatttattacatagatttggaattcacttttttcatgacctagaaaaaaacattccagtgttcaactgttttatattattaaagggcttttaatttgtgaacttctgaaggcatgagtgttttctctttctacttttgtatatgtgcatgttttgtttcctctgacttggtatatgctcatctgagtgacggatatgtgaaatttgtagaactggttagtcaaatggccagactatttcattaatttatttcctcaaatgcttttcaaattaaagcacctttgttagtaaacagtta

SEQ ID NO: 163854 - DNA, 4326 bp, Homo sapiens
  Payload ID: 12264
  Gene Symbol: PASK
  Gene Name: PAS domain containing serine/threonine kinase
  Uniprot ID: Q96RG2
  ENST ID: ENST00000358649
  CDS Start-End: 65-4057
gcgtgaccctcgcctgatccagttgttagagttggaagcttggcagttggcctcccttcttcccatggaggacgggggcttaacagcctttgaagaggaccagagatgcctttcccagagcctccccttgccagtgtcagcagagggcccagctgcacagaccactgctgagcccagcaggtcgttttcctcagcccacagacacctgagcagaaggaatgggctttccagactctgccagagcaggacagcgctctctgaagacagatggagctcctattgtctatcatcactggctgcccagaatatttgtacaagtaaactgcactgccctgctgcccctgagcacacggacccgtccgaaccgcggggcagtgtgtcctgctgctccctgctgcggggactgtcctcagggtggtcctcacctctgcttccggcccctgtgtgcaaccctaacaaggccatcttcacggtggatgccaagaccacagagatcctggttgctaacgacaaagcttgcgggctcctggggtacagcagccaggacctgattggccagaagctcacgcagttctttctgaggtcagattctgatgtggtggaggccctcagcgaggagcacatggaggccgacggccacgctgcggtggtgtttggcacggtggtggacatcatcagccgtagtggggagaagattccagtgtctgtgtggatgaagaggatgcggcaggagcgccgcctatgctgcgtggtggtcctggagcccgtggagagggtctcgacctgggtcgctttccagagcgatggcaccgtcacgtcatgtgacagtctctttgctcatcttcacgggtacgtgtctggggaggacgtggctgggcagcatatcacagacctgatcccttctgtgcagctccctccttctggccagcacatcccaaagaatctcaagattcagaggtctgttggaagagccagggacggtaccaccttccctctgagcttaaagctgaaatcccaacccagcagcgaggaggcgaccaccggtgaggcggcccctgtgagcggctaccgggcatctgtctgggtgttctgcaccatcagtggcctcatcaccctcctgccggatgggaccatccacggcatcaaccacagcttcgcgctgacactgtttggttacggaaagacggagctcctgggcaagaatatcactttcctgattcctggtttctacagctacatggaccttgcgtacaacagctcattacagctcccagacctggccagctgcctggacgtcggcaatgagagtgggtgtggggagagaaccttggacccgtggcagggccaggacccagctgaggggggccaggatccaaggattaatgtcgtgcttgctggtggccacgttgtgccccgagatgagatccggaagctgatggaaagccaagacatcttcaccgggactcagactgagctgattgctggaggccagctcctttcctgcctctcacctcagcctgctccaggggtggacaatgtcccagaaggaagcctgccagtgcacggtgaacaggcgctgcccaaggaccagcaaatcactgccttggggagagaggaacctgtggcaatagagagccccggacaggatcttctgggagaaagcaggtctgaaccagtggatgtgaagccatttgcttcctgcgaagattctgaagctccagtcccagctgaggatgggggcagtgatgctggcatgtgtggcctgtgtcagaaggcccagctagagcggatgggagtcagtggtcccagcggttcagacctttgggctggggctgccgtggccaagccccaggccaagggtcagctggcggggggcagcctcctgatgcactgcccttgctatgggagtgaatggggcttgtggtggcgaagccaggacttggcccccagcccctctgggatggcaggcctctcgtttgggacacctactctagatgagccgtggctgggagtggaaaacgaccgagaagagctgcagacctgcttgattaaggagcagctgtcccagttgagccttgcaggagccctggatgtcccccacgccgaactcgttccgacagagtgccaggctgtcaccgctcctgtgtcgtcctgcgatctgggaggcagagacctgtgcggtggctgcacgggcagctcctcagcctgctatgccttggccacggacctccctgggggcctggaagcagtggaggcccaggaggttgatgtgaattcgttttcctggaacctcaaggaactctttttcagtgaccagacagaccaaacgtcatcaaattgttcctgtgctacgtctgaactcagagagacaccctcttccttggcagtgggctccgatccagatgtaggcagtctccaggaacaggggtcgtgtgtcctggatgacagggagctgttactactgaccggcacctgtgttgaccttggccaaggccgacggttccgggagagctgtgtgggacatgatccaacagaaccgcttgaggtttgtttggtgtcctctgagcattatgcagcaagcgacagagaaagcccaggacacgttccttccacgttggatgctggccctgaggacacgtgcccatcagcagaggagccaaggctgaacgtccaggtcacctccacgcccgtgatcgtgatgcgcggggctgctggcctgcagcgggagatccaggagggtgcctactccgggagctgctaccatcgagatggcttacggctgagtatacagtttgaggtgaggcgggtggagctccagggccccacacctctgttctgctgctggctggtgaaagacctcctccacagccaacgcgactcagccgccaggacccgcctgttccttgccagcctgcccggctccacccactctaccgctgctgagctcaccggacccagcctggtggaagtgctcagagccagaccctggtttgaggagccccccaaggctgtggaactggaggggttggcggcctgtgagggcgagtactcccaaaagtacagtaccatgagcccgctgggcagtggggccttcggcttcgtgtggactgctgtggacaaggaaaaaaacaaggaggtggtggtgaagtttattaagaaggagaaggtcttggaggattgttggattgaggatcccaaacttgggaaagttactttagagatcgcaattctatccagggtggagcacgccaatatcatcaaggtattggatatatttgaaaaccaagggttcttccagcttgtgatggagaagcacggctccggcctagacctcttcgctttcatcgaccgccaccccaggctggatgagcccctggcgagctacatcttccgacaagtgagagcaggccagagccgtctagtgtcagcagtgggatacctgcgcttgaaggacatcatccaccgtgacatcaaggatgagaacatcgtgatcgccgaggacttcacaatcaagctgatagactttggctcggccgcctacttggaaaggggaaaattattttatactttttgtgggaccatcgagtactgtgcaccggaagttctcatggggaatccctacagagggccggagctggagatgtggtctctgggagtcactctgtacacgctggtctttgaggagaaccccttctgtgagctggaggagaccgtggaggctgccatacacccgccatacctggtgtccaaagaactcatgagccttgtgtctgggctgctgcagccagtccctgagagacgcaccaccttggagaagctggtgacagacccgtgggtaacacagcctgtgaatcttgctgactatacatgggaagaggtgtttcgagtaaacaagccagaaagtggagttctgtccgctgcgagcctggagatggggaacaggagcctgagtgatgtggcccaggctcaggagctttgtgggggccccgttccaggcgaggctcctaatggccaaggctgtttgcatcccggggatccccgtctgctgaccagctaaacaccaatttcttcctgcttttctccacttggtttggaaaatcacacagttttcaggctccatctgtttggagaaaatacattctgaagcatccccaattcaccttctaaaaactcatgtgcaggtttgataaacaccagaacagaagacagtgatgctgtattattttagatttattacatagatttggaattcacttttttcatgacctagaaaaaaacattccagtgttcaactgttttatattattaaagggcttttaatttgtg

SEQ ID NO: 163855 - DNA, 4942 bp, Homo sapiens
  Payload ID: 12264
  Gene Symbol: PASK
  Gene Name: PAS domain containing serine/threonine kinase
  Uniprot ID: Q96RG2
  ENST ID: ENST00000405260
  CDS Start-End: 700-4671
gagaagctgggaaggaaagcagagggagtcgaagcgggacgcacagagccgtagctgcaggcagacggagtggacgtctaggcagagtggagagacgccctgggcttgagagttgacttatgtcactgtctcgacctcggaggcgtggaggggccgcgggccaggcggatctttccgtggctgcaaggtgcgggccagtcctacgtgcatccctgacctctgcgagcctcgctggctgcgtctgtacaatgggccgaacggcaagagcaacaacattctcccggcgtccccgcgcggattttacccatgcgaaatgccgccttctcttgacgctcggagcaggcgggcaggtgcggggcacttgcgctggtggggccgctagccagctggctggctccggggcgccagctgggctccccttgcaagtcgttcccagcccagtgcggacgctgcagccttcgtctaccctgcggagccacccggcccatgaacgagccgccccgcgtcctccgccttcagaaagaggcctccaagaggcgagctctgcgctactcacccattttgatcgcgagtcgggaggaaaccgcatctgcccggcccgggggcggaggcgcccattattcctttggctcctccgaagcgccgtaggggtgtttgttgttagagttggaagcttggcagttggcctcccttcttcccatggaggacgggggcttaacagcctttgaagaggaccagagatgcctttcccagagcctccccttgccagtgtcagcagagggcccagctgcacagaccactgctgagcccagcaggtcgttttcctcagcccacagacacctgagcagaaggaatgggctttccagactctgccagagcaggacagcgctctctgaagacagatggagctcctattgtctatcatcactggctgcccagaatatttgtacaagtaaactgcactgccctgctgcccctgagcacacggacccgtccgaaccgcggggcagtgtgtcctgctgctccctgctgcggggactgtcctcagggtggtcctcacctctgcttccggcccctgtgtgcaaccctaacaaggccatcttcacggtggatgccaagaccacagagatcctggttgctaacgacaaagcttgcgggctcctggggtacagcagccaggacctgattggccagaagctcacgcagttctttctgaggtcagattctgatgtggtggaggccctcagcgaggagcacatggaggccgacggccacgctgcggtggtgtttggcacggtggtggacatcatcagccgtagtggggagaagattccagtgtctgtgtggatgaagaggatgcggcaggagcgccgcctatgctgcgtggtggtcctggagcccgtggagagggtctcgacctgggtcgctttccagagcgatggcaccgtcacgtcatgtgacagtctctttgctcatcttcacgggtacgtgtctggggaggacgtggctgggcagcatatcacagacctgatcccttctgtgcagctccctccttctggccagcacatcccaaagaatctcaagattcagaggtctgttggaagagccagggacggtaccaccttccctctgagcttaaagctgaaatcccaacccagcagcgaggaggcgaccaccggtgaggcggcccctgtgagcggctaccgggcatctgtctgggtgttctgcaccatcagtggcctcatcaccctcctgccggatgggaccatccacggcatcaaccacagcttcgcgctgacactgtttggttacggaaagacggagctcctgggcaagaatatcactttcctgattcctggtttctacagctacatggaccttgcgtacaacagctcattacagctcccagacctggccagctgcctggacgtcggcaatgagagtgggtgtggggagagaaccttggacccgtggcagggccaggacccagctgaggggggccaggatccaaggattaatgtcgtgcttgctggtggccacgttgtgccccgagatgagatccggaagctgatggaaagccaagacatcttcaccgggactcagactgagctgattgctggaggccagctcctttcctgcctctcacctcagcctgctccaggggtggacaatgtcccagaaggaagcctgccagtgcacggtgaacaggcgctgcccaaggaccagcaaatcactgccttggggagagaggaacctgtggcaatagagagccccggacaggatcttctgggagaaagcaggtctgaaccagtggatgtgaagccatttgcttcctgcgaagattctgaagctccagtcccagctgaggatgggggcagtgatgctggcatgtgtggcctgtgtcagaaggcccagctagagcggatgggagtcagtggtcccagcggttcagacctttgggctggggctgccgtggccaagccccaggccaagggtcagctggcggggggcagcctcctgatgcactgcccttgctatgggagtgaatggggcttgtggtggcgaagccaggacttggcccccagcccctctgggatggcaggcctctcgtttgggacacctactctagatgagccgtggctgggagtggaaaacgaccgagaagagctgcagacctgcttgattaaggagcagctgtcccagttgagccttgcaggagccctggatgtcccccacgccgaactcgttccgacagagtgccaggctgtcaccgctcctgtgtcgtcctgcgatctgggaggcagagacctgtgcggtggctgcacgggcagctcctcagcctgctatgccttggccacggacctccctgggggcctggaagcagtggaggcccaggaggttgatgtgaattcgttttcctggaacctcaaggaactctttttcagtgaccagacagaccaaacgtcatcaaattgttcctgtgctacgtctgaactcagagagacaccctcttccttggcagtgggctccgatccagatgtaggcagtctccaggaacaggggtcgtgtgtcctggatgacagggagctgttactactgaccggcacctgtgttgaccttggccaaggccgacggttccgggagagctgtgtgggacatgatccaacagaaccgcttgaggtttgtttggtgtcctctgagcattatgcagcaagcgacagagaaagcccaggacacgttccttccacgttggatgctggccctgaggacacgtgcccatcagcagaggagccaaggctgaacgtccaggtcacctccacgcccgtgatcgtgatgcgcggggctgctggcctgcagcgggagatccaggagggtgcctactccgggagctgctaccatcgagatggcttacggctgagtatacagtttgaggtgaggcgggtggagctccagggccccacacctctgttctgctgctggctggtgaaagacctcctccacagccaacgcgactcagccgccaggacccgcctgttccttgccagcctgcccggctccacccactctaccgctgctgagctcaccggacccagcctggtggaagtgctcagagccagaccctggtttgaggagccccccaaggctgtggaactggaggggttggcggcctgtgagggcgagtactcccaaaagtacagtaccatgagcccgctgggcagtggggccttcggcttcgtgtggactgctgtggacaaggaaaaaaacaaggaggtggtggtgaagtttattaagaaggagaaggtcttggaggattgttggattgaggatcccaaacttgggaaagttactttagagatcgcaattctatccagggtggagcacgccaatatcatcaaggtattggatatatttgaaaaccaagggttcttccagcttgtgatggagaagcacggctccggcctagacctcttcgctttcatcgaccgccaccccaggctggatgagcccctggcgagctacatcttccgacaactagtgtcagcagtgggatacctgcgcttgaaggacatcatccaccgtgacatcaaggatgagaacatcgtgatcgccgaggacttcacaatcaagctgatagactttggctcggccgcctacttggaaaggggaaaattattttatactttttgtgggaccatcgagtactgtgcaccggaagttctcatggggaatccctacagagggccggagctggagatgtggtctctgggagtcactctgtacacgctggtctttgaggagaaccccttctgtgagctggaggagaccgtggaggctgccatacacccgccatacctggtgtccaaagaactcatgagccttgtgtctgggctgctgcagccagtccctgagagacgcaccaccttggagaagctggtgacagacccgtgggtaacacagcctgtgaatcttgctgactatacatgggaagaggtgtttcgagtaaacaagccagaaagtggagttctgtccgctgcgagcctggagatggggaacaggagcctgagtgatgtggcccaggctcaggagctttgtgggggccccgttccaggcgaggctcctaatggccaaggctgtttgcatcccggggatccccgtctgctgaccagctaaacaccaatttcttcctgcttttctccacttggtttggaaaatcacacagttttcaggctccatctgtttggagaaaatacattctgaagcatccccaattcaccttctaaaaactcatgtgcaggtttgataaacaccagaacagaagacagtgatgctgtattattttagatttattacatagatttggaattcacttttttcatgacctagaaaaaaacattccagtgttcaactgttttatattattaaagggcttttaatttgtgaa

SEQ ID NO: 163856 - DNA, 5161 bp, Homo sapiens
  Payload ID: 12264
  Gene Symbol: PASK
  Gene Name: PAS domain containing serine/threonine kinase
  Uniprot ID: Q96RG2
  ENST ID: ENST00000403638
  CDS Start-End: 93-3524
ctcctttccgtggtgtgtagccggcttggcgtgaccctcgcctgatccagttgttagagttggaagcttggcagttggcctcccttcttcccatggaggacgggggcttaacagcctttgaagaggaccagagatgcctttcccagagcctccccttgccagtgtcagcagagggcccagctgcacagaccactgctgagcccagcaggtcgttttcctcagcccacagacacctgagcagaaggaatgggctttccagactctgccagagcaggacagcgctctctgaagacagatggagctcctattgtctatcatcactggctgcccagaatatttgtacaagtaaactgcactgccctgctgcccctgagcacacggacccgtccgaaccgcggggcagtgtgtcctgctgctccctgctgcggggactgtcctcagggtggtcctcacctctgcttccggcccctgtgtgcaaccctaacaaggccatcttcacggtggatgccaagaccacagagatcctggttgctaacgacaaagcttgcgggctcctggggtacagcagccaggacctgattggccagaagctcacgcagttctttctgaggtcagattctgatgtggtggaggccctcagcgaggagcacatggaggccgacggccacgctgcggtggtgtttggcacggtggtggacatcatcagccgtagtggggagaagattccagtgtctgtgtggatgaagaggatgcggcaggagcgccgcctatgctgcgtggtggtcctggagcccgtggagagggtctcgacctgggtcgctttccagagcgatggcaccgtcacgtcatgtgacagtctctttgctcatcttcacgggtacgtgtctggggaggacgtggctgggcagcatatcacagacctgatcccttctgtgcagctccctccttctggccagcacatcccaaagaatctcaagattcagaggtctgttggaagagccagggacggtaccaccttccctctgagcttaaagctgaaatcccaacccagcagcgaggaggcgaccaccggtgaggcggcccctgtgagcggctaccgggcatctgtctgggtgttctgcaccatcagtggcctcatcaccctcctgccggatgggaccatccacggcatcaaccacagcttcgcgctgacactgtttggttacggaaagacggagctcctgggcaagaatatcactttcctgattcctggtttctacagctacatggaccttgcgtacaacagctcattacagctcccagacctggccagctgcctggacgtcggcaatgagagtgggtgtggggagagaaccttggacccgtggcagggccaggacccagctgaggggggccaggatccaaggattaatgtcgtgcttgctggtggccacgttgtgccccgagatgagatccggaagctgatggaaagccaagacatcttcaccgggactcagactgagctgattgctggaggccagctcctttcctgcctctcacctcagcctgctccaggggtggacaatgtcccagaaggaagcctgccagtgcacggtgaacaggcgctgcccaaggaccagcaaatcactgccttggggagagaggaacctgtggcaatagagagccccggacaggatcttctgggagaaagcaggtctgaaccagtggatgtgaagccatttgcttcctgcgaagattctgaagctccagtcccagctgaggatgggggcagtgatgctggcatgtgtggcctgtgtcagaaggcccagctagagcggatgggagtcagtggtcccagcggttcagacctttgggctggggctgccgtggccaagccccaggccaagggtcagctggcggggggcagcctcctgatgcactgcccttgctatgggagtgaatggggcttgtggtggcgaagccaggacttggcccccagcccctctgggatggcaggcctctcgtttgggacacctactctagatgagccgtggctgggagtggaaaacgaccgagaagagctgcagacctgcttgattaaggagcagctgtcccagttgagccttgcaggagccctggatgtcccccacgccgaactcgttccgacagagtgccaggctgtcaccgctcctgtgtcgtcctgcgatctgggaggcagagacctgtgcggtggctgcacgggcagctcctcagcctgctatgccttggccacggacctccctgggggcctggaagcagtggaggcccaggaggttgatgtgaattcgttttcctggaacctcaaggaactctttttcagtgaccagacagaccaaacgtcatcaaattgttcctgtgctacgtctgaactcagagagacaccctcttccttggcagtgggctccgatccagatgtaggcagtctccaggaacaggggtcgtgtgtcctggatgacagggagctgttactactgaccggcacctgtgttgaccttggccaaggccgacggttccgggagagctgtgtgggacatgatccaacagaaccgcttgaggtttgtttggtgtcctctgagcattatgcagcaagcgacagagaaagcccaggacacgttccttccacgttggatgctggccctgaggacacgtgcccatcagcagaggagccaaggctgaacgtccaggtcacctccacgcccgtgatcgtgatgcgcggggctgctggcctgcagcgggagatccaggagggtgcctactccgggagctgctaccatcgagatggcttacggctgagtatacagtttgaggtgaggcgggtggagctccagggccccacacctctgttctgctgctggctggtgaaagacctcctccacagccaacgcgactcagccgccaggacccgcctgttccttgccagcctgcccggctccacccactctaccgctgctgagctcaccggacccagcctggtggaagtgctcagagccagaccctggtttgaggagccccccaaggctgtggaactggaggggttggcggcctgtgagggcgagtactcccaaaagtacagtaccatgagcccgctgggcagtggggccttcggcttcgtgtggactgctgtggacaaggaaaaaaacaaggaggtggtggtgaagtttattaagaaggagaaggtcttggaggattgttggattgaggatcccaaacttgggaaagttactttagagatcgcaattctatccagggtggagcacgccaatatcatcaaggtattggatatatttgaaaaccaagggttcttccagcttgtgatggagaagcacggctccggcctagacctcttcgctttcatcgaccgccaccccaggctggatgagcccctggcgagctacatcttccgacaagtgagagcaggccagagccgtgttagtgtgaacgcaggcctgggtgcctgggtccggtggctgcaaagatcagtgatccatactcggttctctctctgagctggatctagccttctgtgtggggatttcatggagtaggatatatattttgagaagaaaattctatgattgaagtagagaaagtgaggttgggaaggaaggatgaggccagatacagtcctggaatgactgagaaagtatgtttaatggttaaggtttatttacatacataaaatatccacaacaatcataaaaattaaccagtaagggttaggatgcagccagagagcgtctcaaaggcatgtgtgcggcacagcggcctgcaggttgtaagtgcccactaaatggtggctgttgaggtaattaaccagcaaaactgagatcctgacattctcacttttcagtaagtatttgtcttgatctgtttcgtgtctaattacatattgaacttcggccattattttattggaatgggagagtgatgatccaaataggaaggcaccctagcagagggacagggggaagaaacggtaactcgtgttgggttttaaggagagggtggcggttccatcctgtactgctcccagctcccccagaagaactggagaaataccagcaaagggctgtgtagacaactcacatttgctcttggattgtttgctggggacaactcgatttctaatgacagcttccgtgaatcaacatttcttccttaaagctacacactctcgggttgttgggtttccgaagtttagtttctcaggctcctacttgtaagtttcagatattatggttctgcaaaaaagggtcacctctctccctcttcctgtgttggaaggtgacgtcctccctttagtttgtggccaacacttgtttctgaaactttttacagcaaacagagtatctgtatgaggttatgttgagggtcgcttgttaaaagctgctgcctgacagctgttaattctggggctagtgagacacataattatggtgtttatactctaaaatttttgccaaaagaatctctaccccttttgtaaatatatagacataaatgttattctatgtaaatacagatgcacaattttataaagtatatgatcgcacatcaatgtatgtaggaatcatgctggttctcagggcattgcctgtcagctccagattcatcaggacctgctcagcagcggggtcggggagctgggcctgggaacagccctggcttggttcaggccgctccagggcagcatggccagtccagggcacagaagcatctgcaggaagagcagctttcttcaagtcgctctttagccctttgtggttaatctctcagtactagttaataaatcttaatgaaactttccatgttcaagttcatgtgtgatttctgtctcctgattggatcctgactgatttgtatatatctacatatatatgtaagtatgtatgcatgcatgcttgtatatgtgtatttatgtgtgtacctatgtacaagtatatgttatgtgtataggtatgcacacgtgtgtatgcaggtgtgtatatatgtgcacatgtatgtatctaaatgtatgtataaatatgcaggtatgtatatataaatatgcaggtatgtatatataaatatgcaggtatgtatatgtttgtatatatgtgtataaatatgcgtatatttattaaatgtaagttaatcgggctta

SEQ ID NO: 163857 - DNA, 578 bp, Homo sapiens
  Payload ID: 12264
  Gene Symbol: PASK
  Gene Name: PAS domain containing serine/threonine kinase
  ENST ID: ENST00000433589
  CDS Start-End: 1-578
taatgttttgcagtcctgccgggcagcacatcagatgctcaagagtggacatcatcagccgtagtggggagaagattccagtgtctgtgtggatgaagaggatgcggcaggagcgccgcctatgctgcgtggtggtcctggagcccgtggagagggtctcgacctgggtcgctttccagagcgatggcaccgtcacgtcatgtgacagtctctttgctcatcttcacgggtacgtgtctggggaggacgtggctgggcagcatatcacagacctgatcccttctgtgcagctccctccttctggccagcacatcccaaagaatctcaagattcagaggtctgttggaagagccagggacggtaccaccttccctctgagcttaaagctgaaatcccaacccagcagcgaggaggcgaccaccggtgaggcggcccctgtgagcggctaccgggcatctgtctgggtgttctgcaccatcagtggcctcatcaccctcctgccggatgggaccatccacggcatcaaccacagcttcgcgctgacactgtttggttacggaaagacggagctcctgggc

SEQ ID NO: 163858 - DNA, 565 bp, Homo sapiens
  Payload ID: 12264
  Gene Symbol: PASK
  Gene Name: PAS domain containing serine/threonine kinase
  ENST ID: ENST00000452907
  CDS Start-End: 190-565
gtgtagccggcttggcgtgaccctcgcctgatccaggttgtgtcgccaggctggagggcagtggtgtcatctcggctcattacaacctccacctcccaggttcaagcgattctcctgcctctgcctccagagtagctgggaatacagttgttagagttggaagcttggcagttggcctcccttcttcccatggaggacgggggcttaacagcctttgaagaggaccagagatgcctttcccagagcctccccttgccagtgtcagcagagggcccagctgcacagaccactgctgagcccagcaggtcgttttcctcagcccacagacacctgagcagaaggaatgggctttccagactctgccagagcaggacagcgctctctgaagacagatggagctcctattgtctatcatcactggctgcccagaatatttgtacaagtaaactgcactgccctgctgcccctgagcacacggacccgtccgaaccgcggggcagtgtgtcctgctgctccctgctgcggggactgtcctcagggtggtcctcacctctgcttccggccc

SEQ ID NO: 163859 - DNA, 538 bp, Homo sapiens
  Payload ID: 12264
  Gene Symbol: PASK
  Gene Name: PAS domain containing serine/threonine kinase
  ENST ID: ENST00000415234
  CDS Start-End: 117-538
gataaaagcgcggaagggctcctttccgtggtgtgtagccggcttggcgtgaccctcgcctgatccaggtggacatcatcagccgtagtggggagaagattccagtgtctgtgtggatgaagaggatgcggcaggagcgccgcctatgctgcgtggtggtcctggagcccgtggagagggtctcgacctgggtcgctttccagagcgatggcaccgtcacgtcatgtgacagtctctttgctcatcttcacgggtacgtgtctggggaggacgtggctgggcagcatatcacagacctgatcccttctgtgcagctccctccttctggccagcacatcccaaagaatctcaagattcagaggtctgttggaagagccagggacggtaccaccttccctctgagcttaaagctgaaatcccaacccagcagcgaggaggcgaccaccggtgaggcggcccctgtgagcggctaccgggcatctgtctgggtgttctgcaccatcagtggcctcatcaccctcctgccggatgggaccat

SEQ ID NO: 163860 - DNA, 1009 bp, Homo sapiens
  Payload ID: 12264
  Gene Symbol: PASK
  Gene Name: PAS domain containing serine/threonine kinase
  ENST ID: ENST00000437780
  CDS Start-End: 113-328
gggataaaagcgcggaagggctcctttccgtggtgtgtagccggcttggcgtgaccctcgcctgatccagttgttagagttggaagcttggcagttggcctcccttcttcccatggaggacgggggcttaacagcctttgaagaggaccagagatgcctttcccagagcctccccttgccagtgtcagcagagggcccagctgcacagaccactgctgagcccagcaggtcgttttcctcagcccacagacacctgagcagaaggaatgggctttccagactctgccagagcaggacagcgctctctggtggacatcatcagccgtagtggggagaagattccagtgtctgtgtggatgaagaggatgcggcaggagcgccgcctatgctgcgtggtggtcctggagcccgtggagagggtctcgacctgggtcgctttccagagcgatggcaccgtcacgtcatgtgacagtctctttgctcatcttcacgggtacgtgtctggggaggacgtggctgggcagcatatcacagacctgatcccttctgtgcagctccctccttctggccagcacatcccaaagaatctcaagattcagaggtctgttggaagagccagggacggtaccaccttccctctgagcttaaagctgaaatcccaacccagcagcgaggaggcgaccaccggtgaggcggcccctgtgagcggctaccgggcatctgtctgggtgttctgcaccatcagtggcctcatcaccctcctgccggatgggaccatccacggcatcaaccacagcttcgcgctgacactgtttggttacggaaagacggagctcctgggcaagaatatcactttcctgattcctggtttctacagctacatggaccttgcgtacaacagctcattacagctcccagacctggccagctgcctggacgtcggcaatgagagtgggtgtggggagagaaccttggacccgtggcagggccaggacccagctgagggggg

SEQ ID NO: 163861 - DNA, 4724 bp, Homo sapiens
  Payload ID: 12264
  Gene Symbol: PASK
  Gene Name: PAS domain containing serine/threonine kinase
  Uniprot ID: Q96RG2
  ENST ID: ENST00000544142
  CDS Start-End: 287-4258
gtccccgcgcggattttacccatcccagtgcggacgctgcagccttcgtctaccctgcggagccacccggcccatgaacgagccgccccgcgtcctccgccttcagaaagaggcctccaagaggcgagctctgcgctactcacccattttgatcgcgagtcgggaggaaaccgcatctgcccggcccgggggcggaggcgcccattattcctttggctcctccgaagcgccgtaggggtgtttgttgttagagttggaagcttggcagttggcctcccttcttcccatggaggacgggggcttaacagcctttgaagaggaccagagatgcctttcccagagcctccccttgccagtgtcagcagagggcccagctgcacagaccactgctgagcccagcaggtcgttttcctcagcccacagacacctgagcagaaggaatgggctttccagactctgccagagcaggacagcgctctctgaagacagatggagctcctattgtctatcatcactggctgcccagaatatttgtacaagtaaactgcactgccctgctgcccctgagcacacggacccgtccgaaccgcggggcagtgtgtcctgctgctccctgctgcggggactgtcctcagggtggtcctcacctctgcttccggcccctgtgtgcaaccctaacaaggccatcttcacggtggatgccaagaccacagagatcctggttgctaacgacaaagcttgcgggctcctggggtacagcagccaggacctgattggccagaagctcacgcagttctttctgaggtcagattctgatgtggtggaggccctcagcgaggagcacatggaggccgacggccacgctgcggtggtgtttggcacggtggtggacatcatcagccgtagtggggagaagattccagtgtctgtgtggatgaagaggatgcggcaggagcgccgcctatgctgcgtggtggtcctggagcccgtggagagggtctcgacctgggtcgctttccagagcgatggcaccgtcacgtcatgtgacagtctctttgctcatcttcacgggtacgtgtctggggaggacgtggctgggcagcatatcacagacctgatcccttctgtgcagctccctccttctggccagcacatcccaaagaatctcaagattcagaggtctgttggaagagccagggacggtaccaccttccctctgagcttaaagctgaaatcccaacccagcagcgaggaggcgaccaccggtgaggcggcccctgtgagcggctaccgggcatctgtctgggtgttctgcaccatcagtggcctcatcaccctcctgccggatgggaccatccacggcatcaaccacagcttcgcgctgacactgtttggttacggaaagacggagctcctgggcaagaatatcactttcctgattcctggtttctacagctacatggaccttgcgtacaacagctcattacagctcccagacctggccagctgcctggacgtcggcaatgagagtgggtgtggggagagaaccttggacccgtggcagggccaggacccagctgaggggggccaggatccaaggattaatgtcgtgcttgctggtggccacgttgtgccccgagatgagatccggaagctgatggaaagccaagacatcttcaccgggactcagactgagctgattgctggaggccagctcctttcctgcctctcacctcagcctgctccaggggtggacaatgtcccagaaggaagcctgccagtgcacggtgaacaggcgctgcccaaggaccagcaaatcactgccttggggagagaggaacctgtggcaatagagagccccggacaggatcttctgggagaaagcaggtctgaaccagtggatgtgaagccatttgcttcctgcgaagattctgaagctccagtcccagctgaggatgggggcagtgatgctggcatgtgtggcctgtgtcagaaggcccagctagagcggatgggagtcagtggtcccagcggttcagacctttgggctggggctgccgtggccaagccccaggccaagggtcagctggcggggggcagcctcctgatgcactgcccttgctatgggagtgaatggggcttgtggtggcgaagccaggacttggcccccagcccctctgggatggcaggcctctcgtttgggacacctactctagatgagccgtggctgggagtggaaaacgaccgagaagagctgcagacctgcttgattaaggagcagctgtcccagttgagccttgcaggagccctggatgtcccccacgccgaactcgttccgacagagtgccaggctgtcaccgctcctgtgtcgtcctgcgatctgggaggcagagacctgtgcggtggctgcacgggcagctcctcagcctgctatgccttggccacggacctccctgggggcctggaagcagtggaggcccaggaggttgatgtgaattcgttttcctggaacctcaaggaactctttttcagtgaccagacagaccaaacgtcatcaaattgttcctgtgctacgtctgaactcagagagacaccctcttccttggcagtgggctccgatccagatgtaggcagtctccaggaacaggggtcgtgtgtcctggatgacagggagctgttactactgaccggcacctgtgttgaccttggccaaggccgacggttccgggagagctgtgtgggacatgatccaacagaaccgcttgaggtttgtttggtgtcctctgagcattatgcagcaagcgacagagaaagcccaggacacgttccttccacgttggatgctggccctgaggacacgtgcccatcagcagaggagccaaggctgaacgtccaggtcacctccacgcccgtgatcgtgatgcgcggggctgctggcctgcagcgggagatccaggagggtgcctactccgggagctgctaccatcgagatggcttacggctgagtatacagtttgaggtgaggcgggtggagctccagggccccacacctctgttctgctgctggctggtgaaagacctcctccacagccaacgcgactcagccgccaggacccgcctgttccttgccagcctgcccggctccacccactctaccgctgctgagctcaccggacccagcctggtggaagtgctcagagccagaccctggtttgaggagccccccaaggctgtggaactggaggggttggcggcctgtgagggcgagtactcccaaaagtacagtaccatgagcccgctgggcagtggggccttcggcttcgtgtggactgctgtggacaaggaaaaaaacaaggaggtggtggtgaagtttattaagaaggagaaggtcttggaggattgttggattgaggatcccaaacttgggaaagttactttagagatcgcaattctatccagggtggagcacgccaatatcatcaaggtattggatatatttgaaaaccaagggttcttccagcttgtgatggagaagcacggctccggcctagacctcttcgctttcatcgaccgccaccccaggctggatgagcccctggcgagctacatcttccgacaactagtgtcagcagtgggatacctgcgcttgaaggacatcatccaccgtgacatcaaggatgagaacatcgtgatcgccgaggacttcacaatcaagctgatagactttggctcggccgcctacttggaaaggggaaaattattttatactttttgtgggaccatcgagtactgtgcaccggaagttctcatggggaatccctacagagggccggagctggagatgtggtctctgggagtcactctgtacacgctggtctttgaggagaaccccttctgtgagctggaggagaccgtggaggctgccatacacccgccatacctggtgtccaaagaactcatgagccttgtgtctgggctgctgcagccagtccctgagagacgcaccaccttggagaagctggtgacagacccgtgggtaacacagcctgtgaatcttgctgactatacatgggaagaggtgtttcgagtaaacaagccagaaagtggagttctgtccgctgcgagcctggagatggggaacaggagcctgagtgatgtggcccaggctcaggagctttgtgggggccccgttccaggcgaggctcctaatggccaaggctgtttgcatcccggggatccccgtctgctgaccagctaaacaccaatttcttcctgcttttctccacttggtttggaaaatcacacagttttcaggctccatctgtttggagaaaatacattctgaagcatccccaattcaccttctaaaaactcatgtgcaggtttgataaacaccagaacagaagacagtgatgctgtattattttagatttattacatagatttggaattcacttttttcatgacctagaaaaaaacattccagtgttcaactgttttatattattaaagggcttttaatttgtgaacttctgaaggcatgagtgttttctctttctacttttgtatatgtgcatgttttgtttcctctgacttggtatatgctcatctgagtgacggatatgtgaaatttgtagaactggttagtcaaatggccagactatttcattaatttatttcctcaaatgcttttcaaattaaagcacctttgttagtaaacagtt

SEQ ID NO: 163862 - DNA, 216 bp, Homo sapiens
  Payload ID: 12264
  Gene Symbol: PASK
  Gene Name: PAS domain containing serine/threonine kinase
  ENST ID: ENST00000629419
  CDS Start-End: 1-216
atggaggacgggggcttaacagcctttgaagaggaccagagatgcctttcccagagcctccccttgccagtgtcagcagagggcccagctgcacagaccactgctgagcccagcaggtcgttttcctcagcccacagacacctgagcagaaggaatgggctttccagactctgccagagcaggacagcgctctctggtggacatcatcagccgtag

SEQ ID NO: 163863 - DNA, 1518 bp, Homo sapiens
  Payload ID: 12265
  Gene Symbol: PNPLA1
  Gene Name: patatin-like phospholipase domain containing 1
  Uniprot ID: Q8N8W4
  ENST ID: ENST00000312917
  CDS Start-End: 140-1480
gggcagtccacaatggaaggcttcttggaggaggagatgattgagctgcttctactaagatgagtatctcagagtcctcaacgtgggtgtggccgaggtgaagaaatccttcctggggcccttgtccccgtcctgtaagatggtgcagatgatgaggcagtttctgtaccgggtcctgcccgaggactcctacaaggtcaccacggggaagctccatgtgagcctcacccgcttaacggacggggagaatgtggtggtttcagagttcacgtccaaggaggagctcattgaggccctatactgcagctgcttcgtcccggtgtactgtggcctcatccccccgacttaccgcggtgtgtgggcatttctcactctgcccccacagaggtacatcgatgggggcttcacgggcatgcagccctgtgccttctggaccgacgccatcaccatctccaccttcagtgggcagcaggacatctgtccccgggactgcccggccatcttccacgacttccgcatgttcaactgctccttccagttctccctggagaacatcgccaggatgacccacgcattgttccccccggacctggtgatcctgcacgattactactaccgagggtacgaggatgcagttttgtacttgaggcggctgaatgctgtttatcttaattcttcctccaagagagtgattttcccccgggtggaagtgtactgccagatagaactcgcccttggcaatgagtgccctgaacgcagtcaaccaagccttcgagcacggcaggccagtctggaaggagccacacaacctcacaaggagtgggttcccaaaggggatggaaggggcagccatggtccgcctgtgtcccaacctgtgcagacacttgaattcacatgcgagtcacctgtttcagcaccagtctctccacttgagcagccacctgcacagccactggcctcttcaactccactttctctaagtggcatgccacctgtatcattcccagctgtgcacaagccacccagctccacacctggttcatcactgcccaccccaccacctggactgtcacctctgtcacctcagcagcaggtacaaccgtctggatcaccagccagatccctacactctcaggcacccacttcacccaggccatccctggggccttcaactgtgggggcacctcaaacactgccccgaagttctctttcagccttccctgctcagccacctgtggaggaactaggccaagaacagccccaagctgtagctcttcttgtctcttcaaaaccaaaaagcgccgtgcctctggttcatgtgaaggaaaccgtcagcaagccttatgtaacggagagccctgctgaagactcaaactgggtgaataaggtcttcaagaagaacaagcaaaagacaagtggcaccagaaaaggcttcccaagacattcgggatccaaaaaaccaagcagcaaagtgcagtgagcatgtctaatgttccttaaatcccacggagaggagca

SEQ ID NO: 163864 - DNA, 2332 bp, Homo sapiens
  Payload ID: 12265
  Gene Symbol: PNPLA1
  Gene Name: patatin-like phospholipase domain containing 1
  Uniprot ID: Q8N8W4
  ENST ID: ENST00000388715
  CDS Start-End: 140-1453
gggcagtccacaatggaaggcttcttggaggaggagatgattgagctgcttctactaagatgagtatctcagagtcctcaacgtgggtgtggccgaggtgaagaaatccttcctggggcccttgtccccgtcctgtaagatggtgcagatgatgaggcagtttctgtaccgggtcctgcccgaggactcctacaaggtcaccacggggaagctccatgtgagcctcacccgcttaacggacggggagaatgtggtggtttcagagttcacgtccaaggaggagctcattgaggccctatactgcagctgcttcgtcccggtgtactgtggcctcatccccccgacttaccgcggtgtgaggtacatcgatgggggcttcacgggcatgcagccctgtgccttctggaccgacgccatcaccatctccaccttcagtgggcagcaggacatctgtccccgggactgcccggccatcttccacgacttccgcatgttcaactgctccttccagttctccctggagaacatcgccaggatgacccacgcattgttccccccggacctggtgatcctgcacgattactactaccgagggtacgaggatgcagttttgtacttgaggcggctgaatgctgtttatcttaattcttcctccaagagagtgattttcccccgggtggaagtgtactgccagatagaactcgcccttggcaatgagtgccctgaacgcagtcaaccaagccttcgagcacggcaggccagtctggaaggagccacacaacctcacaaggagtgggttcccaaaggggatggaaggggcagccatggtccgcctgtgtcccaacctgtgcagacacttgaattcacatgcgagtcacctgtttcagcaccagtctctccacttgagcagccacctgcacagccactggcctcttcaactccactttctctaagtggcatgccacctgtatcattcccagctgtgcacaagccacccagctccacacctggttcatcactgcccaccccaccacctggactgtcacctctgtcacctcagcagcaggtacaaccgtctggatcaccagccagatccctacactctcaggcacccacttcacccaggccatccctggggccttcaactgtgggggcacctcaaacactgccccgaagttctctttcagccttccctgctcagccacctgtggaggaactaggccaagaacagccccaagctgtagctcttcttgtctcttcaaaaccaaaaagcgccgtgcctctggttcatgtgaaggaaaccgtcagcaagccttatgtaacggagagccctgctgaagactcaaactgggtgaataaggtcttcaagaagaacaagcaaaagacaagtggcaccagaaaaggcttcccaagacattcgggatccaaaaaaccaagcagcaaagtgcagtgagcatgtctaatgttccttaaatcccacggagaggagcagctttgggaactgtgttcagagagattccgaggaatagaggagagtgtaagggagtagggggtgcagtgggagattgggctttggaacagacacatccgacataaaattcctgctctgccacagctccactcagggatcatggttgggacacttgctctccctgagcctccatttcctgtaaaatggggatgataccacttcataaagttgtgagagttaaatgtgatcgatgatgtaaattgcttcatagaatgcagaatgtgtaatagctcacaataagtaggtattatgtttacatattatgtttgtatttatgctacttaaatacaaaactggacaggccaggcatggtggctcatgcctgtaatcccagcactttgggaggctgaggtaggtggaaaacctgaggtcaggagttcaagaacagcctgaccaacatggtgaaactccatctctactaaaaatacaaaaattaaccaggcttgatggtgtgcacctgtaatctcagctactcgggaggctgaggcaagagaatcgcttgaacccaggaggcagaggttgcagtgcaccaagactgcgccattgcactccagcccgggcaacaagagcgaaaccccatctcgaaaaaaaacaaaacaaaactagacaagtgagtgcctacgtgacactcaaatgttgccagcatacagttaagggccctagtcaatgtaggcctgcttcttatagctttttgactatattatgctgtctttgacttagtcagtcaacacttattgagcacctactaagtgccaaacactctcctggactctggcaaaataaaaaatgaattaaaactct

SEQ ID NO: 163865 - DNA, 1599 bp, Homo sapiens
  Payload ID: 12265
  Gene Symbol: PNPLA1
  Gene Name: patatin-like phospholipase domain containing 1
  Uniprot ID: Q8N8W4
  ENST ID: ENST00000394571
  CDS Start-End: 1-1599
atggaagaacaggtgttcaagggggacccggacacccctcactccatctccttctcgggcagtggattcctctccttctaccaggcgggggctgtggacgccctgcgggacctggccccccggatgctggaaacagcccaccgctttgcggggacatcggcaggtgctgtgatcgccgccctggccatctgcgggattgaaatggatgagtatctcagagtcctcaacgtgggtgtggccgaggtgaagaaatccttcctggggcccttgtccccgtcctgtaagatggtgcagatgatgaggcagtttctgtaccgggtcctgcccgaggactcctacaaggtcaccacggggaagctccatgtgagcctcacccgcttaacggacggggagaatgtggtggtttcagagttcacgtccaaggaggagctcattgaggccctatactgcagctgcttcgtcccggtgtactgtggcctcatccccccgacttaccgcggtgtgaggtacatcgatgggggcttcacgggcatgcagccctgtgccttctggaccgacgccatcaccatctccaccttcagtgggcagcaggacatctgtccccgggactgcccggccatcttccacgacttccgcatgttcaactgctccttccagttctccctggagaacatcgccaggatgacccacgcattgttccccccggacctggtgatcctgcacgattactactaccgagggtacgaggatgcagttttgtacttgaggcggctgaatgctgtttatcttaattcttcctccaagagagtgattttcccccgggtggaagtgtactgccagatagaactcgcccttggcaatgagtgccctgaacgcagtcaaccaagccttcgagcacggcaggccagtctggaaggagccacacaacctcacaaggagtgggttcccaaaggggatggaaggggcagccatggtccgcctgtgtcccaacctgtgcagacacttgaattcacatgcgagtcacctgtttcagcaccagtctctccacttgagcagccacctgcacagccactggcctcttcaactccactttctctaagtggcatgccacctgtatcattcccagctgtgcacaagccacccagctccacacctggttcatcactgcccaccccaccacctggactgtcacctctgtcacctcagcagcaggtacaaccgtctggatcaccagccagatccctacactctcaggcacccacttcacccaggccatccctggggccttcaactgtgggggcacctcaaacactgccccgaagttctctttcagccttccctgctcagccacctgtggaggaactaggccaagaacagccccaagctgtagctcttcttgtctcttcaaaaccaaaaagcgccgtgcctctggttcatgtgaaggaaaccgtcagcaagccttatgtaacggagagccctgctgaagactcaaactgggtgaataaggtcttcaagaagaacaagcaaaagacaagtggcaccagaaaaggcttcccaagacattcgggatccaaaaaaccaagcagcaaagtgcagtga

SEQ ID NO: 163866 - DNA, 1602 bp, Homo sapiens
  Payload ID: 12265
  Gene Symbol: PNPLA1
  Gene Name: patatin-like phospholipase domain containing 1
  ENST ID: ENST00000457797
  CDS Start-End: 1-1602
atggaagaacaggtgttcaagggggacccggacacccctcactccatctccttctcgggcagtggattcctctccttctaccaggcgggggctgtggacgccctgcgggacctggccccccggatgctggaaacagcccaccgctttgcggggacatcggcaggtgctgtgatcgccgccctggccatctgcgggattgaaatggatgagtatctcagagtcctcaacgtgggtgtggccgaggtgaagaaatccttcctggggcccttgtccccgtcctgtaagatggtgcagatgatgaggcagtttctgtaccgggtcctgcccgaggactcctacaaggtcaccacggggaagctccatgtgagcctcacccgcttaacggacggggagaatgtggtggtttcagagttcacgtccaaggaggagctcattgaggcagccctatactgcagctgcttcgtcccggtgtactgtggcctcatccccccgacttaccgcggtgtgaggtacatcgatgggggcttcacgggcatgcagccctgtgccttctggaccgacgccatcaccatctccaccttcagtgggcagcaggacatctgtccccgggactgcccggccatcttccacgacttccgcatgttcaactgctccttccagttctccctggagaacatcgccaggatgacccacgcattgttccccccggacctggtgatcctgcacgattactactaccgagggtacgaggatgcagttttgtacttgaggcggctgaatgctgtttatcttaattcttcctccaagagagtgattttcccccgggtggaagtgtactgccagatagaactcgcccttggcaatgagtgccctgaacgcagtcaaccaagccttcgagcacggcaggccagtctggaaggagccacacaacctcacaaggagtgggttcccaaaggggatggaaggggcagccatggtccgcctgtgtcccaacctgtgcagacacttgaattcacatgcgagtcacctgtttcagcaccagtctctccacttgagcagccacctgcacagccactggcctcttcaactccactttctctaagtggcatgccacctgtatcattcccagctgtgcacaagccacccagctccacacctggttcatcactgcccaccccaccacctggactgtcacctctgtcacctcagcagcaggtacaaccgtctggatcaccagccagatccctacactctcaggcacccacttcacccaggccatccctggggccttcaactgtgggggcacctcaaacactgccccgaagttctctttcagccttccctgctcagccacctgtggaggaactaggccaagaacagccccaagctgtagctcttcttgtctcttcaaaaccaaaaagcgccgtgcctctggttcatgtgaaggaaaccgtcagcaagccttatgtaacggagagccctgctgaagactcaaactgggtgaataaggtcttcaagaagaacaagcaaaagacaagtggcaccagaaaaggcttcccaagacattcgggatccaaaaaaccaagcagcaaagtgcagtga

SEQ ID NO: 163867 - DNA, 2428 bp, Homo sapiens
  Payload ID: 12266
  Gene Symbol: PNPLA2
  Gene Name: patatin-like phospholipase domain containing 2
  Uniprot ID: Q96AD5
  ENST ID: ENST00000336615
  CDS Start-End: 203-1717
gcggccccagtcagacgcaggcagccccaaagcctgaacaggcagggccagacccagcttcttcgcctccgccagcggggaccccgagctagagccgcagcgggacctgcccggcccccggctccagcgagcgagcggcgagcaggcggctcacagaggcctggccgcccacggaacccggggcccggcggccgccgccgcgatgtttccccgcgagaagacgtggaacatctcgttcgcgggctgcggcttcctcggcgtctactacgtcggcgtggcctcctgcctccgcgagcacgcgcccttcctggtggccaacgccacgcacatctacggcgcctcggccggggcgctcacggccacggcgctggtcaccggggtctgcctgggtgaggctggtgccaagttcattgaggtatctaaagaggcccggaagcggttcctgggccccctgcacccctccttcaacctggtaaagatcatccgcagtttcctgctgaaggtcctgcctgctgatagccatgagcatgccagtgggcgcctgggcatctccctgacccgcgtgtcagacggcgagaatgtcattatatcccacttcaactccaaggacgagctcatccaggccaatgtctgcagcggtttcatccccgtgtactgtgggctcatccctccctccctccagggggtgcgctacgtggatggtggcatttcagacaacctgccactctatgagcttaagaacaccatcacagtgtcccccttctcgggcgagagtgacatctgtccgcaggacagctccaccaacatccacgagctgcgggtcaccaacaccagcatccagttcaacctgcgcaacctctaccgcctctccaaggccctcttcccgccggagcccctggtgctgcgagagatgtgcaagcagggataccgggatggcctgcgctttctgcagcggaacggcctcctgaaccggcccaaccccttgctggcgttgccccccgcccgcccccacggcccagaggacaaggaccaggcagtggagagcgcccaagcggaggattactcgcagctgcccggagaagatcacatcctggagcacctgcccgcccggctcaatgaggccctgctggaggcctgcgtggagcccacggacctgctgaccaccctctccaacatgctgcctgtgcgtctggccacggccatgatggtgccctacacgctgccgctggagagcgctctgtccttcaccatccgcttgctggagtggctgcccgacgttcccgaggacatccggtggatgaaggagcagacgggcagcatctgccagtacctggtgatgcgcgccaagaggaagctgggcaggcacctgccctccaggctgccggagcaggtggagctgcgccgcgtccagtcgctgccgtccgtgccgctgtcctgcgccgcctacagagaggcactgcccggctggatgcgcaacaacctctcgctgggggacgcgctggccaagtgggaggagtgccagcgccagctgctgctcggcctcttctgcaccaacgtggccttcccgcccgaagctctgcgcatgcgcgcacccgccgacccggctcccgcccccgcggacccagcatccccgcagcaccagctggccgggcctgcccccttgctgagcacccctgctcccgaggcccggcccgtgatcggggccctggggctgtgagaccccgaccctctcgaggaaccctgcctgagacgcctccattaccactgcgcagtgagatgaggggactcacagttgccaagaggggtctttgccgtgggccccctcgccagccactcaccagctgcatgcactgagaggggaggtttccacacccctcccctgggccgctgaggccccgcgcacctgtgccttaatcttccctcccctgtgctgcccgagcacctcccccgcccctttactcctgagaactttgcagctgcccttccctccccgtttttcatggcctgctgaaatatgtgtgtgaagaattatttattttcgccaaagcacatgtaataaatgctgcagcccagcctctgcccactttgtgtgtatgtgaccgcctgcttacttgcagtgagagcctggtggccagggtctggccctaccttggctgaccagcctctccacagctgcaggccaggtctcccagcgtcgcactcctgggcctggcatttggaacctgccaggctggcctgggaacacccccctacaggcacatatgaacgtactgcattcctgccgacccccctgtctaggatgcatccacaccccccccaattttgcccagcagcctcctggctgacccttggccacagccttctgagggccaatggaaatatttgggaccaagattcttggtaaataaaaacgaaaatgtttgcaaaa

SEQ ID NO: 163868 - DNA, 2724 bp, Homo sapiens
  Payload ID: 12266
  Gene Symbol: PNPLA2
  Gene Name: patatin-like phospholipase domain containing 2
  ENST ID: ENST00000617551
  CDS Start-End: 1857-2504
gcctcagtcggccccctggcttcaagatacatcaaggtccctgctacccgagccaaggacacctctcccacagtgcttccccaccctgctcccaacaagactccttctcacgggtggtcttgcacagctggagcccatagtgcagcaggtgctggctgaagagcccctggctccacactgccccactcctgaccagggtgatgcactggaggagggcttggacctcagctcctccctcagtgctcccgaccacttccagggactatccccaagctggccagcactcctgcgccccaagaggagtgtttggggtgcttcctcttggctgcagtgggacacaggtgtgccttcctaggaactgggccctgactacttccagcccaacactcccgggcctgtgaactgtgacctgtgtgccgggatgggttttgtgggtctgccccatccccgcactgctggatctggccaagtgggtgaaggctaaggccggtcagagttgagtttctgccttgtcccctctcctgggctagatgccacaccaggcccagtgactcatagggcaggcagttgggaaataccaggcagagggcaggtcctggtctcagctggccagcctctgctgtctgccatcccaggggaggtggccaaagtcccaactgtgagccaggccccacattcactgggcctcctccagggtctgtatgccatggaaccctggacatggggctatgaaggaaggtgggtgttgctaagcccaggagcatgggcccctaaccttggccctgtgccccaggtgaggctggtgccaagttcattgaggtatctaaagaggcccggaagcggttcctgggccccctgcacccctccttcaacctggtaaagatcatccgcagtttcctgctgaaggtcctgcctgctgatagccatgagcatgccagtgggcgcctgggcatctccctgacccgcgtgtcagacggcgagaatgtcattatatcccacttcaactccaaggacgagctcatccaggccaatgtctgcagcggtttcatccccgtgtactgtgggctcatccctccctccctccagggggtgcgctacgtggatggtggcatttcagacaacctgccactctatgagcttaagaacaccatcacagtgtcccccttctcgggcgagagtgacatctgtccgcaggacagctccaccaacatccacgagctgcgggtcaccaacaccagcatccagttcaacctgcgcaacctctaccgcctctccaaggccctcttcccgccggagcccctggtgctgcgagagatgtgcaagcagggataccgggatggcctgcgctttctgcagcggaacggtgcgcggacccgggcgggagagggcggggtgggctcggctctgctaccccctgcgggccgcggccgcgctgatgaactgagaatcccttctctccccaaccccaggcctcctgaaccggcccaaccccttgctggcgttgccccccgcccgcccccacggcccagaggacaaggaccaggcagtggagagcgcccaagcggaggattactcgcagctgcccggagaagatcacatcctggagcacctgcccgcccggctcaatgagggtgcgcacctgggggacgggaggggaggaggggaggcaggagggaaagagagagaggagaggacggtgagcaggggagggaagccgagcgggtcctgggccccgctgcctccactggccgccgacctcccgcccacccgcagccctgctggaggcctgcgtggagcccacggacctgctgaccaccctctccaacatgctgcctgtgcgtctggccacggccatgatggtgccctacacgctgccgctggagagcgctctgtccttcaccatccgcttgctggagtggctgcccgacgttcccgaggacatccggtggatgaaggagcagacgggcagcatctgccagtacctggtgatgcgcgccaagaggaagctgggcaggcacctgccctccaggctgccggagcaggtggagctgcgccgcgtccagtcgctgccgtccgtgccgctgtcctgcgccgcctacagagaggcactgcccggctggatgcgcaacaacctctcgctgggggacgcgctggccaagtgggaggagtgccagcgccagctgctgctcggcctcttctgcaccaacgtggccttcccgcccgaagctctgcgcatgcgcgcacccgccgacccggctcccgcccccgcggacccagcatccccgcagcaccagctggccgggcctgcccccttgctgagcacccctgctcccgaggcccggcccgtgatcgggcccggggctgtgagaccccgaccctctcgaggaaccctgcctgagacgcctccattaccactgcgcagtgagatgaggggactcacagttgccaagaggggtctttgccgtgggccccctcgccagccactcaccagctgcatgcactgagaggggaggtttccacacccctcccctgggccgctgaggccccgcgcacctgtgccttaatcttccctcccctgtgctgcccgagcacctcccccgcccctttactcctgagaactttgcagctgcccttccctccccgtttttcatggcctgctgaaatatgtgtgtgaagaattatttattttcgccaaagcacatgtaataaatgctgcagcccagc

SEQ ID NO: 163869 - DNA, 2805 bp, Homo sapiens
  Payload ID: 12267
  Gene Symbol: PNPLA3
  Gene Name: patatin-like phospholipase domain containing 3
  Uniprot ID: Q9NST1
  ENST ID: ENST00000216180
  CDS Start-End: 174-1619
atggtccgaggggggcggggctgacgtcgcgctgggaatgccctggccgagacactgaggcagggtagagagcgcttgcgggcgccgggcggagctgctgcggatcaggacccgagccgattcccgatcccgacccagatcctaacccgcgcccccgccccgccgccgccgccatgtacgacgcagagcgcggctggagcttgtccttcgcgggctgcggcttcctgggcttctaccacgtcggggcgacccgctgcctgagcgagcacgccccgcacctcctccgcgacgcgcgcatgttgttcggcgcttcggccggggcgttgcactgcgtcggcgtcctctccggtatcccgctggagcagactctgcaggtcctctcagatcttgtgcggaaggccaggagtcggaacattggcatcttccatccatccttcaacttaagcaagttcctccgacagggtctctgcaaatgcctcccggccaatgtccaccagctcatctccggcaaaataggcatctctcttaccagagtgtctgatggggaaaacgttctggtgtctgactttcggtccaaagacgaagtcgtggatgccttggtatgttcctgcttcatccccttctacagtggccttatccctccttccttcagaggcgtgcgatatgtggatggaggagtgagtgacaacgtacccttcattgatgccaaaacaaccatcaccgtgtcccccttctatggggagtacgacatctgccctaaagtcaagtccacgaactttcttcatgtggacatcaccaagctcagtctacgcctctgcacagggaacctctaccttctctcgagagcttttgtccccccggatctcaaggtgctgggagagatatgccttcgaggatatttggatgcattcaggttcttggaagagaagggcatctgcaacaggccccagccaggcctgaagtcatcctcagaagggatggatcctgaggtcgccatgcccagctgggcaaacatgagtctggattcttccccggagtcggctgccttggctgtgaggctggagggagatgagctgctagaccacctgcgtctcagcatcctgccctgggatgagagcatcctggacaccctctcgcccaggctcgctacagcactgagtgaagaaatgaaagacaaaggtggatacatgagcaagatttgcaacttgctacccattaggataatgtcttatgtaatgctgccctgtaccctgcctgtggaatctgccattgcgattgtccagagactggtgacatggcttccagatatgcccgacgatgtcctgtggttgcagtgggtgacctcacaggtgttcactcgagtgctgatgtgtctgctccccgcctccaggtcccaaatgccagtgagcagccaacaggcctccccatgcacacctgagcaggactggccctgctggactccctgctcccccaagggctgtccagcagagaccaaagcagaggccaccccgcggtccatcctcaggtccagcctgaacttcttcttgggcaataaagtacctgctggtgctgaggggctctccacctttcccagtttttcactagagaagagtctgtgagtcacttgaggaggcgagtctagcagattctttcagaggtgctaaagtttcccatctttgtgcagctacctccgcattgctgtgtagtgacccctgcctgtgacgtggaggatcccagcctctgagctgagttggttttatgaaaagctaggaagcaacctttcgcctgtgcagcggtccagcacttaactctaatacatcagcatgcgttaattcagctggttgggaaatgacaccaggaagcccagtgcagagggtcccttactgactgtttcgtggccctattaatggtcagactgttccagcatgaggttcttagaatgacaggtgtttggatgggtgggggccttgtgatggggggtaggctggcccatgtgtgatcttgtggggtggagggaagagaatagcatgatcccacttccccatgctgtgggaaggggtgcagttcgtccccaagaacgacactgcctgtcaggtggtctgcaaagatgataaccttgactactaaaaacgtctccatggcgggggtaacaagatgataatctacttaattttagaacacctttttcacctaactaaaataatgtttaaagagttttgtataaaaatgtaaggaagcgttgttacctgttgaattttgtattatgtgaatcagtgagatgttagtagaataagccttaaaaaaaaaaaaatcggttgggtgcagtggcacacggctgtaatcccagcactttgggaggccaaggttggcagatcacctgaggtcaggagttcaagaccagtctggccaacatagcaaaaccctgtctctactaaaaatacaaaaattatctgggcatggtggtgcatgcctgtaatcccagctattcggaaggctgaggcaggagaatcacttgaacccaggaggcggaggttgcggtgagctgagattgcaccatttcattccagcctgggcaacatgagtgaaagtctgactcaaaaaaaaaaaatttaaaaaacaaaataatctagtgtgcagggcattcacctcagccccccaggcaggagccaagcacagcaggagcttccgcctcctctccactggagcacacaacttgaacctggcttattttctgcagggaccagccccacatggtcagtgagtttctccccatgtgtggcgatgagagagtgtagaaataaagac

SEQ ID NO: 163870 - DNA, 1480 bp, Homo sapiens
  Payload ID: 12267
  Gene Symbol: PNPLA3
  Gene Name: patatin-like phospholipase domain containing 3
  ENST ID: ENST00000406117
  CDS Start-End: 121-483
actgaggcagggtagagagcgcttgcgggcgccgggcggagctgctgcggatcaggacccgagccgattcccgatcccgacccagatcctaacccgcgcccccgccccgccgccgccgccatgtacgacgcagagcgcggctggagcttgtccttcgcgggctgcggcttcctgggcttctaccacgtcggggcgacccgctgcctgagcgagcacgccccgcacctcctccgcgacgcgcgcatgttgttcggcgcttcggccggggcgttgcactgcgtcggcgtcctctccggtatcccgctggactctgcaggtcctctcagatcttgtgcggaaggccaggagtcggaacattggcatcttccatccatccttcaacttaagcaagttcctccgacagggtctctgcaaatgcctcccggccaatgtccaccagctcatctccggcaaaataggcatctctcttaccagagtgtctgatggggaaaacgttctggtgtctgactttcggtccaaagacgaagtcgtggatgccttggtatgttcctgcttcatccccttctacagtggccttatccctccttccttcagaggcgtgcgatatgtggatggaggagtgagtgacaacgtacccttcattgatgccaaaacaaccatcaccgtgtcccccttctatggggagtacgacatctgccctaaagtcaagtccacgaactttcttcatgtggacatcaccaagctcagtctacgcctctgcacagggaacctctaccttctctcgagagcttttgtccccccggatctcaaggtgctgggagagatatgccttcgaggatatttggatgcattcaggttcttggaagagaagggcatctgcaacaggccccagccaggcctgaagtcatcctcagaagggatggatcctgaggtcgccatgcccagctgggcaaacatgagtctggattcttccccggagtcggctgccttggctgtgaggctggagggagatgagctgctagaccacctgcgtctcagcatcctgccctgggatgagagcatcctggacaccctctcgcccaggctcgctacagcactgagtgaagaaatgaaagacaaaggtggatacatgagcaagatttgcaacttgctacccattaggataatgtcttatgtaatgctgccctgtaccctgcctgtggaatctgccattgcgattgtccagagactggtgacatggcttccagatatgcccgacgatgtcctgtggttgcagtgggtgacctcacaggtgttcactcgagtgctgatgtgtctgctccccgcctccagagtttggagcctcttccatcaagtggacctgattttggaggattaggagaagaagctgaatttgttgaagttgagcctgaagctaaacaggaaattcttgaaaacaaagatgtggttgttcaacatgttcattttgatggacttggaa

SEQ ID NO: 163871 - DNA, 2222 bp, Homo sapiens
  Payload ID: 12267
  Gene Symbol: PNPLA3
  Gene Name: patatin-like phospholipase domain containing 3
  Uniprot ID: Q9NST1
  ENST ID: ENST00000423180
  CDS Start-End: 110-1543
gtagagagcgcttgcgggcgccgggcggagctgctgcggatcaggacccgagccgattcccgatcccgacccagatcctaacccgcgcccccgccccgccgccgccgccatgtacgacgcagagcgcggctggagcttgtccttcgcgggctgcggcttcctgggcttctaccacgtcggggcgacccgctgcctgagcgagcacgccccgcacctcctccgcgacgcgcgcatgttgttcggcgcttcggccggggcgttgcactgcgtcggcgtcctctccgagcagactctgcaggtcctctcagatcttgtgcggaaggccaggagtcggaacattggcatcttccatccatccttcaacttaagcaagttcctccgacagggtctctgcaaatgcctcccggccaatgtccaccagctcatctccggcaaaataggcatctctcttaccagagtgtctgatggggaaaacgttctggtgtctgactttcggtccaaagacgaagtcgtggatgccttggtatgttcctgcttcatccccttctacagtggccttatccctccttccttcagaggcgtgcgatatgtggatggaggagtgagtgacaacgtacccttcattgatgccaaaacaaccatcaccgtgtcccccttctatggggagtacgacatctgccctaaagtcaagtccacgaactttcttcatgtggacatcaccaagctcagtctacgcctctgcacagggaacctctaccttctctcgagagcttttgtccccccggatctcaaggtgctgggagagatatgccttcgaggatatttggatgcattcaggttcttggaagagaagggcatctgcaacaggccccagccaggcctgaagtcatcctcagaagggatggatcctgaggtcgccatgcccagctgggcaaacatgagtctggattcttccccggagtcggctgccttggctgtgaggctggagggagatgagctgctagaccacctgcgtctcagcatcctgccctgggatgagagcatcctggacaccctctcgcccaggctcgctacagcactgagtgaagaaatgaaagacaaaggtggatacatgagcaagatttgcaacttgctacccattaggataatgtcttatgtaatgctgccctgtaccctgcctgtggaatctgccattgcgattgtccagagactggtgacatggcttccagatatgcccgacgatgtcctgtggttgcagtgggtgacctcacaggtgttcactcgagtgctgatgtgtctgctccccgcctccaggtcccaaatgccagtgagcagccaacaggcctccccatgcacacctgagcaggactggccctgctggactccctgctcccccaagggctgtccagcagagaccaaagcagaggccaccccgcggtccatcctcaggtccagcctgaacttcttcttgggcaataaagtacctgctggtgctgaggggctctccacctttcccagtttttcactagagaagagtctgtgagtcacttgaggaggcgagtctagcagattctttcagaggtgctaaagtttcccatctttgtgcagctacctccgcattgctgtgtagtgacccctgcctgtgacgtggaggatcccagcctctgagctgagttggttttatgaaaagctaggaagcaacctttcgcctgtgcagcggtccagcacttaactctaatacatcagcatgcgttaattcagctggttgggaaatgacaccaggaagcccagtgcagagggtcccttactgactgtttcgtggccctattaatggtcagactgttccagcatgaggttcttagaatgacaggtgtttggatgggtgggggccttgtgatggggggtaggctggcccatgtgtgatcttgtggggtggagggaagagaatagcatgatcccacttccccatgctgtgggaaggggtgcagttcgtccccaagaacgacactgcctgtcaggtggtctgcaaagatgataaccttgactactaaaaacgtctccatggcgggggtaacaagatgataatctacttaattttagaacacctttttcacctaactaaaataatgtttaaagagttttgtataaaaatgtaaggaagcgttgttacctgttgaattttgtattatgtgaatcagtgagatgttagtagaataagcctt

SEQ ID NO: 163872 - DNA, 3372 bp, Homo sapiens
  Payload ID: 12268
  Gene Symbol: PNPLA4
  Gene Name: patatin-like phospholipase domain containing 4
  Uniprot ID: P41247
  ENST ID: ENST00000381042
  CDS Start-End: 172-933
gcgggaggcggtaccaacccctgccgcaggactttcctgggccggctcgcggagagcgtagcgcggccttggtggcggaatggcgttgagtgacggcccggccccgccatctggttaaagggactcgttcaacacggaagtgtcccggggctgcattgtgctacagctagaatgaagcacatcaacctatcatttgcagcgtgtggatttctgggcatttaccacttgggggcagcatctgcactttgcagacatggcaaaaaacttgtgaaggatgtcaaagccttcgctggggcgtctgcgggatcgttggttgcttctgttctgctaacagcaccagaaaaaatagaggaatgtaaccaatttacctacaagtttgccgaagaaatcagaaggcagtctttcggggcagtaacgcccggttatgacttcatggcccgactaagaagtgggatggagtcgattcttcctcccagcgctcacgagctggcccagaaccgactgcacgtatccatcaccaacgccaaaaccagagaaaatcacttagtctccactttttcctccagggaggacctcattaaggtcctcctagccagcagttttgtgcccatttatgcaggactgaagctagtggaatacaaagggcagaagtgggtggacggaggcctcaccaacgctcttcccatcctgcccgtcggccggacagtaaccatctcccccttcagtggacgactggacatctccccgcaggacaaagggcagctagatctgtatgttaatatcgccaagcaggatatcatgttgtccctggcaaacctggtgagactcaaccaagccctttttcccccaagcaagaggaaaatggaatctttgtatcagtgtggttttgatgacactgttaagtttttacttaaagaaaattggtttgaataaaatgcataaaagtttataatgcaaaacacgttttagatagtttttgatggaagtttctaatcaaatcctttttagaaaatctatcatgactcaattgtattactccttgtaatatttgtgtttatttttaatatttgaattattacttagcacatggatataagaggcactttattagaatttgacaacgtcattaagaaggatacacttaggtgataaggaatcatttttggtgaactgttgtgtcctttaaaaaatggaggaggataggttctttgggtaaattgaggaacatggaaaatggagggccaccacttaggttccatggagaatatgtggcatgatcttgacgtgaagcatgggtgtttccgtgacttagctgtgtccctgtagctctggaactgaaggaactaggtaggagaggaaggatttgagaaataggcaactcatggttaaagacctttgatcaggactggaggaacaaaggtttgtgtattagtccattttcacactgctgagaaagacatacccaagactgggcaatttacaaaagaaaggtttaatgggctcacagttccacatgactgaggaggcctcacaattgtggtggaaggtgaaaggcatgtctcacatggcagcagacaagagaagaaaacttgtgcagggaaactcccctttataaaaccatcggatctcttgagactcgttcactatcatgagaatagcatgggaaagacctgcctccatgattcagttacctcccactgggtccctcccacaacgtgtggcaattgtgggagctacatacacttcaagatgagatttgggtggggacacagccaaaccataacagtttgctttccacaggtgtgtgcagttgctcccagtgcagttaggggcagatatccagaagcctaggagattttgaagaggcttatcccctctcatcttcctcccctaaaccccaccccagtttaggagattatcaagctggttgtcattcattctctctctctctctctctctctctctctctctctctctctctctctctctctcgccatacctctctgagtatttagctattgttctatatactggatacatctattatgggaacttaaatagataaaatactactaaacacaaagaaccaagtagcctagtaaataagaattaaatccagaataatcattcacttctcatttttaaatcacgttgtactgatcccaggttttttactttctgagtagttgtccatcactttgaggacttgtgtatgggcttgtaccaatttactgacactgtcttaaatcctaaatctgtttttatgaggttttgccaagcaagaactcttgattactaagaggcagttagagacaaaccaatttaattccatgtcttcaattgtcacgcatttcttcttttactctttgaaactattctttgagtcaattttatggttctcagaagccaaaatacacaacttttagcacataaacaccaacgatggcctctttttgaggagttatgcatagacccactctagagtaatgatggtccctgtggtatatactttctcctactctagcaaacatgtagtttaatcttaatgtgttgtttccataagtgacatgaagtggatagattctcaattgttatgtccacttattcactaggtaaattttcagttttaatacttttctccttaccccttcctttgatcatttcatgtgaatattctatttgtatgatacactgtatttcaataaattccttgttgatgtacccttaaattgaagaaatttaagctgcaaaaccaaatctcattgtataagacttttttgaagtatcttgtatcgactacatatgtatttgaccctgtgggaggatggtacttttctttttaacttttattttaagttcaggggtacgtgtacaggtttgttataggtaaacttgtgtcacgggggtttgttgtaaagattaatttatcacccaggtgttggtacttttctttaaaaatactgtaagatcattgacgtatcagtctgcagcaactttcctacatgaggggaatacagcggtgtaatgaaacacatacttggtgcacactaggcgctctccggggctggtgcaccaaattctcctgtgagcatgctaccaagcatgctctgcttacctttgctggagtgtgtgctcatgcagccatactaattgaaaacaggcattcacaacaggatctgcctcacttgtgggatcaaaattttgaggcattgtagaactggcatatagaaaatctgaaaggagtttctgacccagatactgatatgtttgcagggtaattactgtgattggcagcttgataaattcccaattccctgtgggggcaatttccttatatatttgaatctgtcattaaaaatgtcattagtcttc

SEQ ID NO: 163873 - DNA, 652 bp, Homo sapiens
  Payload ID: 12268
  Gene Symbol: PNPLA4
  Gene Name: patatin-like phospholipase domain containing 4
  ENST ID: ENST00000442940
  CDS Start-End: 83-652
agacgcgaagagggtaaggcacttccggggcacagaaaatgaggattattaaaggtcagttgctcgcagtgctacagctagaatgaagcacatcaacctatcatttgcagcgtgtggatttctgggcatttaccacttgggggcagcatctgcactttgcagacatggcaaaaaacttgtgaaggatgtcaaagccttcgctggggcgtctgcgggatcgttggttgcttctgttctgctaacagcaccagaaaaaatagaggaatgtaaccaatttacctacaagtttgccgaagaaatcagaaggcagtctttcggggcagtaacgcccggttatgacttcatggcccgactaagaagtgggatggagtcgattcttcctcccagcgctcacgagctggcccagaaccgactgcacgtatccatcaccaacgccaaaaccagagaaaatcacttagtctccactttttcctccagggaggacctcattaaggtcctcctagccagcagttttgtgcccatttatgcaggactgaagctagtggaatacaaagggcagaagtgggtggacggaggcctcaccaacgctcttcccatcctgcccgtcggccggacagtaaccatctcccccttcagtggacgactggacatc

SEQ ID NO: 163874 - DNA, 2752 bp, Homo sapiens
  Payload ID: 12268
  Gene Symbol: PNPLA4
  Gene Name: patatin-like phospholipase domain containing 4
  Uniprot ID: P41247
  ENST ID: ENST00000444736
  CDS Start-End: 68-829
agacgcgaagagggtaaggcacttccggggcacagaaaatgaggattattaaagtgctacagctagaatgaagcacatcaacctatcatttgcagcgtgtggatttctgggcatttaccacttgggggcagcatctgcactttgcagacatggcaaaaaacttgtgaaggatgtcaaagccttcgctggggcgtctgcgggatcgttggttgcttctgttctgctaacagcaccagaaaaaatagaggaatgtaaccaatttacctacaagtttgccgaagaaatcagaaggcagtctttcggggcagtaacgcccggttatgacttcatggcccgactaagaagtgggatggagtcgattcttcctcccagcgctcacgagctggcccagaaccgactgcacgtatccatcaccaacgccaaaaccagagaaaatcacttagtctccactttttcctccagggaggacctcattaaggtcctcctagccagcagttttgtgcccatttatgcaggactgaagctagtggaatacaaagggcagaagtgggtggacggaggcctcaccaacgctcttcccatcctgcccgtcggccggacagtaaccatctcccccttcagtggacgactggacatctccccgcaggacaaagggcagctagatctgtatgttaatatcgccaagcaggatatcatgttgtccctggcaaacctggtgagactcaaccaagccctttttcccccaagcaagaggaaaatggaatctttgtatcagtgtggttttgatgacactgttaagtttttacttaaagaaaattggtttgaataaaatgcataaaagtttataatgcaaaacacgttttagatagtttttgatggaagtttctaatcaaatcctttttagaaaatctatcatgactcaattgtattactccttgtaatatttgtgtttatttttaatatttgaattattacttagcacatggatataagaggcactttattagaatttgacaacgtcattaagaaggatacacttaggtgataaggaatcatttttggtgaactgttgtgtcctttaaaaaatggaggaggataggttctttgggtaaattgaggaacatggaaaatggagggccaccacttaggttccatggagaatatgtggcatgatcttgacgtgaagcatgggtgtttccgtgacttagctgtgtccctgtagctctggaactgaaggaactaggtaggagaggaaggatttgagaaataggcaactcatggttaaagacctttgatcaggactggaggaacaaaggtttgtgtattagtccattttcacactgctgagaaagacatacccaagactgggcaatttacaaaagaaaggtttaatgggctcacagttccacatgactgaggaggcctcacaattgtggtggaaggtgaaaggcatgtctcacatggcagcagacaagagaagaaaacttgtgcagggaaactcccctttataaaaccatcggatctcttgagactcgttcactatcatgagaatagcatgggaaagacctgcctccatgattcagttacctcccactgggtccctcccacaacgtgtggcaattgtgggagctacatacacttcaagatgagatttgggtggggacacagccaaaccataacagtttgctttccacaggtgtgtgcagttgctcccagtgcagttaggggcagatatccagaagcctaggagattttgaagaggcttatcccctctcatcttcctcccctaaaccccaccccagtttaggagattatcaagctggttgtcattcattctctctctctctctctctctctctctctctctctctctctctctctctctctcgccatacctctctgagtatttagctattgttctatatactggatacatctattatgggaacttaaatagataaaatactactaaacacaaagaaccaagtagcctagtaaataagaattaaatccagaataatcattcacttctcatttttaaatcacgttgtactgatcccaggttttttactttctgagtagttgtccatcactttgaggacttgtgtatgggcttgtaccaatttactgacactgtcttaaatcctaaatctgtttttatgaggttttgccaagcaagaactcttgattactaagaggcagttagagacaaaccaatttaattccatgtcttcaattgtcacgcatttcttcttttactctttgaaactattctttgagtcaattttatggttctcagaagccaaaatacacaacttttagcacataaacaccaacgatggcctctttttgaggagttatgcatagacccactctagagtaatgatggtccctgtggtatatactttctcctactctagcaaacatgtagtttaatcttaatgtgttgtttccataagtgacatgaagtggatagattctcaattgttatgtccacttattcactaggtaaattttcagttttaatacttttctccttaccccttcctttgatcatttcatgtgaatattctatttgtatgatacactgtatttcaataaattccttgttgatgtacccttaaattgaagaaatttaagctgcaaaaccaaatctcattgtataagacttttttgaagtatcttgtatcgactacatatgtatttgaccctgtgggaggatggtacttttctttttaacttttattttaag

SEQ ID NO: 163875 - DNA, 2559 bp, Homo sapiens
  Payload ID: 12268
  Gene Symbol: PNPLA4
  Gene Name: patatin-like phospholipase domain containing 4
  Uniprot ID: P41247
  ENST ID: ENST00000537427
  CDS Start-End: 136-636
agacgcgaagagggtaaggcacttccggggcacagaaaatgaggattattaaaggaatgtaaccaatttacctacaagtttgccgaagaaatcagaaggcagtctttcggggcagtaacgcccggttatgacttcatggcccgactaagaagtgggatggagtcgattcttcctcccagcgctcacgagctggcccagaaccgactgcacgtatccatcaccaacgccaaaaccagagaaaatcacttagtctccactttttcctccagggaggacctcattaaggtcctcctagccagcagttttgtgcccatttatgcaggactgaagctagtggaatacaaagggcagaagtgggtggacggaggcctcaccaacgctcttcccatcctgcccgtcggccggacagtaaccatctcccccttcagtggacgactggacatctccccgcaggacaaagggcagctagatctgtatgttaatatcgccaagcaggatatcatgttgtccctggcaaacctggtgagactcaaccaagccctttttcccccaagcaagaggaaaatggaatctttgtatcagtgtggttttgatgacactgttaagtttttacttaaagaaaattggtttgaataaaatgcataaaagtttataatgcaaaacacgttttagatagtttttgatggaagtttctaatcaaatcctttttagaaaatctatcatgactcaattgtattactccttgtaatatttgtgtttatttttaatatttgaattattacttagcacatggatataagaggcactttattagaatttgacaacgtcattaagaaggatacacttaggtgataaggaatcatttttggtgaactgttgtgtcctttaaaaaatggaggaggataggttctttgggtaaattgaggaacatggaaaatggagggccaccacttaggttccatggagaatatgtggcatgatcttgacgtgaagcatgggtgtttccgtgacttagctgtgtccctgtagctctggaactgaaggaactaggtaggagaggaaggatttgagaaataggcaactcatggttaaagacctttgatcaggactggaggaacaaaggtttgtgtattagtccattttcacactgctgagaaagacatacccaagactgggcaatttacaaaagaaaggtttaatgggctcacagttccacatgactgaggaggcctcacaattgtggtggaaggtgaaaggcatgtctcacatggcagcagacaagagaagaaaacttgtgcagggaaactcccctttataaaaccatcggatctcttgagactcgttcactatcatgagaatagcatgggaaagacctgcctccatgattcagttacctcccactgggtccctcccacaacgtgtggcaattgtgggagctacatacacttcaagatgagatttgggtggggacacagccaaaccataacagtttgctttccacaggtgtgtgcagttgctcccagtgcagttaggggcagatatccagaagcctaggagattttgaagaggcttatcccctctcatcttcctcccctaaaccccaccccagtttaggagattatcaagctggttgtcattcattctctctctctctctctctctctctctctctctctctctctctctctctctctcgccatacctctctgagtatttagctattgttctatatactggatacatctattatgggaacttaaatagataaaatactactaaacacaaagaaccaagtagcctagtaaataagaattaaatccagaataatcattcacttctcatttttaaatcacgttgtactgatcccaggttttttactttctgagtagttgtccatcactttgaggacttgtgtatgggcttgtaccaatttactgacactgtcttaaatcctaaatctgtttttatgaggttttgccaagcaagaactcttgattactaagaggcagttagagacaaaccaatttaattccatgtcttcaattgtcacgcatttcttcttttactctttgaaactattctttgagtcaattttatggttctcagaagccaaaatacacaacttttagcacataaacaccaacgatggcctctttttgaggagttatgcatagacccactctagagtaatgatggtccctgtggtatatactttctcctactctagcaaacatgtagtttaatcttaatgtgttgtttccataagtgacatgaagtggatagattctcaattgttatgtccacttattcactaggtaaattttcagttttaatacttttctccttaccccttcctttgatcatttcatgtgaatattctatttgtatgatacactgtatttcaataaattccttgttgatgtacccttaaattgaagaaatttaagctgcaaaaccaaatctcattgtataagacttttttgaagtatcttgtatcgactacatatgtatttgaccctgtgggaggatggtacttttctttttaacttttattttaag

SEQ ID NO: 163876 - DNA, 2539 bp, Homo sapiens
  Payload ID: 12269
  Gene Symbol: PNPLA5
  Gene Name: patatin-like phospholipase domain containing 5
  Uniprot ID: Q7Z6Z6
  ENST ID: ENST00000216177
  CDS Start-End: 134-1423
agcaccagccccagcccggctccctccagagcccacatttgggcccagccccgtccaaggctgcatcccggccctatcccgggtcacggagtgacccttcctcgtcccgatcaccccgcccggtccacccgccatgggcttcttagaggaggagggcagatggaacctgtccttctccggcgccggctacctgggcgcccaccacgtgggcgccaccgaatgcctgcgccagcgagccccgcgcctcctccagggcgcccgccgcatctacggttcctcgtctggggcgctcaacgcagtcagcatcgtctgcggcaagtcggtcgacttctgctgctcccacctcctgggcatggttgggcagttggagcggctgagcctaagcatcctgcacccggcctacgcgcccatcgagcacgtcaagcagcagctgcaggatgctctgccccccgacgcccacgtcctggcctcccagcggctgggcatttcgctgacccgctggcctgacggacgcaacttcttggtcactgacttcgccacctgcgatgagctcatccaggccttggtctgcaccttatactttcctttctactgcgggctgatcccccccgagttcagaggggagcgctacatcgatggggctctgagcaacaacttgccctttgcagactgcccctccaccatcacggtgtcgcccttccatgggacagtggacatctgcccccagagcacctcccccaacctgcatgagctgaacgtcttcaacttcagcttccaaatctccactgagaacttcttcctggggctcatatgtctcataccccccagcctcgaggtagtggccgacaactgcagacaaggctacctggatgccctgaggttcctggagagacgtggactcaccaaggaaccagtgctatggacgctggtgtctaaggaacccccagccccggctgacggaaactgggatgctggctgtgaccaacgctggaaggggggcctgtctctcaactggaaagtgccccatgtgcaagtcaaggatgtacccaactttgagcagctctcaccagagctggaggctgcactgaagaaagcatgtacgagggatcccagccggtgggcccgcttctggcactcggggcctggacaggtgctgacgtacctgctgctaccctgcacactgcccttcgagtacatctacttccgcagcagaaggttggtggtgtggctgcccgatgtgccggcggacttgtggtggatgcagggcctgctgaggaacatggccctcgaggttttctccaggaccaaggcccagctccttgggcccatcagccctccggccactcgcgtcctggaaacaagccccctccaaccccagatagctcctcatagagaggagctcgggcccacccaccaggcctgagggggccgagcagggccagcccagtgactggtgtcccttgattcctgctctggcctttgtcctgtgtgcccacatctgccccagcgggaagaggccctgccaatctccgtggagaccctgcagcttggagcccgttccttggggcgcagcctgtcagcatgtccccggtcactgtgtacccaggtcacctgccctccctcttgccccgtctcatcagggagagaaaggaggacagccacagagacacatgtcttactttcagaatttccacggggggactaggagggcagcattgctggggagaggggctcctgttctgccgtggagctgcccacggagcacctcacagaagattgagaaagtgcctgatgcccgcgtcagagaccagaggagccaactgagatgatggggtgggggtgctccccccagactttctcagtcctgcagcggcccttgggggtgacccccggcatctaccccactcaggaaaccttgacttctgaattcctatcaggtccagagggtggaaggccctggcaggaagcaggaggaggaggagaggggggtccaggtcttttcaggatcccagctgtgggtgcttctgttgggcccagtggcccctgctatccccacagcctcattcctgcagaaggtttgtgacgtagctgtgcctgtacctggggcagagaggatgccagggacaccaggcctctggcctctccacgagtcactgctctccccattggcagcacgggacccatgctgtgcccccggccaggccctgaggaaatgctcagcctcagtggagatggggaggttagagagatggaggcgtgagtgagaacgggaagcaaaggaatacacgtgggaactaaagagaaaaatgaccagcctgggcagcatagcaagaccctgtctctaaaaaaaataataaaaacttagctgggcatggtggtgcatgcctgtggtcctggctacttgggaggctgaggatggaggatcatttgagcccaggaggtcgaggctgcagtgaaccgtgatcacgccactgcaccccagcccaggcaacaaagtgagcccctgtctctaaataaataaagagacaataagccactc

SEQ ID NO: 163877 - DNA, 2000 bp, Homo sapiens
  Payload ID: 12269
  Gene Symbol: PNPLA5
  Gene Name: patatin-like phospholipase domain containing 5
  Uniprot ID: Q7Z6Z6
  ENST ID: ENST00000381198
  CDS Start-End: 134-1081
agcaccagccccagcccggctccctccagagcccacatttgggcccagccccgtccaaggctgcatcccggccctatcccgggtcacggagtgacccttcctcgtcccgatcaccccgcccggtccacccgccatgggcttcttagaggaggagggcagatggaacctgtccttctccggcgccggctacctgggcgcccaccacgtgggcgccaccgaatgcctgcgccagcgagccccgcgcctcctccagggcgcccgccgcatctacggttcctcgtctggggcgctcaacgcagtcagcatcgtctgcggcaagtcggtcgactgcccctccaccatcacggtgtcgcccttccatgggacagtggacatctgcccccagagcacctcccccaacctgcatgagctgaacgtcttcaacttcagcttccaaatctccactgagaacttcttcctggggctcatatgtctcataccccccagcctcgaggtagtggccgacaactgcagacaaggctacctggatgccctgaggttcctggagagacgtggactcaccaaggaaccagtgctatggacgctggtgtctaaggaacccccagccccggctgacggaaactgggatgctggctgtgaccaacgctggaaggggggcctgtctctcaactggaaagtgccccatgtgcaagtcaaggatgtacccaactttgagcagctctcaccagagctggaggctgcactgaagaaagcatgtacgagggatcccagccggtgggcccgcttctggcactcggggcctggacaggtgctgacgtacctgctgctaccctgcacactgcccttcgagtacatctacttccgcagcagaaggttggtggtgtggctgcccgatgtgccggcggacttgtggtggatgcagggcctgctgaggaacatggccctcgaggttttctccaggaccaaggcccagctccttgggcccatcagccctccggccactcgcgtcctggaaacaagccccctccaaccccagatagctcctcatagagaggagctcgggcccacccaccaggcctgagggggccgagcagggccagcccagtgactggtgtcccttgattcctgctctggcctttgtcctgtgtgcccacatctgccccagcgggaagaggccctgccaatctccgtggagaccctgcagcttggagcccgttccttggggcgcagcctgtcagcatgtccccggtcactgtgtacccaggtcacctgccctccctcttgccccgtctcatcagggagagaaaggaggacagccacagagacacatgtcttactttcagaatttccacggggggactaggagggcagcattgctggggagaggggctcctgttctgccgtggagctgcccacggagcacctcacagaagattgagaaagtgcctgatgcccgcgtcagagaccagaggagccaactgagatgatggggtgggggtgctccccccagactttctcagtcctgcagcggcccttgggggtgacccccggcatctaccccactcaggaaaccttgacttctgaattcctatcaggtccagagggtggaaggccctggcaggaagcaggaggaggaggagaggggggtccaggtcttttcaggatcccagctgtgggtgcttctgttgggcccagtggcccctgctatccccacagcctcattcctgcagaaggtttgtgacgtagctgtgcctgtacctggggcagagaggatgccagggacaccaggcctctggcctctccacgagtcactgctctccccattggcagcacgggacccatgctgtgcccccggccaggccctgaggaaatgctcagcctcagtggagatggggaggttagagagatggaggcgtgagtgagaacgggaagcaaaggaatacacgtgggaactaaagagaaaaatgaccagcctgggcagcatagcaagaccctgtctc

SEQ ID NO: 163878 - DNA, 921 bp, Homo sapiens
  Payload ID: 12269
  Gene Symbol: PNPLA5
  Gene Name: patatin-like phospholipase domain containing 5
  ENST ID: ENST00000438734
  CDS Start-End: 116-921
gctccctccagagcccacatttgggcccagccccgtccaaggctgcatcccggccctatcccgggtcacggagtgacccttcctcgtcccgatcaccccgcccggtccacccgccatgggcttcttagaggaggagggcagatggaacctgtccttctccggcgccggctacctgggcgcccaccacgtgggcgccaccgaatgcctgcgccagcgagccccgcgcctcctccagggcgcccgccgcatctacggttcctcgtctggggcgctcaacgcagtcagcatcgtctgcggcaagtcggtcgacttctgctgctcccacctcctgggcatggttgggcagttggagcggctgagcctaagcatcctgcacccggcctacgcgcccatcgagcacgtcaagcagcagctgcaggatgctctgccccccgacgcccacgtcctggcctcccagcggctgggcatttcgctgacccgctggcctgacggacgcaacttcttggtcactgacttcgccacctgcgatgagctcatccaggtagtggccgacaactgcagacaaggctacctggatgccctgaggttcctggagagacgtggactcaccaaggaaccagtgctatggacgctggtgtctaaggaacccccagccccggctgacggaaactgggatgctggctgtgaccaacgctggaaggggggcctgtctctcaactggaaagtgccccatgtgcaagtcaaggatgtacccaactttgagcagctctcaccagagctggaggctgcactgaagaaagcatgtacgagggatcccagccggtgggcccgcttctggcactcggggcctggacaggtgctgacgtacctgctgctaccctgcacactgcccttcgagtacatctacttccgcagcagaag

SEQ ID NO: 163879 - DNA, 2537 bp, Homo sapiens
  Payload ID: 12269
  Gene Symbol: PNPLA5
  Gene Name: patatin-like phospholipase domain containing 5
  Uniprot ID: Q7Z6Z6
  ENST ID: ENST00000597664
  CDS Start-End: 131-1420
accagccccagcccggctccctccagagcccacatttgggcccagccccgtccaaggctgcatcccggccctatcccgggtcacggagtgacccttcctcgtcccgatcaccccgcccggtccacccgccatgggcttcttagaggaggagggcagatggaacctgtccttctccggcgccggctacctgggcgcccaccacgtgggcgccaccgaatgcctgcgccagcgagccccgcgcctcctccagggcgcccgccgcatctacggttcctcgtctggggcgctcaacgcagtcagcatcgtctgcggcaagtcggtcgacttctgctgctcccacctcctgggcatggttgggcagttggagcggctgagcctaagcatcctgcacccggcctacgcgcccatcgagcacgtcaagcagcagctgcaggatgctctgccccccgacgcccacgtcctggcctcccagcggctgggcatttcgctgacccgctggcctgacggacgcaacttcttggtcactgacttcgccacctgcgatgagctcatccaggccttggtctgcaccttatactttcctttctactgcgggctgatcccccccgagttcagaggggagcgctacatcgatggggctctgagcaacaacttgccctttgcagactgcccctccaccatcacggtgtcgcccttccatgggacagtggacatctgcccccagagcacctcccccaacctgcatgagctgaacgtcttcaacttcagcttccaaatctccactgagaacttcttcctggggctcatatgtctcataccccccagcctcgaggtagtggccgacaactgcagacaaggctacctggatgccctgaggttcctggagagacgtggactcaccaaggaaccagtgctatggacgctggtgtctaaggaacccccagccccggctgacggaaactgggatgctggctgtgaccaacgctggaaggggggcctgtctctcaactggaaagtgccccatgtgcaagtcaaggatgtacccaactttgagcagctctcaccagagctggaggctgcactgaagaaagcatgtacgagggatcccagccggtgggcccgcttctggcactcggggcctggacaggtgctgacgtacctgctgctaccctgcacactgcccttcgagtacatctacttccgcagcagaaggttggtggtgtggctgcccgatgtgccggcggacttgtggtggatgcagggcctgctgaggaacatggccctcgaggttttctccaggaccaaggcccagctccttgggcccatcagccctccggccactcgcgtcctggaaacaagccccctccaaccccagatagctcctcatagagaggagctcgggcccacccaccaggcctgagggggccgagcagggccagcccagtgactggtgtcccttgattcctgctctggcctttgtcctgtgtgcccacatctgccccagcgggaagaggccctgccaatctccgtggagaccctgcagcttggagcccgttccttggggcgcagcctgtcagcatgtccccggtcactgtgtacccaggtcacctgccctccctcttgccccgtctcatcagggagagaaaggaggacagccacagagacacatgtcttactttcagaatttccacggggggactaggagggcagcattgctggggagaggggctcctgttctgccgtggagctgcccacggagcacctcacagaagattgagaaagtgcctgatgcccgcgtcagagaccagaggagccaactgagatgatggggtgggggtgctccccccagactttctcagtcctgcagcggcccttgggggtgacccccggcatctaccccactcaggaaaccttgacttctgaattcctatcaggtccagagggtggaaggccctggcaggaagcaggaggaggaggagaggggggtccaggtcttttcaggatcccagctgtgggtgcttctgttgggcccagtggcccctgctatccccacagcctcattcctgcagaaggtttgtgacgtagctgtgcctgtacctggggcagagaggatgccagggacaccaggcctctggcctctccacgagtcactgctctccccattggcagcacgggacccatgctgtgcccccggccaggccctgaggaaatgctcagcctcagtggagatggggaggttagagagatggaggcgtgagtgagaacgggaagcaaaggaatacacgtgggaactaaagagaaaaatgaccagcctgggcagcatagcaagaccctgtctctaaaaaaaataataaaaacttagctgggcatggtggtgcatgcctgtggtcctggctacttgggaggctgaggatggaggatcatttgagcccaggaggtcgaggctgcagtgaaccgtgatcacgccactgcaccccagcccaggcaacaaagtgagcccctgtctctaaataaataaagagacaataagccactca

SEQ ID NO: 163880 - DNA, 2197 bp, Homo sapiens
  Payload ID: 12269
  Gene Symbol: PNPLA5
  Gene Name: patatin-like phospholipase domain containing 5
  Uniprot ID: Q7Z6Z6
  ENST ID: ENST00000593866
  CDS Start-End: 134-1081
agcaccagccccagcccggctccctccagagcccacatttgggcccagccccgtccaaggctgcatcccggccctatcccgggtcacggagtgacccttcctcgtcccgatcaccccgcccggtccacccgccatgggcttcttagaggaggagggcagatggaacctgtccttctccggcgccggctacctgggcgcccaccacgtgggcgccaccgaatgcctgcgccagcgagccccgcgcctcctccagggcgcccgccgcatctacggttcctcgtctggggcgctcaacgcagtcagcatcgtctgcggcaagtcggtcgactgcccctccaccatcacggtgtcgcccttccatgggacagtggacatctgcccccagagcacctcccccaacctgcatgagctgaacgtcttcaacttcagcttccaaatctccactgagaacttcttcctggggctcatatgtctcataccccccagcctcgaggtagtggccgacaactgcagacaaggctacctggatgccctgaggttcctggagagacgtggactcaccaaggaaccagtgctatggacgctggtgtctaaggaacccccagccccggctgacggaaactgggatgctggctgtgaccaacgctggaaggggggcctgtctctcaactggaaagtgccccatgtgcaagtcaaggatgtacccaactttgagcagctctcaccagagctggaggctgcactgaagaaagcatgtacgagggatcccagccggtgggcccgcttctggcactcggggcctggacaggtgctgacgtacctgctgctaccctgcacactgcccttcgagtacatctacttccgcagcagaaggttggtggtgtggctgcccgatgtgccggcggacttgtggtggatgcagggcctgctgaggaacatggccctcgaggttttctccaggaccaaggcccagctccttgggcccatcagccctccggccactcgcgtcctggaaacaagccccctccaaccccagatagctcctcatagagaggagctcgggcccacccaccaggcctgagggggccgagcagggccagcccagtgactggtgtcccttgattcctgctctggcctttgtcctgtgtgcccacatctgccccagcgggaagaggccctgccaatctccgtggagaccctgcagcttggagcccgttccttggggcgcagcctgtcagcatgtccccggtcactgtgtacccaggtcacctgccctccctcttgccccgtctcatcagggagagaaaggaggacagccacagagacacatgtcttactttcagaatttccacggggggactaggagggcagcattgctggggagaggggctcctgttctgccgtggagctgcccacggagcacctcacagaagattgagaaagtgcctgatgcccgcgtcagagaccagaggagccaactgagatgatggggtgggggtgctccccccagactttctcagtcctgcagcggcccttgggggtgacccccggcatctaccccactcaggaaaccttgacttctgaattcctatcaggtccagagggtggaaggccctggcaggaagcaggaggaggaggagaggggggtccaggtcttttcaggatcccagctgtgggtgcttctgttgggcccagtggcccctgctatccccacagcctcattcctgcagaaggtttgtgacgtagctgtgcctgtacctggggcagagaggatgccagggacaccaggcctctggcctctccacgagtcactgctctccccattggcagcacgggacccatgctgtgcccccggccaggccctgaggaaatgctcagcctcagtggagatggggaggttagagagatggaggcgtgagtgagaacgggaagcaaaggaatacacgtgggaactaaagagaaaaatgaccagcctgggcagcatagcaagaccctgtctctaaaaaaaataataaaaacttagctgggcatggtggtgcatgcctgtggtcctggctacttgggaggctgaggatggaggatcatttgagcccaggaggtcgaggctgcagtgaaccgtgatcacgccactgcaccccagcccaggcaacaaagtgagcccctgtctctaaataaataaagagacaataagccactc

SEQ ID NO: 163881 - DNA, 4617 bp, Homo sapiens
  Payload ID: 12270
  Gene Symbol: PNPLA6
  Gene Name: patatin-like phospholipase domain containing 6
  Uniprot ID: Q8IY17
  ENST ID: ENST00000221249
  CDS Start-End: 432-4415
tttttagcgggaggagcagtccttgcgttaagcggtgtgaggccctttaaggcgcggccacactcagcatggcggcctcagtcggccttccaagcatggcgcggggaggaggggtgggagggtcgggagggactgcggtgcgactaggagtgaataatttaaaggggccgtgcctgcggagccgggcggaacgctagcggtgttggcgcggagtggaccccggctgcggcccctggcaatggcgccaccatcggtcccggagtcccagtgatgctctgtgccatagagcccccataacttcactactacgtgatagtaaatccccggcaaaaaccagcagcgccttgcaagcccacgccaccccaagcatcccaggactcttctgaaacgactccgggctaccagatcggccgtccagctggaatcaaccgatggaggctccgctgcaaactggaatggtgcttggcgtgatgatcggggccggagtggcggtggtggtcacggccgtgctcatcctcctggtggtgcggaggctgcgagtgccaaaaaccccagccccggatggcccccggtatcggttccggaagagggacaaagtgctcttctatggccggaagattatgcggaaggtgtcacaatccacctcctccctcgtggatacctctgtctccgccacctcccggccacgcatgaggaagaaactgaagatgctcaacattgccaagaagatcctgcgcatccagaaagagacgcccacgctgcagcggaaggagcccccgcccgcagtgctagaagctgacctgaccgagggcgacctggctaactcccatctgccctctgaagtgctttatatgctcaagaacgtccgggtgctgggccacttcgagaagccactcttcctggagctctgccgccacatggtcttccagcggctgggccagggtgactacgtcttccggccgggccagccagatgccagcatctacgtggtgcaggacgggctgctggagctctgtctgccagggcctgacgggaaggagtgtgtggtgaaggaagtggttcctggggacagcgtcaacagccttctcagcatcctggatgtcatcaccggtcaccagcatccccagcggaccgtgtctgcccgggcggcccgggactccacggtgctgcgcctgccggtggaagcattctccgcggtcttcaccaagtacccggagagcttggtgcgggtcgtgcagatcatcatggtgcggctgcagcgagtcaccttcctggcactgcacaactacctgggtctgaccaatgagctcttcagccacgagatccagcccctgcgtctgttccccagccccggcctcccaactcgcaccagccctgtgcggggctccaagagaatggtcagcacctcagctacagacgagcccagggagaccccagggcggccacccgatcccaccggggccccgctgcctggacctacaggggaccctgtgaagcccacatccctggaaaccccctcggcccctctgctgagccgctgcgtctccatgccaggggacatctcaggcttgcagggtggcccccgctccgacttcgacatggcctatgagcgtggccggatctccgtgtccctgcaggaagaggcctccggggggtccctggcagcccccgctcggacccccactcaggagcctcgtgagcagccggcaggcgcctgtgaatacagctactgtgaggatgagtcggccactggtggctgccctttcgggccctaccagggccgccagaccagcagcatcttcgaggcagcaaagcaggagctggccaagctgatgcggattgaggacccctccctcctgaacagcagagtcttgctgcaccacgccaaagctggcaccatcattgcccgccagggagaccaggacgtgagcctgcacttcgtgctctggggctgcctgcacgtgtaccagcgcatgatcgacaaggcggaggacgtgtgcctgttcgtagcgcagcccggggaactggtggggcagctggcggtgctcactggcgaacctctcatcttcacactgcgagcccaacgcgactgcaccttcctgcggatctccaagtccgacttctatgagatcatgcgcgcacagcccagtgtggtgctgagtgcggcgcacacggtggcagccaggatgtcgcccttcgtgcgccagatggacttcgccatcgactggactgcagtggaggcgggacgcgcgctgtacaggcagggcgaccgctccgactgcacttacatcgtgctcaatgggcggctgcgtagcgtgatccagcgaggcagtggcaagaaggagctggtgggcgagtacggccgcggcgacctcatcggcgtggtggaggcactgacccggcagccgcgagccacgacggtgcacgcggtgcgcgacacggagctggccaagcttcccgagggcaccttgggtcacatcaaacgccggtacccgcaggtcgtgacccgccttatccacctactgagccagaaaattctagggaatttgcagcagctgcaaggacccttcccagcaggctctgggttgggtgtgcccccacactcggaactcaccaacccagccagcaacctggcaactgtggcaatcctgcctgtgtgtgctgaggtccccatggtggccttcacgctggagctgcagcacgccctgcaggccatcggtccgacgctactccttaacagtgacatcatccgggcacgcctgggggcctccgcactggatagcatccaagagttccggctgtcagggtggctggcccagcaggaggatgcacaccgtatcgtactctaccagacggacgcctcgctgacgccctggaccgtgcgctgcctgcgacaggccgactgcatcctcattgtgggcctgggggaccaggagcctaccctcggccagctggagcagatgctggagaacacggctgtgcgcgcccttaagcagctagtcctgctccaccgagaggagggcgcgggccccacgcgcaccgtggagtggctaaatatgcgcagctggtgctcggggcacctgcacctgcgctgtccgcgccgcctcttttcgcgccgcagccctgccaagctgcatgagctctacgagaaggttttctccaggcgcgcggaccggcacagcgacttctcccgcttggcgagggtgctcacggggaacaccattgcccttgtgctaggcgggggcggggccaggggctgctcgcacatcggagtactaaaggcattagaggaggcgggggtccccgtggacctggtgggcggcacgtccattggctctttcatcggagcgttgtacgcggaggagcgcagcgccagccgcacgaagcagcgggcccgggagtgggccaagagcatgacttcggtgctggaacctgtgttggacctcacgtacccagtcacctccatgttcactgggtctgcctttaaccgcagcatccatcgggtcttccaggataagcagattgaggacctgtggctgccttacttcaacgtgaccacagatatcaccgcctcagccatgcgagtccacaaagatggctccctgtggcggtacgtgcgcgccagcatgacgctgtcgggctacctgcccccgctgtgcgaccccaaggacgggcacctactcatggatggcggctacatcaacaatctgccagcggacatcgcccgcagcatgggtgccaaaacggtcatcgccattgacgtggggagccaggatgagacggacctcagcacctacggggacagcctgtccggctggtggctgctgtggaagcggctgaatccctgggctgacaaggtaaaggttccagacatggctgaaatccagtcccgcctggcctacgtgtcctgtgtgcggcagctagaggttgtcaagtccagctcctactgcgagtacctgcgcccgcccatcgactgcttcaagaccatggactttgggaagttcgaccagatctatgatgtgggctaccagtacgggaaggcggtgtttggaggctggagccgtggcaacgtcattgagaaaatgctcacagaccggcggtctacagaccttaatgagagccgccgtgcagacgtgcttgccttcccaagctctggcttcactgacttggcagagattgtgtcccggattgagccccccacgagctatgtctctgatggctgtgctgacggagaggagtcagattgtctgacagagtatgaggaggacgccggacccgactgctcgagggatgaaggggggtcccccgagggcgcaagccccagcactgcctccgagatggaggaggagaagtcgattctccggcaacgacgctgtctgccccaggagccgcccggctcagccacagatgcctgaggacctcgacaggggtcaccccctccctcccacccctggactgggctgggggtggccccgtgggggtagctcactccccctcctgctgctatgcctgtgacccccgcggcccacacactggactgacctgccctgagcggggatgcagtgttgcactgatgacttgaccagcccctcccccaataaactcgcctcttggaaa

SEQ ID NO: 163882 - DNA, 4457 bp, Homo sapiens
  Payload ID: 12270
  Gene Symbol: PNPLA6
  Gene Name: patatin-like phospholipase domain containing 6
  Uniprot ID: Q8IY17
  ENST ID: ENST00000450331
  CDS Start-End: 272-4255
caatggcgccaccatcggtcccggagtcccagtgatgctctgtgccatagagcccccataacttcactactacgtgatagtaaatccccggcaaaaaccagcagcgccttgcaagcccacgccaccccaagcatcccaggactcttctgaaacagggcagtgacccgggaggaagtcaccaggtgcagaggaccgtgccctgtggggacctgcctgcaggctgctgacagactccgggctaccagatcggccgtccagctggaatcaaccgatggaggctccgctgcaaactggaatggtgcttggcgtgatgatcggggccggagtggcggtggtggtcacggccgtgctcatcctcctggtggtgcggaggctgcgagtgccaaaaaccccagccccggatggcccccggtatcggttccggaagagggacaaagtgctcttctatggccggaagattatgcggaaggtgtcacaatccacctcctccctcgtggatacctctgtctccgccacctcccggccacgcatgaggaagaaactgaagatgctcaacattgccaagaagatcctgcgcatccagaaagagacgcccacgctgcagcggaaggagcccccgcccgcagtgctagaagctgacctgaccgagggcgacctggctaactcccatctgccctctgaagtgctttatatgctcaagaacgtccgggtgctgggccacttcgagaagccactcttcctggagctctgccgccacatggtcttccagcggctgggccagggtgactacgtcttccggccgggccagccagatgccagcatctacgtggtgcaggacgggctgctggagctctgtctgccagggcctgacgggaaggagtgtgtggtgaaggaagtggttcctggggacagcgtcaacagccttctcagcatcctggatgtcatcaccggtcaccagcatccccagcggaccgtgtctgcccgggcggcccgggactccacggtgctgcgcctgccggtggaagcattctccgcggtcttcaccaagtacccggagagcttggtgcgggtcgtgcagatcatcatggtgcggctgcagcgagtcaccttcctggcactgcacaactacctgggtctgaccaatgagctcttcagccacgagatccagcccctgcgtctgttccccagccccggcctcccaactcgcaccagccctgtgcggggctccaagagaatggtcagcacctcagctacagacgagcccagggagaccccagggcggccacccgatcccaccggggccccgctgcctggacctacaggggaccctgtgaagcccacatccctggaaaccccctcggcccctctgctgagccgctgcgtctccatgccaggggacatctcaggcttgcagggtggcccccgctccgacttcgacatggcctatgagcgtggccggatctccgtgtccctgcaggaagaggcctccggggggtccctggcagcccccgctcggacccccactcaggagcctcgtgagcagccggcaggcgcctgtgaatacagctactgtgaggatgagtcggccactggtggctgccctttcgggccctaccagggccgccagaccagcagcatcttcgaggcagcaaagcaggagctggccaagctgatgcggattgaggacccctccctcctgaacagcagagtcttgctgcaccacgccaaagctggcaccatcattgcccgccagggagaccaggacgtgagcctgcacttcgtgctctggggctgcctgcacgtgtaccagcgcatgatcgacaaggcggaggacgtgtgcctgttcgtagcgcagcccggggaactggtggggcagctggcggtgctcactggcgaacctctcatcttcacactgcgagcccaacgcgactgcaccttcctgcggatctccaagtccgacttctatgagatcatgcgcgcacagcccagtgtggtgctgagtgcggcgcacacggtggcagccaggatgtcgcccttcgtgcgccagatggacttcgccatcgactggactgcagtggaggcgggacgcgcgctgtacaggcagggcgaccgctccgactgcacttacatcgtgctcaatgggcggctgcgtagcgtgatccagcgaggcagtggcaagaaggagctggtgggcgagtacggccgcggcgacctcatcggcgtggtggaggcactgacccggcagccgcgagccacgacggtgcacgcggtgcgcgacacggagctggccaagcttcccgagggcaccttgggtcacatcaaacgccggtacccgcaggtcgtgacccgccttatccacctactgagccagaaaattctagggaatttgcagcagctgcaaggacccttcccagcaggctctgggttgggtgtgcccccacactcggaactcaccaacccagccagcaacctggcaactgtggcaatcctgcctgtgtgtgctgaggtccccatggtggccttcacgctggagctgcagcacgccctgcaggccatcggtccgacgctactccttaacagtgacatcatccgggcacgcctgggggcctccgcactggatagcatccaagagttccggctgtcagggtggctggcccagcaggaggatgcacaccgtatcgtactctaccagacggacgcctcgctgacgccctggaccgtgcgctgcctgcgacaggccgactgcatcctcattgtgggcctgggggaccaggagcctaccctcggccagctggagcagatgctggagaacacggctgtgcgcgcccttaagcagctagtcctgctccaccgagaggagggcgcgggccccacgcgcaccgtggagtggctaaatatgcgcagctggtgctcggggcacctgcacctgcgctgtccgcgccgcctcttttcgcgccgcagccctgccaagctgcatgagctctacgagaaggttttctccaggcgcgcggaccggcacagcgacttctcccgcttggcgagggtgctcacggggaacaccattgcccttgtgctaggcgggggcggggccaggggctgctcgcacatcggagtactaaaggcattagaggaggcgggggtccccgtggacctggtgggcggcacgtccattggctctttcatcggagcgttgtacgcggaggagcgcagcgccagccgcacgaagcagcgggcccgggagtgggccaagagcatgacttcggtgctggaacctgtgttggacctcacgtacccagtcacctccatgttcactgggtctgcctttaaccgcagcatccatcgggtcttccaggataagcagattgaggacctgtggctgccttacttcaacgtgaccacagatatcaccgcctcagccatgcgagtccacaaagatggctccctgtggcggtacgtgcgcgccagcatgacgctgtcgggctacctgcccccgctgtgcgaccccaaggacgggcacctactcatggatggcggctacatcaacaatctgccagcggacatcgcccgcagcatgggtgccaaaacggtcatcgccattgacgtggggagccaggatgagacggacctcagcacctacggggacagcctgtccggctggtggctgctgtggaagcggctgaatccctgggctgacaaggtaaaggttccagacatggctgaaatccagtcccgcctggcctacgtgtcctgtgtgcggcagctagaggttgtcaagtccagctcctactgcgagtacctgcgcccgcccatcgactgcttcaagaccatggactttgggaagttcgaccagatctatgatgtgggctaccagtacgggaaggcggtgtttggaggctggagccgtggcaacgtcattgagaaaatgctcacagaccggcggtctacagaccttaatgagagccgccgtgcagacgtgcttgccttcccaagctctggcttcactgacttggcagagattgtgtcccggattgagccccccacgagctatgtctctgatggctgtgctgacggagaggagtcagattgtctgacagagtatgaggaggacgccggacccgactgctcgagggatgaaggggggtcccccgagggcgcaagccccagcactgcctccgagatggaggaggagaagtcgattctccggcaacgacgctgtctgccccaggagccgcccggctcagccacagatgcctgaggacctcgacaggggtcaccccctccctcccacccctggactgggctgggggtggccccgtgggggtagctcactccccctcctgctgctatgcctgtgacccccgcggcccacacactggactgacctgccctgagcggggatgcagtgttgcactgatgacttgaccagcccctcccccaataaactcgcctcttggaaa

SEQ ID NO: 163883 - DNA, 4522 bp, Homo sapiens
  Payload ID: 12270
  Gene Symbol: PNPLA6
  Gene Name: patatin-like phospholipase domain containing 6
  Uniprot ID: Q8IY17
  ENST ID: ENST00000414982
  CDS Start-End: 196-4323
caatggcgccaccatcggtcccggagtcccagtgatgctctgtgccatagagcccccataacttcactactacgtgatagtaaatccccggcaaaaaccagcagcgccttgcaagcccacgccaccccaagcatcccaggactcttctgaaacgactccgggctaccagatcggccgtccagctggaatcaaccgatggaggctccgctgcaaactggaatgatggggacatcgagtcacgggctggctacgaactcctcgggggcgaaggtggcggagagggatgggttccaggacgtcctggcgcccggggaaggctcggcgggacggatttgcggtgcgcagccagtgccgttcgtccctcaggtgcttggcgtgatgatcggggccggagtggcggtggtggtcacggccgtgctcatcctcctggtggtgcggaggctgcgagtgccaaaaaccccagccccggatggcccccggtatcggttccggaagagggacaaagtgctcttctatggccggaagattatgcggaaggtgtcacaatccacctcctccctcgtggatacctctgtctccgccacctcccggccacgcatgaggaagaaactgaagatgctcaacattgccaagaagatcctgcgcatccagaaagagacgcccacgctgcagcggaaggagcccccgcccgcagtgctagaagctgacctgaccgagggcgacctggctaactcccatctgccctctgaagtgctttatatgctcaagaacgtccgggtgctgggccacttcgagaagccactcttcctggagctctgccgccacatggtcttccagcggctgggccagggtgactacgtcttccggccgggccagccagatgccagcatctacgtggtgcaggacgggctgctggagctctgtctgccagggcctgacgggaaggagtgtgtggtgaaggaagtggttcctggggacagcgtcaacagccttctcagcatcctggatgtcatcaccggtcaccagcatccccagcggaccgtgtctgcccgggcggcccgggactccacggtgctgcgcctgccggtggaagcattctccgcggtcttcaccaagtacccggagagcttggtgcgggtcgtgcagatcatcatggtgcggctgcagcgagtcaccttcctggcactgcacaactacctgggtctgaccaatgagctcttcagccacgagatccagcccctgcgtctgttccccagccccggcctcccaactcgcaccagccctgtgcggggctccaagagaatggtcagcacctcagctacagacgagcccagggagaccccagggcggccacccgatcccaccggggccccgctgcctggacctacaggggaccctgtgaagcccacatccctggaaaccccctcggcccctctgctgagccgctgcgtctccatgccaggggacatctcaggcttgcagggtggcccccgctccgacttcgacatggcctatgagcgtggccggatctccgtgtccctgcaggaagaggcctccggggggtccctggcagcccccgctcggacccccactcaggagcctcgtgagcagccggcaggcgcctgtgaatacagctactgtgaggatgagtcggccactggtggctgccctttcgggccctaccagggccgccagaccagcagcatcttcgaggcagcaaagcaggagctggccaagctgatgcggattgaggacccctccctcctgaacagcagagtcttgctgcaccacgccaaagctggcaccatcattgcccgccagggagaccaggacgtgagcctgcacttcgtgctctggggctgcctgcacgtgtaccagcgcatgatcgacaaggcggaggacgtgtgcctgttcgtagcgcagcccggggaactggtggggcagctggcggtgctcactggcgaacctctcatcttcacactgcgagcccaacgcgactgcaccttcctgcggatctccaagtccgacttctatgagatcatgcgcgcacagcccagtgtggtgctgagtgcggcgcacacggtggcagccaggatgtcgcccttcgtgcgccagatggacttcgccatcgactggactgcagtggaggcgggacgcgcgctgtacaggcagggcgaccgctccgactgcacttacatcgtgctcaatgggcggctgcgtagcgtgatccagcgaggcagtggcaagaaggagctggtgggcgagtacggccgcggcgacctcatcggcgtggtggaggcactgacccggcagccgcgagccacgacggtgcacgcggtgcgcgacacggagctggccaagcttcccgagggcaccttgggtcacatcaaacgccggtacccgcaggtcgtgacccgccttatccacctactgagccagaaaattctagggaatttgcagcagctgcaaggacccttcccagcaggctctgggttgggtgtgcccccacactcggaactcaccaacccagccagcaacctggcaactgtggcaatcctgcctgtgtgtgctgaggtccccatggtggccttcacgctggagctgcagcacgccctgcaggccatcggtccgacgctactccttaacagtgacatcatccgggcacgcctgggggcctccgcactggatagcatccaagagttccggctgtcagggtggctggcccagcaggaggatgcacaccgtatcgtactctaccagacggacgcctcgctgacgccctggaccgtgcgctgcctgcgacaggccgactgcatcctcattgtgggcctgggggaccaggagcctaccctcggccagctggagcagatgctggagaacacggctgtgcgcgcccttaagcagctagtcctgctccaccgagaggagggcgcgggccccacgcgcaccgtggagtggctaaatatgcgcagctggtgctcggggcacctgcacctgcgctgtccgcgccgcctcttttcgcgccgcagccctgccaagctgcatgagctctacgagaaggttttctccaggcgcgcggaccggcacagcgacttctcccgcttggcgagggtgctcacggggaacaccattgcccttgtgctaggcgggggcggggccaggggctgctcgcacatcggagtactaaaggcattagaggaggcgggggtccccgtggacctggtgggcggcacgtccattggctctttcatcggagcgttgtacgcggaggagcgcagcgccagccgcacgaagcagcgggcccgggagtgggccaagagcatgacttcggtgctggaacctgtgttggacctcacgtacccagtcacctccatgttcactgggtctgcctttaaccgcagcatccatcgggtcttccaggataagcagattgaggacctgtggctgccttacttcaacgtgaccacagatatcaccgcctcagccatgcgagtccacaaagatggctccctgtggcggtacgtgcgcgccagcatgacgctgtcgggctacctgcccccgctgtgcgaccccaaggacgggcacctactcatggatggcggctacatcaacaatctgccagcggacatcgcccgcagcatgggtgccaaaacggtcatcgccattgacgtggggagccaggatgagacggacctcagcacctacggggacagcctgtccggctggtggctgctgtggaagcggctgaatccctgggctgacaaggtaaaggttccagacatggctgaaatccagtcccgcctggcctacgtgtcctgtgtgcggcagctagaggttgtcaagtccagctcctactgcgagtacctgcgcccgcccatcgactgcttcaagaccatggactttgggaagttcgaccagatctatgatgtgggctaccagtacgggaaggcggtgtttggaggctggagccgtggcaacgtcattgagaaaatgctcacagaccggcggtctacagaccttaatgagagccgccgtgcagacgtgcttgccttcccaagctctggcttcactgacttggcagagattgtgtcccggattgagccccccacgagctatgtctctgatggctgtgctgacggagaggagtcagattgtctgacagagtatgaggaggacgccggacccgactgctcgagggatgaaggggggtcccccgagggcgcaagccccagcactgcctccgagatggaggaggagaagtcgattctccggcaacgacgctgtctgccccaggagccgcccggctcagccacagatgcctgaggacctcgacaggggtcaccccctccctcccacccctggactgggctgggggtggccccgtgggggtagctcactccccctcctgctgctatgcctgtgacccccgcggcccacacactggactgacctgccctgagcggggatgcagtgttgcactgatgacttgaccagcccctcccccaataaactcgcctcttgg

SEQ ID NO: 163884 - DNA, 4502 bp, Homo sapiens
  Payload ID: 12270
  Gene Symbol: PNPLA6
  Gene Name: patatin-like phospholipase domain containing 6
  Uniprot ID: Q8IY17
  ENST ID: ENST00000545201
  CDS Start-End: 401-4303
gagtctgggtttccgttagcctcgcaggggtgtcccttcgagggtcgttagcgagcctccgctttcccacgatctgtcctccgattcctgttaactctagactttctgatgttcccataccccccacgtctcggcaggtgtttccacaccggtagccagctgtgccctgaggtggaagaggaccggccacccaggaattttccaacaatggcgccaccatcggtcccggagtcccagtgatgctctgtgccatagagcccccataacttcactactacgtgatagtaaatccccggcaaaaaccagcagcgccttgcaagcccacgccaccccaagcatcccaggactcttctgaaacgactccgggctaccagatcggccgtccagctggaatcaaccgatggaggctccgctgcaaactggaatggtgcttggcgtgatgatcggggccggagtggcggtggtggtcacggccgtgctcatcctcctggtggtgcggaggctgcgagtgccaaaaaccccagccccggatggcccccggtatcggttccggaagagggacaaagtgctcttctatggccggaagattatgcggaaggtgtcacaatccacctcctccctcgtggatacctctgtctccgccacctcccggccacgcatgaggaagaaactgaagatgctcaacattgccaagaagatcctgcgcatccagaaagagacgcccacgctgcagcggaaggagcccccgcccgcagtgctagaagctgacctgaccgagggcgacctggctaactcccatctgccctctgaagtgctttatatgctcaagaacgtccgggtgctgggccacttcgagaagccactcttcctggagctctgccgccacatggtcttccagcggctgggccagggtgactacgtcttccggccgggccagccagatgccagcatctacgtggtgcaggacgggctgctggagctctgtctgccagggcctgacgggaaggagtgtgtggtgaaggaagtggttcctggggacagcgtcaacagccttctcagcatcctggatgtcatcaccggtcaccagcatccccagcggaccgtgtctgcccgggcggcccgggactccacggtgctgcgcctgccggtggaagcattctccgcggtcttcaccaagtacccggagagcttggtgcgggtcgtgcagatcatcatggtgcggctgcagcgagtcaccttcctggcactgcacaactacctgggtctgaccaatgagctcttcagccacgagatccagcccctgcgtctgttccccagccccggcctcccaactcgcaccagccctgtgcggggctccaagagaatggtcagcacctcagctacagacgagcccagggagaccccagggcggccacccgatcccaccggggccccgctgcctggacctacaggggaccctgtgaagcccacatccctggaaaccccctcggcccctctgctgagccgctgcgtctccatgccaggggacatctcaggcttgcagggtggcccccgctccgacttcgacatggcctatgagcgtggccggatctccgtgtccctgcaggaagaggcctccggggggtccctggcagcccccgctcggacccccactcaggagcctcgtgagcagccggcaggcgcctgtgaatacagctactgtgaggatgagtcggccactggtggctgccctttcgggccctaccagggccgccagaccagcagcatcttcgaggcagcaaagcaggagctggccaagctgatgcggattgaggacgtgagcctgcacttcgtgctctggggctgcctgcacgtgtaccagcgcatgatcgacaaggcggaggacgtgtgcctgttcgtagcgcagcccggggaactggtggggcagctggcggtgctcactggcgaacctctcatcttcacactgcgagcccaacgcgactgcaccttcctgcggatctccaagtccgacttctatgagatcatgcgcgcacagcccagtgtggtgctgagtgcggcgcacacggtggcagccaggatgtcgcccttcgtgcgccagatggacttcgccatcgactggactgcagtggaggcgggacgcgcgctgtacaggcagggcgaccgctccgactgcacttacatcgtgctcaatgggcggctgcgtagcgtgatccagcgaggcagtggcaagaaggagctggtgggcgagtacggccgcggcgacctcatcggcgtggtggaggcactgacccggcagccgcgagccacgacggtgcacgcggtgcgcgacacggagctggccaagcttcccgagggcaccttgggtcacatcaaacgccggtacccgcaggtcgtgacccgccttatccacctactgagccagaaaattctagggaatttgcagcagctgcaaggacccttcccaggctctgggttgggtgtgcccccacactcggaactcaccaacccagccagcaacctggcaactgtggcaatcctgcctgtgtgtgctgaggtccccatggtggccttcacgctggagctgcagcacgccctgcaggccatcggtccgacgctactccttaacagtgacatcatccgggcacgcctgggggcctccgcactggatagcatccaagagttccggctgtcagggtggctggcccagcaggaggatgcacaccgtatcgtactctaccagacggacgcctcgctgacgccctggaccgtgcgctgcctgcgacaggccgactgcatcctcattgtgggcctgggggaccaggagcctaccctcggccagctggagcagatgctggagaacacggctgtgcgcgcccttaagcagctagtcctgctccaccgagaggagggcgcgggccccacgcgcaccgtggagtggctaaatatgcgcagctggtgctcggggcacctgcacctgcgctgtccgcgccgcctcttttcgcgccgcagccctgccaagctgcatgagctctacgagaaggttttctccaggcgcgcggaccggcacagcgacttctcccgcttggcgagggtgctcacggggaacaccattgcccttgtgctaggcgggggcggggccaggggctgctcgcacatcggagtactaaaggcattagaggaggcgggggtccccgtggacctggtgggcggcacgtccattggctctttcatcggagcgttgtacgcggaggagcgcagcgccagccgcacgaagcagcgggcccgggagtgggccaagagcatgacttcggtgctggaacctgtgttggacctcacgtacccagtcacctccatgttcactgggtctgcctttaaccgcagcatccatcgggtcttccaggataagcagattgaggacctgtggctgccttacttcaacgtgaccacagatatcaccgcctcagccatgcgagtccacaaagatggctccctgtggcggtacgtgcgcgccagcatgacgctgtcgggctacctgcccccgctgtgcgaccccaaggacgggcacctactcatggatggcggctacatcaacaatctgccagcggacatcgcccgcagcatgggtgccaaaacggtcatcgccattgacgtggggagccaggatgagacggacctcagcacctacggggacagcctgtccggctggtggctgctgtggaagcggctgaatccctgggctgacaaggtaaaggttccagacatggctgaaatccagtcccgcctggcctacgtgtcctgtgtgcggcagctagaggttgtcaagtccagctcctactgcgagtacctgcgcccgcccatcgactgcttcaagaccatggactttgggaagttcgaccagatctatgatgtgggctaccagtacgggaaggcggtgtttggaggctggagccgtggcaacgtcattgagaaaatgctcacagaccggcggtctacagaccttaatgagagccgccgtgcagacgtgcttgccttcccaagctctggcttcactgacttggcagagattgtgtcccggattgagccccccacgagctatgtctctgatggctgtgctgacggagaggagtcagattgtctgacagagtatgaggaggacgccggacccgactgctcgagggatgaaggggggtcccccgagggcgcaagccccagcactgcctccgagatggaggaggagaagtcgattctccggcaacgacgctgtctgccccaggagccgcccggctcagccacagatgcctgaggacctcgacaggggtcaccccctccctcccacccctggactgggctgggggtggccccgtgggggtagctcactccccctcctgctgctatgcctgtgacccccgcggcccacacactggactgacctgccctgagcggggatgcagtgttgcactgatgacttgaccagcccctcccccaataaactcgcctcttgg

SEQ ID NO: 163885 - DNA, 669 bp, Homo sapiens
  Payload ID: 12270
  Gene Symbol: PNPLA6
  Gene Name: patatin-like phospholipase domain containing 6
  ENST ID: ENST00000599947
  CDS Start-End: 1-467
agcggctgaatccctgggctgacaaggtaaaggttccagacatggctgaaatccagtcccgcctggcctacgtgtcctgtgtgcggcagctagaggttgtcaagtccagctcctactgcgagtacctgcgcccgcccatcgactgcttcaagaccatggactttgggaagttcgaccagatctatgtgcttgccttcccaagctctggcttcactgacttggcagagattgtgtcccggattgagccccccacgagctatgtctctgatggctgtgctgacggagaggagtcagattgtctgacagagtatgaggaggacgccggacccgactgctcgagggatgaaggggggtcccccgagggcgcaagccccagcactgcctccgagatggaggaggagaagtcgattctccggcaacgacgctgtctgccccaggagccgcccggctcagccacagatgcctgaggacctcgacaggggtcaccccctccctcccacccctggactgggctgggggtggccccgtgggggtagctcactccccctcctgctgctatgcctgtgacccccgcggcccacacactggactgacctgccctgagcggggatgcagtgttgcactgatgacttgaccagcccctcccccaataaactcgcctcttggaaa

SEQ ID NO: 163886 - DNA, 584 bp, Homo sapiens
  Payload ID: 12270
  Gene Symbol: PNPLA6
  Gene Name: patatin-like phospholipase domain containing 6
  ENST ID: ENST00000593924
  CDS Start-End: 232-584
acggtttgcgggcccgttttcctggggtggggcattcagtcttcgacggagtagggggtgcggcctggggggtggggtggtcaggcttgatcaaccctgcagagggcagtgacccgggaggaagtcaccaggtgcagaggaccgtgccctgtggggacctgcctgcaggctgctgacagtgggtaccaggactccgggctaccagatcggccgtccagctggaatcaaccgatggaggctccgctgcaaactggaatggtgcttggcgtgatgatcggggccggagtggcggtggtggtcacggccgtgctcatcctcctggtggtgcggaggctgcgagtgccaaaaaccccagccccggatggcccccggtatcggttccggaagagggacaaagtgctcttctatggccggaagattatgcggaaggtgtcacaatccacctcctccctcgtggatacctctgtctccgccacctcccggccacgcatgaggaagaaactgaagatgctcaacattgccaagaagatcctgcgcatccagaaagagacgcccacgctgcagcggaaggagcccccgcccgc

SEQ ID NO: 163887 - DNA, 574 bp, Homo sapiens
  Payload ID: 12270
  Gene Symbol: PNPLA6
  Gene Name: patatin-like phospholipase domain containing 6
  ENST ID: ENST00000594551
  CDS Start-End: 1-574
ttatatgctcaagaacgtccgggtgctgggccacttcgagaagccactcttcctggagctctgccgccacatggtcttccagcggctgggccagggtgactacgtcttccggccgggccagccagatgccagcatctacgtggtgcaggacgggctgctggagctctgtctgccagggcctgacgggaaggagtgtgtggtgaaggaagtggttcctggggacagcgtcaacagccttctcagcatcctggatgtcatcacccatccccagcggaccgtgtctgcccgggcggcccgggactccacggtgctgcgcctgccggtggaagcattctccgcggtcttcaccaagtacccggagagcttggtgcgggtcgtgcagatcatcatggtgcggctgcagcgagtcaccttcctggcactgcacaactacctgggtctgaccaatgagctcttcagccacgagatccagcccctgcgtctgttccccagccccggcctcccaactcgcaccagccctgtgcggggctccaagagaatggtcagcacctcagctacagacgagcccagggag

SEQ ID NO: 163888 - DNA, 543 bp, Homo sapiens
  Payload ID: 12270
  Gene Symbol: PNPLA6
  Gene Name: patatin-like phospholipase domain containing 6
  ENST ID: ENST00000596515
  CDS Start-End: 429-543
agaaacatcctcagcttcccagaaaaatcccagtaatattccagcatctctcagtatcttccaaggagcccggacgccctccccaggcccgctctcataagcaccccaggaatgtgcccacccacctcctggttttcccagcagtagtattgtaatcctcagaatctcagtaactttccagtgaccccgcatccccacccactaatcccagcgtctctggttacgcctcccagcaatggcgccaccatcggtcccggagtcccagtgatgctctgtgccatagagcccccataacttcactactacgtgatagtaaatccccggcaaaaaccagcagcgccttgcaagcccacgccaccccaagcatcccaggactcttctgaaacgactccgggctaccagatcggccgtccagctggaatcaaccgatggaggctccgctgcaaactggaatggtgcttggcgtgatgatcggggccggagtggcggtggtggtcacggccgtgctcatcctcctggtggtgcggaggctgcgagtgccaa

SEQ ID NO: 163889 - DNA, 753 bp, Homo sapiens
  Payload ID: 12270
  Gene Symbol: PNPLA6
  Gene Name: patatin-like phospholipase domain containing 6
  ENST ID: ENST00000601668
  CDS Start-End: 351-753
gtgaataatttaaaggggccgtgcctgcggagccgggcggaacgctagcggtgttggcgcggagtggaccccggctgcggcccctgggtgtttccacaccggtagccagctgtgccctgaggtggaagaggaccggccacccaggaattttccaacaatggcgccaccatcggtcccggagtcccagtgatgctctgtgccatagagcccccataacttcactactacgtgatagtaaatccccggcaaaaaccagcagcgccttgcaagcccacgccaccccaagcatcccaggactcttctgaaacgactccgggctaccagatcggccgtccagctggaatcaaccgatggaggctccgctgcaaactggaatggtgcttggcgtgatgatcggggccggagtggcggtggtggtcacggccgtgctcatcctcctggtggtgcggaggctgcgagtgccaaaaaccccagccccggatggcccccggtatcggttccggaagagggacaaagtgctcttctatggccggaagattatgcggaaggtgtcacaatccacctcctccctcgtggatacctctgtctccgccacctcccggccacgcatgaggaagaaactgaagatgctcaacattgccaagaagatcctgcgcatccagaaagagacgcccacgctgcagcggaaggagcccccgcccgcagtgctagaagctgacctgaccgagggcgacctggctaactcccatctgc

SEQ ID NO: 163890 - DNA, 800 bp, Homo sapiens
  Payload ID: 12270
  Gene Symbol: PNPLA6
  Gene Name: patatin-like phospholipase domain containing 6
  ENST ID: ENST00000595264
  CDS Start-End: 1-800
aagctgacctgaccgagggcgacctggctaactcccatctgccctctgaagtgctttatatgctcaagaacgtccgggtgctgggccacttcgagaagccactcttcctggagctctgccgccacatggtcttccagcggctgggccagggtgactacgtcttccggccgggccagccagatgccagcatctacgtggtgcaggacgggctgctggagctctgtctgccagggcctgacgggaaggagtgtgtggtgaaggaagtggttcctggggacagcgtcaacagccttctcagcatcctggatgtcatcaccggtcaccagcatccccagcggaccgtgtctgcccgggcggcccgggactccacggtgctgcgcctgccggtggaagcattctccgcggtcttcaccaagtacccggagagcttggtgcgggtcgtgcagatcatcatggtgcggctgcagcgagtcaccttcctggcactgcacaactacctgggtctgaccaatgagctcttcagccacgagatccagcccctgcgtctgttccccagccccggcctcccaactcgcaccagccctgtgcggggctccaagagaatggtcagcacctcagctacagacgagcccagggagaccccagggcggccacccgatcccaccggggccccgctgcctggacctacaggcttgcagggtggcccccgctccgacttcgacatggcctatgagcgtggccggatctccgtgtccctgcaggaagaggcctccggggggtccctggcagcccccgctcgg

SEQ ID NO: 163891 - DNA, 562 bp, Homo sapiens
  Payload ID: 12270
  Gene Symbol: PNPLA6
  Gene Name: patatin-like phospholipase domain containing 6
  ENST ID: ENST00000600942
  CDS Start-End: 102-562
tgcctcccagctcctgggtcttccccggggcaggcttgcgtcgggagccgagtatctaggactccgggctaccagatcggccgtccagctggaatcaaccgatggaggctccgctgcaaactggaatggtgcttggcgtgatgatcggggccggagtggcggtggtggtcacggccgtgctcatcctcctggtggtgcggaggctgcgagtgccaaaaaccccagccccggatggcccccggtatcggttccggaagagggacaaagtgctcttctatggccggaagattatgcggaaggtgtcacaatccacctcctccctcgtggatacctctgtctccgccacctcccggccacgcatgaggaagaaactgaagatgctcaacattgccaagaagatcctgcgcatccagaaagagacgcccacgctgcagcggaaggagcccccgcccgcagtgctagaagctgacctgaccgagggcgacctggctaactcccatctgccctctgaagtgctttatatgctcaagaacgtccgggtgctgggccacttcgagaagcc

SEQ ID NO: 163892 - DNA, 866 bp, Homo sapiens
  Payload ID: 12270
  Gene Symbol: PNPLA6
  Gene Name: patatin-like phospholipase domain containing 6
  ENST ID: ENST00000601001
  CDS Start-End: 324-866
agcggtgttggcgcggagtggaccccggctgcggcccctggcaatggcgccaccatcggtcccggagtcccagtgatgctctgtgccatagagcccccataacttcactactacgtgatagtaaatccccggcaaaaaccagcagcgccttgcaagcccacgccaccccaagcatcccaggactcttctgaaacagggcagtgacccgggaggaagtcaccaggtgcagaggaccgtgccctgtggggacctgcctgcaggctgctgacagtgggtaccaggactccgggctaccagatcggccgtccagctggaatcaaccgatggaggctccgctgcaaactggaatggtgcttggcgtgatgatcggggccggagtggcggtggtggtcacggccgtgctcatcctcctggtggtgcggaggctgcgagtgccaaaaaccccagccccggatggcccccggtatcggttccggaagagggacaaagtgctcttctatggccggaagattatgcggaaggtgtcacaatccacctcctccctcgtggatacctctgtctccgccacctcccggccacgcatgaggaagaaactgaagatgctcaacattgccaagaagatcctgcgcatccagaaagagacgcccacgctgcagcggaaggagcccccgcccgcagtgctagaagctgacctgaccgagggcgacctggctaactcccatctgccctctgaagtgctttatatgctcaagaacgtccgggtgctgggccacttcgagaagccactcttcctggagctctgccgccacatggtcttccagcggctgggccagggtgactacgtcttccggccgggccagccagat

SEQ ID NO: 163893 - DNA, 4195 bp, Homo sapiens
  Payload ID: 12270
  Gene Symbol: PNPLA6
  Gene Name: patatin-like phospholipase domain containing 6
  Uniprot ID: Q8IY17
  ENST ID: ENST00000600737
  CDS Start-End: 84-4181
tttcccggcatgcactgcgggccgccgggcctcagggaagagtcgcgcccccggggagggagcagcactggcccattctgcagatggggacatcgagtcacgggctggctacgaactcctcgggggcgaaggtggcggagagggatgggttccaggacgtcctggcgcccggggaaggctcggcgggacggatttgcggtgcgcagccagtgccgttcgtccctcaggtgcttggcgtgatgatcggggccggagtggcggtggtggtcacggccgtgctcatcctcctggtggtgcggaggctgcgagtgccaaaaaccccagccccggatggcccccggtatcggttccggaagagggacaaagtgctcttctatggccggaagattatgcggaaggtgtcacaatccacctcctccctcgtggatacctctgtctccgccacctcccggccacgcatgaggaagaaactgaagatgctcaacattgccaagaagatcctgcgcatccagaaagagacgcccacgctgcagcggaaggagcccccgcccgcagtgctagaagctgacctgaccgagggcgacctggctaactcccatctgccctctgaagtgctttatatgctcaagaacgtccgggtgctgggccacttcgagaagccactcttcctggagctctgccgccacatggtcttccagcggctgggccagggtgactacgtcttccggccgggccagccagatgccagcatctacgtggtgcaggacgggctgctggagctctgtctgccagggcctgacgggaaggagtgtgtggtgaaggaagtggttcctggggacagcgtcaacagccttctcagcatcctggatgtcatcaccggtcaccagcatccccagcggaccgtgtctgcccgggcggcccgggactccacggtgctgcgcctgccggtggaagcattctccgcggtcttcaccaagtacccggagagcttggtgcgggtcgtgcagatcatcatggtgcggctgcagcgagtcaccttcctggcactgcacaactacctgggtctgaccaatgagctcttcagccacgagatccagcccctgcgtctgttccccagccccggcctcccaactcgcaccagccctgtgcggggctccaagagaatggtcagcacctcagctacagacgagcccagggagaccccagggcggccacccgatcccaccggggccccgctgcctggacctacaggggaccctgtgaagcccacatccctggaaaccccctcggcccctctgctgagccgctgcgtctccatgccaggggacatctcaggcttgcagggtggcccccgctccgacttcgacatggcctatgagcgtggccggatctccgtgtccctgcaggaagaggcctccggggggtccctggcagcccccgctcggacccccactcaggagcctcgtgagcagccggcaggcgcctgtgaatacagctactgtgaggatgagtcggccactggtggctgccctttcgggccctaccagggccgccagaccagcagcatcttcgaggcagcaaagcaggagctggccaagctgatgcggattgaggacccctccctcctgaacagcagagtcttgctgcaccacgccaaagctggcaccatcattgcccgccagggagaccaggacgtgagcctgcacttcgtgctctggggctgcctgcacgtgtaccagcgcatgatcgacaaggcggaggacgtgtgcctgttcgtagcgcagcccggggaactggtggggcagctggcggtgctcactggcgaacctctcatcttcacactgcgagcccaacgcgactgcaccttcctgcggatctccaagtccgacttctatgagatcatgcgcgcacagcccagtgtggtgctgagtgcggcgcacacggtggcagccaggatgtcgcccttcgtgcgccagatggacttcgccatcgactggactgcagtggaggcgggacgcgcgctgtacaggcagggcgaccgctccgactgcacttacatcgtgctcaatgggcggctgcgtagcgtgatccagcgaggcagtggcaagaaggagctggtgggcgagtacggccgcggcgacctcatcggcgtggtggaggcactgacccggcagccgcgagccacgacggtgcacgcggtgcgcgacacggagctggccaagcttcccgagggcaccttgggtcacatcaaacgccggtacccgcaggtcgtgacccgccttatccacctactgagccagaaaattctagggaatttgcagcagctgcaaggacccttcccaggctctgggttgggtgtgcccccacactcggaactcaccaacccagccagcaacctggcaactgtggcaatcctgcctgtgtgtgctgaggtccccatggtggccttcacgctggagctgcagcacgccctgcaggccatcggtccgacgctactccttaacagtgacatcatccgggcacgcctgggggcctccgcactggatagcatccaagagttccggctgtcagggtggctggcccagcaggaggatgcacaccgtatcgtactctaccagacggacgcctcgctgacgccctggaccgtgcgctgcctgcgacaggccgactgcatcctcattgtgggcctgggggaccaggagcctaccctcggccagctggagcagatgctggagaacacggctgtgcgcgcccttaagcagctagtcctgctccaccgagaggagggcgcgggccccacgcgcaccgtggagtggctaaatatgcgcagctggtgctcggggcacctgcacctgcgctgtccgcgccgcctcttttcgcgccgcagccctgccaagctgcatgagctctacgagaaggttttctccaggcgcgcggaccggcacagcgacttctcccgcttggcgagggtgctcacggggaacaccattgcccttgtgctaggcgggggcggggccaggggctgctcgcacatcggagtactaaaggcattagaggaggcgggggtccccgtggacctggtgggcggcacgtccattggctctttcatcggagcgttgtacgcggaggagcgcagcgccagccgcacgaagcagcgggcccgggagtgggccaagagcatgacttcggtgctggaacctgtgttggacctcacgtacccagtcacctccatgttcactgggtctgcctttaaccgcagcatccatcgggtcttccaggataagcagattgaggacctgtggctgccttacttcaacgtgaccacagatatcaccgcctcagccatgcgagtccacaaagatggctccctgtggcggtacgtgcgcgccagcatgacgctgtcgggctacctgcccccgctgtgcgaccccaaggacgggcacctactcatggatggcggctacatcaacaatctgccagcggacatcgcccgcagcatgggtgccaaaacggtcatcgccattgacgtggggagccaggatgagacggacctcagcacctacggggacagcctgtccggctggtggctgctgtggaagcggctgaatccctgggctgacaaggtaaaggttccagacatggctgaaatccagtcccgcctggcctacgtgtcctgtgtgcggcagctagaggttgtcaagtccagctcctactgcgagtacctgcgcccgcccatcgactgcttcaagaccatggactttgggaagttcgaccagatctatgatgtgggctaccagtacgggaaggcggtgtttggaggctggagccgtggcaacgtcattgagaaaatgctcacagaccggcggtctacagaccttaatgagagccgccgtgcagacgtgcttgccttcccaagctctggcttcactgacttggcagagattgtgtcccggattgagccccccacgagctatgtctctgatggctgtgctgacggagaggagtcagattgtctgacagagtatgaggaggacgccggacccgactgctcgagggatgaaggggggtcccccgagggcgcaagccccagcactgcctccgagatggaggaggagaagtcgattctccggcaacgacgctgtctgccccaggagccgcccggctcagccacagatgcctgaggacctcgacaggg

SEQ ID NO: 163894 - DNA, 4581 bp, Homo sapiens
  Payload ID: 12271
  Gene Symbol: PNPLA7
  Gene Name: patatin-like phospholipase domain containing 7
  Uniprot ID: Q6ZV29
  ENST ID: ENST00000277531
  CDS Start-End: 188-4141
aaaagacagcttttcttcctggagaacagactttttcagcaggattttcctttcagtgaaacataatttgacttgaaaggaacccagggaaaagtgtccaggtgtgagcatgagcgggtagaggtgtgcccttgtttgcttcaggctgtctgcttttcgcccctgactgttttttctgtttctggccatggaggaagagaaagatgacagcccacagctgacggggattgcagttggagccctcctggccctggccttggttggtgtcctcatccttttcatgttcagaaggcttagacaatttcgacaagcacagcccactcctcagtaccggttccggaagagagacaaagtgatgttttacggccggaagatcatgaggaaggtgaccacactccccaacacccttgtggagaacactgccctgccccggcagcgggccaggaagaggaccaaggtgctgtctttggccaagaggattctgcgtttcaagaaggaatacccggccctgcagcccaaggagcccccgccctccctgctggaggccgacctcacggagtttgacgtgaagaattctcacctgccatcggaagttctgtacatgctgaaaaacgttcgggtcctgggccactttgagaagccgctgttcctggagctttgcaaacacatcgtctttgtgcagctgcaggaaggggagcacgtcttccagcccagggagccggaccccagcatctgtgtggtgcaggacgggcggctggaggtctgcatccaggacactgacggcaccgaggtggtggtgaaagaggttctggcgggagacagcgtccacagcctgctcagcatcctggacatcatcaccggccatgctgcaccttacaaaacggtctccgtccgcgcggccatcccgtccaccatcctccggcttccagctgcggcttttcatggagtttttgagaaatatccggaaactctggtgagggtggtgcagatcatcatggtgcggctgcagagggtgacctttctggctctgcacaactacctcggcctgaccacagagctcttcaacgctgagagccaggccatccctctcgtgtctgtagccagtgtggctgccgggaaggccaagaagcaggtgttctatggcgaagaagagcggcttaaaaagccaccgcggctccaggagtcctgtgactcagatcacgggggcggccgcccggcagctgctgggcccctgctgaagaggagccactccgtccccgcgccttccattcgcaaacagatcttggaggagctggagaagcccggggcaggtgaccctgacccttcggccccacaagggggcccaggcagtgccacttctgatctggggatggcatgtgaccgtgccagggtcttcctgcactcggacgagcaccccgggagctccgtggccagcaagtccaggaaaagcgtgatggttgcagagataccctccacggtctcccagcactcagagagtcacacggatgagaccctggccagcaggaagtcggatgccatcttcagagctgccaagaaggacctgctcaccctgatgaagctggaagactcatctctgttggatggccgggtggcgcttctgcacgttcctgcaggcacggtggtgtcaaggcagggagaccaggacgccagcatcctgttcgtggtctcggggctgctgcacgtgtaccagcggaagatcggcagccaggaggacacctgcttgttcctcacgcgccccggggagatggtgggccagctggccgtgctcaccggggagcctctcatcttcaccgtcaaggccaacagggactgcagcttcctgtccatctccaaggcccacttctatgaaatcatgcggaagcagccgaccgtcgtcctgggtgtggcgcacactgtggtgaagaggatgtcgtccttcgtgcggcaaatcgactttgccctggactgggtggaggtggaggccgggcgagcaatatacaggcagggggacaagtccgactgcacgtacatcatgctcagcggccggctgcgctctgtgatccggaaggatgatgggaagaagcgcctggccggggagtacggccgaggagacctcgtcggcgtggtggagacactgacccaccaggcccgggcgaccacggtgcatgccgttcgggactcagaattggccaagctgccggcaggagccctcacgtccatcaagcgcaggtacccacaggtggtgactcggctgattcatctcttgggtgagaagatcctgggcagcctccagcagggacctgtgacaggccaccagcttgggctccccacggagggcagcaagtgggacttggggaacccggctgtcaacctgtccacggtggcagtgatgcccgtgtcagaggaagtgcccctcaccgccttcgccctggagctggagcatgccctcagcgccatcggcccgaccctgctgctgactagtgacaacataaaacggcgccttggctccgctgccctggacagtgttcacgagtaccggctgtccagctggctggggcagcaggaggacacccacaggatcgtgctctaccaggcagatggcacgctcacaccctggacccagcgctgcgtgcgccaggccgactgcatcctcatcgtgggcctgggtgaccaggagcccacagtgggcgagctggagcggatgctggagagcacagctgtgcgtgcccagaagcagctgatcctgctgcacagggaggagggcccggcgccagcgcgcaccgtggagtggctcaacatgcggagctggtgctccggccacctgcacctctgctgcccgcgccgcgtcttctccaggaggagcctgcccaagctggtggagatgtacaagcatgtcttccagcggcccccggaccgacactcagacttctcccgcctggcgagggtgctgacgggcaacgccattgccctggtgcttgggggagggggagcaagaggctgtgcccaggtgggcgttctcaaggccttggcggagtgcggcatccctgtggacatggtgggaggcacgtccatcggggccttcgtgggtgccctgtactctgaggagcggaactacagccagatgcggatccgggccaagcagtgggccgagggcatgacgtccttgatgaaggccgcgctggacctcacctaccccatcacgtccatgttctccggagccggcttcaacagcagcatcttcagcgtcttcaaggaccagcagatcgaggacctgtggattccttatttcgccatcaccaccgacatcacagcctcggccatgcgggtccacaccgacggctccctgtggtggtacgtgcgtgccagcatgtccctgtccggttacatgccccctctctgtgacccgaaggacggacacctgctgatggacgggggctacatcaacaacctcccagcggatgtggcccggtccatgggggcaaaagtggtgatcgccattgacgtgggcagccgagatgagacggacctcaccaactatggggatgcgctgtctgggtggtggctgctgtggaaacgctggaaccccttggccacgaaagtcaaggtgttgaacatggcagagattcagacgcgcctggcctacgtgtgttgcgtgcggcagctggaggtggtgaagagcagtgactactgcgagtacctgcgcccccccatcgacagctacagcaccctggacttcggcaagttcaacgagatctgcgaagtgggctaccagcacgggcgcacggtgtttgacatctggggccgcagcggcgtgctggagaagatgctccgcgaccagcaggggccgagcaagaagcccgcgagtgcggtcctcacctgtcccaacgcctccttcacggaccttgccgaaattgtgtctcgcattgagcccgccaagcccgccatggtggatgacgaatctgactaccagacggagtacgaggaggagctgctggacgtccccagggatgcatacgcagacttccagagcacctcagcccagcagggctcagacttggaggacgagtcctcactgcggcatcgacaccccagtctggctttcccaaaactgtctgagggctcctctgaccaggacgggtagaggcctctgctaaagagcccggatgcagcgtcttccgtgggactgtccccaaggctgaggctcctgccaagtcctaggggcctctgtacctgccctgctggaagccctgacttccccggggccccaggctgtgttagggttctctgggcctcttctttgtaccagcagccctgcatacagggccctgtgagcccccctgcagtcctgtgaggcccctgaagctctgtgaggcccctgaagctctgtgaaccccctgcagccctgtgaggccccccgaagccctgtgaggccccccgaagccctgtgaaccacctgctgccctgtgaggcccccaaagccctgtgaactgcctgctgtcctgtgaactgcctgctgccctgtgaggtgtgggagccctgatgctgccgtgtgatgtttcaataaaggtggatctcactgtt

SEQ ID NO: 163895 - DNA, 4806 bp, Homo sapiens
  Payload ID: 12271
  Gene Symbol: PNPLA7
  Gene Name: patatin-like phospholipase domain containing 7
  Uniprot ID: Q6ZV29
  ENST ID: ENST00000406427
  CDS Start-End: 338-4366
gctgcccccatccccgccgcgctgggcctggctcctcttgacctgcttggatacgccccatctggctgctgttctgggttccgggacagccacgtgagggctgtttacagagggaaggaggtggctcctagcagatgacagacacttctcaaaagacagcttttcttcctggagaacagactttttcagcaggattttcctttcagtgaaacataatttgacttgaaaggaacccagggaaaagtgtccaggtgtgagcatgagcgggtagaggtgtgcccttgtttgcttcaggctgtctgcttttcgcccctgactgttttttctgtttctggccatggaggaagagaaagatgacagcccacaggctgacttctgcctgggcaccgccctgcactcttggggactgtggttcacggaggaaggttcaccgtccaccatgctgacggggattgcagttggagccctcctggccctggccttggttggtgtcctcatccttttcatgttcagaaggcttagacaatttcgacaagcacagcccactcctcagtaccggttccggaagagagacaaagtgatgttttacggccggaagatcatgaggaaggtgaccacactccccaacacccttgtggagaacactgccctgccccggcagcgggccaggaagaggaccaaggtgctgtctttggccaagaggattctgcgtttcaagaaggaatacccggccctgcagcccaaggagcccccgccctccctgctggaggccgacctcacggagtttgacgtgaagaattctcacctgccatcggaagttctgtacatgctgaaaaacgttcgggtcctgggccactttgagaagccgctgttcctggagctttgcaaacacatcgtctttgtgcagctgcaggaaggggagcacgtcttccagcccagggagccggaccccagcatctgtgtggtgcaggacgggcggctggaggtctgcatccaggacactgacggcaccgaggtggtggtgaaagaggttctggcgggagacagcgtccacagcctgctcagcatcctggacatcatcaccggccatgctgcaccttacaaaacggtctccgtccgcgcggccatcccgtccaccatcctccggcttccagctgcggcttttcatggagtttttgagaaatatccggaaactctggtgagggtggtgcagatcatcatggtgcggctgcagagggtgacctttctggctctgcacaactacctcggcctgaccacagagctcttcaacgctgagagccaggccatccctctcgtgtctgtagccagtgtggctgccgggaaggccaagaagcaggtgttctatggcgaagaagagcggcttaaaaagccaccgcggctccaggagtcctgtgactcagatcacgggggcggccgcccggcagctgctgggcccctgctgaagaggagccactccgtccccgcgccttccattcgcaaacagatcttggaggagctggagaagcccggggcaggtgaccctgacccttcggccccacaagggggcccaggcagtgccacttctgatctggggatggcatgtgaccgtgccagggtcttcctgcactcggacgagcaccccgggagctccgtggccagcaagtccaggaaaagcgtgatggttgcagagataccctccacggtctcccagcactcagagagtcacacggatgagaccctggccagcaggaagtcggatgccatcttcagagctgccaagaaggacctgctcaccctgatgaagctggaagactcatctctgttggatggccgggtggcgcttctgcacgttcctgcaggcacggtggtgtcaaggcagggagaccaggacgccagcatcctgttcgtggtctcggggctgctgcacgtgtaccagcggaagatcggcagccaggaggacacctgcttgttcctcacgcgccccggggagatggtgggccagctggccgtgctcaccggggagcctctcatcttcaccgtcaaggccaacagggactgcagcttcctgtccatctccaaggcccacttctatgaaatcatgcggaagcagccgaccgtcgtcctgggtgtggcgcacactgtggtgaagaggatgtcgtccttcgtgcggcaaatcgactttgccctggactgggtggaggtggaggccgggcgagcaatatacaggcagggggacaagtccgactgcacgtacatcatgctcagcggccggctgcgctctgtgatccggaaggatgatgggaagaagcgcctggccggggagtacggccgaggagacctcgtcggcgtggtggagacactgacccaccaggcccgggcgaccacggtgcatgccgttcgggactcagaattggccaagctgccggcaggagccctcacgtccatcaagcgcaggtacccacaggtggtgactcggctgattcatctcttgggtgagaagatcctgggcagcctccagcagggacctgtgacaggccaccagcttgggctccccacggagggcagcaagtgggacttggggaacccggctgtcaacctgtccacggtggcagtgatgcccgtgtcagaggaagtgcccctcaccgccttcgccctggagctggagcatgccctcagcgccatcggcccgaccctgctgctgactagtgacaacataaaacggcgccttggctccgctgccctggacagtgttcacgagtaccggctgtccagctggctggggcagcaggaggacacccacaggatcgtgctctaccaggcagatggcacgctcacaccctggacccagcgctgcgtgcgccaggccgactgcatcctcatcgtgggcctgggtgaccaggagcccacagtgggcgagctggagcggatgctggagagcacagctgtgcgtgcccagaagcagctgatcctgctgcacagggaggagggcccggcgccagcgcgcaccgtggagtggctcaacatgcggagctggtgctccggccacctgcacctctgctgcccgcgccgcgtcttctccaggaggagcctgcccaagctggtggagatgtacaagcatgtcttccagcggcccccggaccgacactcagacttctcccgcctggcgagggtgctgacgggcaacgccattgccctggtgcttgggggagggggagcaagaggctgtgcccaggtgggcgttctcaaggccttggcggagtgcggcatccctgtggacatggtgggaggcacgtccatcggggccttcgtgggtgccctgtactctgaggagcggaactacagccagatgcggatccgggccaagcagtgggccgagggcatgacgtccttgatgaaggccgcgctggacctcacctaccccatcacgtccatgttctccggagccggcttcaacagcagcatcttcagcgtcttcaaggaccagcagatcgaggacctgtggattccttatttcgccatcaccaccgacatcacagcctcggccatgcgggtccacaccgacggctccctgtggtggtacgtgcgtgccagcatgtccctgtccggttacatgccccctctctgtgacccgaaggacggacacctgctgatggacgggggctacatcaacaacctcccagcggatgtggcccggtccatgggggcaaaagtggtgatcgccattgacgtgggcagccgagatgagacggacctcaccaactatggggatgcgctgtctgggtggtggctgctgtggaaacgctggaaccccttggccacgaaagtcaaggtgttgaacatggcagagattcagacgcgcctggcctacgtgtgttgcgtgcggcagctggaggtggtgaagagcagtgactactgcgagtacctgcgcccccccatcgacagctacagcaccctggacttcggcaagttcaacgagatctgcgaagtgggctaccagcacgggcgcacggtgtttgacatctggggccgcagcggcgtgctggagaagatgctccgcgaccagcaggggccgagcaagaagcccgcgagtgcggtcctcacctgtcccaacgcctccttcacggaccttgccgaaattgtgtctcgcattgagcccgccaagcccgccatggtggatgacgaatctgactaccagacggagtacgaggaggagctgctggacgtccccagggatgcatacgcagacttccagagcacctcagcccagcagggctcagacttggaggacgagtcctcactgcggcatcgacaccccagtctggctttcccaaaactgtctgagggctcctctgaccaggacgggtagaggcctctgctaaagagcccggatgcagcgtcttccgtgggactgtccccaaggctgaggctcctgccaagtcctaggggcctctgtacctgccctgctggaagccctgacttccccggggccccaggctgtgttagggttctctgggcctcttctttgtaccagcagccctgcatacagggccctgtgagcccccctgcagtcctgtgaggcccctgaagctctgtgaggcccctgaagctctgtgaaccccctgcagccctgtgaggccccccgaagccctgtgaggccccccgaagccctgtgaaccacctgctgccctgtgaggcccccaaagccctgtgaactgcctgctgtcctgtgaactgcctgctgccctgtgaggtgtgggagccctgatgctgccgtgtgatgtttcaataaaggtggatctcactgtt

SEQ ID NO: 163896 - DNA, 874 bp, Homo sapiens
  Payload ID: 12271
  Gene Symbol: PNPLA7
  Gene Name: patatin-like phospholipase domain containing 7
  ENST ID: ENST00000491019
  CDS Start-End: 42-644
ccctcctggccctggccttggttggtgtcctcatccttttcatgttcagaaggcttagacaatttcgacaagcacagcccactcctcagtaccggttccggaagagagacaaagtgatgttttacggccggaagatcatgaggaaggtgaccacactccccaacacccttgtggagaacactgccctgccccggcagcgggccaggaagaggaccaaggtgctgtctttggccaagaggattctgcgtttcaagaaggaatacccggccctgcagcccaaggagcccccgccctccctgctggaggccgacctcacggagtttgacgtgaagaattctcacctgccatcggaagttctgtacatgctgaaaaacgttcgggtcctgggccactttgagaagccgctgttcctggagctttgcaaacacatcgtctttgtgcagctgcaggaaggggagcacgtcttccagcccagggagccggaccccagcatctgtgtggtgcaggacgggcggctggaggtctgcatccaggacactgtgcctgctgctctcatggcgcctcagaggtgcaggcccgtggccccactgccctgggctgggctgagcctccgccaggccccgcggtcgcagccccagacctgacggcacccactctgctctccaagcgcaggacggcaccgaggtggtggtgaaagaggttctggcgggagacagcgtccacagcctgctcagcatcctggacatcatcaccggccatgctgcaccttacaaaacggtctccgtccgcgcggccatcccgtccaccatcctccggcttccagctgcggcttttcatggagtttttgagaaatatccggaaactctggtgaggg

SEQ ID NO: 163897 - DNA, 3490 bp, Homo sapiens
  Payload ID: 12272
  Gene Symbol: PNPLA8
  Gene Name: patatin-like phospholipase domain containing 8
  Uniprot ID: Q9NP80
  ENST ID: ENST00000257694
  CDS Start-End: 296-2644
acttccgctgggggcggagcggggcggggctgagtgggtggcgacctagctgctgcgccagtgtttgtgttggaagctcagctgatgcaggccggttggagtggacgtcattgccgggaacgagcgagtcgccgctgcagccctagtgactgcggcctgcatcccgattgtcttctcctccaaggtctacatgattacctgaagtttaataagtaagaccatgaattatggcatttcttaaatgaagcgttcaagaagtgagagaatgtcatagaaaataaatgatttttaagttatgtctattaatctgactgtagatatatatatttacctccttagtaatgcaagaagtgtttgtgggaagcagagaagcaagcaactgtatttcttgttctcacctaagcattactggaggataagccacatcagtctacaaagaggttttcatacaaacataataagatgtaaatggaccaaaagtgaagcacattcttgcagtaagcactgttactctccaagcaaccatggtttacatattgggattttgaaacttagcacttctgctcccaagggacttacaaaagtgaacatttgtatgtcccgtattaaaagtactttgaactctgtttcaaaggctgtttttggcaatcaaaatgaaatgatttcacgtttagctcaatttaagccaagttcccaaattttaagaaaagtatcggatagtggctggttaaaacagaaaaacatcaaacaagccatcaaatctctgaaaaaatatagtgacaaatcagcagaaaagagtccttttccagaagagaaaagtcacattatagacaaagaagaagatataggtaaacgcagtctttttcattacacaagttctataaccacaaaatttggagactcattctactttttatcaaatcatattaattcatatttcaaacgtaaggaaaaaatgtctcaacaaaaggaaaatgaacatttccgggacaaatcagaacttgaagataaaaaggtagaagaggggaaattaagatctccagatcctggcatcctggcttataagccaggctcagaatctgtacatacggtggacaagcctacaagtccttctgcgatacctgatgttcttcaagtttcaactaaacaaagtattgctaactttctttctcgtcccacggaaggtgtacaagctttagtaggtggttatattggtggacttgtccccaaattaaagtatgattcaaagagtcagtcagaagaacaggaagagcctgctaaaactgatcaggctgtcagcaaagacagaaatgcagaggagaaaaagcgtttatctcttcagcgagaaaagattatcgcaagggtgagtattgataacaggacccgggcattagttcaggcattaagaagaacaactgacccaaagctctgcattactagggttgaagaactgacttttcatcttctagaatttcctgaaggaaaaggagtggctgtcaaggaaagaattattccatatttattacgactgagacaaattaaggatgaaactcttcaggctgcagttagagaaattttggccctaattggctatgtggatccagtgaaagggagaggaatccgaattctctcaattgatggtggaggaacaaggggcgtggttgctctccagaccctacgaaaattagttgaacttactcagaagccagttcatcagctctttgattacatttgtggtgtaagcacaggtgccatattagctttcatgttggggttgtttcatatgcccttggatgaatgtgaggaactttatcgaaaattaggatcagatgtattttcacaaaatgtcattgttggaacagtaaaaatgagttggagccatgcattttatgacagtcaaacatgggaaaacattcttaaggataggatgggatctgcactgatgattgaaacagcaagaaaccccacatgtcctaaggtagctgctgtaagtaccatagtaaatagagggataacacccaaagcttttgtgttcagaaactatggtcattttcctggaatcaactctcattatttgggaggctgtcagtataaaatgtggcaggccattagagcctcatctgctgctccaggctactttgcagaatatgcattgggaaatgatcttcatcaagatggaggtttgcttctgaataacccttcggcattagctatgcatgagtgtaaatgtctttggccagatgtgccgttagagtgcatagtatccctgggcactggacgttatgagagtgatgtgagaaacacggtaacatacacaagcttgaaaactaaactttctaatgttatcaacagtgctacagatacagaagaagtccatataatgcttgatggcctgttacctcctgacacctattttagattcaatcctgtaatgtgtgaaaacatacctctagatgaaagtcgaaatgaaaagctggatcagctgcagttggaagggttgaaatacatagaaagaaatgaacaaaaaatgaaaaaagttgcaaaaatattaagtcaagaaaaaacaactctgcagaaaattaatgattggataaaattaaaaactgatatgtatgaaggacttccattcttttcaaaattgtgatgagtatatgcttatgttctcataaatgaaggtctgtttagaagatcaaccacattcaataaggaattgtggggttcgacatgagttaactttgaaatacgtatgaattctggagaatcctgaaaaagacggtgcttcaaccagcttgcatagcacagagaatattcttggttacagaattcatatgggaactaggcttttaagatgttaataattagctaagctttagtaacccttactgtgctagtagattttagtagatattggtgttatattgtttgatgtttgaaaatatattaatatatgtgccgaacaagaaaccgaaagctatattgtactgtgtatttttactttagtcctcataatcatgttgaatttatgtgatcattgattttatttcatatggaaaagctaatttcttcttaaatttacattacctaatattctcactagctatgttctccaatccacactgccttttattgtaatatcatctaaatagatgcagaaaaatggaattttctctattaaagtattttacatttgacataaaaaagaaccagatacagttttctattcagatatgtttattttaacattgtttggttaaaaaaggtgaagttccagtcaaccactttttacccctgaaatttcaagataatgctatattaacttttccagatctaacactagcttattcttccctgttataaaatggtttgaacttactgaggagatattcctatcattaacaaaaataaactatttaaataatctgttgttaaaaggctaatgtcattttaaaattaatttttgttcataatgtagctcccctttagcctttga

SEQ ID NO: 163898 - DNA, 3366 bp, Homo sapiens
  Payload ID: 12272
  Gene Symbol: PNPLA8
  Gene Name: patatin-like phospholipase domain containing 8
  Uniprot ID: Q9NP80
  ENST ID: ENST00000453144
  CDS Start-End: 544-2592
atgctctattgcgcatatctcggggcgggggaggaacggagattgacaaggaggcagaggcctgagcgaggcggaaaatcctcaccccggcccgcgggtagacccaaacttctagcgcgtcacttccgctgggggcggagcggggcggggctgagtgggtggcgacctagctgctgcgccagtgtttgtgttggaagctcagctgatgcaggccggttggagtggacgtcattgccgggaacgagcgagtcgccgctgcagccctagtgactgcggcctgcatcccgtaatgcaagaagtgtttgtgggaagcagagaagcaagcaactgtatttcttgttctcacctaagcattactggaggataagccacatcagtctacaaagaggttttcatacaaacataataagatgtaaatggaccaaaagtgaagcacattcttgcagtaagcactgttactctccaagcaaccatggtttacatattgggattttgaaacttagcacttctgctcccaagggacttacaaaagtgaacatttgtatgtcccgtattaaaagtactttgaactctgtttcaaaggctgtttttggcaatcaaaatgaaatgatttcacgtttagctcaatttaagccaagttcccaaattttaagaaaagtatcggatagtggctggttaaaacagaaaaacatcaaacaagccatcaaatctctgaaaaaatatagtgacaaatcagcagaaaagagtccttttccagaagagaaaagtcacattatagacaaagaagaagatataggtaaacgcagtctttttcattacacaagttctataaccacaaaatttggagactcattctactttttatcaaatcatattaattcatatttcaaacgtaaggaaaaaatgtctcaacaaaaggaaaatgaacatttccgggacaaatcagaacttgaagataaaaaggtagaagaggggaaattaagatctccagatcctggcatcctggcttataagccaggctcagaatctgtacatacggtggacaagcctacaagtccttctgcgatacctgatgttcttcaagtttcaactaaacaaagtattgctaactttctttctcgtcccacggaaggtgtacaagctttagtaggtggttatattggtggacttgtccccaaattaaagtatgattcaaagagtcagtcagaagaacaggaagagcctgctaaaactgatcaggctgtcagcaaagacagaaatgcagaggagaaaaagcgtttatctcttcagcgagaaaagattatcgcaagggtgagtattgataacaggacccgggcattagttcaggcattaagaagaacaactgacccaaagctctgcattactagggttgaagaactgacttttcatcttctagaatttcctgaaggaaaaggagtggctgtcaaggaaagaattattccatatttattacgactgagacaaattaaggatgaaactcttcaggctgcagttagagaaattttggccctaattggctatgtggatccagtgaaagggagaggaatccgaattctctcaattgatggtggaggaacaaggggcgtggttgctctccagaccctacgaaaattagttgaacttactcagaagccagttcatcagctctttgattacatttgtggtgtaagcacaggtgccatattagctttcatgttggggttgtttcatatgcccttggatgaatgtgaggaactttatcgaaaattaggatcagatgtattttcacaaaatgtcattgttggaacagtaaaaatgagttggagccatgcattttatgacagtcaaacatgggaaaacattcttaaggataggatgggatctgcactgatgattgaaacagcaagaaaccccacatgtcctaaggtagctgctgtaagtaccatagtaaatagagggataacacccaaagcttttgtgttcagaaactatggtcattttcctggaatcaactctcattatttgggaggctgtcagtataaaatgtggcaggccattagagcctcatctgctgctccaggctactttgcagaatatgcattgggaaatgatcttcatcaagatggaggtttgcttctgaataacccttcggcattagctatgcatgagtgtaaatgtctttggccagatgtgccgttagagtgcatagtatccctgggcactggacgttatgagagtgatgtgagaaacacggtaacatacacaagcttgaaaactaaactttctaatgttatcaacagtgctacagatacagaagaagtccatataatgcttgatggcctgttacctcctgacacctattttagattcaatcctgtaatgtgtgaaaacatacctctagatgaaagtcgaaatgaaaagctggatcagctgcagttggaagggttgaaatacatagaaagaaatgaacaaaaaatgaaaaaagttgcaaaaatattaagtcaagaaaaaacaactctgcagaaaattaatgattggataaaattaaaaactgatatgtatgaaggacttccattcttttcaaaattgtgatgagtatatgcttatgttctcataaatgaaggtctgtttagaagatcaaccacattcaataaggaattgtggggttcgacatgagttaactttgaaatacgtatgaattctggagaatcctgaaaaagacggtgcttcaaccagcttgcatagcacagagaatattcttggttacagaattcatatgggaactaggcttttaagatgttaataattagctaagctttagtaacccttactgtgctagtagattttagtagatattggtgttatattgtttgatgtttgaaaatatattaatatatgtgccgaacaagaaaccgaaagctatattgtactgtgtatttttactttagtcctcataatcatgttgaatttatgtgatcattgattttatttcatatggaaaagctaatttcttcttaaatttacattacctaatattctcactagctatgttctccaatccacactgccttttattgtaatatcatctaaatagatgcagaaaaatggaattttctctattaaagtattttacatttgacataaaaaagaaccagatacagttttctattcagatatgtttattttaacattgtttggttaaaaaaggtgaagttccagtcaaccactttttacccctgaaatttcaagataatgctatattaacttttccagatctaacactagcttattcttccctgttataaaatggtttgaacttactgaggagatattcctatcattaacaaaaataaactatttaaataa

SEQ ID NO: 163899 - DNA, 568 bp, Homo sapiens
  Payload ID: 12272
  Gene Symbol: PNPLA8
  Gene Name: patatin-like phospholipase domain containing 8
  ENST ID: ENST00000415498
  CDS Start-End: 404-568
aggggatgaaagagcataagcggagagggaatggtggtgctctctccttgaccatactttagttaggctcctctgagccctcttcccaactaggcctcatccttgggcccctgtcttaggcctgctgagtccagttttagcaagaatcttgcaaagtcagtttagagagtatctcctagccttgataattgatcatctccgcctgtcttcagcaagaatcttagtgttatacagctggaatcatactgctatggtccgaatgtttgtgcctctcaaaattcatgtggaaatcataaccgctaaagtgatggtattaagaggtaagaccatgaattatggcatttcttaaatgaagcgttcaagaagtgagagaatgtcatagaaaataaatgatttttaagttatgtctattaatctgactgtagatatatatatttacctccttagtaatgcaagaagtgtttgtgggaagcagagaagcaagcaactgtatttcttgttctcacctaagcattactggaggataagccacatcagtctacaaagaggttttcatacaaacataata

SEQ ID NO: 163900 - DNA, 4268 bp, Homo sapiens
  Payload ID: 12272
  Gene Symbol: PNPLA8
  Gene Name: patatin-like phospholipase domain containing 8
  Uniprot ID: Q9NP80
  ENST ID: ENST00000426128
  CDS Start-End: 127-2289
gcgagtcgccgctgcagccctagtgactgcggcctgcatcccggtaagaccatgaattatggcatttcttaaatgaagcgttcaagaagtgagagaatgtcatagaaaataaatgatttttaagttatgtctattaatctgactgtagatatatatatttacctccttagtaatgcaagaagtgtttgtgggaagcagagaagcaagcaactgtatttcttgttctcacctaagcattactggaggataagccacatcagtctacaaagaggttttcatacaaacataataagatgtaaatggaccaaaagtgaagcacattcttgcagtaagcactgttactctccaagcaaccatggtttacatattgggattttgaaacttagcacttctgctcccaagggacttacaaaagtgaacatttgtatgtcccgtattaaaagtactttgaactctgtttcaaaggctgtttttggcaatcaaaatgaaatgatttcacgtttagctcaatttaagccaagttcccaaattttaagaaaagtatcggatagtggctggttaaaacagaaaaacatcaaacaagccatcaaatctctgaaaaaatatagtgacaaatcagcagaaaagagtccttttccagaagagaaaagtcacattatagacaaagaagaagatataggtaaacgcagtctttttcattacacaagttctataaccacaaaatttggagactcattctactttttatcaaatcatattaattcatatttcaaacgtaaggaaaaaatgtctcaacaaaaggaaaatgaacatttccgggacaaatcagaacttgaagataaaaaggtagaagaggggaaattaagatctccagatcctggcatcctggcttataagccaggctcagaatctgtacatacggtggacaagcctacaagtccttctgcgatacctgatgttcttcaagtttcaactaaacaaagtattgctaactttctttctcgtcccacggaaggtgtacaagctttagtaggtggttatattggtggacttgtccccaaattaaagtatgattcaaagagtcagtcagaagaacaggaagagcctgctaaaactgatcaggctgtcagcaaagacagaaatgcagaggagaaaaagcgtttatctcttcagcgagaaaagattatcgcaagggtgagtattgataacaggacccgggcattagttcaggcattaagaagaacaactgacccaaagctctgcattactagggttgaagaactgacttttcatcttctagaatttcctgaaggaaaaggagtggctgtcaaggaaagaattattccatatttattacgactgagacaaattaaggatgaaactcttcaggctgcagttagagaaattttggccctaattggctatgtggatccagtgaaagggagaggaatccgaattctctcaattgatggtggaggaacaaggggcgtggttgctctccagaccctacgaaaattagttgaacttactcagaagccagttcatcagctctttgattacatttgtggtgtaagcacaggtgccatattagctttcatgttggggttgtttcatatgcccttggatgaatgtgaggaactttatcgaaaattaggatcagatgtattttcacaaaatgtcattgttggaacagtaaaaatgagttggagccatgcattttatgacagtcaaacatgggaaaacattcttaaggataggatgggatctgcactgatgattgaaacagcaagaaaccccacatgtcctaaggtagctgctgatggaggtttgcttctgaataacccttcggcattagctatgcatgagtgtaaatgtctttggccagatgtgccgttagagtgcatagtatccctgggcactggacgttatgagagtgatgtgagaaacacggtaacatacacaagcttgaaaactaaactttctaatgttatcaacagtgctacagatacagaagaagtccatataatgcttgatggcctgttacctcctgacacctattttagattcaatcctgtaatgtgtgaaaacatacctctagatgaaagtcgaaatgaaaagctggatcagctgcagttggaagggttgaaatacatagaaagaaatgaacaaaaaatgaaaaaagttgcaaaaatattaagtcaagaaaaaacaactctgcagaaaattaatgattggataaaattaaaaactgatatgtatgaaggacttccattcttttcaaaattgtgatgagtatatgcttatgttctcataaatgaaggtctgtttagaagatcaaccacattcaataaggaattgtggggttcgacatgagttaactttgaaatacgtatgaattctggagaatcctgaaaaagacggtgcttcaaccagcttgcatagcacagagaatattcttggttacagaattcatatgggaactaggcttttaagatgttaataattagctaagctttagtaacccttactgtgctagtagattttagtagatattggtgttatattgtttgatgtttgaaaatatattaatatatgtgccgaacaagaaaccgaaagctatattgtactgtgtatttttactttagtcctcataatcatgttgaatttatgtgatcattgattttatttcatatggaaaagctaatttcttcttaaatttacattacctaatattctcactagctatgttctccaatccacactgccttttattgtaatatcatctaaatagatgcagaaaaatggaattttctctattaaagtattttacatttgacataaaaaagaaccagatacagttttctattcagatatgtttattttaacattgtttggttaaaaaaggtgaagttccagtcaaccactttttacccctgaaatttcaagataatgctatattaacttttccagatctaacactagcttattcttccctgttataaaatggtttgaacttactgaggagatattcctatcattaacaaaaataaactatttaaataatctgttgttaaaaggctaatgtcattttaaaattaatttttgttcataatgtagctcccctttagcctttgaatacacctggcagcagtatgcttaaaaataagaagttagttgcctggcgcagtagctcacacctgtaatcccagcactttgggaggccgaggcaggcagatcacctgacgtcaggagtccaagaccagcctggccaacacggtgaaacctcgtctctaataaaaatacaaacattagcccggcatggtggtgcacacctatagtcccagctactcgggaggctaaggcaggagaatggcttgaacctgagagacggaggttgcagtgagccaaatagcgccagtgcactccagcctaggcgacacagcgagactccatctcaaaaaaaaaaaaaaaaaaaagaagaagttaggcttgttttaccttattaactcctttgaactgtctggatttcatggaagttggtaagatgcacttacatggaacattgttcatgccaaacaaactcatctttattgtatctatttgtcacataaatccttacatggaatgttttgatttcttaagaaaaatgaaacaaaggttagcgccccttgttttagacatacaaactaaagctagaccctgttgcccagatagtcatattgcttctttgcaatatcaattcacagaggctgtgagatgtggttcaaagagtggagtcgagagtctggatgctaatcctgcctttgctgcaagaacccttctgtttgttaccttgaggaaggcaaatgtctgtaggctttgcatatctcatttgtaaaatgaggaaaggtagctgtaaaattttctaacatccgaattatataaactttagacatagtataaaataggaaactaccaatgatttctaaagataatatagttctttcagaccacaaataatacataataacatgcaactaagaacaacttgtaaatgcaagaaaaaaacaaataattggaaatcagaatatttctgggaattcttcgtaataaagcaaatttcaagcacaataaagtaatatttatgcatatttacatatttgcacctcatcataaggtcactctagtcctaaactgatgtagttcatctgttttacagctgaagttaagtatgtcccttatttgtgcttggcttatttctttcttaaataatacattacacaagtgaa

SEQ ID NO: 163901 - DNA, 2326 bp, Homo sapiens
  Payload ID: 12272
  Gene Symbol: PNPLA8
  Gene Name: patatin-like phospholipase domain containing 8
  ENST ID: ENST00000453085
  CDS Start-End: 408-2326
aaggatgaaagcctgaactagagcagtggaaatgcgaatgtggagcagaggaacgattcaagaaattctgcggtaaaactcatcagacttcatgactgattaaagattgtcttctcctccaaggtctacatgattacctgaagtttaataataatgcaagaagtgtttgtgggaagcagagaagcaagcaactgtatttcttgttctcacctaagcattactggaggataagccacatcagtctacaaagaggttttcatacaaacataataagatgtaaatggaccaaaagtgaagcacattcttgcagtaagcactgttactctccaagcaaccatggtttacatattgggattttgaaacttagcacttctgctcccaagggacttacaaaagtgaacatttgtatgtcccgtattaaaagtactttgaactctgtttcaaaggctgtttttggcaatcaaaatgaaatgatttcacgtttagctcaatttaagccaagttcccaaattttaagaaaagtatcggatagtggctggttaaaacagaaaaacatcaaacaagccatcaaatctctgaaaaaatatagtgacaaatcagcagaaaagagtccttttccagaagagaaaagtcacattatagacaaagaagaagatataggtaaacgcagtctttttcattacacaagttctataaccacaaaatttggagactcattctactttttatcaaatcatattaattcatatttcaaacgtaaggaaaaaatgtctcaacaaaaggaaaatgaacatttccgggacaaatcagaacttgaagataaaaaggtagaagaggggaaattaagatctccagatcctggcatcctggcttataagccaggctcagaatctgtacatacggtggacaagcctacaagtccttctgcgatacctgatgttcttcaagtttcaactaaacaaagtattgctaactttctttctcgtcccacggaaggtgtacaagctttagtaggtggttatattggtggacttgtccccaaattaaagtatgattcaaagagtcagtcagaagaacaggaagagcctgctaaaactgatcaggctgtcagcaaagacagaaatgcagaggagaaaaagcgtttatctcttcagcgagaaaagattatcgcaagggtgagtattgataacaggacccgggcattagttcaggcattaagaagaacaactgacccaaagctctgcattactagggttgaagaactgacttttcatcttctagaatttcctgaaggaaaaggagtggctgtcaaggaaagaattattccatatttattacgactgagacaaattaaggatgaaactcttcaggctgcagttagagaaattttggccctaattggctatgtggatccagtgaaagggagaggaatccgaattctctcaattgatggtggaggaacaaggggcgtggttgctctccagaccctacgaaaattagttgaacttactcagaagccagttcatcagctctttgattacatttgtggtgtaagcacaggtgccatattagctttcatgttggggttgtttcatatgcccttggatgaatgtgaggaactttatcgaaaattaggatcagatgtattttcacaaaatgtcattgttggaacagtaaaaatgagttggagccatgcattttatgacagtcaaacatgggaaaacattcttaaggataggatgggatctgcactgatgattgaaacagcaagaaaccccacatgtcctaaggtagctgctgtaagtaccatagtaaatagagggataacacccaaagcttttgtgttcagaaactatggtcattttcctggaatcaactctcattatttgggaggctgtcagtataaaatgtggcaggccattagagcctcatctgctgctccaggctactttgcagaatatgcattgggaaatgatcttcatcaagatggaggtttgcttctgaataacccttcggcattagctatgcatgagtgtaaatgtctttggccagatgtgccgttagagtgcatagtatccctgggcactggacgttatgagagtgatgtgagaaacacggtaacatacacaagcttgaaaactaaactttctaatgttatcaacagtgctacagatacagaagaagtccatataatgcttgatggcctgttacctcctgacacctattttagattcaatcctgtaatgtgtgaaaacatacctctagatgaaagtcgaaatgaaaagctggatcagctgcagttggaagggttgaaatacatagaaag

SEQ ID NO: 163902 - DNA, 735 bp, Homo sapiens
  Payload ID: 12272
  Gene Symbol: PNPLA8
  Gene Name: patatin-like phospholipase domain containing 8
  ENST ID: ENST00000427008
  CDS Start-End: 158-735
ggaagctcagctgatgcaggccggttggagtggacgtcattgccgggaacgagcgagtcgccgctgcagccctagtaagaccatgaattatggcatttcttaaatgaagcgttcaagaagtgagagaatgtcatagaaaataaatgatttttaagttatgtctattaatctgactgtagatatatatatttacctccttagtaatgcaagaagtgtttgtgggaagcagagaagcaagcaactgtatttcttgttctcacctaagcattactggaggataagccacatcagtctacaaagaggttttcatacaaacataataagatgtaaatggaccaaaagtgaagcacattcttgcagtaagcactgttactctccaagcaaccatggtttacatattgggattttgaaacttagcacttctgctcccaagggacttacaaaagtgaacatttgtatgtcccgtattaaaagtactttgaactctgtttcaaaggctgtttttggcaatcaaaatgaaatgatttcacgtttagctcaatttaagccaagttcccaaattttaagaaaagtatcggatagtggctggttaaaacagaaaaacatcaaacaagccatcaaatctctgaaaaaatatagtgacaaatcagcagaaaagagtccttttccagaagagaaaagtcacattatagacaaagaagaagatataggtaaacgcagtctttttcattacac

SEQ ID NO: 163903 - DNA, 3462 bp, Homo sapiens
  Payload ID: 12272
  Gene Symbol: PNPLA8
  Gene Name: patatin-like phospholipase domain containing 8
  Uniprot ID: Q9NP80
  ENST ID: ENST00000436062
  CDS Start-End: 374-2722
gtcatgctctattgcgcatatctcggggcgggggaggaacggagattgacaaggaggcagaggcctgagcgaggcggaaaatcctcaccccggcccgcgggtagacccaaacttctagcgcgtcacttccgctgggggcggagcggggcggggctgagtgggtggcgacctagctgctgcgccagtgtttgtgttggaagctcagctgatgcaggccggttggagtggacgtcattgccgggaacgagcgagtcgccgctgcagccctagtgactgcggcctgcatcccggtaagaccatgaattatggcatttcttaaatgaagcgttcaagaagtgagagaatgtcatagaaaataaatgatttttaagttatgtctattaatctgactgtagatatatatatttacctccttagtaatgcaagaagtgtttgtgggaagcagagaagcaagcaactgtatttcttgttctcacctaagcattactggaggataagccacatcagtctacaaagaggttttcatacaaacataataagatgtaaatggaccaaaagtgaagcacattcttgcagtaagcactgttactctccaagcaaccatggtttacatattgggattttgaaacttagcacttctgctcccaagggacttacaaaagtgaacatttgtatgtcccgtattaaaagtactttgaactctgtttcaaaggctgtttttggcaatcaaaatgaaatgatttcacgtttagctcaatttaagccaagttcccaaattttaagaaaagtatcggatagtggctggttaaaacagaaaaacatcaaacaagccatcaaatctctgaaaaaatatagtgacaaatcagcagaaaagagtccttttccagaagagaaaagtcacattatagacaaagaagaagatataggtaaacgcagtctttttcattacacaagttctataaccacaaaatttggagactcattctactttttatcaaatcatattaattcatatttcaaacgtaaggaaaaaatgtctcaacaaaaggaaaatgaacatttccgggacaaatcagaacttgaagataaaaaggtagaagaggggaaattaagatctccagatcctggcatcctggcttataagccaggctcagaatctgtacatacggtggacaagcctacaagtccttctgcgatacctgatgttcttcaagtttcaactaaacaaagtattgctaactttctttctcgtcccacggaaggtgtacaagctttagtaggtggttatattggtggacttgtccccaaattaaagtatgattcaaagagtcagtcagaagaacaggaagagcctgctaaaactgatcaggctgtcagcaaagacagaaatgcagaggagaaaaagcgtttatctcttcagcgagaaaagattatcgcaagggtgagtattgataacaggacccgggcattagttcaggcattaagaagaacaactgacccaaagctctgcattactagggttgaagaactgacttttcatcttctagaatttcctgaaggaaaaggagtggctgtcaaggaaagaattattccatatttattacgactgagacaaattaaggatgaaactcttcaggctgcagttagagaaattttggccctaattggctatgtggatccagtgaaagggagaggaatccgaattctctcaattgatggtggaggaacaaggggcgtggttgctctccagaccctacgaaaattagttgaacttactcagaagccagttcatcagctctttgattacatttgtggtgtaagcacaggtgccatattagctttcatgttggggttgtttcatatgcccttggatgaatgtgaggaactttatcgaaaattaggatcagatgtattttcacaaaatgtcattgttggaacagtaaaaatgagttggagccatgcattttatgacagtcaaacatgggaaaacattcttaaggataggatgggatctgcactgatgattgaaacagcaagaaaccccacatgtcctaaggtagctgctgtaagtaccatagtaaatagagggataacacccaaagcttttgtgttcagaaactatggtcattttcctggaatcaactctcattatttgggaggctgtcagtataaaatgtggcaggccattagagcctcatctgctgctccaggctactttgcagaatatgcattgggaaatgatcttcatcaagatggaggtttgcttctgaataacccttcggcattagctatgcatgagtgtaaatgtctttggccagatgtgccgttagagtgcatagtatccctgggcactggacgttatgagagtgatgtgagaaacacggtaacatacacaagcttgaaaactaaactttctaatgttatcaacagtgctacagatacagaagaagtccatataatgcttgatggcctgttacctcctgacacctattttagattcaatcctgtaatgtgtgaaaacatacctctagatgaaagtcgaaatgaaaagctggatcagctgcagttggaagggttgaaatacatagaaagaaatgaacaaaaaatgaaaaaagttgcaaaaatattaagtcaagaaaaaacaactctgcagaaaattaatgattggataaaattaaaaactgatatgtatgaaggacttccattcttttcaaaattgtgatgagtatatgcttatgttctcataaatgaaggtctgtttagaagatcaaccacattcaataaggaattgtggggttcgacatgagttaactttgaaatacgtatgaattctggagaatcctgaaaaagacggtgcttcaaccagcttgcatagcacagagaatattcttggttacagaattcatatgggaactaggcttttaagatgttaataattagctaagctttagtaacccttactgtgctagtagattttagtagatattggtgttatattgtttgatgtttgaaaatatattaatatatgtgccgaacaagaaaccgaaagctatattgtactgtgtatttttactttagtcctcataatcatgttgaatttatgtgatcattgattttatttcatatggaaaagctaatttcttcttaaatttacattacctaatattctcactagctatgttctccaatccacactgccttttattgtaatatcatctaaatagatgcagaaaaatggaattttctctattaaagtattttacatttgacataaaaaagaaccagatacagttttctattcagatatgtttattttaacattgtttggttaaaaaaggtgaagttccagtcaaccactttttacccctgaaatttcaagataatgctatattaacttttccagatctaacactagcttattcttccctgttataaaatggtttgaacttactgaggagatat

SEQ ID NO: 163904 - DNA, 3530 bp, Homo sapiens
  Payload ID: 12272
  Gene Symbol: PNPLA8
  Gene Name: patatin-like phospholipase domain containing 8
  Uniprot ID: Q9NP80
  ENST ID: ENST00000422087
  CDS Start-End: 408-2756
acttccgctgggggcggagcggggcggggctgagtgggtggcgacctagctgctgcgccagtgtttgtgttggaagctcagctgatgcaggccggttggagtggacgtcattgccgggaacgagcgagtcgccgctgcagccctagtgactgcggcctgcatcccgattgtcttctcctccaaggtctacatgattacctgaagtttaataattttgcctttctagagtgttatacagctggaatcatactgctatggtccgaatgtttgtgcctctcaaaattcatgtggaaatcataaccgctaaagtgatggtattaagaggtaagaccatgaattatggcatttcttaaatgaagcgttcaagaagtgagagaatgtcatagaaaataaatgatttttaagttatgtctattaatctgactgtagatatatatatttacctccttagtaatgcaagaagtgtttgtgggaagcagagaagcaagcaactgtatttcttgttctcacctaagcattactggaggataagccacatcagtctacaaagaggttttcatacaaacataataagatgtaaatggaccaaaagtgaagcacattcttgcagtaagcactgttactctccaagcaaccatggtttacatattgggattttgaaacttagcacttctgctcccaagggacttacaaaagtgaacatttgtatgtcccgtattaaaagtactttgaactctgtttcaaaggctgtttttggcaatcaaaatgaaatgatttcacgtttagctcaatttaagccaagttcccaaattttaagaaaagtatcggatagtggctggttaaaacagaaaaacatcaaacaagccatcaaatctctgaaaaaatatagtgacaaatcagcagaaaagagtccttttccagaagagaaaagtcacattatagacaaagaagaagatataggtaaacgcagtctttttcattacacaagttctataaccacaaaatttggagactcattctactttttatcaaatcatattaattcatatttcaaacgtaaggaaaaaatgtctcaacaaaaggaaaatgaacatttccgggacaaatcagaacttgaagataaaaaggtagaagaggggaaattaagatctccagatcctggcatcctggcttataagccaggctcagaatctgtacatacggtggacaagcctacaagtccttctgcgatacctgatgttcttcaagtttcaactaaacaaagtattgctaactttctttctcgtcccacggaaggtgtacaagctttagtaggtggttatattggtggacttgtccccaaattaaagtatgattcaaagagtcagtcagaagaacaggaagagcctgctaaaactgatcaggctgtcagcaaagacagaaatgcagaggagaaaaagcgtttatctcttcagcgagaaaagattatcgcaagggtgagtattgataacaggacccgggcattagttcaggcattaagaagaacaactgacccaaagctctgcattactagggttgaagaactgacttttcatcttctagaatttcctgaaggaaaaggagtggctgtcaaggaaagaattattccatatttattacgactgagacaaattaaggatgaaactcttcaggctgcagttagagaaattttggccctaattggctatgtggatccagtgaaagggagaggaatccgaattctctcaattgatggtggaggaacaaggggcgtggttgctctccagaccctacgaaaattagttgaacttactcagaagccagttcatcagctctttgattacatttgtggtgtaagcacaggtgccatattagctttcatgttggggttgtttcatatgcccttggatgaatgtgaggaactttatcgaaaattaggatcagatgtattttcacaaaatgtcattgttggaacagtaaaaatgagttggagccatgcattttatgacagtcaaacatgggaaaacattcttaaggataggatgggatctgcactgatgattgaaacagcaagaaaccccacatgtcctaaggtagctgctgtaagtaccatagtaaatagagggataacacccaaagcttttgtgttcagaaactatggtcattttcctggaatcaactctcattatttgggaggctgtcagtataaaatgtggcaggccattagagcctcatctgctgctccaggctactttgcagaatatgcattgggaaatgatcttcatcaagatggaggtttgcttctgaataacccttcggcattagctatgcatgagtgtaaatgtctttggccagatgtgccgttagagtgcatagtatccctgggcactggacgttatgagagtgatgtgagaaacacggtaacatacacaagcttgaaaactaaactttctaatgttatcaacagtgctacagatacagaagaagtccatataatgcttgatggcctgttacctcctgacacctattttagattcaatcctgtaatgtgtgaaaacatacctctagatgaaagtcgaaatgaaaagctggatcagctgcagttggaagggttgaaatacatagaaagaaatgaacaaaaaatgaaaaaagttgcaaaaatattaagtcaagaaaaaacaactctgcagaaaattaatgattggataaaattaaaaactgatatgtatgaaggacttccattcttttcaaaattgtgatgagtatatgcttatgttctcataaatgaaggtctgtttagaagatcaaccacattcaataaggaattgtggggttcgacatgagttaactttgaaatacgtatgaattctggagaatcctgaaaaagacggtgcttcaaccagcttgcatagcacagagaatattcttggttacagaattcatatgggaactaggcttttaagatgttaataattagctaagctttagtaacccttactgtgctagtagattttagtagatattggtgttatattgtttgatgtttgaaaatatattaatatatgtgccgaacaagaaaccgaaagctatattgtactgtgtatttttactttagtcctcataatcatgttgaatttatgtgatcattgattttatttcatatggaaaagctaatttcttcttaaatttacattacctaatattctcactagctatgttctccaatccacactgccttttattgtaatatcatctaaatagatgcagaaaaatggaattttctctattaaagtattttacatttgacataaaaaagaaccagatacagttttctattcagatatgtttattttaacattgtttggttaaaaaaggtgaagttccagtcaaccactttttacccctgaaatttcaagataatgctatattaacttttccagatctaacactagcttattcttccctgttataaaatggtttgaacttactgaggagatattcctatcattaacaaaaataaactatttaaataa

SEQ ID NO: 163905 - DNA, 8057 bp, Homo sapiens
  Payload ID: 12273
  Gene Symbol: PTCH1
  Gene Name: patched 1
  Uniprot ID: Q13635
  ENST ID: ENST00000331920
  CDS Start-End: 301-4644
gaactggatgtgggcagcggcggccgcagagacctcgggacccccgcgcaatgtggcaatggaaggcgcagggtctgactccccggcagcggccgcggccgcagcggcagcagcgcccgccgtgtgagcagcagcagcggctggtctgtcaaccggagcccgagcccgagcagcctgcggccagcagcgtcctcgcaagccgagcgcccaggcgcgccaggagcccgcagcagcggcagcagcgcgccgggccgcccgggaagcctccgtccccgcggcggcggcggcggcggcggcaacatggcctcggctggtaacgccgccgagccccaggaccgcggcggcggcggcagcggctgtatcggtgccccgggacggccggctggaggcgggaggcgcagacggacgggggggctgcgccgtgctgccgcgccggaccgggactatctgcaccggcccagctactgcgacgccgccttcgctctggagcagatttccaaggggaaggctactggccggaaagcgccgctgtggctgagagcgaagtttcagagactcttatttaaactgggttgttacattcaaaaaaactgcggcaagttcttggttgtgggcctcctcatatttggggccttcgcggtgggattaaaagcagcgaacctcgagaccaacgtggaggagctgtgggtggaagttggaggacgagtaagtcgtgaattaaattatactcgccagaagattggagaagaggctatgtttaatcctcaactcatgatacagacccctaaagaagaaggtgctaatgtcctgaccacagaagcgctcctacaacacctggactcggcactccaggccagccgtgtccatgtatacatgtacaacaggcagtggaaattggaacatttgtgttacaaatcaggagagcttatcacagaaacaggttacatggatcagataatagaatatctttacccttgtttgattattacacctttggactgcttctgggaaggggcgaaattacagtctgggacagcatacctcctaggtaaacctcctttgcggtggacaaacttcgaccctttggaattcctggaagagttaaagaaaataaactatcaagtggacagctgggaggaaatgctgaataaggctgaggttggtcatggttacatggaccgcccctgcctcaatccggccgatccagactgccccgccacagcccccaacaaaaattcaaccaaacctcttgatatggcccttgttttgaatggtggatgtcatggcttatccagaaagtatatgcactggcaggaggagttgattgtgggtggcacagtcaagaacagcactggaaaactcgtcagcgcccatgccctgcagaccatgttccagttaatgactcccaagcaaatgtacgagcacttcaaggggtacgagtatgtctcacacatcaactggaacgaggacaaagcggcagccatcctggaggcctggcagaggacatatgtggaggtggttcatcagagtgtcgcacagaactccactcaaaaggtgctttccttcaccaccacgaccctggacgacatcctgaaatccttctctgacgtcagtgtcatccgcgtggccagcggctacttactcatgctcgcctatgcctgtctaaccatgctgcgctgggactgctccaagtcccagggtgccgtggggctggctggcgtcctgctggttgcactgtcagtggctgcaggactgggcctgtgctcattgatcggaatttcctttaacgctgcaacaactcaggttttgccatttctcgctcttggtgttggtgtggatgatgtttttcttctggcccacgccttcagtgaaacaggacagaataaaagaatcccttttgaggacaggaccggggagtgcctgaagcgcacaggagccagcgtggccctcacgtccatcagcaatgtcacagccttcttcatggccgcgttaatcccaattcccgctctgcgggcgttctccctccaggcagcggtagtagtggtgttcaattttgccatggttctgctcatttttcctgcaattctcagcatggatttatatcgacgcgaggacaggagactggatattttctgctgttttacaagcccctgcgtcagcagagtgattcaggttgaacctcaggcctacaccgacacacacgacaatacccgctacagccccccacctccctacagcagccacagctttgcccatgaaacgcagattaccatgcagtccactgtccagctccgcacggagtacgacccccacacgcacgtgtactacaccaccgctgagccgcgctccgagatctctgtgcagcccgtcaccgtgacacaggacaccctcagctgccagagcccagagagcaccagctccacaagggacctgctctcccagttctccgactccagcctccactgcctcgagcccccctgtacgaagtggacactctcatcttttgctgagaagcactatgctcctttcctcttgaaaccaaaagccaaggtagtggtgatcttcctttttctgggcttgctgggggtcagcctttatggcaccacccgagtgagagacgggctggaccttacggacattgtacctcgggaaaccagagaatatgactttattgctgcacaattcaaatacttttctttctacaacatgtatatagtcacccagaaagcagactacccgaatatccagcacttactttacgacctacacaggagtttcagtaacgtgaagtatgtcatgttggaagaaaacaaacagcttcccaaaatgtggctgcactacttcagagactggcttcagggacttcaggatgcatttgacagtgactgggaaaccgggaaaatcatgccaaacaattacaagaatggatcagacgatggagtccttgcctacaaactcctggtgcaaaccggcagccgcgataagcccatcgacatcagccagttgactaaacagcgtctggtggatgcagatggcatcattaatcccagcgctttctacatctacctgacggcttgggtcagcaacgaccccgtcgcgtatgctgcctcccaggccaacatccggccacaccgaccagaatgggtccacgacaaagccgactacatgcctgaaacaaggctgagaatcccggcagcagagcccatcgagtatgcccagttccctttctacctcaacggcttgcgggacacctcagactttgtggaggcaattgaaaaagtaaggaccatctgcagcaactatacgagcctggggctgtccagttaccccaacggctaccccttcctcttctgggagcagtacatcggcctccgccactggctgctgctgttcatcagcgtggtgttggcctgcacattcctcgtgtgcgctgtcttccttctgaacccctggacggccgggatcattgtgatggtcctggcgctgatgacggtcgagctgttcggcatgatgggcctcatcggaatcaagctcagtgccgtgcccgtggtcatcctgatcgcttctgttggcataggagtggagttcaccgttcacgttgctttggcctttctgacggccatcggcgacaagaaccgcagggctgtgcttgccctggagcacatgtttgcacccgtcctggatggcgccgtgtccactctgctgggagtgctgatgctggcgggatctgagttcgacttcattgtcaggtatttctttgctgtgctggcgatcctcaccatcctcggcgttctcaatgggctggttttgcttcccgtgcttttgtctttctttggaccatatcctgaggtgtctccagccaacggcttgaaccgcctgcccacaccctcccctgagccaccccccagcgtggtccgcttcgccatgccgcccggccacacgcacagcgggtctgattcctccgactcggagtatagttcccagacgacagtgtcaggcctcagcgaggagcttcggcactacgaggcccagcagggcgcgggaggccctgcccaccaagtgatcgtggaagccacagaaaaccccgtcttcgcccactccactgtggtccatcccgaatccaggcatcacccaccctcgaacccgagacagcagccccacctggactcagggtccctgcctcccggacggcaaggccagcagccccgcagggacccccccagagaaggcttgtggccacccccctacagaccgcgcagagacgcttttgaaatttctactgaagggcattctggccctagcaatagggcccgctggggccctcgcggggcccgttctcacaaccctcggaacccagcgtccactgccatgggcagctccgtgcccggctactgccagcccatcaccactgtgacggcttctgcctccgtgactgtcgccgtgcacccgccgcctgtccctgggcctgggcggaacccccgagggggactctgcccaggctaccctgagactgaccacggcctgtttgaggacccccacgtgcctttccacgtccggtgtgagaggagggattcgaaggtggaagtcattgagctgcaggacgtggaatgcgaggagaggccccggggaagcagctccaactgagggtgattaaaatctgaagcaaagaggccaaagattggaaaccccccacccccacctctttccagaactgcttgaagagaactggttggagttatggaaaagatgccctgtgccaggacagcagttcattgttactgtaaccgattgtattattttgttaaatatttctataaatatttaagagatgtacacatgtgtaatataggaaggaaggatgtaaagtggtatgatctggggcttctccactcctgccccagagtgtggaggccacagtggggcctctccgtatttgtgcattgggctccgtgccacaaccaagcttcattagtcttaaatttcagcatatgttgctgctgcttaaatattgtataatttacttgtataattctatgcaaatattgcttatgtaataggattattttgtaaaggtttctgtttaaaatattttaaatttgcatatcacaaccctgtggtagtatgaaatgttactgttaactttcaaacacgctatgcgtgataatttttttgtttaatgagcagatatgaagaaagcacgttaatcctggtggcttctctaggtgtcgttgtgtgcggtcctcttgtttggctgtgcgtgtgaacacgtgtgtgagttcaccatgtactgtactgtgattttttttttgtcttgttttgtttctctacactgtctgtaacctgtagtaggctctgacctagtcaggctggaagcgtcaggatatcttttcttcgtgctggtgagggctggccctaaacatccacctaatcctttcaaatcagcccggcaaaagctagactctcctcgtgtctacggcatctcttatgatcattggctgccatccaggaccccaatttgtgcttcagggggataatctccttctctcggatcattgtgatggatgctggaacctcagggtatggagctcacatcagttcatcatggtgggtgttagagaattcggtgacatgcctagtgctgagccttggctgggccatgagagtctgtatactctaaaaagcatgcagcatggtgcccctcttctgaccaacacacacacgacccctcccccaacacccccaaattcaagagtggatgtggccctgtcacaggtagaaaaacctatttagttaattctttcttggcccacagtctcccagaaatgatgttttgagtccctatagtttaaactccctctcttaaatggagcagctggttgaggctttctagatctgtttgcatcttctttaaaactaagtggtgagcatgcattgtggtgtagaggcaggcattatgtaggataagagctccggggggattcttcatgcaccagtgtttagggtacgtgcttcctaagtaaatccaaacattgtctccatcctccccgtcattagtgctctttcaatgtgatgtgggaaagcaggaggatggacacaccccactgaaagatgtaggcaggggcaggtctctcaaccaggcatatttttaaaagttgcttctgtactggttctcttcttttgctctgaggtgtgggctccctcatctcgtaaccagagaccagcacatgtcagggaagcacccagtgtcggctccccatccaaatccacaccagcaccttgttacagacaagaagtcagaggaaagggcggggtccctgcagggctgaagcctaagctactgtgaggcgctcacgagtggcagctcctgttactcccttttaaattacctgggaaatcttaacagaaaggtaatgggcccccagaaatacccacagcatagtgacctcagaccctgatactcaccacaaaacttttaagatgctgattgggagccgcttgtggctgctgggtgtgtgtgtgtgtgtgtgcgtgcgtgcgtgtgtgtgtgtctctgctggggaccctggccacccccctgctgctgtcttggtgcctgtcacccacatggtctgccatcctaacacccagctctgctcagaaaacgtcctgcgtggaggagggatgatgcagaattctgaagtcgacttccctctggctcctggcgtgccctcgctcccttcctgagcccagctcgtgttgcgccggaggctgcgcggcccctgatttctgcatggtgtagaactttctccaatagtcacattggcaaagggagaactggggtgggcggggggtggggctggcagggaattagaatttctctctctcttttaatagttttattttgtctgtcctgtttgttcatttggatgttttaatttttaaaaaaaaaaaaactttgctgatatttataattttgtatcataagaatgttttcctctacagtatttgtcatgccagtttataacaaaaaaaaatgcagggattttatttctattggaaacattacagctatgttttacttttggacagaatttttatttgtatagagtgcttactaatgttaaatagttcagagtatataacatttacattaaggactcatggtaggttttagggtaaggagtttaaaggaaataaatattcaaactgggtctcattgccaattttggtggaaatgagtttgtgtcatttcaattacaaagataaaagtatgccatataatttatttatatgaagatttatttttgtagtgtacatagtagtcatcaagtcttttgacagaagtatatttttaaagaatttatatgtgatgaatccataatgtctggaactttgctgagacatgagtgggcacagttttcattgtaaattacagcaaggaaagaaaatgtttaacagtgttaagagagtcagagcagagtggatattcatgcgattatgaagtgtttattagttaccattggcgacctagcatgcttctcatttcaaaccttggaaggtgaaaatgtacaaactctctaaataattaatgttcaaacactgatagaaattctaacatgaataaaaaataatataacttgttggttatatctttgtttgtagaatgctttttttctttaaaatacttgggagagacagttagtgttggagccatcagaaactgttgtttcatcttgctgaccttgtgacactcttcttttttgctctatctgatggagagagttttaggttttcctcctttttgttttgtataaatagtgggtataagcatagctctgttacatggatgtattacaaagtgggggctgagcttttagtgtgatcatcacccaaatagtgtacattgtacccattaattaatttcttatcacctgaccctatttttgttttctcataccaagaaacttcctaagttaaccatcaaaattagtccttctgtcatctctcttagcatacttatttcccttatgtgatgcctaataatgagggaacataaataaagccaaattcaaagatga

SEQ ID NO: 163906 - DNA, 1058 bp, Homo sapiens
  Payload ID: 12273
  Gene Symbol: PTCH1
  Gene Name: patched 1
  ENST ID: ENST00000375271
  CDS Start-End: 1-1058
aaggctgaggttggtcatggttacatggaccgcccctgcctcaatccggccgatccagactgccccgccacagcccccaacaaaaattcaaccaaacctcttgatatggcccttgttttgaatggtggatgtcatggcttatccagaaagtatatgcactggcaggaggagttgattgtgggtggcacagtcaagaacagcactggaaaactcgtcagcgcccatgccctgcagaccatgttccagttaatgactcccaagcaaatgtacgagcacttcaaggggtacgagtatgtctcacacatcaactggaacgaggacaaagcggcagccatcctggaggcctggcagaggacatatgtggaggtggttcatcagagtgtcgcacagaactccactcaaaaggtgctttccttcaccaccacgaccctggacgacatcctgaaatccttctctgacgtcagtgtcatccgcgtggccagcggctacttactcatggttttgccatttctcgctcttggtgttggtgtggatgatgtttttcttctggcccacgccttcagtgaaacaggacagaataaaagaatcccttttgaggacaggaccggggagtgcctgaagcgcacaggagccagcgtggccctcacgtccatcagcaatgtcacagccttcttcatggccgcgttaatcccaattcccgctctgcgggcgttctccctccaggcagcggtagtagtggtgttcaattttgccatggttctgctcatttttcctgcaattctcagcatggatttatatcgacgcgaggacaggagactggatattttctgctgttttacaagcccctgcgtcagcagagtgattcaggttgaacctcaggcctacaccgacacacacgacaatacccgctacagccccccacctccctacagcagccacagctttgcccatgaaacgcagattaccatgcagtccactgtccagctccgcacggagtacgacccccacacgcacgtgtactacaccaccgctgagccgcgctccgagatctctgtgca

SEQ ID NO: 163907 - DNA, 4720 bp, Homo sapiens
  Payload ID: 12273
  Gene Symbol: PTCH1
  Gene Name: patched 1
  Uniprot ID: Q13635
  ENST ID: ENST00000375274
  CDS Start-End: 146-4486
acccaggagggctgtgctgatagcacgttcctcgagtttactttgctttccttgagtttattgtaaaggggtaaagttttcggatccgtcacgtgaccctgacaggtcctgcctatggcgcggcagaccacccacgccgagggccatggaactgcttaatagaaacaggcttgtaattgtgagtccgcgctgcactccgccgaaagcctccggcggcccagcgcgccggggtttttacactttccgttccttttgtaaagacggaggaggaggagaagaagaagaagaaaacggaggagaagaaaaagacgacaggggagacaaagagacccgcagcgacaaggggaaggctactggccggaaagcgccgctgtggctgagagcgaagtttcagagactcttatttaaactgggttgttacattcaaaaaaactgcggcaagttcttggttgtgggcctcctcatatttggggccttcgcggtgggattaaaagcagcgaacctcgagaccaacgtggaggagctgtgggtggaagttggaggacgagtaagtcgtgaattaaattatactcgccagaagattggagaagaggctatgtttaatcctcaactcatgatacagacccctaaagaagaaggtgctaatgtcctgaccacagaagcgctcctacaacacctggactcggcactccaggccagccgtgtccatgtatacatgtacaacaggcagtggaaattggaacatttgtgttacaaatcaggagagcttatcacagaaacaggttacatggatcagataatagaatatctttacccttgtttgattattacacctttggactgcttctgggaaggggcgaaattacagtctgggacagcatacctcctaggtaaacctcctttgcggtggacaaacttcgaccctttggaattcctggaagagttaaagaaaataaactatcaagtggacagctgggaggaaatgctgaataaggctgaggttggtcatggttacatggaccgcccctgcctcaatccggccgatccagactgccccgccacagcccccaacaaaaattcaaccaaacctcttgatatggcccttgttttgaatggtggatgtcatggcttatccagaaagtatatgcactggcaggaggagttgattgtgggtggcacagtcaagaacagcactggaaaactcgtcagcgcccatgccctgcagaccatgttccagttaatgactcccaagcaaatgtacgagcacttcaaggggtacgagtatgtctcacacatcaactggaacgaggacaaagcggcagccatcctggaggcctggcagaggacatatgtggaggtggttcatcagagtgtcgcacagaactccactcaaaaggtgctttccttcaccaccacgaccctggacgacatcctgaaatccttctctgacgtcagtgtcatccgcgtggccagcggctacttactcatgctcgcctatgcctgtctaaccatgctgcgctgggactgctccaagtcccagggtgccgtggggctggctggcgtcctgctggttgcactgtcagtggctgcaggactgggcctgtgctcattgatcggaatttcctttaacgctgcaacaactcaggttttgccatttctcgctcttggtgttggtgtggatgatgtttttcttctggcccacgccttcagtgaaacaggacagaataaaagaatcccttttgaggacaggaccggggagtgcctgaagcgcacaggagccagcgtggccctcacgtccatcagcaatgtcacagccttcttcatggccgcgttaatcccaattcccgctctgcgggcgttctccctccaggcagcggtagtagtggtgttcaattttgccatggttctgctcatttttcctgcaattctcagcatggatttatatcgacgcgaggacaggagactggatattttctgctgttttacaagcccctgcgtcagcagagtgattcaggttgaacctcaggcctacaccgacacacacgacaatacccgctacagccccccacctccctacagcagccacagctttgcccatgaaacgcagattaccatgcagtccactgtccagctccgcacggagtacgacccccacacgcacgtgtactacaccaccgctgagccgcgctccgagatctctgtgcagcccgtcaccgtgacacaggacaccctcagctgccagagcccagagagcaccagctccacaagggacctgctctcccagttctccgactccagcctccactgcctcgagcccccctgtacgaagtggacactctcatcttttgctgagaagcactatgctcctttcctcttgaaaccaaaagccaaggtagtggtgatcttcctttttctgggcttgctgggggtcagcctttatggcaccacccgagtgagagacgggctggaccttacggacattgtacctcgggaaaccagagaatatgactttattgctgcacaattcaaatacttttctttctacaacatgtatatagtcacccagaaagcagactacccgaatatccagcacttactttacgacctacacaggagtttcagtaacgtgaagtatgtcatgttggaagaaaacaaacagcttcccaaaatgtggctgcactacttcagagactggcttcagggacttcaggatgcatttgacagtgactgggaaaccgggaaaatcatgccaaacaattacaagaatggatcagacgatggagtccttgcctacaaactcctggtgcaaaccggcagccgcgataagcccatcgacatcagccagttgactaaacagcgtctggtggatgcagatggcatcattaatcccagcgctttctacatctacctgacggcttgggtcagcaacgaccccgtcgcgtatgctgcctcccaggccaacatccggccacaccgaccagaatgggtccacgacaaagccgactacatgcctgaaacaaggctgagaatcccggcagcagagcccatcgagtatgcccagttccctttctacctcaacggcttgcgggacacctcagactttgtggaggcaattgaaaaagtaaggaccatctgcagcaactatacgagcctggggctgtccagttaccccaacggctaccccttcctcttctgggagcagtacatcggcctccgccactggctgctgctgttcatcagcgtggtgttggcctgcacattcctcgtgtgcgctgtcttccttctgaacccctggacggccgggatcattgtgatggtcctggcgctgatgacggtcgagctgttcggcatgatgggcctcatcggaatcaagctcagtgccgtgcccgtggtcatcctgatcgcttctgttggcataggagtggagttcaccgttcacgttgctttggcctttctgacggccatcggcgacaagaaccgcagggctgtgcttgccctggagcacatgtttgcacccgtcctggatggcgccgtgtccactctgctgggagtgctgatgctggcgggatctgagttcgacttcattgtcaggtatttctttgctgtgctggcgatcctcaccatcctcggcgttctcaatgggctggttttgcttcccgtgcttttgtctttctttggaccatatcctgaggtgtctccagccaacggcttgaaccgcctgcccacaccctcccctgagccaccccccagcgtggtccgcttcgccatgccgcccggccacacgcacagcgggtctgattcctccgactcggagtatagttcccagacgacagtgtcaggcctcagcgaggagcttcggcactacgaggcccagcagggcgcgggaggccctgcccaccaagtgatcgtggaagccacagaaaaccccgtcttcgcccactccactgtggtccatcccgaatccaggcatcacccaccctcgaacccgagacagcagccccacctggactcagggtccctgcctcccggacggcaaggccagcagccccgcagggacccccccagagaaggcttgtggccacccccctacagaccgcgcagagacgcttttgaaatttctactgaagggcattctggccctagcaatagggcccgctggggccctcgcggggcccgttctcacaaccctcggaacccagcgtccactgccatgggcagctccgtgcccggctactgccagcccatcaccactgtgacggcttctgcctccgtgactgtcgccgtgcacccgccgcctgtccctgggcctgggcggaacccccgagggggactctgcccaggctaccctgagactgaccacggcctgtttgaggacccccacgtgcctttccacgtccggtgtgagaggagggattcgaaggtggaagtcattgagctgcaggacgtggaatgcgaggagaggccccggggaagcagctccaactgagggtgattaaaatctgaagcaaagaggccaaagattggaaaccccccacccccacctctttccagaactgcttgaagagaactggttggagttatggaaaagatgccctgtgccaggacagcagttcattgttactgtaaccgattgtattattttgttaaatatttctataaatatttaagagatgtacacatgtgtaatataggaaggaaggatgtaaagtggtatgatctg

SEQ ID NO: 163908 - DNA, 10631 bp, Homo sapiens
  Payload ID: 12273
  Gene Symbol: PTCH1
  Gene Name: patched 1
  ENST ID: ENST00000375290
  CDS Start-End: 1-1461
gggaaggctactggccggaaagcgccgctgtggctgagagcgaagtttcagagactcttatttaaactgggttgttacattcaaaaaaactgcggcaagttcttggttgtgggcctcctcatatttggggccttcgcggtgggattaaaagcagcgaacctcgagaccaacgtggaggagctgtgggtggaagttggaggacgagtaagtcgtgaattaaattatactcgccagaagattggagaagaggctatgtttaatcctcaactcatgatacagacccctaaagaagaaggtgctaatgtcctgaccacagaagcgctcctacaacacctggactcggcactccaggccagccgtgtccatgtatacatgtacaacagaggtaaacctcctttgcggtggacaaacttcgaccctttggaattcctggaagagttaaagaaaataaactatcaagtggacagctgggaggaaatgctgaataaggctgaggttggtcatggttacatggaccgcccctgcctcaatccggccgatccagactgccccgccacagcccccaacaaaaattcaaccaaacctcttgatatggcccttgttttgaatggtggatgtcatggcttatccagaaagtatatgcactggcaggaggagttgattgtgggtggcacagtcaagaacagcactggaaaactcgtcagcgcccatgccctgcagaccatgttccagttaatgactcccaagcaaatgtacgagcacttcaaggggtacgagtatgtctcacacatcaactggaacgaggacaaagcggcagccatcctggaggcctggcagaggacatatgtggaggtggttcatcagagtgtcgcacagaactccactcaaaaggtgctttccttcaccaccacgaccctggacgacatcctgaaatccttctctgacgtcagtgtcatccgcgtggccagcggctacttactcatgctcgcctatgcctgtctaaccatgctgcgctgggactgctccaagtcccagggtgccgtggggctggctggcgtcctgctggttgcactgtcagtggctgcaggactgggcctgtgctcattgatcggaatttcctttaacgctgcaacaactcaggttttgccatttctcgctcttggtgttggtgtggatgatgtttttcttctggcccacgccttcagtgaaacaggacagaataaaagaatcccttttgaggacaggaccggggagtgcctgaagcgcacaggagccagcgtggccctcacgtccatcagcaatgtcacagccttcttcatggccgcgttaatcccaattcccgctctgcgggcgttctccctccagtacatactgatggctcatcgaggccgactctcctttaatgataccctgtggtgtggtggtctgaaaagctacatgaggtttccttacgaggagtagccttgtagaaaatccagtgcgctaaattctcccaaggcagcggtagtagtggtgttcaattttgccatggttctgctcatttttcctgcaattctcagcatggatttatatcgacgcgaggacaggagactggatattttctgctgttttacaagcccctgcgtcagcagagtgattcaggttgaacctcaggcctacaccgacacacacgacaatacccgctacagccccccacctccctacagcagccacagctttgcccatgaaacgcagattaccatgcagtccactgtccagctccgcacggagtacgacccccacacgcacgtgtactacaccaccgctgagccgcgctccgagatctctgtgcagcccgtcaccgtgacacaggacaccctcagctgccagagcccagagagcaccagctccacaagggacctgctctcccagttctccgactccagcctccactgcctcgagcccccctgtacgaagtggacactctcatcttttgctgagaagcactatgctcctttcctcttgaaaccaaaagccaaggtagtggtgatcttcctttttctgggcttgctgggggtcagcctttatggcaccacccgagtgagagacgggctggaccttacggacattgtacctcgggaaaccagagaatatgactttattgctgcacaattcaaatacttttctttctacaacatgtatatagtcacccagaaagcagactacccgaatatccagcacttactttacgacctacacaggagtttcagtaacgtgaagtatgtcatgttggaagaaaacaaacagcttcccaaaatgtggctgcactacttcagagactggcttcagggacttcaggatgcatttgacagtgactgggaaaccgggaaaatcatgccaaacaattacaagaatggatcagacgatggagtccttgcctacaaactcctggtgcaaaccggcagccgcgataagcccatcgacatcagccagttgactaaacagcgtctggtggatgcagatggcatcattaatcccagcgctttctacatctacctgacggcttgggtcagcaacgaccccgtcgcgtatgctgcctcccaggccaacatccggccacaccgaccagaatgggtccacgacaaagccgactacatgcctgaaacaaggctgagaatcccggcagcagagcccatcgagtatgcccagttccctttctacctcaacggcttgcgggacacctcagactttgtggaggcaattgaaaaagtaaggaccatctgcagcaactatacgagcctggggctgtccagttaccccaacggctaccccttcctcttctgggagcagtacatcggcctccgccactggctgctgctgttcatcagcgtggtgttggcctgcacattcctcgtgtgcgctgtcttccttctgaacccctggacggccgggatcattgtgatggtcctggcgctgatgacggtcgagctgttcggcatgatgggcctcatcggaatcaagctcagtgccgtgcccgtggtcatcctgatcgcttctgttggcataggagtggagttcaccgttcacgttgctttggcctttctgacggccatcggcgacaagaaccgcagggctgtgcttgccctggagcacatgtttgcacccgtcctggatggcgccgtgtccactctgctgggagtgctgatgctggcgggatctgagttcgacttcattgtcaggtaagcaggcgtgtgcaaggagacatgttttagaaatcattgtgattgggccgggtgcagtggctcacgcctgtaatcccagcactttaggaggccgaggcgggtggatcagaaggtcaaggagttcaagaccagcctggccaagatggtgaaactcatctccactcaaaatacaaaaattagccgggcgtggtggtgggtgcctgtaatcccagctacttgggaggctgaggcagagaattgctcgaacccgggaggcggaggttgcagtgagctgagattgcgccactacactccagcctgggtgacagagcgagattctgtctcaaaaaaaaaaatattgttattagctcaggtgatcttcgttgcttatttccttctgtatctggtagattgcagcacctcgtcatcgtgactctgctttcttttgaacttgttaacgtagagatattcggaggtataaagacaagctctcttctagagctgtcttggggagtatcttgaaaacagaaggtaaaggatttggggctggcagcaaagacaactctgcagcttgaagccaaaggatcacccaataggtggcccattattgtctcgggttagaaacactgcagaaagaaatgccacatttgacctacgctccctctccttcaaactgtagaaaggaaaacttaaaaatacctaaaattgtcacctgactttattcttttaagaagtgaaaatgacgtgctcagatttcatattcgagtccccacaattaggaagcatttagcattggactttggtgtcaactcttgggaatctaagcctagtttggatctcaaggcaagtcgtttccagttgatttaattaagaatatgactttgtgaaatataaaagaacagtgagttttccttttgaaaagaatttgagaactgcagaggaggaaaccacttgcttctttgagcagcctccatggctttgtgagggacctgctcttggatagaactctgctactttatggagctctaaggccagaatcaccaataagtaaaagatagtccaggattagaaccatgacagggcagaaccagatgtgagaaatgattggtttgtttggcacgcttcagtactgagaggttgtgtgtgtgtgtgtgtgtgtgtgtgtgtcagagagagagatacgcttcttatcttcaagtaaaaagaagagggtttcaactagaagttttagccaaagttttattacgggaaagagatgagtccattggttggcctgtggcatagcccactgggcaatttggcatcatggaggccgccttcttagaatgagtgccaagcttgcttattgtagtttttgcatagagtgaatggtgaagtggaatcgctgtagaccagcgcttctcacaccgatgtgctgaggaatcatctgagggtctaagtgcagggccgatttcggggggcgggaggtgggatgagggctgggtctgcatctccagctacctccctgcaatgtccatggagctagacttctcagcacaaactactgctaagccagcaagccagttcctaaattcctgtttgccaataccaagtagagagttgcccaactgagttaaatgttttggtctgtgttttattttagttcttagtttgattttagcttttcctttgttcttagtatacactttttcaggcactaacgttatcattatgatataaaagctcaatgtcaagtagagtttcttttgcatatttactttctcgtttaacacaaatataacaagcaccccataagtgccatttgcacaacagcaaataatggggacccccatatccctctgtgtagcctaaggtcttttaggggagagacaagttcacaggcaaaaccaggggaaatgcaaggtgtgctggggtctcatgagttacaggagggtctcgctcagccttgtgggggatgctgaatgaggaaacttagcctgaattagagcccccagctggaaacctggcagctggaatcccagcgctctcctctcagccggggttgttcccgcccagaaatatcagggttcctctttcaagcacttaaaagggcttcccattttctaggatgggatggattaacctgataaaggcctcaccaaggtcaaataaatgagcagacactgtatatgctaagccgtcagaaatctaattggcctgtttatgcttcagctagatggatgggatgcaaatgtcttaatgtggctgctgatacatgccccagccgaaagttccagcagtttacattagaccaagacattggctgcttggtttttactaatgtagttcagaagtttctagtgtttacaatagctgtgaggtatttgtatttttatggggattctctctcctttcatctgatgtcaaaacatatatagacatggcagcactggttgcctgttccattttatgaaccagaggaccattaacagatagatatcttgccccccccttcccagaacatcctgagcctctcccctaccccagcccacttccatcagagttgccctagaaatcattagttccagaaacgcatccctgcgtggagtctgtgccctccagccatgcagagtgtctgccagaggctgtccctggctgacaggtttaccttggtattcatgaaggattccagaccttagccctcaatggtgggaaagcagaactacttctgcactctcctcctctgccatggtgctgcggcctttatgtttgaattggctgacgcaaaacaagagtattcagagatgctaaattgttcaacaaaagattggcccgcagagcagccccgccattgtggagtgccctcacccagcacaatgccccagctcccacagaatgggcagcattttctttgcagaaagctggttcctgtgttctaaaaaggttgcaattggagctatttggtaaaactggaactcacagaattctaggcagaaagttgtgattaatgaaaggccagggaaagccttacctgatatgctagagacttaattagagattctgccgtaagatgcagaagcatttcacagtggattagcagcctgcagaagtgggctgcttttcctcctgggctaaattgtttaaattctacacccttcacttcatttgtttgcttctgctgggttttcacgagcggggcccctcggcattgtgtttgtgctttcagtctgcccagccattcaggtcgcattccatatttttgtgtttgtgtaacacattcataaataacattacatgccatcagagttcagcaaattaacaaactaattttttttttcttcccttcatgaactaacactttgggttgtggaatgtagtcctcaaagtcataaggtaaagaaacaaaaagcaaaaactcaccttgtgttgaatgtgaactgcggttggataacagccttttcagtggggtgggttttgttcatttctggcgttgccatgctgctgtgtcgggcacacggagggtggcgcgatccaccctgtcacagcgcgtgttcccgtttcctcttgatctcccaggtatttctttgctgtgctggcgatcctcaccatcctcggcgttctcaatgggctggttttgcttcccgtgcttttgtctttctttggaccatatcctgaggtgtctccagccaacggcttgaaccgcctgcccacaccctcccctgagccaccccccagcgtggtccgcttcgccatgccgcccggccacacgcacagcgggtctgattcctccgactcggagtatagttcccagacgacagtgtcaggcctcagcgaggagcttcggcactacgaggcccagcagggcgcgggaggccctgcccaccaagtgatcgtggaagccacagaaaaccccgtcttcgcccactccactgtggtccatcccgaatccaggcatcacccaccctcgaacccgagacagcagccccacctggactcagggtccctgcctcccggacggcaaggccagcagccccgcagggacccccccagagaaggcttgtggccacccccctacagaccgcgcagagacgcttttgaaatttctactgaagggcattctggccctagcaatagggcccgctggggccctcgcggggcccgttctcacaaccctcggaacccagcgtccactgccatgggcagctccgtgcccggctactgccagcccatcaccactgtgacggcttctgcctccgtgactgtcgccgtgcacccgccgcctgtccctgggcctgggcggaacccccgagggggactctgcccaggctaccctgagactgaccacggcctgtttgaggacccccacgtgcctttccacgtccggtgtgagaggagggattcgaaggtggaagtcattgagctgcaggacgtggaatgcgaggagaggccccggggaagcagctccaactgagggtgattaaaatctgaagcaaagaggccaaagattggaaaccccccacccccacctctttccagaactgcttgaagagaactggttggagttatggaaaagatgccctgtgccaggacagcagttcattgttactgtaaccgattgtattattttgttaaatatttctataaatatttaagagatgtacacatgtgtaatataggaaggaaggatgtaaagtggtatgatctggggcttctccactcctgccccagagtgtggaggccacagtggggcctctccgtatttgtgcattgggctccgtgccacaaccaagcttcattagtcttaaatttcagcatatgttgctgctgcttaaatattgtataatttacttgtataattctatgcaaatattgcttatgtaataggattattttgtaaaggtttctgtttaaaatattttaaatttgcatatcacaaccctgtggtagtatgaaatgttactgttaactttcaaacacgctatgcgtgataatttttttgtttaatgagcagatatgaagaaagcacgttaatcctggtggcttctctaggtgtcgttgtgtgcggtcctcttgtttggctgtgcgtgtgaacacgtgtgtgagttcaccatgtactgtactgtgattttttttttgtcttgttttgtttctctacactgtctgtaacctgtagtaggctctgacctagtcaggctggaagcgtcaggatatcttttcttcgtgctggtgagggctggccctaaacatccacctaatcctttcaaatcagcccggcaaaagctagactctcctcgtgtctacggcatctcttatgatcattggctgccatccaggaccccaatttgtgcttcagggggataatctccttctctcggatcattgtgatggatgctggaacctcagggtatggagctcacatcagttcatcatggtgggtgttagagaattcggtgacatgcctagtgctgagccttggctgggccatgagagtctgtatactctaaaaagcatgcagcatggtgcccctcttctgaccaacacacacacgacccctcccccaacacccccaaattcaagagtggatgtggccctgtcacaggtagaaaaacctatttagttaattctttcttggcccacagtctcccagaaatgatgttttgagtccctatagtttaaactccctctcttaaatggagcagctggttgaggctttctagatctgtttgcatcttctttaaaactaagtggtgagcatgcattgtggtgtagaggcaggcattatgtaggataagagctccggggggattcttcatgcaccagtgtttagggtacgtgcttcctaagtaaatccaaacattgtctccatcctccccgtcattagtgctctttcaatgtgatgtgggaaagcaggaggatggacacaccccactgaaagatgtaggcaggggcaggtctctcaaccaggcatatttttaaaagttgcttctgtactggttctcttcttttgctctgaggtgtgggctccctcatctcgtaaccagagaccagcacatgtcagggaagcacccagtgtcggctccccatccaaatccacaccagcaccttgttacagacaagaagtcagaggaaagggcggggtccctgcagggctgaagcctaagctactgtgaggcgctcacgagtggcagctcctgttactcccttttaaattacctgggaaatcttaacagaaaggtaatgggcccccagaaatacccacagcatagtgacctcagaccctgatactcaccacaaaacttttaagatgctgattgggagccgcttgtggctgctgggtgtgtgtgtgtgtgtgtgcgtgcgtgcgtgtgtgtgtgtctctgctggggaccctggccacccccctgctgctgtcttggtgcctgtcacccacatggtctgccatcctaacacccagctctgctcagaaaacgtcctgcgtggaggagggatgatgcagaattctgaagtcgacttccctctggctcctggcgtgccctcgctcccttcctgagcccagctcgtgttgcgccggaggctgcgcggcccctgatttctgcatggtgtagaactttctccaatagtcacattggcaaagggagaactggggtgggcggggggtggggctggcagggaattagaatttctctctctcttttaatagttttattttgtctgtcctgtttgttcatttggatgttttaatttttaaaaaaaaaaaaactttgctgatatttataattttgtatcataagaatgttttcctctacagtatttgtcatgccagtttataacaaaaaaaaatgcagggattttatttctattggaaacattacagctatgttttacttttggacagaatttttatttgtatagagtgcttactaatgttaaatagttcagagtatataacatttacattaaggactcatggtaggttttagggtaaggagtttaaaggaaataaatattcaaactgggtctcattgccaattttggtggaaatgagtttgtgtcatttcaattacaaagataaaagtatgccatataatttatttatatgaagatttatttttgtagtgtacatagtagtcatcaagtcttttgacagaagtatatttttaaagaatttatatgtgatgaatccataatgtctggaactttgctgagacatgagtgggcacagttttcattgtaaattacagcaaggaaagaaaatgtttaacagtgttaagagagtcagagcagagtggatattcatgcgattatgaagtgtttattagttaccattggcgacctagcatgcttctcatttcaaaccttggaaggtgaaaatgtacaaactctctaaataattaatgttcaaacactgatagaaattctaacatgaataaaaaataatataacttgttggtt

SEQ ID NO: 163909 - DNA, 8049 bp, Homo sapiens
  Payload ID: 12273
  Gene Symbol: PTCH1
  Gene Name: patched 1
  Uniprot ID: Q13635
  ENST ID: ENST00000437951
  CDS Start-End: 495-4640
acccaggagggctgtgctgatagcacgttcctcgagtttactttgctttccttgagtttattgtaaaggggtaaagttttcggatccgtcacgtgaccctgacaggtcctgcctatggcgcggcagaccacccacgccgagggccatggaactgcttaatagaaacaggcttgtaattgtgagtccgcgctgcactccgccgaaagcctccggcggcccagcgcgccggggtttttacactttccgttccttttgtaaagacggaggaggaggagaagaagaagaagaaaacggaggagaagaaaaagacgacaggggagacaaagagacccgcagcgacaaggcaagggggagacgagggaagactgggagaagacggaggagcggaggacgaggaaaggggggccagggaaaaaaaaggaattgatgtgaaatccaagcccagcgtccgcgccatcggcacccgcgctccgagcaggggttgacggccggctatggggaaggctactggccggaaagcgccgctgtggctgagagcgaagtttcagagactcttatttaaactgggttgttacattcaaaaaaactgcggcaagttcttggttgtgggcctcctcatatttggggccttcgcggtgggattaaaagcagcgaacctcgagaccaacgtggaggagctgtgggtggaagttggaggacgagtaagtcgtgaattaaattatactcgccagaagattggagaagaggctatgtttaatcctcaactcatgatacagacccctaaagaagaaggtgctaatgtcctgaccacagaagcgctcctacaacacctggactcggcactccaggccagccgtgtccatgtatacatgtacaacaggcagtggaaattggaacatttgtgttacaaatcaggagagcttatcacagaaacaggttacatggatcagataatagaatatctttacccttgtttgattattacacctttggactgcttctgggaaggggcgaaattacagtctgggacagcatacctcctaggtaaacctcctttgcggtggacaaacttcgaccctttggaattcctggaagagttaaagaaaataaactatcaagtggacagctgggaggaaatgctgaataaggctgaggttggtcatggttacatggaccgcccctgcctcaatccggccgatccagactgccccgccacagcccccaacaaaaattcaaccaaacctcttgatatggcccttgttttgaatggtggatgtcatggcttatccagaaagtatatgcactggcaggaggagttgattgtgggtggcacagtcaagaacagcactggaaaactcgtcagcgcccatgccctgcagaccatgttccagttaatgactcccaagcaaatgtacgagcacttcaaggggtacgagtatgtctcacacatcaactggaacgaggacaaagcggcagccatcctggaggcctggcagaggacatatgtggaggtggttcatcagagtgtcgcacagaactccactcaaaaggtgctttccttcaccaccacgaccctggacgacatcctgaaatccttctctgacgtcagtgtcatccgcgtggccagcggctacttactcatgctcgcctatgcctgtctaaccatgctgcgctgggactgctccaagtcccagggtgccgtggggctggctggcgtcctgctggttgcactgtcagtggctgcaggactgggcctgtgctcattgatcggaatttcctttaacgctgcaacaactcaggttttgccatttctcgctcttggtgttggtgtggatgatgtttttcttctggcccacgccttcagtgaaacaggacagaataaaagaatcccttttgaggacaggaccggggagtgcctgaagcgcacaggagccagcgtggccctcacgtccatcagcaatgtcacagccttcttcatggccgcgttaatcccaattcccgctctgcgggcgttctccctccaggcagcggtagtagtggtgttcaattttgccatggttctgctcatttttcctgcaattctcagcatggatttatatcgacgcgaggacaggagactggatattttctgctgttttacaagcccctgcgtcagcagagtgattcaggttgaacctcaggcctacaccgacacacacgacaatacccgctacagccccccacctccctacagcagccacagctttgcccatgaaacgcagattaccatgcagtccactgtccagctccgcacggagtacgacccccacacgcacgtgtactacaccaccgctgagccgcgctccgagatctctgtgcagcccgtcaccgtgacacaggacaccctcagctgccagagcccagagagcaccagctccacaagggacctgctctcccagttctccgactccagcctccactgcctcgagcccccctgtacgaagtggacactctcatcttttgctgagaagcactatgctcctttcctcttgaaaccaaaagccaaggtagtggtgatcttcctttttctgggcttgctgggggtcagcctttatggcaccacccgagtgagagacgggctggaccttacggacattgtacctcgggaaaccagagaatatgactttattgctgcacaattcaaatacttttctttctacaacatgtatatagtcacccagaaagcagactacccgaatatccagcacttactttacgacctacacaggagtttcagtaacgtgaagtatgtcatgttggaagaaaacaaacagcttcccaaaatgtggctgcactacttcagagactggcttcagggacttcaggatgcatttgacagtgactgggaaaccgggaaaatcatgccaaacaattacaagaatggatcagacgatggagtccttgcctacaaactcctggtgcaaaccggcagccgcgataagcccatcgacatcagccagttgactaaacagcgtctggtggatgcagatggcatcattaatcccagcgctttctacatctacctgacggcttgggtcagcaacgaccccgtcgcgtatgctgcctcccaggccaacatccggccacaccgaccagaatgggtccacgacaaagccgactacatgcctgaaacaaggctgagaatcccggcagcagagcccatcgagtatgcccagttccctttctacctcaacggcttgcgggacacctcagactttgtggaggcaattgaaaaagtaaggaccatctgcagcaactatacgagcctggggctgtccagttaccccaacggctaccccttcctcttctgggagcagtacatcggcctccgccactggctgctgctgttcatcagcgtggtgttggcctgcacattcctcgtgtgcgctgtcttccttctgaacccctggacggccgggatcattgtgatggtcctggcgctgatgacggtcgagctgttcggcatgatgggcctcatcggaatcaagctcagtgccgtgcccgtggtcatcctgatcgcttctgttggcataggagtggagttcaccgttcacgttgctttggcctttctgacggccatcggcgacaagaaccgcagggctgtgcttgccctggagcacatgtttgcacccgtcctggatggcgccgtgtccactctgctgggagtgctgatgctggcgggatctgagttcgacttcattgtcaggtatttctttgctgtgctggcgatcctcaccatcctcggcgttctcaatgggctggttttgcttcccgtgcttttgtctttctttggaccatatcctgaggtgtctccagccaacggcttgaaccgcctgcccacaccctcccctgagccaccccccagcgtggtccgcttcgccatgccgcccggccacacgcacagcgggtctgattcctccgactcggagtatagttcccagacgacagtgtcaggcctcagcgaggagcttcggcactacgaggcccagcagggcgcgggaggccctgcccaccaagtgatcgtggaagccacagaaaaccccgtcttcgcccactccactgtggtccatcccgaatccaggcatcacccaccctcgaacccgagacagcagccccacctggactcagggtccctgcctcccggacggcaaggccagcagccccgcagggacccccccagagaaggcttgtggccacccccctacagaccgcgcagagacgcttttgaaatttctactgaagggcattctggccctagcaatagggcccgctggggccctcgcggggcccgttctcacaaccctcggaacccagcgtccactgccatgggcagctccgtgcccggctactgccagcccatcaccactgtgacggcttctgcctccgtgactgtcgccgtgcacccgccgcctgtccctgggcctgggcggaacccccgagggggactctgcccaggctaccctgagactgaccacggcctgtttgaggacccccacgtgcctttccacgtccggtgtgagaggagggattcgaaggtggaagtcattgagctgcaggacgtggaatgcgaggagaggccccggggaagcagctccaactgagggtgattaaaatctgaagcaaagaggccaaagattggaaaccccccacccccacctctttccagaactgcttgaagagaactggttggagttatggaaaagatgccctgtgccaggacagcagttcattgttactgtaaccgattgtattattttgttaaatatttctataaatatttaagagatgtacacatgtgtaatataggaaggaaggatgtaaagtggtatgatctggggcttctccactcctgccccagagtgtggaggccacagtggggcctctccgtatttgtgcattgggctccgtgccacaaccaagcttcattagtcttaaatttcagcatatgttgctgctgcttaaatattgtataatttacttgtataattctatgcaaatattgcttatgtaataggattattttgtaaaggtttctgtttaaaatattttaaatttgcatatcacaaccctgtggtagtatgaaatgttactgttaactttcaaacacgctatgcgtgataatttttttgtttaatgagcagatatgaagaaagcacgttaatcctggtggcttctctaggtgtcgttgtgtgcggtcctcttgtttggctgtgcgtgtgaacacgtgtgtgagttcaccatgtactgtactgtgattttttttttgtcttgttttgtttctctacactgtctgtaacctgtagtaggctctgacctagtcaggctggaagcgtcaggatatcttttcttcgtgctggtgagggctggccctaaacatccacctaatcctttcaaatcagcccggcaaaagctagactctcctcgtgtctacggcatctcttatgatcattggctgccatccaggaccccaatttgtgcttcagggggataatctccttctctcggatcattgtgatggatgctggaacctcagggtatggagctcacatcagttcatcatggtgggtgttagagaattcggtgacatgcctagtgctgagccttggctgggccatgagagtctgtatactctaaaaagcatgcagcatggtgcccctcttctgaccaacacacacacgacccctcccccaacacccccaaattcaagagtggatgtggccctgtcacaggtagaaaaacctatttagttaattctttcttggcccacagtctcccagaaatgatgttttgagtccctatagtttaaactccctctcttaaatggagcagctggttgaggctttctagatctgtttgcatcttctttaaaactaagtggtgagcatgcattgtggtgtagaggcaggcattatgtaggataagagctccggggggattcttcatgcaccagtgtttagggtacgtgcttcctaagtaaatccaaacattgtctccatcctccccgtcattagtgctctttcaatgtgatgtgggaaagcaggaggatggacacaccccactgaaagatgtaggcaggggcaggtctctcaaccaggcatatttttaaaagttgcttctgtactggttctcttcttttgctctgaggtgtgggctccctcatctcgtaaccagagaccagcacatgtcagggaagcacccagtgtcggctccccatccaaatccacaccagcaccttgttacagacaagaagtcagaggaaagggcggggtccctgcagggctgaagcctaagctactgtgaggcgctcacgagtggcagctcctgttactcccttttaaattacctgggaaatcttaacagaaaggtaatgggcccccagaaatacccacagcatagtgacctcagaccctgatactcaccacaaaacttttaagatgctgattgggagccgcttgtggctgctgggtgtgtgtgtgtgtgtgtgcgtgcgtgcgtgtgtgtgtgtctctgctggggaccctggccacccccctgctgctgtcttggtgcctgtcacccacatggtctgccatcctaacacccagctctgctcagaaaacgtcctgcgtggaggagggatgatgcagaattctgaagtcgacttccctctggctcctggcgtgccctcgctcccttcctgagcccagctcgtgttgcgccggaggctgcgcggcccctgatttctgcatggtgtagaactttctccaatagtcacattggcaaagggagaactggggtgggcggggggtggggctggcagggaattagaatttctctctctcttttaatagttttattttgtctgtcctgtttgttcatttggatgttttaatttttaaaaaaaaaaaaactttgctgatatttataattttgtatcataagaatgttttcctctacagtatttgtcatgccagtttataacaaaaaaaaatgcagggattttatttctattggaaacattacagctatgttttacttttggacagaatttttatttgtatagagtgcttactaatgttaaatagttcagagtatataacatttacattaaggactcatggtaggttttagggtaaggagtttaaaggaaataaatattcaaactgggtctcattgccaattttggtggaaatgagtttgtgtcatttcaattacaaagataaaagtatgccatataatttatttatatgaagatttatttttgtagtgtacatagtagtcatcaagtcttttgacagaagtatatttttaaagaatttatatgtgatgaatccataatgtctggaactttgctgagacatgagtgggcacagttttcattgtaaattacagcaaggaaagaaaatgtttaacagtgttaagagagtcagagcagagtggatattcatgcgattatgaagtgtttattagttaccattggcgacctagcatgcttctcatttcaaaccttggaaggtgaaaatgtacaaactctctaaataattaatgttcaaacactgatagaaattctaacatgaataaaaaataatataacttgttggttatatctttgtttgtagaatgctttttttctttaaaatacttgggagagacagttagtgttggagccatcagaaactgttgtttcatcttgctgaccttgtgacactcttcttttttgctctatctgatggagagagttttaggttttcctcctttttgttttgtataaatagtgggtataagcatagctctgttacatggatgtattacaaagtgggggctgagcttttagtgtgatcatcacccaaatagtgtacattgtacccattaattaatttcttatcacctgaccctatttttgttttctcataccaagaaacttcctaagttaaccatcaaaattagtccttctgtcatctctcttagcatacttatttcccttatgtgatgcctaataatgagggaacataaataaagccaaattcaaag

SEQ ID NO: 163910 - DNA, 7815 bp, Homo sapiens
  Payload ID: 12273
  Gene Symbol: PTCH1
  Gene Name: patched 1
  Uniprot ID: Q13635
  ENST ID: ENST00000418258
  CDS Start-End: 516-4406
aattcagctcacacagcctctccccacgctatggaaatgcgtcgggagtgaactccggcggccgcgctcaccacgtggatccccacttactaccattctcggcgggggtccagttgggggaacccgcaatatgttgttccaaagagcgctcgcccctagcgcccgtccccgagggtgatggacagagcaggactggtttgctggctcctgaaccttgggctccatcgctgggattacgcagcccctcccttctcagctctggggggaaggctactggccggaaagcgccgctgtggctgagagcgaagtttcagagactcttatttaaactgggttgttacattcaaaaaaactgcggcaagttcttggttgtgggcctcctcatatttggggccttcgcggtgggattaaaagcagcgaacctcgagaccaacgtggaggagctgtgggtggaagttggaggacgagtaagtcgtgaattaaattatactcgccagaagattggagaagaggctatgtttaatcctcaactcatgatacagacccctaaagaagaaggtgctaatgtcctgaccacagaagcgctcctacaacacctggactcggcactccaggccagccgtgtccatgtatacatgtacaacaggcagtggaaattggaacatttgtgttacaaatcaggagagcttatcacagaaacaggttacatggatcagataatagaatatctttacccttgtttgattattacacctttggactgcttctgggaaggggcgaaattacagtctgggacagcatacctcctaggtaaacctcctttgcggtggacaaacttcgaccctttggaattcctggaagagttaaagaaaataaactatcaagtggacagctgggaggaaatgctgaataaggctgaggttggtcatggttacatggaccgcccctgcctcaatccggccgatccagactgccccgccacagcccccaacaaaaattcaaccaaacctcttgatatggcccttgttttgaatggtggatgtcatggcttatccagaaagtatatgcactggcaggaggagttgattgtgggtggcacagtcaagaacagcactggaaaactcgtcagcgcccatgccctgcagaccatgttccagttaatgactcccaagcaaatgtacgagcacttcaaggggtacgagtatgtctcacacatcaactggaacgaggacaaagcggcagccatcctggaggcctggcagaggacatatgtggaggtggttcatcagagtgtcgcacagaactccactcaaaaggtgctttccttcaccaccacgaccctggacgacatcctgaaatccttctctgacgtcagtgtcatccgcgtggccagcggctacttactcatgctcgcctatgcctgtctaaccatgctgcgctgggactgctccaagtcccagggtgccgtggggctggctggcgtcctgctggttgcactgtcagtggctgcaggactgggcctgtgctcattgatcggaatttcctttaacgctgcaacaactcaggttttgccatttctcgctcttggtgttggtgtggatgatgtttttcttctggcccacgccttcagtgaaacaggacagaataaaagaatcccttttgaggacaggaccggggagtgcctgaagcgcacaggagccagcgtggccctcacgtccatcagcaatgtcacagccttcttcatggccgcgttaatcccaattcccgctctgcgggcgttctccctccaggcagcggtagtagtggtgttcaattttgccatggttctgctcatttttcctgcaattctcagcatggatttatatcgacgcgaggacaggagactggatattttctgctgttttacaagcccctgcgtcagcagagtgattcaggttgaacctcaggcctacaccgacacacacgacaatacccgctacagccccccacctccctacagcagccacagctttgcccatgaaacgcagattaccatgcagtccactgtccagctccgcacggagtacgacccccacacgcacgtgtactacaccaccgctgagccgcgctccgagatctctgtgcagcccgtcaccgtgacacaggacaccctcagctgccagagcccagagagcaccagctccacaagggacctgctctcccagttctccgactccagcctccactgcctcgagcccccctgtacgaagtggacactctcatcttttgctgagaagcactatgctcctttcctcttgaaaccaaaagccaaggtagtggtgatcttcctttttctgggcttgctgggggtcagcctttatggcaccacccgagtgagagacgggctggaccttacggacattgtacctcgggaaaccagagaatatgactttattgctgcacaattcaaatacttttctttctacaacatgtatatagtcacccagaaagcagactacccgaatatccagcacttactttacgacctacacaggagtttcagtaacgtgaagtatgtcatgttggaagaaaacaaacagcttcccaaaatgtggctgcactacttcagagactggcttcagggacttcaggatgcatttgacagtgactgggaaaccgggaaaatcatgccaaacaattacaagaatggatcagacgatggagtccttgcctacaaactcctggtgcaaaccggcagccgcgataagcccatcgacatcagccagttgactaaacagcgtctggtggatgcagatggcatcattaatcccagcgctttctacatctacctgacggcttgggtcagcaacgaccccgtcgcgtatgctgcctcccaggccaacatccggccacaccgaccagaatgggtccacgacaaagccgactacatgcctgaaacaaggctgagaatcccggcagcagagcccatcgagtatgcccagttccctttctacctcaacggcttgcgggacacctcagactttgtggaggcaattgaaaaagtaaggaccatctgcagcaactatacgagcctggggctgtccagttaccccaacggctaccccttcctcttctgggagcagtacatcggcctccgccactggctgctgctgttcatcagcgtggtgttggcctgcacattcctcgtgtgcgctgtcttccttctgaacccctggacggccgggatcattgtgatggtcctggcgctgatgacggtcgagctgttcggcatgatgggcctcatcggaatcaagctcagtgccgtgcccgtggtcatcctgatcgcttctgttggcataggagtggagttcaccgttcacgttgctttggcctttctgacggccatcggcgacaagaaccgcagggctgtgcttgccctggagcacatgtttgcacccgtcctggatggcgccgtgtccactctgctgggagtgctgatgctggcgggatctgagttcgacttcattgtcaggtatttctttgctgtgctggcgatcctcaccatcctcggcgttctcaatgggctggttttgcttcccgtgcttttgtctttctttggaccatatcctgaggtgtctccagccaacggcttgaaccgcctgcccacaccctcccctgagccaccccccagcgtggtccgcttcgccatgccgcccggccacacgcacagcgggtctgattcctccgactcggagtatagttcccagacgacagtgtcaggcctcagcgaggagcttcggcactacgaggcccagcagggcgcgggaggccctgcccaccaagtgatcgtggaagccacagaaaaccccgtcttcgcccactccactgtggtccatcccgaatccaggcatcacccaccctcgaacccgagacagcagccccacctggactcagggtccctgcctcccggacggcaaggccagcagccccgcagggacccccccagagaaggcttgtggccacccccctacagaccgcgcagagacgcttttgaaatttctactgaagggcattctggccctagcaatagggcccgctggggccctcgcggggcccgttctcacaaccctcggaacccagcgtccactgccatgggcagctccgtgcccggctactgccagcccatcaccactgtgacggcttctgcctccgtgactgtcgccgtgcacccgccgcctgtccctgggcctgggcggaacccccgagggggactctgcccaggctaccctgagactgaccacggcctgtttgaggacccccacgtgcctttccacgtccggtgtgagaggagggattcgaaggtggaagtcattgagctgcaggacgtggaatgcgaggagaggccccggggaagcagctccaactgagggtgattaaaatctgaagcaaagaggccaaagattggaaaccccccacccccacctctttccagaactgcttgaagagaactggttggagttatggaaaagatgccctgtgccaggacagcagttcattgttactgtaaccgattgtattattttgttaaatatttctataaatatttaagagatgtacacatgtgtaatataggaaggaaggatgtaaagtggtatgatctggggcttctccactcctgccccagagtgtggaggccacagtggggcctctccgtatttgtgcattgggctccgtgccacaaccaagcttcattagtcttaaatttcagcatatgttgctgctgcttaaatattgtataatttacttgtataattctatgcaaatattgcttatgtaataggattattttgtaaaggtttctgtttaaaatattttaaatttgcatatcacaaccctgtggtagtatgaaatgttactgttaactttcaaacacgctatgcgtgataatttttttgtttaatgagcagatatgaagaaagcacgttaatcctggtggcttctctaggtgtcgttgtgtgcggtcctcttgtttggctgtgcgtgtgaacacgtgtgtgagttcaccatgtactgtactgtgattttttttttgtcttgttttgtttctctacactgtctgtaacctgtagtaggctctgacctagtcaggctggaagcgtcaggatatcttttcttcgtgctggtgagggctggccctaaacatccacctaatcctttcaaatcagcccggcaaaagctagactctcctcgtgtctacggcatctcttatgatcattggctgccatccaggaccccaatttgtgcttcagggggataatctccttctctcggatcattgtgatggatgctggaacctcagggtatggagctcacatcagttcatcatggtgggtgttagagaattcggtgacatgcctagtgctgagccttggctgggccatgagagtctgtatactctaaaaagcatgcagcatggtgcccctcttctgaccaacacacacacgacccctcccccaacacccccaaattcaagagtggatgtggccctgtcacaggtagaaaaacctatttagttaattctttcttggcccacagtctcccagaaatgatgttttgagtccctatagtttaaactccctctcttaaatggagcagctggttgaggctttctagatctgtttgcatcttctttaaaactaagtggtgagcatgcattgtggtgtagaggcaggcattatgtaggataagagctccggggggattcttcatgcaccagtgtttagggtacgtgcttcctaagtaaatccaaacattgtctccatcctccccgtcattagtgctctttcaatgtgatgtgggaaagcaggaggatggacacaccccactgaaagatgtaggcaggggcaggtctctcaaccaggcatatttttaaaagttgcttctgtactggttctcttcttttgctctgaggtgtgggctccctcatctcgtaaccagagaccagcacatgtcagggaagcacccagtgtcggctccccatccaaatccacaccagcaccttgttacagacaagaagtcagaggaaagggcggggtccctgcagggctgaagcctaagctactgtgaggcgctcacgagtggcagctcctgttactcccttttaaattacctgggaaatcttaacagaaaggtaatgggcccccagaaatacccacagcatagtgacctcagaccctgatactcaccacaaaacttttaagatgctgattgggagccgcttgtggctgctgggtgtgtgtgtgtgtgtgtgcgtgcgtgcgtgtgtgtgtgtctctgctggggaccctggccacccccctgctgctgtcttggtgcctgtcacccacatggtctgccatcctaacacccagctctgctcagaaaacgtcctgcgtggaggagggatgatgcagaattctgaagtcgacttccctctggctcctggcgtgccctcgctcccttcctgagcccagctcgtgttgcgccggaggctgcgcggcccctgatttctgcatggtgtagaactttctccaatagtcacattggcaaagggagaactggggtgggcggggggtggggctggcagggaattagaatttctctctctcttttaatagttttattttgtctgtcctgtttgttcatttggatgttttaatttttaaaaaaaaaaaaactttgctgatatttataattttgtatcataagaatgttttcctctacagtatttgtcatgccagtttataacaaaaaaaaatgcagggattttatttctattggaaacattacagctatgttttacttttggacagaatttttatttgtatagagtgcttactaatgttaaatagttcagagtatataacatttacattaaggactcatggtaggttttagggtaaggagtttaaaggaaataaatattcaaactgggtctcattgccaattttggtggaaatgagtttgtgtcatttcaattacaaagataaaagtatgccatataatttatttatatgaagatttatttttgtagtgtacatagtagtcatcaagtcttttgacagaagtatatttttaaagaatttatatgtgatgaatccataatgtctggaactttgctgagacatgagtgggcacagttttcattgtaaattacagcaaggaaagaaaatgtttaacagtgttaagagagtcagagcagagtggatattcatgcgattatgaagtgtttattagttaccattggcgacctagcatgcttctcatttcaaaccttggaaggtgaaaatgtacaaactctctaaataattaatgttcaaacactgatagaaattctaacatgaataaaaaataatataacttgttggttatatctttgtttgtagaatgctttttttctttaaaatacttgggagagacagttagtgttggagccatcagaaactgttgtttcatcttgctgaccttgtgacactcttcttttttgctctatctgatggagagagttttaggttttcctcctttttgttttgtataaatagtgggtataagcatagctctgttacatggatgtattacaaagtgggggctgagcttttagtgtgatcatcacccaaatagtgtacattgtacccattaattaatttcttatcacctgaccctatttttgttttctcataccaagaaacttcctaagttaaccatcaaaattagtccttctgtcatctctcttagcatacttatttcccttatgtgatgcctaataatgagggaacataaataaagccaaattcaaag

SEQ ID NO: 163911 - DNA, 7659 bp, Homo sapiens
  Payload ID: 12273
  Gene Symbol: PTCH1
  Gene Name: patched 1
  Uniprot ID: Q13635
  ENST ID: ENST00000421141
  CDS Start-End: 360-4250
actcacacctctccaggaaaagcagcagacaaatggggattgaaaaattcaaaccctccctctggtcctgggaggaaagggctgtctgaggtccgcagggggtggaggggaaggctactggccggaaagcgccgctgtggctgagagcgaagtttcagagactcttatttaaactgggttgttacattcaaaaaaactgcggcaagttcttggttgtgggcctcctcatatttggggccttcgcggtgggattaaaagcagcgaacctcgagaccaacgtggaggagctgtgggtggaagttggaggacgagtaagtcgtgaattaaattatactcgccagaagattggagaagaggctatgtttaatcctcaactcatgatacagacccctaaagaagaaggtgctaatgtcctgaccacagaagcgctcctacaacacctggactcggcactccaggccagccgtgtccatgtatacatgtacaacaggcagtggaaattggaacatttgtgttacaaatcaggagagcttatcacagaaacaggttacatggatcagataatagaatatctttacccttgtttgattattacacctttggactgcttctgggaaggggcgaaattacagtctgggacagcatacctcctaggtaaacctcctttgcggtggacaaacttcgaccctttggaattcctggaagagttaaagaaaataaactatcaagtggacagctgggaggaaatgctgaataaggctgaggttggtcatggttacatggaccgcccctgcctcaatccggccgatccagactgccccgccacagcccccaacaaaaattcaaccaaacctcttgatatggcccttgttttgaatggtggatgtcatggcttatccagaaagtatatgcactggcaggaggagttgattgtgggtggcacagtcaagaacagcactggaaaactcgtcagcgcccatgccctgcagaccatgttccagttaatgactcccaagcaaatgtacgagcacttcaaggggtacgagtatgtctcacacatcaactggaacgaggacaaagcggcagccatcctggaggcctggcagaggacatatgtggaggtggttcatcagagtgtcgcacagaactccactcaaaaggtgctttccttcaccaccacgaccctggacgacatcctgaaatccttctctgacgtcagtgtcatccgcgtggccagcggctacttactcatgctcgcctatgcctgtctaaccatgctgcgctgggactgctccaagtcccagggtgccgtggggctggctggcgtcctgctggttgcactgtcagtggctgcaggactgggcctgtgctcattgatcggaatttcctttaacgctgcaacaactcaggttttgccatttctcgctcttggtgttggtgtggatgatgtttttcttctggcccacgccttcagtgaaacaggacagaataaaagaatcccttttgaggacaggaccggggagtgcctgaagcgcacaggagccagcgtggccctcacgtccatcagcaatgtcacagccttcttcatggccgcgttaatcccaattcccgctctgcgggcgttctccctccaggcagcggtagtagtggtgttcaattttgccatggttctgctcatttttcctgcaattctcagcatggatttatatcgacgcgaggacaggagactggatattttctgctgttttacaagcccctgcgtcagcagagtgattcaggttgaacctcaggcctacaccgacacacacgacaatacccgctacagccccccacctccctacagcagccacagctttgcccatgaaacgcagattaccatgcagtccactgtccagctccgcacggagtacgacccccacacgcacgtgtactacaccaccgctgagccgcgctccgagatctctgtgcagcccgtcaccgtgacacaggacaccctcagctgccagagcccagagagcaccagctccacaagggacctgctctcccagttctccgactccagcctccactgcctcgagcccccctgtacgaagtggacactctcatcttttgctgagaagcactatgctcctttcctcttgaaaccaaaagccaaggtagtggtgatcttcctttttctgggcttgctgggggtcagcctttatggcaccacccgagtgagagacgggctggaccttacggacattgtacctcgggaaaccagagaatatgactttattgctgcacaattcaaatacttttctttctacaacatgtatatagtcacccagaaagcagactacccgaatatccagcacttactttacgacctacacaggagtttcagtaacgtgaagtatgtcatgttggaagaaaacaaacagcttcccaaaatgtggctgcactacttcagagactggcttcagggacttcaggatgcatttgacagtgactgggaaaccgggaaaatcatgccaaacaattacaagaatggatcagacgatggagtccttgcctacaaactcctggtgcaaaccggcagccgcgataagcccatcgacatcagccagttgactaaacagcgtctggtggatgcagatggcatcattaatcccagcgctttctacatctacctgacggcttgggtcagcaacgaccccgtcgcgtatgctgcctcccaggccaacatccggccacaccgaccagaatgggtccacgacaaagccgactacatgcctgaaacaaggctgagaatcccggcagcagagcccatcgagtatgcccagttccctttctacctcaacggcttgcgggacacctcagactttgtggaggcaattgaaaaagtaaggaccatctgcagcaactatacgagcctggggctgtccagttaccccaacggctaccccttcctcttctgggagcagtacatcggcctccgccactggctgctgctgttcatcagcgtggtgttggcctgcacattcctcgtgtgcgctgtcttccttctgaacccctggacggccgggatcattgtgatggtcctggcgctgatgacggtcgagctgttcggcatgatgggcctcatcggaatcaagctcagtgccgtgcccgtggtcatcctgatcgcttctgttggcataggagtggagttcaccgttcacgttgctttggcctttctgacggccatcggcgacaagaaccgcagggctgtgcttgccctggagcacatgtttgcacccgtcctggatggcgccgtgtccactctgctgggagtgctgatgctggcgggatctgagttcgacttcattgtcaggtatttctttgctgtgctggcgatcctcaccatcctcggcgttctcaatgggctggttttgcttcccgtgcttttgtctttctttggaccatatcctgaggtgtctccagccaacggcttgaaccgcctgcccacaccctcccctgagccaccccccagcgtggtccgcttcgccatgccgcccggccacacgcacagcgggtctgattcctccgactcggagtatagttcccagacgacagtgtcaggcctcagcgaggagcttcggcactacgaggcccagcagggcgcgggaggccctgcccaccaagtgatcgtggaagccacagaaaaccccgtcttcgcccactccactgtggtccatcccgaatccaggcatcacccaccctcgaacccgagacagcagccccacctggactcagggtccctgcctcccggacggcaaggccagcagccccgcagggacccccccagagaaggcttgtggccacccccctacagaccgcgcagagacgcttttgaaatttctactgaagggcattctggccctagcaatagggcccgctggggccctcgcggggcccgttctcacaaccctcggaacccagcgtccactgccatgggcagctccgtgcccggctactgccagcccatcaccactgtgacggcttctgcctccgtgactgtcgccgtgcacccgccgcctgtccctgggcctgggcggaacccccgagggggactctgcccaggctaccctgagactgaccacggcctgtttgaggacccccacgtgcctttccacgtccggtgtgagaggagggattcgaaggtggaagtcattgagctgcaggacgtggaatgcgaggagaggccccggggaagcagctccaactgagggtgattaaaatctgaagcaaagaggccaaagattggaaaccccccacccccacctctttccagaactgcttgaagagaactggttggagttatggaaaagatgccctgtgccaggacagcagttcattgttactgtaaccgattgtattattttgttaaatatttctataaatatttaagagatgtacacatgtgtaatataggaaggaaggatgtaaagtggtatgatctggggcttctccactcctgccccagagtgtggaggccacagtggggcctctccgtatttgtgcattgggctccgtgccacaaccaagcttcattagtcttaaatttcagcatatgttgctgctgcttaaatattgtataatttacttgtataattctatgcaaatattgcttatgtaataggattattttgtaaaggtttctgtttaaaatattttaaatttgcatatcacaaccctgtggtagtatgaaatgttactgttaactttcaaacacgctatgcgtgataatttttttgtttaatgagcagatatgaagaaagcacgttaatcctggtggcttctctaggtgtcgttgtgtgcggtcctcttgtttggctgtgcgtgtgaacacgtgtgtgagttcaccatgtactgtactgtgattttttttttgtcttgttttgtttctctacactgtctgtaacctgtagtaggctctgacctagtcaggctggaagcgtcaggatatcttttcttcgtgctggtgagggctggccctaaacatccacctaatcctttcaaatcagcccggcaaaagctagactctcctcgtgtctacggcatctcttatgatcattggctgccatccaggaccccaatttgtgcttcagggggataatctccttctctcggatcattgtgatggatgctggaacctcagggtatggagctcacatcagttcatcatggtgggtgttagagaattcggtgacatgcctagtgctgagccttggctgggccatgagagtctgtatactctaaaaagcatgcagcatggtgcccctcttctgaccaacacacacacgacccctcccccaacacccccaaattcaagagtggatgtggccctgtcacaggtagaaaaacctatttagttaattctttcttggcccacagtctcccagaaatgatgttttgagtccctatagtttaaactccctctcttaaatggagcagctggttgaggctttctagatctgtttgcatcttctttaaaactaagtggtgagcatgcattgtggtgtagaggcaggcattatgtaggataagagctccggggggattcttcatgcaccagtgtttagggtacgtgcttcctaagtaaatccaaacattgtctccatcctccccgtcattagtgctctttcaatgtgatgtgggaaagcaggaggatggacacaccccactgaaagatgtaggcaggggcaggtctctcaaccaggcatatttttaaaagttgcttctgtactggttctcttcttttgctctgaggtgtgggctccctcatctcgtaaccagagaccagcacatgtcagggaagcacccagtgtcggctccccatccaaatccacaccagcaccttgttacagacaagaagtcagaggaaagggcggggtccctgcagggctgaagcctaagctactgtgaggcgctcacgagtggcagctcctgttactcccttttaaattacctgggaaatcttaacagaaaggtaatgggcccccagaaatacccacagcatagtgacctcagaccctgatactcaccacaaaacttttaagatgctgattgggagccgcttgtggctgctgggtgtgtgtgtgtgtgtgtgcgtgcgtgcgtgtgtgtgtgtctctgctggggaccctggccacccccctgctgctgtcttggtgcctgtcacccacatggtctgccatcctaacacccagctctgctcagaaaacgtcctgcgtggaggagggatgatgcagaattctgaagtcgacttccctctggctcctggcgtgccctcgctcccttcctgagcccagctcgtgttgcgccggaggctgcgcggcccctgatttctgcatggtgtagaactttctccaatagtcacattggcaaagggagaactggggtgggcggggggtggggctggcagggaattagaatttctctctctcttttaatagttttattttgtctgtcctgtttgttcatttggatgttttaatttttaaaaaaaaaaaaactttgctgatatttataattttgtatcataagaatgttttcctctacagtatttgtcatgccagtttataacaaaaaaaaatgcagggattttatttctattggaaacattacagctatgttttacttttggacagaatttttatttgtatagagtgcttactaatgttaaatagttcagagtatataacatttacattaaggactcatggtaggttttagggtaaggagtttaaaggaaataaatattcaaactgggtctcattgccaattttggtggaaatgagtttgtgtcatttcaattacaaagataaaagtatgccatataatttatttatatgaagatttatttttgtagtgtacatagtagtcatcaagtcttttgacagaagtatatttttaaagaatttatatgtgatgaatccataatgtctggaactttgctgagacatgagtgggcacagttttcattgtaaattacagcaaggaaagaaaatgtttaacagtgttaagagagtcagagcagagtggatattcatgcgattatgaagtgtttattagttaccattggcgacctagcatgcttctcatttcaaaccttggaaggtgaaaatgtacaaactctctaaataattaatgttcaaacactgatagaaattctaacatgaataaaaaataatataacttgttggttatatctttgtttgtagaatgctttttttctttaaaatacttgggagagacagttagtgttggagccatcagaaactgttgtttcatcttgctgaccttgtgacactcttcttttttgctctatctgatggagagagttttaggttttcctcctttttgttttgtataaatagtgggtataagcatagctctgttacatggatgtattacaaagtgggggctgagcttttagtgtgatcatcacccaaatagtgtacattgtacccattaattaatttcttatcacctgaccctatttttgttttctcataccaagaaacttcctaagttaaccatcaaaattagtccttctgtcatctctcttagcatacttatttcccttatgtgatgcctaataatgagggaacataaataaagccaaattcaaag

SEQ ID NO: 163912 - DNA, 8232 bp, Homo sapiens
  Payload ID: 12273
  Gene Symbol: PTCH1
  Gene Name: patched 1
  Uniprot ID: Q13635
  ENST ID: ENST00000430669
  CDS Start-End: 587-4732
cggccgcggggggcggggagagggtggctaggctcgcgggagctcgccgggcagggcgcctcccaggaaggcggggaggggagcgcctgtttacccaggagggctgtgctgatagcacgttcctcgagtttactttgctttccttgagtttattgtaaaggggtaaagttttcggatccgtcacgtgaccctgacaggtcctgcctatggcgcggcagaccacccacgccgagggccatggaactgcttaatagaaacaggcttgtaattgtgagtccgcgctgcactccgccgaaagcctccggcggcccagcgcgccggggtttttacactttccgttccttttgtaaagacggaggaggaggagaagaagaagaagaaaacggaggagaagaaaaagacgacaggggagacaaagagacccgcagcgacaaggcaagggggagacgagggaagactgggagaagacggaggagcggaggacgaggaaaggggggccagggaaaaaaaaggaattgatgtgaaatccaagcccagcgtccgcgccatcggcacccgcgctccgagcaggggttgacggccggctatggggaaggctactggccggaaagcgccgctgtggctgagagcgaagtttcagagactcttatttaaactgggttgttacattcaaaaaaactgcggcaagttcttggttgtgggcctcctcatatttggggccttcgcggtgggattaaaagcagcgaacctcgagaccaacgtggaggagctgtgggtggaagttggaggacgagtaagtcgtgaattaaattatactcgccagaagattggagaagaggctatgtttaatcctcaactcatgatacagacccctaaagaagaaggtgctaatgtcctgaccacagaagcgctcctacaacacctggactcggcactccaggccagccgtgtccatgtatacatgtacaacaggcagtggaaattggaacatttgtgttacaaatcaggagagcttatcacagaaacaggttacatggatcagataatagaatatctttacccttgtttgattattacacctttggactgcttctgggaaggggcgaaattacagtctgggacagcatacctcctaggtaaacctcctttgcggtggacaaacttcgaccctttggaattcctggaagagttaaagaaaataaactatcaagtggacagctgggaggaaatgctgaataaggctgaggttggtcatggttacatggaccgcccctgcctcaatccggccgatccagactgccccgccacagcccccaacaaaaattcaaccaaacctcttgatatggcccttgttttgaatggtggatgtcatggcttatccagaaagtatatgcactggcaggaggagttgattgtgggtggcacagtcaagaacagcactggaaaactcgtcagcgcccatgccctgcagaccatgttccagttaatgactcccaagcaaatgtacgagcacttcaaggggtacgagtatgtctcacacatcaactggaacgaggacaaagcggcagccatcctggaggcctggcagaggacatatgtggaggtggttcatcagagtgtcgcacagaactccactcaaaaggtgctttccttcaccaccacgaccctggacgacatcctgaaatccttctctgacgtcagtgtcatccgcgtggccagcggctacttactcatgctcgcctatgcctgtctaaccatgctgcgctgggactgctccaagtcccagggtgccgtggggctggctggcgtcctgctggttgcactgtcagtggctgcaggactgggcctgtgctcattgatcggaatttcctttaacgctgcaacaactcaggttttgccatttctcgctcttggtgttggtgtggatgatgtttttcttctggcccacgccttcagtgaaacaggacagaataaaagaatcccttttgaggacaggaccggggagtgcctgaagcgcacaggagccagcgtggccctcacgtccatcagcaatgtcacagccttcttcatggccgcgttaatcccaattcccgctctgcgggcgttctccctccaggcagcggtagtagtggtgttcaattttgccatggttctgctcatttttcctgcaattctcagcatggatttatatcgacgcgaggacaggagactggatattttctgctgttttacaagcccctgcgtcagcagagtgattcaggttgaacctcaggcctacaccgacacacacgacaatacccgctacagccccccacctccctacagcagccacagctttgcccatgaaacgcagattaccatgcagtccactgtccagctccgcacggagtacgacccccacacgcacgtgtactacaccaccgctgagccgcgctccgagatctctgtgcagcccgtcaccgtgacacaggacaccctcagctgccagagcccagagagcaccagctccacaagggacctgctctcccagttctccgactccagcctccactgcctcgagcccccctgtacgaagtggacactctcatcttttgctgagaagcactatgctcctttcctcttgaaaccaaaagccaaggtagtggtgatcttcctttttctgggcttgctgggggtcagcctttatggcaccacccgagtgagagacgggctggaccttacggacattgtacctcgggaaaccagagaatatgactttattgctgcacaattcaaatacttttctttctacaacatgtatatagtcacccagaaagcagactacccgaatatccagcacttactttacgacctacacaggagtttcagtaacgtgaagtatgtcatgttggaagaaaacaaacagcttcccaaaatgtggctgcactacttcagagactggcttcagggacttcaggatgcatttgacagtgactgggaaaccgggaaaatcatgccaaacaattacaagaatggatcagacgatggagtccttgcctacaaactcctggtgcaaaccggcagccgcgataagcccatcgacatcagccagttgactaaacagcgtctggtggatgcagatggcatcattaatcccagcgctttctacatctacctgacggcttgggtcagcaacgaccccgtcgcgtatgctgcctcccaggccaacatccggccacaccgaccagaatgggtccacgacaaagccgactacatgcctgaaacaaggctgagaatcccggcagcagagcccatcgagtatgcccagttccctttctacctcaacggcttgcgggacacctcagactttgtggaggcaattgaaaaagtaaggaccatctgcagcaactatacgagcctggggctgtccagttaccccaacggctaccccttcctcttctgggagcagtacatcggcctccgccactggctgctgctgttcatcagcgtggtgttggcctgcacattcctcgtgtgcgctgtcttccttctgaacccctggacggccgggatcattgtgatggtcctggcgctgatgacggtcgagctgttcggcatgatgggcctcatcggaatcaagctcagtgccgtgcccgtggtcatcctgatcgcttctgttggcataggagtggagttcaccgttcacgttgctttggcctttctgacggccatcggcgacaagaaccgcagggctgtgcttgccctggagcacatgtttgcacccgtcctggatggcgccgtgtccactctgctgggagtgctgatgctggcgggatctgagttcgacttcattgtcaggtatttctttgctgtgctggcgatcctcaccatcctcggcgttctcaatgggctggttttgcttcccgtgcttttgtctttctttggaccatatcctgaggtgtctccagccaacggcttgaaccgcctgcccacaccctcccctgagccaccccccagcgtggtccgcttcgccatgccgcccggccacacgcacagcgggtctgattcctccgactcggagtatagttcccagacgacagtgtcaggcctcagcgaggagcttcggcactacgaggcccagcagggcgcgggaggccctgcccaccaagtgatcgtggaagccacagaaaaccccgtcttcgcccactccactgtggtccatcccgaatccaggcatcacccaccctcgaacccgagacagcagccccacctggactcagggtccctgcctcccggacggcaaggccagcagccccgcagggacccccccagagaaggcttgtggccacccccctacagaccgcgcagagacgcttttgaaatttctactgaagggcattctggccctagcaatagggcccgctggggccctcgcggggcccgttctcacaaccctcggaacccagcgtccactgccatgggcagctccgtgcccggctactgccagcccatcaccactgtgacggcttctgcctccgtgactgtcgccgtgcacccgccgcctgtccctgggcctgggcggaacccccgagggggactctgcccaggctaccctgagactgaccacggcctgtttgaggacccccacgtgcctttccacgtccggtgtgagaggagggattcgaaggtggaagtcattgagctgcaggacgtggaatgcgaggagaggccccggggaagcagctccaactgaggtgagtgccactgacaagggcagccaagggacctagagccaggcaaagaggaggacaaggttctcctggggttctcggcatccccgaggggctgtggcgctcgggcacatcccacgctggaccccagtgaccttttatccccagagcaaggctgatgtgtccaagctttgtcatccttggggaaccagtccagctccacactgctctcttcccccactgctaacctgcggagggtcggtgcagcgccacaaggacacaaacagcaccaccttttaccaatatttgccagtctttatggaggtgcatgccacagcgaattggtcacatgggaacgcatccgtgtaaccagcccccagatgaagggagaggtcacaagcagcccccagggacacctcaggcccacaccccactctcgtgatttctaataccaaggttactgctgcctgcttttgtactttataaatacggacttgcacacctcttactctgttcaacttccttttttgcttccttttaaagggtgattaaaatctgaagcaaagaggccaaagattggaaaccccccacccccacctctttccagaactgcttgaagagaactggttggagttatggaaaagatgccctgtgccaggacagcagttcattgttactgtaaccgattgtattattttgttaaatatttctataaatatttaagagatgtacacatgtgtaatataggaaggaaggatgtaaagtggtatgatctggggcttctccactcctgccccagagtgtggaggccacagtggggcctctccgtatttgtgcattgggctccgtgccacaaccaagcttcattagtcttaaatttcagcatatgttgctgctgcttaaatattgtataatttacttgtataattctatgcaaatattgcttatgtaataggattattttgtaaaggtttctgtttaaaatattttaaatttgcatatcacaaccctgtggtagtatgaaatgttactgttaactttcaaacacgctatgcgtgataatttttttgtttaatgagcagatatgaagaaagcacgttaatcctggtggcttctctaggtgtcgttgtgtgcggtcctcttgtttggctgtgcgtgtgaacacgtgtgtgagttcaccatgtactgtactgtgattttttttttgtcttgttttgtttctctacactgtctgtaacctgtagtaggctctgacctagtcaggctggaagcgtcaggatatcttttcttcgtgctggtgagggctggccctaaacatccacctaatcctttcaaatcagcccggcaaaagctagactctcctcgtgtctacggcatctcttatgatcattggctgccatccaggaccccaatttgtgcttcagggggataatctccttctctcggatcattgtgatggatgctggaacctcagggtatggagctcacatcagttcatcatggtgggtgttagagaattcggtgacatgcctagtgctgagccttggctgggccatgagagtctgtatactctaaaaagcatgcagcatggtgcccctcttctgaccaacacacacacgacccctcccccaacacccccaaattcaagagtggatgtggccctgtcacaggtagaaaaacctatttagttaattctttcttggcccacagtctcccagaaatgatgttttgagtccctatagtttaaactccctctcttaaatggagcagctggttgaggctttctagatctgtttgcatcttctttaaaactaagtggtgagcatgcattgtggtgtagaggcaggcattatgtaggataagagctccggggggattcttcatgcaccagtgtttagggtacgtgcttcctaagtaaatccaaacattgtctccatcctccccgtcattagtgctctttcaatgtgatgtgggaaagcaggaggatggacacaccccactgaaagatgtaggcaggggcaggtctctcaaccaggcatatttttaaaagttgcttctgtactggttctcttcttttgctctgaggtgtgggctccctcatctcgtaaccagagaccagcacatgtcagggaagcacccagtgtcggctccccatccaaatccacaccagcaccttgttacagacaagaagtcagaggaaagggcggggtccctgcagggctgaagcctaagctactgtgaggcgctcacgagtggcagctcctgttactcccttttaaattacctgggaaatcttaacagaaaggtaatgggcccccagaaatacccacagcatagtgacctcagaccctgatactcaccacaaaacttttaagatgctgattgggagccgcttgtggctgctgggtgtgtgtgtgtgtgtgtgcgtgcgtgcgtgtgtgtgtgtctctgctggggaccctggccacccccctgctgctgtcttggtgcctgtcacccacatggtctgccatcctaacacccagctctgctcagaaaacgtcctgcgtggaggagggatgatgcagaattctgaagtcgacttccctctggctcctggcgtgccctcgctcccttcctgagcccagctcgtgttgcgccggaggctgcgcggcccctgatttctgcatggtgtagaactttctccaatagtcacattggcaaagggagaactggggtgggcggggggtggggctggcagggaattagaatttctctctctcttttaatagttttattttgtctgtcctgtttgttcatttggatgttttaatttttaaaaaaaaaaaaactttgctgatatttataattttgtatcataagaatgttttcctctacagtatttgtcatgccagtttataacaaaaaaaaatgcagggattttatttctattggaaacattacagctatgttttacttttggacagaatttttatttgtatagagtgcttactaatgttaaatagttcagagtatataacatttacattaaggactcatggtaggttttagggtaaggagtttaaaggaaataaatattcaaactgggtctcattgccaattttggtggaaatgagtttgtgtcatttcaattacaaagataaaagtatgccatataatttatttatatgaagatttatttttgtagtgtacatagtagtcatcaagtcttttgacagaagtatatttttaaagaatttatatgtgatgaatccataatgtctggaactttgctgagacatgagtgggcacagttttcattgtaaattacagcaaggaaagaaaatgtttaacagtgttaagagagtcagagcagagtggatattcatgcgattatgaagtgtttattagttaccattggcgacctagcatgcttctcatttcaaaccttggaaggtgaaaatgtacaaactctctaaataattaatgttcaaacactgatagaaattctaacatgaataaaaaataatataacttgttggtt

SEQ ID NO: 163913 - DNA, 6563 bp, Homo sapiens
  Payload ID: 12273
  Gene Symbol: PTCH1
  Gene Name: patched 1
  Uniprot ID: Q13635
  ENST ID: ENST00000429896
  CDS Start-End: 442-4332
gaaggcgagcacccagacgggggcccgccggggccgcggccagcgccggggaaatgccgcgccggggagcagcctgcgccggcctgagcccttccctttgcactcggctgttttttacgtttaaccagaaaggaagggagaggagggaaagatccatgtggctgccctcttccgatcacaaatattgtcgggaaggctactggccggaaagcgccgctgtggctgagagcgaagtttcagagactcttatttaaactgggttgttacattcaaaaaaactgcggcaagttcttggttgtgggcctcctcatatttggggccttcgcggtgggattaaaagcagcgaacctcgagaccaacgtggaggagctgtgggtggaagttggaggacgagtaagtcgtgaattaaattatactcgccagaagattggagaagaggctatgtttaatcctcaactcatgatacagacccctaaagaagaaggtgctaatgtcctgaccacagaagcgctcctacaacacctggactcggcactccaggccagccgtgtccatgtatacatgtacaacaggcagtggaaattggaacatttgtgttacaaatcaggagagcttatcacagaaacaggttacatggatcagataatagaatatctttacccttgtttgattattacacctttggactgcttctgggaaggggcgaaattacagtctgggacagcatacctcctaggtaaacctcctttgcggtggacaaacttcgaccctttggaattcctggaagagttaaagaaaataaactatcaagtggacagctgggaggaaatgctgaataaggctgaggttggtcatggttacatggaccgcccctgcctcaatccggccgatccagactgccccgccacagcccccaacaaaaattcaaccaaacctcttgatatggcccttgttttgaatggtggatgtcatggcttatccagaaagtatatgcactggcaggaggagttgattgtgggtggcacagtcaagaacagcactggaaaactcgtcagcgcccatgccctgcagaccatgttccagttaatgactcccaagcaaatgtacgagcacttcaaggggtacgagtatgtctcacacatcaactggaacgaggacaaagcggcagccatcctggaggcctggcagaggacatatgtggaggtggttcatcagagtgtcgcacagaactccactcaaaaggtgctttccttcaccaccacgaccctggacgacatcctgaaatccttctctgacgtcagtgtcatccgcgtggccagcggctacttactcatgctcgcctatgcctgtctaaccatgctgcgctgggactgctccaagtcccagggtgccgtggggctggctggcgtcctgctggttgcactgtcagtggctgcaggactgggcctgtgctcattgatcggaatttcctttaacgctgcaacaactcaggttttgccatttctcgctcttggtgttggtgtggatgatgtttttcttctggcccacgccttcagtgaaacaggacagaataaaagaatcccttttgaggacaggaccggggagtgcctgaagcgcacaggagccagcgtggccctcacgtccatcagcaatgtcacagccttcttcatggccgcgttaatcccaattcccgctctgcgggcgttctccctccaggcagcggtagtagtggtgttcaattttgccatggttctgctcatttttcctgcaattctcagcatggatttatatcgacgcgaggacaggagactggatattttctgctgttttacaagcccctgcgtcagcagagtgattcaggttgaacctcaggcctacaccgacacacacgacaatacccgctacagccccccacctccctacagcagccacagctttgcccatgaaacgcagattaccatgcagtccactgtccagctccgcacggagtacgacccccacacgcacgtgtactacaccaccgctgagccgcgctccgagatctctgtgcagcccgtcaccgtgacacaggacaccctcagctgccagagcccagagagcaccagctccacaagggacctgctctcccagttctccgactccagcctccactgcctcgagcccccctgtacgaagtggacactctcatcttttgctgagaagcactatgctcctttcctcttgaaaccaaaagccaaggtagtggtgatcttcctttttctgggcttgctgggggtcagcctttatggcaccacccgagtgagagacgggctggaccttacggacattgtacctcgggaaaccagagaatatgactttattgctgcacaattcaaatacttttctttctacaacatgtatatagtcacccagaaagcagactacccgaatatccagcacttactttacgacctacacaggagtttcagtaacgtgaagtatgtcatgttggaagaaaacaaacagcttcccaaaatgtggctgcactacttcagagactggcttcagggacttcaggatgcatttgacagtgactgggaaaccgggaaaatcatgccaaacaattacaagaatggatcagacgatggagtccttgcctacaaactcctggtgcaaaccggcagccgcgataagcccatcgacatcagccagttgactaaacagcgtctggtggatgcagatggcatcattaatcccagcgctttctacatctacctgacggcttgggtcagcaacgaccccgtcgcgtatgctgcctcccaggccaacatccggccacaccgaccagaatgggtccacgacaaagccgactacatgcctgaaacaaggctgagaatcccggcagcagagcccatcgagtatgcccagttccctttctacctcaacggcttgcgggacacctcagactttgtggaggcaattgaaaaagtaaggaccatctgcagcaactatacgagcctggggctgtccagttaccccaacggctaccccttcctcttctgggagcagtacatcggcctccgccactggctgctgctgttcatcagcgtggtgttggcctgcacattcctcgtgtgcgctgtcttccttctgaacccctggacggccgggatcattgtgatggtcctggcgctgatgacggtcgagctgttcggcatgatgggcctcatcggaatcaagctcagtgccgtgcccgtggtcatcctgatcgcttctgttggcataggagtggagttcaccgttcacgttgctttggcctttctgacggccatcggcgacaagaaccgcagggctgtgcttgccctggagcacatgtttgcacccgtcctggatggcgccgtgtccactctgctgggagtgctgatgctggcgggatctgagttcgacttcattgtcaggtatttctttgctgtgctggcgatcctcaccatcctcggcgttctcaatgggctggttttgcttcccgtgcttttgtctttctttggaccatatcctgaggtgtctccagccaacggcttgaaccgcctgcccacaccctcccctgagccaccccccagcgtggtccgcttcgccatgccgcccggccacacgcacagcgggtctgattcctccgactcggagtatagttcccagacgacagtgtcaggcctcagcgaggagcttcggcactacgaggcccagcagggcgcgggaggccctgcccaccaagtgatcgtggaagccacagaaaaccccgtcttcgcccactccactgtggtccatcccgaatccaggcatcacccaccctcgaacccgagacagcagccccacctggactcagggtccctgcctcccggacggcaaggccagcagccccgcagggacccccccagagaaggcttgtggccacccccctacagaccgcgcagagacgcttttgaaatttctactgaagggcattctggccctagcaatagggcccgctggggccctcgcggggcccgttctcacaaccctcggaacccagcgtccactgccatgggcagctccgtgcccggctactgccagcccatcaccactgtgacggcttctgcctccgtgactgtcgccgtgcacccgccgcctgtccctgggcctgggcggaacccccgagggggactctgcccaggctaccctgagactgaccacggcctgtttgaggacccccacgtgcctttccacgtccggtgtgagaggagggattcgaaggtggaagtcattgagctgcaggacgtggaatgcgaggagaggccccggggaagcagctccaactgagggtgattaaaatctgaagcaaagaggccaaagattggaaaccccccacccccacctctttccagaactgcttgaagagaactggttggagttatggaaaagatgccctgtgccaggacagcagttcattgttactgtaaccgattgtattattttgttaaatatttctataaatatttaagagatgtacacatgtgtaatataggaaggaaggatgtaaagtggtatgatctggggcttctccactcctgccccagagtgtggaggccacagtggggcctctccgtatttgtgcattgggctccgtgccacaaccaagcttcattagtcttaaatttcagcatatgttgctgctgcttaaatattgtataatttacttgtataattctatgcaaatattgcttatgtaataggattattttgtaaaggtttctgtttaaaatattttaaatttgcatatcacaaccctgtggtagtatgaaatgttactgttaactttcaaacacgctatgcgtgataatttttttgtttaatgagcagatatgaagaaagcacgttaatcctggtggcttctctaggtgtcgttgtgtgcggtcctcttgtttggctgtgcgtgtgaacacgtgtgtgagttcaccatgtactgtactgtgattttttttttgtcttgttttgtttctctacactgtctgtaacctgtagtaggctctgacctagtcaggctggaagcgtcaggatatcttttcttcgtgctggtgagggctggccctaaacatccacctaatcctttcaaatcagcccggcaaaagctagactctcctcgtgtctacggcatctcttatgatcattggctgccatccaggaccccaatttgtgcttcagggggataatctccttctctcggatcattgtgatggatgctggaacctcagggtatggagctcacatcagttcatcatggtgggtgttagagaattcggtgacatgcctagtgctgagccttggctgggccatgagagtctgtatactctaaaaagcatgcagcatggtgcccctcttctgaccaacacacacacgacccctcccccaacacccccaaattcaagagtggatgtggccctgtcacaggtagaaaaacctatttagttaattctttcttggcccacagtctcccagaaatgatgttttgagtccctatagtttaaactccctctcttaaatggagcagctggttgaggctttctagatctgtttgcatcttctttaaaactaagtggtgagcatgcattgtggtgtagaggcaggcattatgtaggataagagctccggggggattcttcatgcaccagtgtttagggtacgtgcttcctaagtaaatccaaacattgtctccatcctccccgtcattagtgctctttcaatgtgatgtgggaaagcaggaggatggacacaccccactgaaagatgtaggcaggggcaggtctctcaaccaggcatatttttaaaagttgcttctgtactggttctcttcttttgctctgaggtgtgggctccctcatctcgtaaccagagaccagcacatgtcagggaagcacccagtgtcggctccccatccaaatccacaccagcaccttgttacagacaagaagtcagaggaaagggcggggtccctgcagggctgaagcctaagctactgtgaggcgctcacgagtggcagctcctgttactcccttttaaattacctgggaaatcttaacagaaaggtaatgggcccccagaaatacccacagcatagtgacctcagaccctgatactcaccacaaaacttttaagatgctgattgggagccgcttgtggctgctgggtgtgtgtgtgtgtgtgtgcgtgcgtgcgtgtgtgtgtgtctctgctggggaccctggccacccccctgctgctgtcttggtgcctgtcacccacatggtctgccatcctaacacccagctctgctcagaaaacgtcctgcgtggaggagggatgatgcagaattctgaagtcgacttccctctggctcctggcgtgccctcgctcccttcctgagcccagctcgtgttgcgccggaggctgcgcggcccctgatttctgcatggtgtagaactttctccaatagtcacattggcaaagggagaactggggtgggcggggggtggggctggcagggaattagaatttctctctctcttttaatagtt

SEQ ID NO: 163914 - DNA, 809 bp, Homo sapiens
  Payload ID: 12273
  Gene Symbol: PTCH1
  Gene Name: patched 1
  ENST ID: ENST00000551845
  CDS Start-End: 288-809
atccatgtggctgccctcttccgatcacaaatattgggaaggctactggccggaaagcgccgctgtggctgagagcgaagtttcagagactcttatttaaactgggttgttacattcaaaaaaactgcggcaagttcttggttgtgggcctcctcatatttggggccttcgcggtgggattaaaagcagcgaacctcgagaccaacgtggaggagctgtgggtggaagttggaggacgagtaagtcgtgaattaaattatactcgccagaagattggagaagaggctatgtttaatcctcaactcatgatacagacccctaaagaagaaggtgctaatgtcctgaccacagaagcgctcctacaacacctggactcggcactccaggccagccgtgtccatgtatacatgtacaacaggcagtggaaattggaacatttgtgttacaaatcaggagagcttatcacagaaacaggttacatggatcagataatagaatatctttacccttgtttgattattacacctttggactgcttctgggaaggggcgaaattacagtctgggacagcatacctcctaggtaaacctcctttgcggtggacaaacttcgaccctttggaattcctggaagagttaaagaaaataaactatcaagtggacagctgggaggaaatgctgaataaggctgaggttggtcatggttacatggaccgcccctgcctcaatccggccgatccagactgccccgccacagcccccaacaaaaattcaaccaaacctcttgatatggcccttgttttgaatggt

SEQ ID NO: 163915 - DNA, 366 bp, Homo sapiens
  Payload ID: 12273
  Gene Symbol: PTCH1
  Gene Name: patched 1
  ENST ID: ENST00000551623
  CDS Start-End: 1-51
gacgacaggggagacaaagagacccgcagcgacaagttggaggacgagtaagtcgtgaattaaattatactcgccagaagattggagaagaggctatgtttaatcctcaactcatgatacagacccctaaagaagaaggtgctaatgtcctgaccacagaagcgctcctacaacacctggactcggcactccaggccagccgtgtccatgtatacatgtacaacaggcagtggaaattggaacatttgtgttacaaatcaggagagcttatcacagaaacaggttacatggatcagataatagaatatctttacccttgtttgattattacacctttggactgcttctgggaaggggcgaaattac

SEQ ID NO: 163916 - DNA, 1037 bp, Homo sapiens
  Payload ID: 12273
  Gene Symbol: PTCH1
  Gene Name: patched 1
  ENST ID: ENST00000553011
  CDS Start-End: 516-1037
aattcagctcacacagcctctccccacgctatggaaatgcgtcgggagtgaactccggcggccgcgctcaccacgtggatccccacttactaccattctcggcgggggtccagttgggggaacccgcaatatgttgttccaaagagcgctcgcccctagcgcccgtccccgagggtgatggacagagcaggactggtttgctggctcctgaaccttgggctccatcgctgggattacgcagcccctcccttctcagctctggggggaaggctactggccggaaagcgccgctgtggctgagagcgaagtttcagagactcttatttaaactgggttgttacattcaaaaaaactgcggcaagttcttggttgtgggcctcctcatatttggggccttcgcggtgggattaaaagcagcgaacctcgagaccaacgtggaggagctgtgggtggaagttggaggacgagtaagtcgtgaattaaattatactcgccagaagattggagaagaggctatgtttaatcctcaactcatgatacagacccctaaagaagaaggtgctaatgtcctgaccacagaagcgctcctacaacacctggactcggcactccaggccagccgtgtccatgtatacatgtacaacaggcagtggaaattggaacatttgtgttacaaatcaggagagcttatcacagaaacaggttacatggatcagataatagaatatctttacccttgtttgattattacacctttggactgcttctgggaaggggcgaaattacagtctgggacagcatacctcctaggtaaacctcctttgcggtggacaaacttcgaccctttggaattcctggaagagttaaagaaaataaactatcaagtggacagctgggaggaaatgctgaataaggctgaggttggtcatggttacatggaccgcccctgcctcaatccggccgatccagactgccccgccacagcccccaacaaaaattcaaccaaacctcttgatatggcccttgttttgaatggt

SEQ ID NO: 163917 - DNA, 881 bp, Homo sapiens
  Payload ID: 12273
  Gene Symbol: PTCH1
  Gene Name: patched 1
  ENST ID: ENST00000547672
  CDS Start-End: 360-881
actcacacctctccaggaaaagcagcagacaaatggggattgaaaaattcaaaccctccctctggtcctgggaggaaagggctgtctgaggtccgcagggggtggaggggaaggctactggccggaaagcgccgctgtggctgagagcgaagtttcagagactcttatttaaactgggttgttacattcaaaaaaactgcggcaagttcttggttgtgggcctcctcatatttggggccttcgcggtgggattaaaagcagcgaacctcgagaccaacgtggaggagctgtgggtggaagttggaggacgagtaagtcgtgaattaaattatactcgccagaagattggagaagaggctatgtttaatcctcaactcatgatacagacccctaaagaagaaggtgctaatgtcctgaccacagaagcgctcctacaacacctggactcggcactccaggccagccgtgtccatgtatacatgtacaacaggcagtggaaattggaacatttgtgttacaaatcaggagagcttatcacagaaacaggttacatggatcagataatagaatatctttacccttgtttgattattacacctttggactgcttctgggaaggggcgaaattacagtctgggacagcatacctcctaggtaaacctcctttgcggtggacaaacttcgaccctttggaattcctggaagagttaaagaaaataaactatcaagtggacagctgggaggaaatgctgaataaggctgaggttggtcatggttacatggaccgcccctgcctcaatccggccgatccagactgccccgccacagcccccaacaaaaattcaaccaaacctcttgatatggcccttgttttgaatggt

SEQ ID NO: 163918 - DNA, 864 bp, Homo sapiens
  Payload ID: 12273
  Gene Symbol: PTCH1
  Gene Name: patched 1
  ENST ID: ENST00000546820
  CDS Start-End: 343-864
actcacacctctccaggaaaagcagcagacaaatggggattgaaaaattcaaaccctccctctggtcctgggaggaaagggctgtctgaggggaaggctactggccggaaagcgccgctgtggctgagagcgaagtttcagagactcttatttaaactgggttgttacattcaaaaaaactgcggcaagttcttggttgtgggcctcctcatatttggggccttcgcggtgggattaaaagcagcgaacctcgagaccaacgtggaggagctgtgggtggaagttggaggacgagtaagtcgtgaattaaattatactcgccagaagattggagaagaggctatgtttaatcctcaactcatgatacagacccctaaagaagaaggtgctaatgtcctgaccacagaagcgctcctacaacacctggactcggcactccaggccagccgtgtccatgtatacatgtacaacaggcagtggaaattggaacatttgtgttacaaatcaggagagcttatcacagaaacaggttacatggatcagataatagaatatctttacccttgtttgattattacacctttggactgcttctgggaaggggcgaaattacagtctgggacagcatacctcctaggtaaacctcctttgcggtggacaaacttcgaccctttggaattcctggaagagttaaagaaaataaactatcaagtggacagctgggaggaaatgctgaataaggctgaggttggtcatggttacatggaccgcccctgcctcaatccggccgatccagactgccccgccacagcccccaacaaaaattcaaccaaacctcttgatatggcccttgttttgaatggt

SEQ ID NO: 163919 - DNA, 553 bp, Homo sapiens
  Payload ID: 12273
  Gene Symbol: PTCH1
  Gene Name: patched 1
  ENST ID: ENST00000548420
  CDS Start-End: 354-553
aagcgggcgtgggcgcgcgggccgcgactccccggcgctcactcctcccttctgcttcgtccccaggggaaggctactggccggaaagcgccgctgtggctgagagcgaagtttcagagactcttatttaaactgggttgttacattcaaaaaaactgcggcaagttcttggttgtgggcctcctcatatttggggccttcgcggtgggattaaaagcagcgaacctcgagaccaacgtggaggagctgtgggtggaagaggtaaacctcctttgcggtggacaaacttcgaccctttggaattcctggaagagttaaagaaaataaactatcaagtggacagctgggaggaaatgctgaataaggctgaggttggtcatggttacatggaccgcccctgcctcaatccggccgatccagactgccccgccacagcccccaacaaaaattcaaccaaacctcttgatatggcccttgttttgaatggtggatgtcatggcttatccagaaagtatatgcactggcaggaggagttgattgtgggtggcacagt

SEQ ID NO: 163920 - DNA, 1254 bp, Homo sapiens
  Payload ID: 12273
  Gene Symbol: PTCH1
  Gene Name: patched 1
  ENST ID: ENST00000468211
  CDS Start-End: 587-1138
cggccgcggggggcggggagagggtggctaggctcgcgggagctcgccgggcagggcgcctcccaggaaggcggggaggggagcgcctgtttacccaggagggctgtgctgatagcacgttcctcgagtttactttgctttccttgagtttattgtaaaggggtaaagttttcggatccgtcacgtgaccctgacaggtcctgcctatggcgcggcagaccacccacgccgagggccatggaactgcttaatagaaacaggcttgtaattgtgagtccgcgctgcactccgccgaaagcctccggcggcccagcgcgccggggtttttacactttccgttccttttgtaaagacggaggaggaggagaagaagaagaagaaaacggaggagaagaaaaagacgacaggggagacaaagagacccgcagcgacaaggcaagggggagacgagggaagactgggagaagacggaggagcggaggacgaggaaaggggggccagggaaaaaaaaggaattgatgtgaaatccaagcccagcgtccgcgccatcggcacccgcgctccgagcaggggttgacggccggctatggggaaggctactggccggaaagcgccgctgtggctgagagcgaagtttcagagactcttatttaaactgggttgttacattcaaaaaaactgcggcaagttcttggttgtgggcctcctcatatttggggccttcgcggtgggattaaaagcagcgaacctcgagaccaacgtggaggagctgtgggtggaagttggaggacgagtaagtcgtgaattaaattatactcgccagaagattggagaagaggctatgtttaatcctcaactcatgatacagacccctaaagaagaaggtgctaatgtcctgaccacagaagcgctcctacaacacctggactcggcactccaggccagccgtgtccatgtatacatgtacaacaggcagtggaaattggaacatttgtgttacaaatcaggagagcttatcacagaaacaggttacatggatcagataatagaatatctttacccttgtttgattattacacctttggactgcttctgggaaggggcgaaattacagtctgggacagcatacctcctgtaagtgtgtgatcatgctttctgatgtctgtgacttctctaggactcagtgtttctaatgttgcttatcattgtttgttccatttcagttttgaacaagaaataaaaacattgaaattc

SEQ ID NO: 163921 - DNA, 630 bp, Homo sapiens
  Payload ID: 12273
  Gene Symbol: PTCH1
  Gene Name: patched 1
  ENST ID: ENST00000550914
  CDS Start-End: 253-492
gggaaggctactggccggaaagcgccgctgtggctgagagcgaagtttcagagactcttatttaaactgggttgttacattcaaaaaaactgcggcaagttcttggttgtgggcctcctcatatttggggccttcgcggtgggattaaaagcagcgaacctcgagaccaacgtggaggagctgtgggtggaagttggaggacgagtaagtcgtgaattaaattatactcgccagaagattggagaagaggctatgtttaatcctcaactcatgatacagacccctaaagaagaaggtgctaatgtcctgaccacagaagcgctcctacaacacctggactcggcactccaggccagccgtgtccatgtatacatgtacaacagtgagaaatttttgtctctgcttttcattttattaggcagtggaaattggaacatttgtgttacaaatcaggagagcttatcacagaaacaggttacatggatcagataatagaatatctttacccttgtttgattattacacctttggactgcttctgggaaggggcgaaattacagtctgggacagcatacctcctaggtaaacctcctttgcggtggacaaacttcgaccctttggaattcctgg

SEQ ID NO: 163922 - DNA, 539 bp, Homo sapiens
  Payload ID: 12273
  Gene Symbol: PTCH1
  Gene Name: patched 1
  ENST ID: ENST00000551630
  CDS Start-End: 264-539
ttcgtccccaggggaaggctactggccggaaagcgccgctgtggctgagagcgaagtttcagagactcttatttaaactgggttgttacattcaaaaaaactgcggcaagttcttggttgtgggcctcctcatatttggggccttcgcggtgggattaaaagcagcgaacctcgagaccaacgtggaggagctgtgggtggaagttggaggacgagtaagtcgtgaattaaattatactcgccagaagattggagaagaggctatgtttaatcctcaactcatgatacagacccctaaagaagaaggtgctaatgtcctgaccacagaagcgctcctacaacacctggactcggcactccaggccagccgtgtccatgtatacatgtacaacaggcagtggaaattggaacatttgtgttacaaatcaggagagcttatcacagaaacaggttacatggatcagataatagaatatctttacccttgtttgattattacacctttggactgcttctgggaaggggcgaaattacagtct

SEQ ID NO: 163923 - DNA, 4225 bp, Homo sapiens
  Payload ID: 12274
  Gene Symbol: PTCH2
  Gene Name: patched 2
  Uniprot ID: Q9Y6C5
  ENST ID: ENST00000372192
  CDS Start-End: 132-3743
cccacgcccgcgccttggcggccccactgaatccctacgcggggcccagcggtaccgggagaccgggctagcctatgggagcgcccagataacgcgggttgggggcgcccgcgccccccatccccgccagcatgactcgatcgccgcccctcagagagctgcccccgagttacacacccccagctcgaaccgcagcaccccagatcctagctgggagcctgaaggctccactctggcttcgtgcttacttccagggcctgctcttctctctgggatgcgggatccagagacattgtggcaaagtgctctttctgggactgttggcctttggggccctggcattaggtctccgcatggccattattgagacaaacttggaacagctctgggtagaagtgggcagccgggtgagccaggagctgcattacaccaaggagaagctgggggaggaggctgcatacacctctcagatgctgatacagaccgcacgccaggagggagagaacatcctcacacccgaagcacttggcctccacctccaggcagccctcactgccagtaaagtccaagtatcactctatgggaagtcctgggatttgaacaaaatctgctacaagtcaggagttccccttattgaaaatggaatgattgagcggatgattgagaagctgtttccgtgcgtgatcctcacccccctcgactgcttctgggagggagccaaactccaagggggctccgcctacctgcccggccgcccggatatccagtggaccaacctggatccagagcagctgctggaggagctgggtccctttgcctcccttgagggcttccgggagctgctagacaaggcacaggtgggccaggcctacgtggggcggccctgtctgcaccctgatgacctccactgcccacctagtgcccccaaccatcacagcaggcaggctcccaatgtggctcacgagctgagtgggggctgccatggcttctcccacaaattcatgcactggcaggaggaattgctgctgggaggcatggccagagacccccaaggagagctgctgagggcagaggccctgcagagcaccttcttgctgatgagtccccgccagctgtacgagcatttccggggtgactatcagacacatgacattggctggagtgaggagcaggccagcacagtgctacaagcctggcagcggcgctttgtgcagctggcccaggaggccctgcctgagaacgcttcccagcagatccatgccttctcctccaccaccctggatgacatcctgcatgcgttctctgaagtcagtgctgcccgtgtggtgggaggctatctgctcatgctggcctatgcctgtgtgaccatgctgcggtgggactgcgcccagtcccagggttccgtgggccttgccggggtactgctggtggccctggcggtggcctcaggccttgggctctgtgccctgctcggcatcaccttcaatgctgccactacccaggtgctgcccttcttggctctgggaatcggcgtggatgacgtattcctgctggcgcatgccttcacagaggctctgcctggcacccctctccaggagcgcatgggcgagtgtctgcagcgcacgggcaccagtgtcgtactcacatccatcaacaacatggccgccttcctcatggctgccctcgttcccatccctgcgctgcgagccttctccctacaggcggccatagtggttggctgcacctttgtagccgtgatgcttgtcttcccagccatcctcagcctggacctacggcggcgccactgccagcgccttgatgtgctctgctgcttctccagtccctgctctgctcaggtgattcagatcctgccccaggagctgggggacgggacagtaccagtgggcattgcccacctcactgccacagttcaagcctttacccactgtgaagccagcagccagcatgtggtcaccatcctgcctccccaagcccacctggtgcccccaccttctgacccactgggctctgagctcttcagccctggagggtccacacgggaccttctaggccaggaggaggagacaaggcagaaggcagcctgcaagtccctgccctgtgcccgctggaatcttgcccatttcgcccgctatcagtttgccccgttgctgctccagtcacatgctaaggccatcgtgctggtgctctttggtgctcttctgggcctgagcctctacggagccaccttggtgcaagacggcctggccctgacggatgtggtgcctcggggcaccaaggagcatgccttcctgagcgcccagctcaggtacttctccctgtacgaggtggccctggtgacccagggtggctttgactacgcccactcccaacgcgccctctttgatctgcaccagcgcttcagttccctcaaggcggtgctgcccccaccggccacccaggcaccccgcacctggctgcactattaccgcaactggctacagggaatccaggctgcctttgaccaggactgggcttctgggcgcatcacccgccactcgtaccgcaatggctctgaggatggggccctggcctacaagctgctcatccagactggagacgcccaggagcctctggatttcagccagctgaccacaaggaagctggtggacagagagggactgattccacccgagctcttctacatggggctgaccgtgtgggtgagcagtgaccccctgggtctggcagcctcacaggccaacttctaccccccacctcctgaatggctgcacgacaaatacgacaccacgggggagaaccttcgcatcccgccagctcagcccttggagtttgcccagttccccttcctgctgcgtggcctccagaagactgcagactttgtggaggccatcgagggggcccgggcagcatgcgcagaggccggccaggctggggtgcacgcctaccccagcggctcccccttcctcttctgggaacagtatctgggcctgcggcgctgcttcctgctggccgtctgcatcctgctggtgtgcactttcctcgtctgtgctctgctgctcctcaacccctggacggctggcctcatagtgctggtcctggcgatgatgacagtggaactctttggtatcatgggtttcctgggcatcaagctgagtgccatccccgtggtgatccttgtggcctctgtaggcattggcgttgagttcacagtccacgtggctctgggcttcctgaccacccagggcagccggaacctgcgggccgcccatgcccttgagcacacatttgcccccgtgaccgatggggccatctccacattgctgggtctgctcatgcttgctggttcccactttgacttcattgtaaggtacttctttgcggcgctgacagtgctcacgctcctgggcctcctccatggactcgtgctgctgcctgtgctgctgtccatcctgggcccgccgccagaggtgatacagatgtacaaggaaagcccagagatcctgagtccaccagctccacagggaggcgggcttaggtggggggcatcctcctccctgccccagagctttgccagagtgactacctccatgaccgtggccatccacccaccccccctgcctggtgcctacatccatccagcccctgatgagcccccttggtcccctgctgccactagctctggcaacctcagttccaggggaccaggtccagccactgggtgaaagagcagctgaagcacagagaccatgtgtggggcgtgtggggtcactgggaagcactgggtctggtgttagacgcaggatggacccctggagggccctgctgctgctgcatcccctctcccgacccagctgtcatgggcctccctgatatccatacagaacagccaccgatttgcacatccaggcctgtgtgagcctgtatctgtgtcacttgagagtgaaagctggcacttggggctgcagtgcagccctgtcccccttcccaccccacaccactgcctgcccagctgaccaagcctgagggaccctccagcacccttccgtctggtgactcctgggcaggctctccatatccctgcccacctcctaccacatccattatttatatgaaaatgtctatttttgtagtatacatacatgttagctatgatgaaagttttattttttaaagaatgaaatatattctatgtgaactaatctca

SEQ ID NO: 163924 - DNA, 4298 bp, Homo sapiens
  Payload ID: 12274
  Gene Symbol: PTCH2
  Gene Name: patched 2
  Uniprot ID: Q9Y6C5
  ENST ID: ENST00000447098
  CDS Start-End: 13-3453
atccccgccagcatgactcgatcgccgcccctcagagagctgcccccgagttacacacccccagctcgaaccgcagcaccccagatcctagctgggagcctgaaggctccactctggcttcgtgcttacttccagggcctgctcttctctctgggatgcgggatccagagacattgtggcaaagtgctctttctgggactgttggcctttggggccctggcattaggtctccgcatggccattattgagacaaacttggaacagctctgggtagaagtgggcagccgggtgagccaggagctgcattacaccaaggagaagctgggggaggaggctgcatacacctctcagatgctgatacagaccgcacgccaggagggagagaacatcctcacacccgaagcacttggcctccacctccaggcagccctcactgccagtaaagtccaagtatcactctatgggaagtcctgggatttgaacaaaatctgctacaagtcaggagttccccttattgaaaatggaatgattgagcggatgattgagaagctgtttccgtgcgtgatcctcacccccctcgactgcttctgggagggagccaaactccaagggggctccgcctacctgcccggccgcccggatatccagtggaccaacctggatccagagcagctgctggaggagctgggtccctttgcctcccttgagggcttccgggagctgctagacaaggcacaggtgggccaggcctacgtggggcggccctgtctgcaccctgatgacctccactgcccacctagtgcccccaaccatcacagcaggcaggctcccaatgtggctcacgagctgagtgggggctgccatggcttctcccacaaattcatgcactggcaggaggaattgctgctgggaggcatggccagagacccccaaggagagctgctgagggcagaggccctgcagagcaccttcttgctgatgagtccccgccagctgtacgagcatttccggggtgactatcagacacatgacattggctggagtgaggagcaggccagcacagtgctacaagcctggcagcggcgctttgtgcagctggcccaggaggccctgcctgagaacgcttcccagcagatccatgccttctcctccaccaccctggatgacatcctgcatgcgttctctgaagtcagtgctgcccgtgtggtgggaggctatctgctcatgctggcctatgcctgtgtgaccatgctgcggtgggactgcgcccagtcccagggttccgtgggccttgccggggtactgctggtggccctggcggtggcctcaggccttgggctctgtgccctgctcggcatcaccttcaatgctgccactacccaggtgctgcccttcttggctctgggaatcggcgtggatgacgtattcctgctggcgcatgccttcacagaggctctgcctggcacccctctccaggagcgcatgggcgagtgtctgcagcgcacgggcaccagtgtcgtactcacatccatcaacaacatggccgccttcctcatggctgccctcgttcccatccctgcgctgcgagccttctccctacaggcggccatagtggttggctgcacctttgtagccgtgatgcttgtcttcccagccatcctcagcctggacctacggcggcgccactgccagcgccttgatgtgctctgctgcttctccagtccctgctctgctcaggtgattcagatcctgccccaggagctgggggacgggacagtaccagtgggcattgcccacctcactgccacagttcaagcctttacccactgtgaagccagcagccagcatgtggtcaccatcctgcctccccaagcccacctggtgcccccaccttctgacccactgggctctgagctcttcagccctggagggtccacacgggaccttctaggccaggaggaggagacaaggcagaaggcagcctgcaagtccctgccctgtgcccgctggaatcttgcccatttcgcccgctatcagtttgccccgttgctgctccagtcacatgctaaggccatcgtgctggtgctctttggtgctcttctgggcctgagcctctacggagccaccttggtgcaagacggcctggccctgacggatgtggtgcctcggggcaccaaggagcatgccttcctgagcgcccagctcaggtacttctccctgtacgaggtggccctggtgacccagggtggctttgactacgcccactcccaacgcgccctctttgatctgcaccagcgcttcagttccctcaaggcggtgctgcccccaccggccacccaggcaccccgcacctggctgcactattaccgcaactggctacagggaatccaggctgcctttgaccaggactgggcttctgggcgcatcacccgccactcgtaccgcaatggctctgaggatggggccctggcctacaagctgctcatccagactggagacgcccaggagcctctggatttcagccagctgaccacaaggaagctggtggacagagagggactgattccacccgagctcttctacatggggctgaccgtgtgggtgagcagtgaccccctgggtctggcagcctcacaggccaacttctaccccccacctcctgaatggctgcacgacaaatacgacaccacgggggagaaccttcgcatcccgccagctcagcccttggagtttgcccagttccccttcctgctgcgtggcctccagaagactgcagactttgtggaggccatcgagggggcccgggcagcatgcgcagaggccggccaggctggggtgcacgcctaccccagcggctcccccttcctcttctgggaacagtatctgggcctgcggcgctgcttcctgctggccgtctgcatcctgctggtgtgcactttcctcgtctgtgctctgctgctcctcaacccctggacggctggcctcatagtgctggtcctggcgatgatgacagtggaactctttggtatcatgggtttcctgggcatcaagctgagtgccatccccgtggtgatccttgtggcctctgtaggcattggcgttgagttcacagtccacgtggctctgggcttcctgaccacccagggcagccggaacctgcgggccgcccatgcccttgagcacacatttgcccccgtgaccgatggggccatctccacattgctgggtctgctcatgcttgctggttcccactttgacttcattgtaaggtacttctttgcggcgctgacagtgctcacgctcctgggcctcctccatggactcgtgctgctgcctgtgctgctgtccatcctgggcccgccgccagaggtgatacagatgtacaaggaaagcccagagatcctgagtccaccagctccacagggaggcgggcttaggcccgaggagatctagcctctgcctcccaccccagcaccccctcatcagacacacggagcgccactgtctggacaggctgaattggtcttcgggtccctaatttctcatacgccattccctctgcctagaacactttctcacctccccttgatgtgaccccatatcacccttcgaggtgaattggatcggatgccatctcctccaggaggggtggggtcgtgcctcctgtgaggtcccagtgcccctgagtgtctgtgcccgtctgtttccccgtccctctctctaagcccggaggcttactgcgggtaaggacggcgggacaggaccttaacccctgggacgaacaccagctccgcaaaggactccgcacccggcgccgcccacggggtgcgggtcccaggaggaccagcagagaggagcataggagagcaaaggagatcagtgacccatggcttccccggtggcgcggaacagcccggagccgcctgtgatttgcatacccatggtgcaccacgaaaagataccctcaagatgcttgcactccctctgtgcgcgcatttctgcactgttttagagcatgatgcctcttacacgcatctgtgtgcataaactacatatagggagtgcgtaccacgcaggcatccaacaaccataagtgtgttaagtgttagttctccctgcgaggttcgaagcggaagtcacgaatatactcgggtttctcttcaaagcgcataaatctttcgccttttactaaagatttccgtggagagaaagttgtgagtttttattcaattttttgaggcctcttatttcctgaggctacatttttaagtattaaaagttaggcaactacaaccaag

SEQ ID NO: 163925 - DNA, 1110 bp, Homo sapiens
  Payload ID: 12274
  Gene Symbol: PTCH2
  Gene Name: patched 2
  ENST ID: ENST00000438067
  CDS Start-End: 1-265
ctttgacttcattgtaaggtacttctttgcggcgctgacagtgctcacgctcctgggcctcctccatggactcgtgctgctgcctgtgctgctgtccatcctgggcccgccgccagaggtgatacagatgtacaaggaaagcccagagatcctgagtccaccagctccacagggaggcgggcttagagtggggagtttgcaagtgaacattagctattggaaggagcttctctggtgccaggacctgaggcccgaggagatctagcctctgcctcccaccccagcaccccctcatcagacacacggagcgccactgtctggacaggctgaattggtcttcgggtccctaatttctcatacgccattccctctgcctagaacactttctcacctccccttgatgtgaccccatatcacccttcgaggtgaattggatcggatgccatctcctccaggaggggtggggtcgtgcctcctgtgaggtcccagtgcccctgagtgtctgtgcccgtctgtttccccgtccctctctctaagcccggaggcttactgcgggtaaggacggcgggacaggaccttaacccctgggacgaacaccagctccgcaaaggactccgcacccggcgccgcccacggggtgcgggtcccaggaggaccagcagagaggagcataggagagcaaaggagatcagtgacccatggcttccccggtggcgcggaacagcccggagccgcctgtgatttgcatacccatggtgcaccacgaaaagataccctcaagatgcttgcactccctctgtgcgcgcatttctgcactgttttagagcatgatgcctcttacacgcatctgtgtgcataaactacatatagggagtgcgtaccacgcaggcatccaacaaccataagtgtgttaagtgttagttctccctgcgaggttcgaagcggaagtcacgaatatactcgggtttctcttcaaagcgcataaatctttcgccttttactaaagatttccgtggagagaaagttgtgagtttttattcaattttttgaggcctcttatttcctgaggctacatttttaagtattaaaagttaggcaactacaaccaag

SEQ ID NO: 163926 - DNA, 13714 bp, Homo sapiens
  Payload ID: 12275
  Gene Symbol: PTCHD1
  Gene Name: patched domain containing 1
  Uniprot ID: Q96NR3
  ENST ID: ENST00000379361
  CDS Start-End: 861-3527
tttggaaggaggcgtgatttccacgttcgagcgtcttcgctccccaccccctctcggcaccagccagtgcgcgccaccacctgagcctggcgagagccgggacgcacgcagtcttcagcctgctcctttaagcctctggagagactcggctctgagcgggtccgcccgacacccgccccctccccccactcctgagaactctttactttttgtttggaaaatcggggccatttctttatttatctctgggtcttcccggaggagggcagagaaggggagagcgagcttggcgggccggaccgggggaggggagcgaagggaggggaggggactgggtgtagcctggaattctccgtcctcgtgttcctgggcgggcgcgcagagtctcctggcgatagcgccgtcgccgctccccgcgccaccccgtcgttggccttgggggtcgggtgagtggggtcatgacgagccgcgggggctgccccgggccccgcccgcgctgagaggggacgcggccgcgcggcgcggagcccccctggcggggaggccgcggggggtggggagggcgcacgcggtagggcggagtgggggcggcgcagaggccgccaagctggggggctctccgggagggcgcggccgcgggcaggagggcgtgtctccggctcgaggggaccctcccgaggcgcggcgcgggactccccgatggtggtgccgcggctccgggagagctcagggtctcgccgccgccgccgtcgccgccgccgcgggcgccgctgccgccgccgccgccgccgccgccgccgccgcccgaacccgcgccgagcgtgcgcctcgccctcctcccgcgcccgctctgctctaggatgctgcggcaggttctgcacaggggcttgaggacgtgtttctcccggctcggccacttcattgccagtcaccctgtcttcttcgcctcggcgccggtgctcatctccatcctgctcggcgccagcttcagccgctaccaggtcgaggagagcgtggagcacctgctggcgccccagcacagcctggccaagatcgagcgcaacctcgttaacagcctcttcccggtcaaccgctccaagcaccgtctctactcggacctgcagacccccgggcgctacggccgggtcatcgtcacctccttccagaaagccaacatgctggaccagcatcacaccgacctgatcttaaagttgcatgctgctgtcaccaagatccaggttccaaggcctggttttaattacacgtttgcccatatatgtatcctgaataatgataagacttgcatcgtggatgacatagtgcacgtcctggaagagctaaagaatgctcgggccaccaatcggaccaattttgctatcacatacccaatcactcacttaaaggacgggagggctgtgtacaatgggcaccagcttgggggcgtcactgtgcacagcaaagaccgggtgaaatctgcagaggccatccagctcacctactacctgcagtcaatcaacagtctcaatgacatggtggctgagaggtgggagtccagcttctgcgacactgtcagactgtttcagaaatccaacagcaaagtcaaaatgtacccttacacgtcctcctcactgagggaagatttccagaagaccagccgcgtatcagaacgttacctggtcaccagcctgattctggtggttaccatggccatcctgtgttgctctatgcaggactgcgtccgcagcaaaccctggctaggcctgctcggattggtgaccataagcctggccactctcactgcagccgggatcatcaatcttactggtgggaaatataattccaccttcctgggagtccctttcgtcatgctaggtcatggattatatgggacttttgaaatgttatcctcctggaggaaaactagagaagaccaacatgttaaagagagaactgcagcagtctatgcagactccatgctctccttttctctcaccactgccatgtacctggtcacctttggcataggggccagccctttcacgaacattgaggcagccaggattttctgctgcaattcctgtattgcaatcttcttcaactacctctatgtactctcgttttatggttccagcctagtgttcactggctacatagaaaacaattaccagcatagtatcttctgtagaaaagtcccaaagcctgaggcattgcaggagaagccggcatggtacaggtttctcctgacggccagattcagtgaggacacagctgaaggcgaggaagcgaacacttacgagagtcacctattggtatgtttcctcaaacgctattactgtgactggataaccaacacctatgtcaagccttttgtagttctcttttaccttatttatatttcctttgccttaatgggctatctgcaggtcagtgaagggtcagaccttagtaacattgtagcaaccgcgacacaaaccattgagtacactactgcccagcaaaagtacttcagcaactacagtcctgtgattgggttttacatatatgagtctatagaatactggaacactagtgtccaagaagatgttctagaatacaccaaggggtttgtgcggatatcctggtttgagagctatttaaattaccttcggaaactcaatgtatccactggcttgcctaagaaaaatttcacagacatgttgaggaattcctttctgaaagcccctcaattttcacattttcaagaggacatcatcttctctaaaaaatacaatgatgaggtcgatgtagtggcctccagaatgtttttggtggccaagaccatggaaacaaacagagaagaactctatgatctcttggaaaccctgaggagactttctgtcacctccaaggtgaagttcatcgtcttcaatccgtcctttgtatacatggatcgatatgcctcctctctgggagcccccctgcacaactcctgcatcagtgctttgttcctgctcttcttctcggcattcctggtggcagattcactgattaacgtctggatcactctcacagttgtgtccgtggagtttggagtgataggtttcatgacattatggaaagtagaactggactgcatttctgtgctatgcttaatttatggaattaattacacaattgacaattgtgctccaatgttatccacatttgttctgggcaaggatttcacaagaactaaatgggtaaaaaatgccctggaagtgcatggggtagctattttacagagttacctctgctatattgttggtctgattcctcttgcagctgtgccttcaaatctgacctgtacactgttcaggtgcttgtttttaatagcatttgtcaccttctttcactgctttgccattttacctgtgatactgactttcctgccaccctctaagaaaaaaaggaaagagaagaaaaatcctgagaaccgggaggaaattgagtgtgtagaaatggtagatatcgatagtacccgtgtggttgaccaaattacaacagtgtgataatgtctgcttggcatattttcaccttaggtcttatcaagaccaaagagattatgttaatgaaacaattaaattcaaagttcttcccttttttaaagataggaaacaggcattgccaaaaaaaaaaaaaaaaaaaaaaggaaaggacagtggggagaaatgggcctggcatattttcagtctttaaaacaaaggagttgttatgagaattcacacacacatagacacacacacacacacacacacacacacacacacacacacaccctgggagacctatagtctcttaaactaagatcaagtagaagaaagcttattaacaagcaggatcctgccttatccaaactgcagatgttgctggcattgtgacaaaacccactgattgaaaggtcaactgccaaggcagaaacacctttaagcattgttcaaacaataaggcttccagaacttctgtagagcagtagctccagtcatggtctgtggtttgaggttttagctgtctcacctagctccctaacactgaaggagatacttgtgaaagttctgaccagcaaaagcaagccagagccttggaaactgatatgtggtagagtggccatcactcatggactaaaattgattcaccgctaaatttacccaggtgaagcagtttcgttgtctagaatgaaattatcatattccgccattggtatgcctttaacatttgtatagtttggtttgcttaaaacaccttaaaaccaatgacagctccagcactgcagaattggtgtgattctactttggaatagcttgtcacttgtcaccaaatgggtctgctttattagttacagctcttggcaggaggatccagggacccaaaaccacagggccaaacccaaatacctggcatgatggagcaaaagcaggtgtctacttggacccagatatagtgtctccattttaacaacaacaacaaaatagccagctggtacagctgtttgcattggccctacatgcattttttgcatggatatccagaaacatctgcccacacaaaactgcggggaaaaaaaatgaacactgaaatagttatttgctgttgcttccaacttgtagtgccagtctgcctttgctgtgaaacacacctgctcagagacagagaggggaagaagatctttggtaagtctaagtcctgacgctgagaagctttgtaaaagtgcagggagataaagggccaaaagggagatagatggaaaacactggaaaaagtattcactgatacaaatctatcaatgatggcagtccaattctcttgctaaagtggctgcacctcaccttgctggtcccccccacaccttttttgatgtccttctgcgtcatcatagcaaggcccttctgtaaattaacaagcctagatatttatactcttgacttccagtatctacagaagaatggttcatagatctaaacagaaatggtttagatctaaaaaggctgtatacgttgcccaggcccctgcatttctttaaatttataaaaatgaagctaaaacctggttacatttgaagcaaatatctacagtatttttcccttttagagatgtagcttccttagacatctgtagtggtaagcatttcccaaaagcatcttacctttctgaaccttagcagacatactgtgcagcttacctatcttctgcagaggaggaaactgagacctaggagaataaagtgactcactcaggtcacaccactaaagggttttcatcatttcagcatacctaagacagggcagtccaattttcagtattctcataagatggctattactcctctcaaaatgcatttccaaagtaggaacataggacttcgttggccacagggcagacatttttttagtgtctggaattaaaatgtttgaggtttaggtttgccattgtctttccaaaaggccaaataattcagatgtaaccacaccaagtgcaaacctgtgctttctatttcacgtactgttgtccatacagttctaaatacatgtgcaggggattgtagctaatgcattacacagtcgttcagtcttctctgcagacacactaagtgatcataccaacgtgttatacactcaactagaagataataagctttaatctgagggcaagtacagtcctgacaaaagggcaagtttgcataatagatcttcgatcaattctctctccaaggggcccgcaactaggctattattcataaaacacaactgaagaggggattggttttactgttaaatcatgtgttgctaaatcattttctgaacagtgtgttctaaatcagtcattgatttagtgtcagccacgtggagcacctcggcttaaagcagctccacaaaacctgacacaacacacacaccaattaaatggattttgttgagaatttaatcattcaatttggtcaaccagaatgacttcctgtggaactctgttttatgacagataatagttttccaacttgattgagtctctgtataccctgggatattgtattttttaatgaagggcattttcaaacttgtcaacttctcttttcagcacttgaaatgaaggcttatggaattctgactgtgaaatgaatttttctattgggagattatgcatgccaagatttattatttattgttagataattattatttatttgttaatactgattattgattattgctctgctgcattggtttagccccgctatggagaagacactttagaagtaactcagaatcacatccccataaaatctaagtctttacttcatcaagttttactttttgaattgctataaagacggaaaaattgatccctgcaaacacttgaagaagctgtgttttttttctttcaattaattccaaccaagacattaacgtccactttaccaaagaaacttacttggttggtttttagttggtgtttgttgtttgtttaccaaagaaaatattcgattcatcaaaaatattgctcctggtcaactaaaaaactgtgatactgggacttttttggccattcataaggaaaatttttaaaagtcaaggtaagggtgatattctctcatttagtggaagaagaagatgtcaattcacagggaatgtggtgttcgcaagaaagaaaatgatacttgaaatagggcattattgtttagcctacagcaacatttcaacaagcagcatcagggctcctcaggttaaaagaagtacagtttgtttcagagaaaaaggaagacaaaccctcgtgaaatgtttctccattgttccagctcataagttttactttgttttgggttttggagtttttagtttctttgatgtttgttttgctttaatttggtttgtggtttgtgtttgcttgtgtttgcttctgcctttcctaccttctgccttttactccctcagttttcagtcagaagtgtgataatcagatgccatcctccatggccacgcttatgtatgcaatataccgctccaaatgaggaccttggtaacccttgaccctttaattctaactaaccatcacccaatcgtaagtggcattatgggaccatgataccacttttctccagtgtcaatgacagagctcagctgtgtccatcacaagaaaaggtggaatgggcagctgtcttgggggtgtggcaagaggcagaacctcttggacacaaatgttatcttcctcataatggctttattcttttggatcctattaaagtacccctgtagcttatagtagtgtttgacctctgtgactctgttttctcatctgtaaaatggggataatatcagtaaatgtctttaaattcagcaaatacttatcgagtgccaaatatcgcccagatactgttcgagaggctggggacacaacagtcaacaaatcagattttttaaaatctgctcttgtagagtctacctttgagtgacattgcaggtatattgtggggattgaatgagatgagagatgacatttggaaagcactcttggaaaggcctggcaaagaaaagagactcaagacattatttgtaattcagcaatctcgcacagtagcattagggctcgggatgtaaagctactgagaagtagatttgagcctgagaattagggctacaaatacaatgagttgccacagaaggtagttaattaccagtcattttaggacatcaaaatgaagctgatcaccacatagtggggccactgtaaaggggctgcaagtcctggatgttggcatcatactatgatctttgaaaaaaacagatacaggcacttgcttttggggatggggaagggacaccactgattactgaataactgtggctggcttgtctgagggaatgtaaacattcccttgaggtaatttgcttttaattttgtgtaaaaagcaccaggtatttagagacataaagttcccgttttttaaaagaatagtaaatctgcaatacaaagaaaaatattaagttagtggattcgctggcaaagaactaagaatggctgcagccaacacactgcagagttcctccctgtggtggttacaactgttatttctgtttcatgccagtccaggagaaagcaaagaggaaagtggatgagctataatccgttcacctgaataggcagtgccaggatgtcccccccagcttgcctctcacccgccccgctgctgcccagctgatttgtttgaagtcctctttgatatctatgagagcaccgtggaaggaagaagaagggaggcgaccggagagctatggcctctgtgcagatttttgagttagattaaaattagtaccacctgattaggagcctacctggtgaggaaaaaagccttcttttcaaagtacaaaaaaaagcgatgtgtaccaaggagaaaaccagcagagaaagcttggtggaagaagtgatgttcttgtggaatgtgccagcagcttctccttccagaatgctgacaccagatgaatctttggttagaattaagcctacccctttgtttttcacatgagaaaactgaaccctcgagtaatgaaattatattcacagagctaattagaaacaggagactataattgaaatctagtttttagcctcaattctttctccattttgccactttactgccaaattctattcatctaaattattggggtcttaacctgggggccaaatgagttcatgggaggggtctctgagtttcctacaattaagttacatgcaaaaatgtgtgtatatgttcaacatgtgcattttcctaaactgagggctcagattccaaaagaggtctatgaccgaaaaagggtgaagaaccactgtcctaaattaatacagacctcattgggagtgtgatcctggtgtcctcattttggctaatgagcaatcaagaacttttgaactatcttttctctaaggatccaaaaatgcttcaaaatattggtttcttcatcccaagccaagtgcctacttctattcatttattcttcattcattctttcattcattcatttctttattctgcaaatgtattttcagtgccaattcatgttctagcagcagctaaatatgccctccacagcaggaccaggaaaggagccctctgtactgtgctcttgttggcaagaggaacaccaggttgctaccacattctcactgttgcaacaaattatatatagcctcaaattttcagtaaccatcccacacacacatacacacataaaggcagcagccaacaaagccaacatatagaagtgtgccctgtcaaagaaccaggaagagcagcctatttccaggttatatacagtgatatgctgtttacaactgcataccacatccttagaaggcctgctcccaaatgagccctactctgagatgtctacaccaggcatgctttcacacacgtgcagtaccctactctcaaaacaagtatggagagaataagtctcattcatctcgttaatatttttagtgggcaaagaagcaaccgtggccatggacagatgggtgcatttaaggacaggtgtggccgggcacagtggctcaagcctgtaatcccagcactttgggaggcggaggcgggcagatcacgaggttaagagattgagaccatcctggccagcatggtgaaaccccgcctctactaaaaaatacaaaaaaattagctgggcgtggtggcacgtgcctgtagtcccagctactcaggaggcaggagaatcccttgaacccgggaggtagaagttgcagtgagccgagatttcaccactgccctccagactggcaacagagtgagacttcgtctcaaaaaaataaaggacaagtgtgttttatacacaaatatgcagaagcccagttctcttgactccaagtcagaagctagataaaatagaggttgctgggggaagttggaaaataaatgactatactgtacttgttggctctgctgctgctgatataacttcaggcacaacggaagccgcctcggttggcctatgggaagggctgggtgaatcactgcttggccttgcatgaagcacaaaggacacaccaatggctgatcagtggcccttccatcatcttctgcccagccatgataaggaaagccttctattgagatggaggaatattagctcaactttgtagcatctgatgtaaagtttgaggggtttgtcttttttgtttgtttgtttgtttttttttgagatggagtctcactctgtcacccaggctggagtgcagtggcgccatctcagctcactgcaagctccacctcccaggttcacgacattctcctgcctcagcctcctgagtagctgggactacaggtgcccgccaccgcgcccggctaattgtgtgtgtgtgtgtgtgtgtgtgtgtgtgtgtgtttagtagagatggggtttcaccgtgttacccatgatagtctcgatctcctaacctcgtgatccacccgcctcggcctcccaaagtgctgggattacaggcgtgagccaccgtgcccggcaagggctttgttcattaggatcaacaaagtgctttgtctaattcctgcaaaatggcaaagacccagcccatttccattactcattccaggctcatgctcaggaaaactaataacgttctctttgacaaaacaatttccttaattttctaggatgaatcttgaacatgtttagctcagcctttcagatatttattctttaaattaccatcctgtcaaaattgcctttacgcactgatccagaatcaccaaggcagttgccacgatgcctcccaggactgtgggtgactgggcaaactggtaatgacccgttggctctgcttcacacacacacatacacattgacacacataaatgtacacatgcatatatgtgtgtacaacacaactataaaacatagaaacatatacctgtacatatgcacatgcttacatacacacatatcacagatgtgcatgcacacatacacatgcacaccaccttttacaatatgcctgacacatttgaggcacattaaaatgccttggcaggcccagccctatagttctgtaaggtttggcaggccaaaggcttcggatgtctgcaggataccattgaaaaaatgttatcttccccttctatatgtttcttatgcacgagcacagctaagagcagccaaatagtaagctttaaagaaaagaaacctggaaaagtgaatgtgccttgcaatttaaaaattgctaacagtttcacagtgggaaaattgcatttgttggaattttccaagtcataagcaagaagaatagcatagacccaaaacgacagagatctcttccaaggtatggaattgtggaaatttatttagaatatttgcttggtgatccagagaagggggaaagaagtggtgaggaagaatatatggggtgatccctccaaattgccaactcctcgtcttaggaagaagtgggcagtttccattgatccctagcatcagtttgacgggaaaaccggtgcatttcatcaacctcaaggaaaggaagtgccatgcatggaggcctggtgataggcaacatccatttagaagaacagtcacacaagcaacagaagaactatccaagactagaagcttagaagcttataccaaactctctgtctctctctctctctctcacacacacacacacagagtggatgggaggggacattaagaggaaccctagtgcagttcccccaaaaaaccttggcatagagtataacagggaaaaagtaattactgggaagctgaaaacaatcaaatatgtgaggaatgactgaatatgagctgaggataatgtaaattgttctggattgtctataagataaagatacagagcctgaatctatgtttttctgaataaagagaccccatattctcttttgaattattgacctataattcctcttcagcagctttgaatacactcaagttctcttcctattgtttatgatcccataatacaaccacccactatttgttgtggtttacaatccagcttagaacccttgagcaaaattattgaattattgaatgctaggcccaaacaaaagaaatttcagcttggttttagtaatttcttgatcaaacttctctcattcctctaaatgtacaaaggtttcaaagttgtaaaaaatatgtctacatagccaatgctcttagtatttttaacagcaaagataatctctgccaataattattaatgacaaaatagtgataactgttcaatgttgctttaacagtccaattgtagtaggtgagaaaacaaaaaagaagagaagctatgttgaatatttagtaatgttggaaaagatcctcaccctagacataaaatagtttaaacatttaaacatggcccctctcttattgtcattgctagtgaaagaagttcctgaaattgcatattacattgtaaagttttgggctaaatcacaatacatttttaagttgcttccatggcaatagatcgtaagaccacagcttgtcaaagtaaccactaattcagtattcagaaaccttatcatctgttcctccaaaaagaccccatagttaatgttgtgtttcccagtattttagttgggtttcttcacacttaggcaagtgggtgattctggtcataataaactattttcaaactaggaaaaagtatccaaatgctagagcacataatgagttcagcttggtcagttttgagacagataagcataaaaccctactagaaaaaaataatagtcaaacctaaagctttaaaaaatgtgagtcacatcacttttctccaggaaaggcagaacgtgctcagggtggaatttaatcaaaaatgtacccagaacaatttcccacaaagagctgtaatactttgcagcaaggggcattaataaactctaatttttaccgaaagtcaagagacacacagatcttttttggtaccctctacatcatcatagcaaggcccttctgaacattaacaagcctagatgtttctactgcttatttgcagtatctacaggggaatggttcgtggatataaacagaaatgttttatctgaagaggctgtgtatgccaccccagacccctgcatttcttaatatctataaaaatatgactaaacttgttacatttgaggcaaatatgtacagtatttttcccttttaaagatagtttaaaaaatcaaggtaataaaaaacggccaactctttcaggaaaaaaaaaatccggtattttgtactacttgagtttctctaatgcctaaaatatgcatttaaatcatcccacacctacacagaaacaaaatcagcagggaaaaccatcccactgatgattggcaattccaccgttcctctccatctgaccagctttcaccagagggcgatctttcatgcttgcacatcgagtttatacaatgtagaagcccccaagtcacctgggaaatggctcatgccaaatacatggagtccttagttgactatcttttcatattaaaatcccatcttccaatgaagcatcctgttttcaatactgatatcaaatttcgaatgtaaaggagatttcaaatgtattgctttcaccttttcttttttattcatttatttttaattgacataaaaattgtatatatttatgggatacaatgtgatgttttgatatatgtatgcattgtggaatgattaaatcaagctaattaaca

SEQ ID NO: 163927 - DNA, 736 bp, Homo sapiens
  Payload ID: 12275
  Gene Symbol: PTCHD1
  Gene Name: patched domain containing 1
  ENST ID: ENST00000456522
  CDS Start-End: 1-311
tcgagcgcaacctcgttaacagcctcttcccggtcaaccgctccaagcaccgtctctactcggacctgcagacccccgggcgctacggccgggtcatcgtcacctccttccagaaagccaacatgctggaccagcatcacaccgacctgatcttaaaggtcatggattatatgggacttttgaaatgttatcctcctggaggaaaactagagaagaccaacatgttaaagagagaactgcagcagtctatgcagactccatgctctccttttctctcaccactgccatgtacctggtcacctttggcataggggccagccctttcacgaacattgaggcagccaggattttctgctgcaattcctgtattgcaatcttcttcaactacctctatgtactctcgttttatggttccagcctagtgttcactggctacatagaaaacaattaccagcatagtatcttctgtagaaaagtcccaaagcctgaggcattgcaggagaagccggcatggtacaggtttctcctgacggccagattcagtgaggacacagctgaaggcgaggaagcgaacacttacgagagtcacctattggtatgtttcctcaaacgctattactgtgactggataaccaacacctatgtcaagccttttgtagttctcttttaccttatttatatttcctttgccttaatgggctatctgcaggtcagtgaagggtcagaccttagtaac

SEQ ID NO: 163928 - DNA, 2286 bp, Homo sapiens
  Payload ID: 12275
  Gene Symbol: PTCHD1
  Gene Name: patched domain containing 1
  Uniprot ID: Q96NR3
  ENST ID: ENST00000616022
  CDS Start-End: 410-1180
atttggaaggaggcgtgatttccacgttcgagcgtcttcgctccccaccccctctcggcaccagccagtgcgcgccaccacctgagcctggcgagagccgggacgcacgcagtcttcagcctgctcctttaagcctctggagagactcggctctgagcgggtccgcccgacacccgccccctccccccactcctgagaactctttactttttgtttggaaaatcggggccatttctttatttatctctgggtcttcccggaggagggcagagaaggggagagcgagatcgagcgcaacctcgttaacagcctcttcccggtcaaccgctccaagcaccgtctctactcggacctgcagacccccgggcgctacggccgggtcatcgtcacctccttccagaaagccaacatgctggaccagcatcacaccgacctgatcttaaagttgcatgctgctgtcaccaagatccaggttccaaggcctggttttaattacacgtttgcccatatatgtatcctgaataatgataagacttgcatcgtggatgacatagtgcacgtcctggaagagctaaagaatgctcgggccaccaatcggaccaattttgctatcacatacccaatcactcacttaaaggacgggagggctgtgtacaatgggcaccagcttgggggcgtcactgtgcacagcaaagaccgggtgaaatctgcagaggccatccagctcacctactacctgcagtcaatcaacagtctcaatgacatggtggctgagaggtgggagtccagcttctgcgacactgtcagactgtttcagaaatccaacagcaaagtcaaaatgtacccttacacgtcctcctcactgagggaagatttccagaagaccagccgcgtatcagaacgttacctggtcaccagcctgattctggtggttaccatggccatcctgtgttgctctatgcaggactgcgtccgcagcaaaccctggctaggcctgctcggattggtgaccataagcctggccactctcactgcagccgggatcatcaatcttactggtgggaaatataattccaccttcctgggagtccctttcgtcatgctaggtaattactactcttctttcttctgtttccgcctgctggtggtgttgactaggttcctaaaaggccaggagtagccttctaacaactttgtttcatttaacagtatcttcattttgcccaaaagtcctgggacccactctataaagtgctggtaatcagcaaaaaacaacctaatctggtaaatgtgccagaagttcaaagtcctgggttctagcgctgactctccattgagcagccatgtggtgtctagcaggtattaatcttctccttgtcccagtgtcttaggttgggcttccccataagcagggccctgagaaaaagatttggatacaagtagtgtatttgggaggtgagcccaggaagcaccagtatgggagtgaggaagtggaagttgaaggcacttcagttgaaggcaggcagttgaaggtatgttaatgagcccaagatatatcacattctgccggttgctgtgggcacctgtggttcagccccacaggggacctttgggagaccttgtgaaacacacctcagagaggtcctcccccggggtgaggaatttgggctattttcccacagaccctttgtgattcattgagggctgctccccaggccagttaactgccagcacttcccagggaggtgctcctgcagcacactcctgcagccagagaaatccttcaggtgactttgtagttataagccttcagcaagctcaagaatggggaatgggagggcatgttgggttggcactgagagcgcctgctactctcagtttccccaccttatgaatagagtggatgtgagcatcacacaaaaggacatgataaatgtataagaactttgaaagtgacatgtgagataccagtaggaagtaactttttttcctattcttactatgaactcaggagaatattttaaagcgatgctgatggtgacagcgtgcttccagtgtgtccactcagggggctgctggaactccctgatagagattaatggtcaaaacaaagccatagtggccataacatcggttgccctgtccatctgttatcgaaaatggcatgcccagcaagcctgatggcagggttcttgcgggccaaggattcaagaggttcactttcccccttttctatggtagcttctcatcaattcctttaacaaaattaaaatgtcatttggaatc

SEQ ID NO: 163929 - DNA, 5215 bp, Homo sapiens
  Payload ID: 12276
  Gene Symbol: PTCHD2
  Gene Name: patched domain containing 2
  Uniprot ID: Q9P2K9
  ENST ID: ENST00000294484
  CDS Start-End: 139-4317
gcggctccgagaagcttccccctgcgacttccgcgaggagacgagtctgcgcagcgtggtggccgccgccccccgaccctctgcgcactctctcccgcgccggcggctcagcctagccccgttcggccggccgagactatggacacggaggatgaccccttgctgcaggatgtgtggctagaggaggagcaggaggaggaagaagcaacgggtgaaacctttttaggggcccagaagccagggccccaacctggggcagggggacagtgttgctggcggcactggcccctggcttcccgacccccagcttcgggcttctggagtaccctgggctgggccttcaccaatccgtgctgtgctgggctggtgctcttcctgggctgcagcatccccatggccctgtcagccttcatgttcctttactacccaccgctggacattgacatctcctacaacgcctttgagatccgcaaccacgaggcctcacagcgtttcgacgctctcactctggcgcttaagtcccagtttggatcctgggggcggaaccggcgcgatttggccgacttcacctccgagacgcttcagcgccttatctcagagcagctgcagcagctgcatctcggcaaccgctcgcggcaagcctcccgagccccccgcgtcatccccgcggcctcactcggtggcccaggcccttaccgggacacttccgcggctcaaaagcccacagccaatcggagcgggcgacttcggcgtgagaccccgcccctggaggatctggcagccaaccagagtgaagacccgcgaaaccagcggctgagcaagaatgggcggtaccagcccagcatcccgccccacgcggcagtcgcggccaatcagagccgtgcccgccgaggcgcctcgcgctgggactactcgcgcgcctatgtgagtgccaacactcagacgcacgcgcactggcgcatcgagctcatcttcctggcgcgcggcgacgcggagcgcaacattttcaccagtgagcgcctggtcacgatccatgagatcgagcgcaagatcatggaccacccaggcttccgggagttctgctggaagccccacgaggtgctcaaggatctgccgctgggctcctactcctactgctcgccccccagctcgctcatgacctacttttttcccaccgagaggggcggcaagatctactatgacggcatgggccaggacctggcggacatccggggctccctggagctggccatgactcaccctgagttctactggtatgtggatgagggcctctctgcagacaatctgaagagctccctcctgcgcagtgagatcctgtttggagcacccctgcccaactactactcagtagatgaccgctgggaggaacaacgggctaagtttcagagcttcgtggtcacctacgtggccatgctggccaagcagtctaccagcaaagtccaggttctctatggggggacagacctgtttgactatgaagtgcgcaggacgttcaacaatgacatgctcctggccttcatcagcagcagctgcattgctgccctggtctacatcctcacctcctgctcagtgttcctgtccttctttgggattgccagcattggtctcagctgcctggtggccctcttcctgtaccacgtggtctttggtatccagtacttgggcatcctgaatggggtggccgccttcgtgatcgtgggcattggtgtggacgatgtctttgtgttcatcaacacctaccgccaggccacccacctggaagacccacagctgcgcatgatccacaccgtccaaactgcaggcaaggccaccttcttcacctccctgaccacagccgccgcctacgcagctaacgtcttctcccagatcccagccgtccacgactttggcctgttcatgtctctcatcgtgtcctgttgctggctggccgtgcttgtcaccatgcctgcagctctgggcctctggagcctctacctggcaccactggagagctcctgccagaccagctgccaccagaattgcagccggaagacctccctgcacttccccggagacgtgtttgccgctcccgagcaggttggaggcagccctgcccagggccccataccctacctggatgatgacatccccttgctggaggtcgaggaagagccagtgtcactggagctgggagacgtgtccctggtgtctgtgtcccccgagggtctgcagccagcctccaacacgggcagccgcggccatctcatcgtgcagctgcaggagctgctgcaccactgggtcctgtggtcagccgtcaagagccgctgggtgattgtggggctgttcgtctccatcctcatcttgtccctggtgttcgccagccggctccgccccgccagccgggccccgctactcttccggcctgataccaacatccaggtgctgctggacctcaagtacaacctgagcgccgagggcatctcctgcatcacctgttcaggtctgttccaggagaagccccacagcctgcagaacaacatccggacgtccctggagaagaagaggcgaggctcaggggtcccctgggctagccggcctgaggccaccctgcaggatttcccaggcaccgtgtacatctctaaagtgaagagtcaaggccaccccgctgtctacaggctctccctcaatgccagcctgcctgctccttggcaggctgtgtcgcctggggatggagaggtgccctccttccaggtgtatagagcgccttttggtaacttcaccaagaagctgaccgcttgtatgtctacagtagggctgctccaggcggcgagcccctcccgcaagtggatgctgacgaccttggcctgtgatgccaagcggggctggaagtttgacttcagcttctacgtggccaccaaggagcagcagcacacccggaagctgtacttcgcccagtcccacaagccccccttccacgggcgcgtatgcatggcaccccctggctgcctgcttagctccagccccgatgggcctaccaaaggcttcttcttcgtgcctagtgagaaagtgcccaaggcccgtctctcagccaccttcggcttcaacccctgcgtgaacacgggctgcgggaagccggcggtgcggccactagtggataccggggccatggtctttgtggtcttcggcattattggcgtcaaccgcactcggcaggtggacaaccacgtcattggagacccgggtagtgttgtctacgacagcagctttgacctcttcaaggaaattgggcacctgtgtcacctctgcaaggccatcgcagccaactccgagctggtgaagccgggtggggcccagtgcctgccttcaggctacagcatctcctccttcctgcagatgttgcaccctgagtgcaaggagctgcccgagcccaacctgctcccggggcagctgtcccacggggcagtgggcgtcagggagggccgcgtgcagtggatctccatggctttcgagtcgaccacgtacaagggcaaatcctccttccagacctactcggactacctgcgctgggagagcttcctccagcagcagctgcaggccttgcccgagggctcagtcctgcgccggggcttccagacctgcgagcactggaagcagatattcatggaaatcgtaggggtgcagagcgccctgtgcggcctggtgctatccctgctcatctgcgtggccgcggtggccgtgttcaccacccacatcctgctcctgctgcccgtgctcctcagcatcttgggcatcgtgtgcctggtggtgaccatcatgtactggagcggctgggagatgggggctgtggaagccatctccctgtccatcctcgttggctcctccgtggattactgcgtccacctggtcgagggctacctgctggctggagagaacctgcccccccaccaggccgaggacgcccgaacgcagcgccagtggcgtacgctggaggccgtgcggcacgtgggcgtggccatcgtctccagtgccctcaccacggtcatcgccacagtgcccctcttcttctgcatcatcgccccatttgccaagttcggcaagattgtggcactcaacacgggcgtgtccatcctctacacgctgaccgtcagcaccgccctgctgggcatcatggcgcccagctctttcactcggacccggacttccttcctcaaggccctgggtgccgtgctgctggcaggggccctggggctgggtgcctgcctcgtgctcctgcagagcggctataagattcccctgcccgcaggggcctccctatagcccgggacgggctctggacacttgcacctttggtcccatgggtgggggacaggagctgcttcccagctcgacttcagctagctgtgtccccaggcctgggcccagggcgccctgcgggccagcgtggaggctgacacccacacagatggtgtggaccatgctgccttgtggagctgggagttggagacagccgccaccccacaggccgggctactggcagccacactcggctttttgcccagtggcagaagagaccagccctcctcccatgcccggtcaccatgggggtcaggttatttttgtagggggtctccctctcacactgcctcagtgctcacaaccttccagtgtggatgttacagggtggcccccattctaccgatgtgaaaactgaggcgccaggacacagtggctgccctgtcgctggatcagtagcagagccagagctgcctccgagcgccatgccgccctcgggaatcatacaggaagagcacagtggatccagggtgggggcctctcaccccctaaccccgcccccccgcaaccctccccttcagctttacggcggccagtgctgaatggccctgtggccctccctgggccttttggtcttggccagagaagacagaaggacccggcttgggcttctgcatgtcctacccctgaccccagcctcaaggggcccctcaaaggccctctctgggggctctggggctcagcacagctttcctcatggatctaagcccctgtctttcccacctgactctgagtggatgttttgggggatggcccctgtggggaggagctgccatgccggccgcctgctcacggcagaaggttgctattaaaatgacataggattgcagactgctgctgttaatacgagcattttaagcac

SEQ ID NO: 163930 - DNA, 1495 bp, Homo sapiens
  Payload ID: 12276
  Gene Symbol: PTCHD2
  Gene Name: patched domain containing 2
  ENST ID: ENST00000304391
  CDS Start-End: 119-925
ggctcaccacacggcaaggtgcccgcttccaagctgaccccaccagcactcagacacgcatgcacacacacacgcagacctactatgaactggcttgtgctcagcaagagcagaattgatgagcagataccttaagaatcttttagagcaggaccacgtacaagggcaaatcctccttccagacctactcggactacctgcgctgggagagcttcctccagcagcagctgcaggccttgcccgagggctcagtcctgcgccggggcttccagacctgcgagcactggaagcagatattcatggaaatcgtaggggtgcagagcgccctgtgcggcctggtgctatccctgctcatctgcgtggccgcggtggccgtgttcaccacccacatcctgctcctgctgcccgtgctcctcagcatcttgggcatcgtgtgcctggtggtgaccatcatgtactggagcggctgggagatgggggctgtggaagccatctccctgtccatcctcgttggctcctccgtggattactgcgtccacctggtcgagggctacctgctggctggagagaacctgcccccccaccaggccgaggacgcccgaacgcagcgccagtggcgtacgctggaggccgtgcggcacgtgggcgtggccatcgtctccagtgccctcaccacggtcatcgccacagtgcccctcttcttctgcatcatcgccccatttgccaagttcggcaagattgtggcactcaacacgggcgtgtccatcctctacacgctgaccgtcagcaccgccctgctgggcatcatggcgcccagctctttcactcggacccggacttccttcctcaaggccctgggtgccgtgctgctggcaggggccctggggctgggtgcctgcctcgtgctcctgcagagcggctataagattcccctgcccgcaggggcctccctatagcccgggacgggctctggacacttgcacctttggtcccatgggtgggggacaggagctgcttcccagctcgacttcagctagctgtgtccccaggcctgggcccagggcgccctgcgggccagcgtggaggctgacacccacacagatggtgtggaccatgctgccttgtggagctgggagttggagacagccgccaccccacaggccgggctactggcagccacactcggctttttgcccagtggcagaagagaccagccctcctcccatgcccggtcaccatgggggtcaggttatttttgtagggggtctccctctcacactgcctcagtgctcacaaccttccagtgtggatgttacagggtggcccccattctaccgatgtgaaaactgaggcgccaggacacagtggctgccctgtcgctggatcagtagcagagccagagctgcctccgagcgccatgccgccctcgggaatcatacaggaagagcacagtggatccagggtgggggcctctcaccccctaaccccgcccccc

SEQ ID NO: 163931 - DNA, 2529 bp, Homo sapiens
  Payload ID: 12277
  Gene Symbol: PTCHD3
  Gene Name: patched domain containing 3
  Uniprot ID: Q3KNS1
  ENST ID: ENST00000438700
  CDS Start-End: 119-2422
aggaaaccgttgggtggggccaggagagcgttgggtggggccaggaaaccgtctggtgggatctccgcagctgcttttcacctgctgttcctcctgcgcttcctaagaggaagaatcaatgccgtgggtggagcccaagcccaggccggggccggagcagaagcccaagctcaccaaaccggactctgccaccgggccgcagtggtaccaggaatctcaggaatcggagtcggaaggcaagcagccacccccgggacccctggcacccccgaaatcccccgaaccctcaggacccctggcgtcggagcaggatgcacccctgccagagggggacgatgcacccccccggccgtcgatgctggacgatgcaccccgcctgccgctggagctggacgatgcacccctgccggaggaggaaacccccgaacccacggccatctgcaggcaccggcaccgctgtcacaccgactgcctagaggggctgctgtcccgcaccttccagtggctggggtggcaggtgggcgcgcacccctggatcttcctgctggcgcccttgatgctgacagccgcgctgggcaccggcttcctgtacctacccaaggacgaagaggaagacctagaggagcattacacccctgtggggagcccggccaaggcggagcggcgcttcgtgcagggccatttcaccaccaacgactcctaccgcttctccgcctccaggaggagcaccgaagccaatttcgtctcgcttctggtggtctcctacagcgactcactgctggacccagctacctttgcagaagtcagcaaactggacggcgcggtgcaggatctgcgcgtggcgcgggaaaagggaagccagatccagtaccagcaggtgtgcgcgaggtacagggcgctctgcgtgccccccaacccgatcctgtacgcctggcaggtgaacaaaacgctcaacctgagcagcatctccttccccgcctacaaccacggcaggcatcccctctacctgaccggcttcttcggaggatacatcttggggggcagcctaggaatgggccagttactcctgcgggccaaagccatgcggctgctgtactacctgaagaccgaggaccctgagtacgacgtgcagagcaagcagtggctcacccatttgctcgatcaatttaccaacattaagaacatcttggccttgaaaaaaattgaggtagtccactttacatcgctttccagacaactggaatttgaggcaacttctgtgactgtgatccctgtgtttcacctggcatacattctcatcattctgtttgcagtcacatcatgctttaggtttgactgcatacgaaacaaaatgtgtgttgcggcctttggagtgatttctgctttcttggcagtggtgagcggctttggcctgctgttgcacattggggtgccatttgtcatcatagttgccaattcaccatttcttattctaggtgttggggtcgatgacatgtttatcatgatttctgcctggcataagaccaaccttgcagatgacatacgagagcggatgtccaatgtctattcaaaagcggcagtgtctattacaatcaccaccatcactaacatcctggccttatatacagggattatgagctcttttaggtctgtacaatgtttttgcatctatacaggaatgaccctgttattttgctatttttataacatcacgtgttttggagcatttatggccttggatggtaaaagagaagtagtctgcctatgctggttgaaaaaggctgacccaaaatggccctcatttaaaaagttctgctgtttcccatttggttctgtcccagatgaacatggaactgatatccatccaataagtttgttttttagagactattttggcccctttctcacaaggagtgagtccaagtattttgtagtctttatatatgttttgtacatcataagcagtatatatgggtgtttccatgtgcaggaaggtttagaccttcgaaatctggcaagtgacgattcctacatcacaccatattttaacgtagaggagaattatttttcagattatggtcccagggttatggttattgttactaaaaaagttgactactgggataaagatgttaggcaaaaactggaaaactgtactaaaatttttgaaaaaaatgtctatgtagataaaaatcttacagagttttggttagatgcatatgtgcaatatttaaaaggtaacagccaagatcctaatgagaagaatacttttatgaacaatattcctgattttttaagcaattttccaaattttcagcatgatattaatatttcttcatcaaatgaaatcatttcttcccggggcttcattcagacaacagatgtttcttcctcagccaaaaagaaaatattgttattctaattacgacgcatagctgaagactgtcaaattcccctaatggtgtataaccaggcatttatatattttgatcagtatgctgcaatattagaagacactgttagaaatgt

SEQ ID NO: 163932 - DNA, 1720 bp, Homo sapiens
  Payload ID: 12277
  Gene Symbol: PTCHD3
  Gene Name: patched domain containing 3
  ENST ID: ENST00000610715
  CDS Start-End: 119-1720
aggaaaccgttgggtggggccaggagagcgttgggtggggccaggaaaccgtctggtgggatctccgcagctgcttttcacctgctgttcctcctgcgcttcctaagaggaagaatcaatgccgtgggtggagcccaagcccaggccggggccggagcagaagcccaagctcaccaaaccggactctgccaccgggccgcagtggtaccaggaatctcaggaatcggagtcggaaggcaagcagccacccccgggacccctggcacccccgaaatcccccgaaccctcaggacccctggcgtcggagcaggatgcacccctgccagagggggacgatgcacccccccggccgtcgatgctggacgatgcaccccgcctgccgctggagctggacgatgcacccctgccggaggaggaaacccccgaacccacggccatctgcaggcaccggcaccgctgtcacaccgactgcctagaggggctgctgtcccgcaccttccagtggctggggtggcaggtgggcgcgcacccctggatcttcctgctggcgcccttgatgctgacagccgcgctgggcaccggcttcctgtacctacccaaggacgaagaggaagacctagaggagcattacacccctgtggggagcccggccaaggcggagcggcgcttcgtgcagggccatttcaccaccaacgactcctaccgcttctccgcctccaggaggagcaccgaagccaatttcgtctcgcttctggtggtctcctacagcgactcactgctggacccagctacctttgcagaagtcagcaaactggacggcgcggtgcaggatctgcgcgtggcgcgggaaaagggaagccagatccagtaccagcaggtgtgcgcgaggtacagggcgctctgcgtgccccccaacccgatcctgtacgcctggcaggtgaacaaaacgctcaacctgagcagcatctccttccccgcctacaaccacggcaggcatcccctctacctgaccggcttcttcggaggatacatcttggggggcagcctaggaatgggccagttactcctgcgggccaaagccatgcggctgctgtactacctgaagaccgaggaccctgagtacgacgtgcagagcaagcagtggctcacccatttgctcgatcaatttaccaacattaagaacatcttggccttgaaaaaaattgaggtagtccactttacatcgctttccagacaactggaatttgaggcaacttctgtgactgtgatccctgtgtttcacctggcatacattctcatcattctgtttgcagtcacatcatgctttaggtttgactgcatacgaaacaaaatgtgtgttgcggcctttggagtgatttctgctttcttggcagtggtgagcggctttggcctgctgttgcacattggggtgccatttgtcatcatagttgccaattcaccatttcttattctaggtgttggggtcgatgacatgtttatcatgatttctgcctggcataagaccaaccttgcagatgacatacgagagcggatgtccaatgtctattcaaaagcggcagtgtctattacaatcaccaccatcactaacatcctggccttatatacagggattatgagctcttttagggcttcattcagacaacagatgtttcttcctcagccaaaaagaaaatattgttattctaattacgacgcatag

SEQ ID NO: 163933 - DNA, 1720 bp, Homo sapiens; identical to SEQ ID NO: 163932
  Payload ID: 12277
  Gene Symbol: PTCHD3
  Gene Name: patched domain containing 3
  ENST ID: ENST00000622555
  CDS Start-End: 119-1720

SEQ ID NO: 163934 - DNA, 2529 bp, Homo sapiens; identical to SEQ ID NO: 163931
  Payload ID: 12277
  Gene Symbol: PTCHD3
  Gene Name: patched domain containing 3
  Uniprot ID: Q3KNS1
  ENST ID: ENST00000617711
  CDS Start-End: 119-2422

SEQ ID NO: 163935 - DNA, 2850 bp, Homo sapiens
  Payload ID: 12278
  Gene Symbol: PTCHD4
  Gene Name: patched domain containing 4
  Uniprot ID: Q6ZW05
  ENST ID: ENST00000339488
  CDS Start-End: 35-2575
gagaacggggtagcccggcgcttacacatgtcacatgtgctttttaagacggccgggagcgcctgcgagctggatctggtggaggatgctgcggcaggtgcttcgcagagggctccagtcgttctgccacaggctgggtttgtgcgtgagccggcacccggtctttttcctcaccgtgcccgcagtcctgacaatcaccttcggcctcagcgcgctcaaccgcttccagcccgagggcgacctggagcgcctggtcgctcccagccacagcctggccaagatcgagcgcagcctggccagcagccttttccccctggaccagtccaaaagccagctctattcggacttacacacccctgggaggtatggcagggtgatcctcctctccccaaccggggacaatattttgctccaggctgaggggatcctgcagacccaccgagccgtgctggaaatgaaggatgggaggaacagttttattggacaccaactgggcggggtagtggaagtgccaaacagcaaagatcagcgggtcaagtcagccagagccattcaaatcacctactacctccagacctatggctctgccacccaagacctcataggggagaagtgggagaatgagttctgtaagcttataaggaagctccaggaggagcatcaagaactccagctctactctttagcatcctttagcctctggagggactttcataagaccagcatcctggccagaagcaaggtcctggtgagcctcgtgctgatcctgaccacagccaccctctccagctccatgaaggactgcttgcgcagtaagcccttcctgggcctcctgggggtgctcacagtatgcatctccatcatcacagcagcagggatcttcttcatcaccgatggaaagtacaactccaccctgctgggaatcccgttcttcgccatgggtcatggaactaaaggagtgtttgagcttctgtccggatggcggagaaccaaagagaacttgcccttcaaagacaggatagcagatgcctattctgatgtgatggtcacctataccatgaccagctccctgtacttcatcacttttggcatgggtgccagcccattcacaaacatagaggctgtgaaggtcttctgtcaaaacatgtgtgtctctattctgttgaactacttctacattttctccttctttggctcctgtctggtctttgctggccaactagagcaaaaccgctaccacagcatcttttgctgtaagatcccttctgcagaatacctggatcgcaaacctgtgtggttccagacagtgatgagtgatgggcatcaacagacgtcccatcatgagacgaacccctaccagcaccacttcattcagcacttcctccgtgaacattataatgaatggattaccaatatatatgtgaagccatttgttgtcatcctctatctcatttatgcctccttctccttcatggggtgcttacagatcagtgacggagccaacatcatcaatctactagccagtgattcgccaagtgtttcctatgccatggttcagcagaaatatttcagcaactatagccctgtgataggattctacgtctatgagcccctagagtactggaacagcagcgtccaggatgacctaagaagactctgtagtggattcactgcagtgtcctgggtggagcagtactaccagttcctgaaagtcagcaacgtcagtgccaataacaaaagtgacttcatcagtgtcctgcaaagctcatttttaaaaaagccagaattccagcattttcgaaatgatatcatcttctccaaggcaggggatgaaagcaatatcattgcttctcgcttgtatctggtggccaggactagcagagacaagcagaaagaaatcacagaagtgttggaaaagctgaggcccctatccctctcaaagagcatccgattcatcgtgttcaacccctcctttgtcttcatggaccattacagcttgtctgtcacagtgcctgttctgattgcaggctttggtgttctcctggtgttaatcctgacttttttcctagtgatccaccctctgggaaacttctggctaattcttagcgtcacctcaattgagctgggcgttctgggcttaatgacattatggaacgtcgacatggattgcatttctatcttgtgccttatctacaccttgaatttcgccattgaccactgtgcaccactgcttttcacatttgtattagcaactgagcacacccgaacacaatgtataaaaagctccttgcaagaccatgggacagccattttgcaaaatgttacttcttttcttattgggttagtcccccttctatttgtgccttcgaacctgaccttcacactgttcaaatgcttgctgctcactgggggttgcacacttctgcactgttttgttattttacctgtgttcctaacgtttttccccccttccaaaaagcaccacaagaaaaagaaacgtgccaagcgaaaggagagagaggaaattgaatgcatagaaattcaagagaacccggatcacgtcaccacagtatgaggggtatagaccagtggattatttttcttttccagtattgcacaatgatgcagggcaagtaaagctcagacctcagctgcttgggctggccaggggtaacaaggcaagtcagatcaagagtgcattattcatgacacttcaaggtgcctgcttcttggggggaagagggaataaaaaaagaggaaaaagttatttgcaaccttgttctcctctaaaaacaagtttctggatgtaatctgagagctcttccaaggaatggatgaatcaatggagtg

SEQ ID NO: 163936 - DNA, 3232 bp, Homo sapiens
  Payload ID: 12278
  Gene Symbol: PTCHD4
  Gene Name: patched domain containing 4
  ENST ID: ENST00000398738
  CDS Start-End: 1-934
gtgctttttaagacggccgggagcgcctgcgagctggatctggtggaggatgctgcggcaggtgcttcgcagagggctccagtcgttctgccacaggctgggtttgtgcgtgagccggcacccggtctttttcctcaccgtgcccgcagtcctgacaatcaccttcggcctcagcgcgctcaaccgcttccagcccgagggcgacctggagcgcctggtcgctcccagccacagcctggccaagatcgagcgcagcctggccagcagccttttccccctggaccagtccaaaagccagctctattcggacttacacacccctgggaggtatggcagggtgatcctcctctccccaaccggggacaatattttgctccaggctgaggggatcctgcagacccaccgagccgtgctggaaatgaaggatgggaggaacagttttattggacaccaactgggcggggtagtggaagtgccaaacagcaaagatcagcgggtcaagtcagccagagccattcaaatcacctactacctccagacctatggctctgccacccaagacctcataggggagaagtgggagaatgagttctgtaagcttataaggaagctccaggaggagcatcaagaactccagctctactctttagcatcctttagcctctggagggactttcataagaccagcatcctggccagaagcaaggtcctggtgagcctcgtgctgatcctgaccacagccaccctctccagctccatgaaggactgcttgcgcagtaagcccttcctgggcctcctgggggtgctcacagtatgcatctccatcatcacagcagcagggatcttcttcatcaccgatggaaagtacaactccaccctgctgggaatcccgttcttcgccatgggcatctccactgaatttacctcaagctagaaacaaatttagtttggaagaaagaaaggagagaaggaaggagagaaaaaactggagaggagaaaaatatcacatttggaagattatatgtgaagactcctaggatacaataaaatcatcatcatcgtcatcatcatcatcatcaccaccaataccatcagagcaatctgagagttcattctagtctaagaacccagccctctattttttggaggttaagtatcctccaggtatttctttcctccctgtgcttaacagctgtgtgtctgtaacccatactgtcttttctatctcccacctgactcctctcatgggaaactaaattggtttaaatcatatggaagcattataagtactgtttagtgatgaaaataaattgattccaatcatataggtactttcctaaatactgactgatgaagtttagatgtgctgtaatttataaataaaatgaaggaggttacctggcaatatgtgagagggaggaacaattatcgtgtttgagatttaaaggaaagagtaatgaacacttcccaaataattctatgagataaatattaccctgatactaaaaccagacaaaaacatcacaaggaaggaaaactacaggttaataactttatgaacttgagtgtaaaaattctcaataaaatactagcaagccaaattcaatgaacaaatgaggtttatttctatttatttttatttttttttatttttattttattttattattttttttttttgagacggagtcttgctctgtcgcccaggccggactgcggactgcagtggcgcaatctcggctcactgcaagctccgcctcccaggttcacgccattctcctgcctcagcctcccgagtagctgggactacaggcgcccgccaccgcgcccggctaattttttgtatttttagtagagacggggtttcaccttgttagccaggatggtctcgatctcctgacctcatgatccacccgcctcggcctcccaaagtgctgggattacaggcgtgagccaccatgcccggcccaaatgaggtttattttataaatgcaagagtggtttaacatttgaaaatcattaacataatataccatcaatagaattaaggtcaaaaaccgcatggtcatctcaatagacaaagaaagggcatttgacaaactctaacaacattttatgacaacaaaataactctcaacaaactagtaatagaagggaacttgcttaatctgatacagatatccataaaaacccaaagctaatatcatatttaatggagaaagaatgaacttaaaagttgtacttcaatgaataccatcaagaaagtgaaaaacaaactcacagaatgggagaaaatattttcaaattatctatcttataagagacttgtatacagaatatttaaaggactattacagcttaataataaaaacacaacccaatttcaaagtggacagaagattcgaatagacatttattctaagaagataaacaagtggccaaaagtatatttaaaatgctcaaaataattagttattaaagaaatgcaaatcaaaaccacattgagcacatcatatccattaggatgactaaaatcaagaagtaaggcaataacaagtattgatgaggtaggttaggaactctttacacattgctgatgaaaatgtaaatgatgcagctcttttggaaaatagtctgacagttcctaaaaatgctaaacttagtattagcattttgattcagtaattccactgctaggtatatactcaagagaaatgaaaatatttatccacacaaaactgtacaaatgttcatagcaatattattcataatggcaaaaggtagacacaatccaaatgtccatcaactgatgaatggaaacataaaaagtggtatatgcatacaatggaatattattcagccattaaaaaggaaacaagtactgatacatgctccaatatggatgagcattgaaaatattttgataagtgaaagaagtcatgaaagtgtacataattgcatgattctatatatatgaaatgttcagagtaggcaaatatgtagagacaggaagtagatgagtagttgctgaggattggtgggttaggggatgaagccagggaatggagtcactgctaatgatacagaagttctttcaggttgatgaaatgttctgaaattgattatggcaatcattgcacaactttgtagtatactagaaacttttaaattgtacacttttaatcaatgaattgcttggcattatatcacaataaagctgttaaaaacaaac

SEQ ID NO: 163937 - DNA, 6618 bp, Homo sapiens
  Payload ID: 12279
  Gene Symbol: PEG10
  Gene Name: paternally expressed 10
  Uniprot ID: Q86TG7
  ENST ID: ENST00000482108
  CDS Start-End: 480-1457
ctcctcggtgcaacctatataaggctcacagtctgcgctcctggtacacgcgcttcaacttcggttggtgtgtgtcgaagaaacctgactgcgccctgaggagaacagcggagaaggtccaccgagcctggcgaaaggtccgctgagcgggctgtcgtccggagccactccgggctgcggagcacccagtggagaccgcgcctggctcaggtgtgggaccccatccttcctgtcttcgcagaggagtcctcgcgtgaaataagcgggttttgaaaacaaaaaaaagaaggagtggaagagggggccaggatccaggcctccatccccacagaagtgaagctacagctgggaggtctcctcccaccccaaccgtcaccctgggtcccgactgcccacctcctcctcctccccctccccccaacaacaacaacaacaacaactccaagcacaccggccataagagtgcgtgtgtccccaacatgaccgaacgaagaagggacgagctctctgaagagatcaacaacttaagagagaaggtcatgaagcagtcggaggagaacaacaacctgcagagccaggtgcagaagctcacagaggagaacaccacccttcgagagcaagtggaacccacccctgaggatgaggatgatgacatcgagctccgcggtgctgcagcagctgctgccccaccccctccaatagaggaagagtgcccagaagacctcccagagaagttcgatggcaacccagacatgctggctcctttcatggcccagtgccagatcttcatggaaaagagcaccagggatttctcagttgatcgtgtccgtgtctgcttcgtgacaagcatgatgaccggccgtgctgcccgttgggcctcagcaaagctggagcgctcccactacctgatgcacaactacccagctttcatgatggaaatgaagcatgtctttgaagaccctcagaggcgagaggttgccaaacgcaagatcagacgcctgcgccaaggcatggggtctgtcatcgactactccaatgctttccagatgattgcccaggacctggattggaacgagcctgcgctgattgaccagtaccacgagggcctcagcgaccacattcaggaggagctctcccacctcgaggtcgccaagtcgctgtctgctctgattgggcagtgcattcacattgagagaaggctggccagggctgctgcagctcgcaagccacgctcgccaccccgggcgctggtgttgcctcacattgcaagccaccaccaggtagatccaaccgagccggtgggaggtgcccgcatgcgcctgacgcaggaagaaaaagaaagacgcagaaagctgaacctgtgcctctactgtggaacaggaggtcactacgctgacaattgtcctgccaaggcctcaaagtcttcgccggcgggaaactccccggccccgctgtagagggaccttcagcgaccgggccagaaataataaggtccccacaagatgatgcctcatctccacacttgcaagtgatgctccagattcatcttccgggcagacacaccctgttcgtccgagccatgatcgattctggtgcttctggcaacttcattgatcacgaatatgttgctcaaaatggaattcctctaagaatcaaggactggccaatacttgtggaagcaattgatgggcgccccatagcatcgggcccagttgtccacgaaactcacgacctgatagttgacctgggagatcaccgagaggtgctgtcatttgatgtgactcagtctccattcttccctgtcgtcctaggggttcgctggctgagcacacatgatcccaatatcacatggagcactcgatctatcgtctttgattctgaatactgccgctaccactgccggatgtattctccaataccaccatcgctcccaccaccagcaccacaaccgccactctattatccagtagatggatacagagtttaccaaccagtgaggtattactatgtccagaatgtgtacactccagtagatgagcacgtctacccagatcaccgcctggttgaccctcacatagaaatgatacctggagcacacagtattcccagtggacatgtgtattcactgtccgaacctgaaatggcagctcttcgagattttgtggcaagaaatgtaaaagatgggctaattactccaacgattgcacctaatggagcccaagttctccaggtgaagagggggtggaaactgcaagtttcttatgattgccgagctccaaacaattttactatccagaatcagtatcctcgcctatctattccaaatttagaagaccaagcacacctggcaacgtacactgaattcgtacctcaaatacctggataccaaacataccccacatatgccgcgtacccgacctacccagtaggattcgcctggtacccagtgggacgagacggacaaggaagatcactatatgtacctgtgatgatcacttggaatccacactggtaccgccagcctccggtaccacagtacccgccgccacagccgccgcctccaccaccaccaccgccgccgcctccatcttacagtaccctgtaaatacctgtcatgtccttcaggatctctgccctcaaaatttattcctgttcagcttctcaatcagtgactgtgtgctaaattttaggctactgtatcttcaggccacctgaggcacatcctctctgaaacggctatggaaggttagggccactctggactggcacacatcctaaagcaccaaaagaccttcaacattttctgagagcaacagagtatttgccaataaatgatctctcatttttccaccttgactgccaatctaactaaaataattaataagtttactttccagccagtcctggaagtctgggttttacctgccaaaacctccatcaccatctaaattataggctgccaaatttgctgtttaacatttacagagaagctgatacaaacgcaggaaatgctgatttctttatggagggggagacgaggaggaggaggacatgacttttcttgcggtttcggtaccctctttttaaatcactggaggactgaggccttattaaggaagccaaaattatcggtgcagtgtggaaaggcttccgtgatcctctcgctgcacccttagaaacttcaccgtcttcaaactccatttccatggttctgttaattctcaaggagcagcaactcgactggttctcccaggagcaggaaaaacccttgtgacatgaaacatctcaggcctgaaaagaaagtgctctctcagatggactcttgcatgttaagactatgtcttcacatcatggtgcaaatcacatgtacccaatgactccggctttgacacaacaccttaccatcatcatgccatgatggcttccacaaagcattaaacctggtaaccagagattactggtggctccagcgttgttagatgttcatgaaatgtgaccacctctcaatcacctttgagggctaaagagtagcacatcaaaaggactccaaaatcccatacccaactcttaagagatttgtcctggtacttcagaaagaattttcatgagtgttcttaattggctggaaaagcaccagctgacgttttggaagaatctatccatgtgtctgcctccatatgcatctgggcatttcatcttcagtcccctcattagactgtagcattaggatgtgtggagagaggagaaatgatttagcacccagattcacactcctatgcctggaagggggacatctttgaagaagaggaattagggctgtggacactgtcttgaggatgtggacttccttagtgagctccacattacttgatggtaaccacttcaaaaggatcagaatccacgtaatgaaaaaggtccctctagaggatggagctgatgtgaagctgccaatggatgaaaagcctcagaaagcaactcaaaggactcaaagcaacggacaacacaagagttgtcttcagcccagtgacacctctgatgtcccctggaagctttgtgctaacctgggactgcctgacttcctttagcctggtcccttgctactaccttgaactgttttatctaacctctctttttctgtttaattctttgctactgccattgaccctgctgcaggatttgtgtcattttcctgcctggttgctgagactccattttgctgccacacacagagatgtaagaggcaggctttaattgccaaagcacagtttgagcagtagaaaacaacatggtgtatatctcaaattgcctgacatgaagaggagtctaacggtgaagtttcacttttcatcagcatcatctttcacatgttcattatcatctgctcttattcttgcatgtttaaacacttaaaatttttagtataatttttagtgtgttttgaagtggtgactaggctttcaaaaacttccattgaattacaaagcactatccagttcttattgttaaactaagtaaaaatgataagtaacatagtgtaaaatattcctttactgtgaacttcttacaatgctgtgaatgagaggctcctcagaactggagcatttgtataataattcatcctgttcatcttcaattttaacatcatatataatttcaattctatcaattgggcctttaaaaatcatataaaaggatataaaatttgaaaagagaaacctaattggctatttaatccaaaacaactttttttttccttcaatggaatcagaaagcttgtcaatcactcatgtgttttagagtaattacttttaaaatggtgcatttgtgcttctgaactattttgaagagtcacttctgtttacctcaagtatcaattcatcctccatacatttgaattcaagttgtttttttgtcaaatttacagttgtcaattgatcttcaagctgcagggtgcctagaaatgggccgttgtctgtagccctggcatgtgcacacggacatttgccaccactgcaagcaaaagtctggagaagttcaccaacgacaagaacgattagggaaaatatgctgctgtgggttaacaactcagaaagtccctgatccacatttggctgtttactaaagcttgtgattaactttttggcagtgtgtactatgctctattgctatatatgctatctataaatgtagatgttaaggataagtaattctaaatttattattctatagttttgaagtttggttaagtttcctttcactcaattgatttattttgttgttaatcaaatttatgttaattggatcctttaaattttttttggcattttccaacaaaaatggctttattcataagaaaggaaaaaaatcaatggaatttgatatctaaagaagttagaaagggagcaaaataaaaaacataaaggagatagatgaattagtaagcaaatcagtagtcgagtttttcaaactggcaaaattaattaattgacttttagcccaaatttacattgttaattaaatcaagaaggaagaagatctaagagctcccattgataggcaagcctagagagaactagctaaatttatcatgctaggatattgaaacacagaaagtttacatacatttatgaagggtcaatttagtttggacagtgaggtatttgtcttagtggaaaaaaggagaattagtctgatcaaatcgtgaagtaatacagtgaacttgcaggtgcacaaaataagagggccacatctatatggtgcagtctggaattctgtttaagtttgtaggtacctcttggacttctgaattgatccagttgtcatccaccacagacatctcacatcagatacagacagttccaagattgacaacagagaacaacctgctggaaagacctgggcagaaatggagagccctgcgggaaccatgctacattttcatctaaagagagaatgcacatctgatgagactgaaagttctttgttgttttagattgtagaatggtattgaattggtctgtggaaaattgcattgcttttatttctttgtgtaatcaagtttaagtaataggggatatataatcataagcattttagggtgggagggactattaagtaattttaagtgggtggggttatttagaatgttagaataatattatgtattagatatcgctataagtggacatgcgtacttacttgtaaccctttaccctataattgctatccttaaagatttcaaataaactcggagggaactgcagggagaccaacttatttagagcgaattggacatggataaaaaccccagtgggagaaagttcaaaggtgattagattaataatttaatagaggatgagtgacctctgataaattactgctagaatgaacttgtcaatgatggatggtaaattttcatggaagttataaaagtgataaataaaaacccttgcttttacccctgtcagtagccctcctcctaccactgaaccccattgcccctacccctccttctaactttattgctgtattctcttcactctatatttctctctatttgctaatattgcattgctgttacaataaaaattcaataaagatttagtggttaagtgcaaa

SEQ ID NO: 163938 - DNA, 2587 bp, Homo sapiens
  Payload ID: 12279
  Gene Symbol: PEG10
  Gene Name: paternally expressed 10
  ENST ID: ENST00000488574
  CDS Start-End: 218-1423
acacgcgcttcaacttcggttggtgtgtgtcgaagaaacctgactgcgccctgaggagaacagcggagaaggtccaccgagcctggcgaaaggtccgctgagcgggctgtcgtccggagccactccgggctgcggagcacccagtggagaccgcgcctggctcaggtgtgggaccccatccttcctgtcttcgcagaggagtcctcgcgtggtgagtatgcgaaataagcgggttttgaaaacaaaaaaaagaaggagtggaagagggggccaggatccaggcctccatccccacagaagtgaagctacagctgggaggtctcctcccaccccaaccgtcaccctgggtcccgactgcccacctcctcctcctccccctccccccaacaacaacaacaacaacaactccaagcacaccggccataagagtgcgtgtgtccccaacatgaccgaacgaagaagggacgagctctctgaagagatcaacaacttaagagagaaggtcatgaagcagtcggaggagaacaacaacctgcagagccaggtgcagaagctcacagaggagaacaccacccttcgagagcaagtggaacccacccctgaggatgaggatgatgacatcgagctccgcggtgctgcagcagctgctgccccaccccctccaatagaggaagagtgcccagaagacctcccagagaagttcgatggcaacccagacatgctggctcctttcatggcccagtgccagatcttcatggaaaagagcaccagggatttctcagttgatcgtgtccgtgtctgcttcgtgacaagcatgatgaccggccgtgctgcccgttgggcctcagcaaagctggagcgctcccactacctgatgcacaactacccagctttcatgatggaaatgaagcatgtctttgaagaccctcagaggcgagaggttgccaaacgcaagatcagacgcctgcgccaaggcatggggtctgtcatcgactactccaatgctttccagatgattgcccaggacctggattggaacgagcctgcgctgattgaccagtaccacgagggcctcagcgaccacattcaggaggagctctcccacctcgaggtcgccaagtcgctgtctgctctgattgggcagtgcattcacattgagagaaggctggccagggctgctgcagctcgcaagccacgctcgccaccccgggcgctggtgttgcctcacattgcaagccaccaccaggtagatccaaccgagccggtgggaggtgcccgcatgcgcctgacgcaggaagaaaaagaaagacgcagaaagctgaacctgtgcctctactgtggaacaggaggtcactacgctgacaattgtcctgccaaggcctcaaagtcttcgccggcgggaaactccccggccccgctgtagagggaccttcagcgaccgggccagaaataataaggtccccacaagatgatgcctcatctccacacttgcaagtgatgctccagattcatcttccgggcagacacaccctgttcgtccgagccatgatcgattctggtgcttctggcaacttcattgatcacgaatatgttgctcaaaatggaattcctctaagaatcaaggactggccaatacttgtggaagcaattgatgggcgccccatagcatcgggcccagttgtccacgaaactcacgacctgatagttgacctgggagatcaccgagaggtgctgtcatttgatgtgactcagtctccattcttccctgtcgtcctaggggttcgctggctgagcacacatgatcccaatatcacatggagcactcgatctatcgtctttgattctgaatactgccgctaccactgccggatgtattctccaataccaccatcgctcccaccaccagcaccacaaccgccactctattatccagtagatggatacagagtttaccaaccagtgaggtattactatgtccagaatgtgtacactccagtagatgagcacgtctacccagatcaccgcctggttgaccctcacatagaaatgatacctggagcacacagtattcccagtggacatgtgtattcactgtccgaacctgaaatggcagctcttcgagattttgtggcaagaaatgtaaaagatgggctaattactccaacgattgcacctaatggagcccaagttctccaggtgaagagggggtggaaactgcaagtttcttatgattgccgagctccaaacaattttactatccagaatcagtatcctcgcctatctattccaaatttagaagaccaagcacacctggcaacgtacactgaattcgtacctcaaatacctggataccaaacataccccacatatgccgcgtacccgacctacccagtaggattcgcctggtacccagtgggacgagacggacaaggaagatcactatatgtacctgtgatgatcacttggaatccacactggtaccgccagcctccggtaccacagtacccgccgccacagccgccgcctccaccaccaccaccgccgccgcctccatcttacagtaccctgtaaatacctgtcatgtcct

SEQ ID NO: 163939 - DNA, 6392 bp, Homo sapiens
  Payload ID: 12279
  Gene Symbol: PEG10
  Gene Name: paternally expressed 10
  ENST ID: ENST00000612941
  CDS Start-End: 157-2382
catccttcctgtcttcgcagaggagtcctcgcgtgaaataagcgggttttgaaaacaaaaaaaagaaggagtggaagagggggccaggatccaggcctccatccccacagaagtgaagctacagctgggaggtctcctcccaccccaaccgtcaccctgggtcccgactgcccacctcctcctcctccccctccccccaacaacaacaacaacaacaactccaagcacaccggccataagagtgcgtgtgtccccaacatgaccgaacgaagaagggacgagctctctgaagagatcaacaacttaagagagaaggtcatgaagcagtcggaggagaacaacaacctgcagagccaggtgcagaagctcacagaggagaacaccacccttcgagagcaagtggaacccacccctgaggatgaggatgatgacatcgagctccgcggtgctgcagcagctgctgccccaccccctccaatagaggaagagtgcccagaagacctcccagagaagttcgatggcaacccagacatgctggctcctttcatggcccagtgccagatcttcatggaaaagagcaccagggatttctcagttgatcgtgtccgtgtctgcttcgtgacaagcatgatgaccggccgtgctgcccgttgggcctcagcaaagctggagcgctcccactacctgatgcacaactacccagctttcatgatggaaatgaagcatgtctttgaagaccctcagaggcgagaggttgccaaacgcaagatcagacgcctgcgccaaggcatggggtctgtcatcgactactccaatgctttccagatgattgcccaggacctggattggaacgagcctgcgctgattgaccagtaccacgagggcctcagcgaccacattcaggaggagctctcccacctcgaggtcgccaagtcgctgtctgctctgattgggcagtgcattcacattgagagaaggctggccagggctgctgcagctcgcaagccacgctcgccaccccgggcgctggtgttgcctcacattgcaagccaccaccaggtagatccaaccgagccggtgggaggtgcccgcatgcgcctgacgcaggaagaaaaagaaagacgcagaaagctgaacctgtgcctctactgtggaacaggaggtcactacgctgacaattgtcctgccaaggcctcaaagtcttcgccggggaaactccccggccccgctgtagagggaccttcagcgaccgggccagaaataataaggtccccacaagatgatgcctcatctccacacttgcaagtgatgctccagattcatcttccgggcagacacaccctgttcgtccgagccatgatcgattctggtgcttctggcaacttcattgatcacgaatatgttgctcaaaatggaattcctctaagaatcaaggactggccaatacttgtggaagcaattgatgggcgccccatagcatcgggcccagttgtccacgaaactcacgacctgatagttgacctgggagatcaccgagaggtgctgtcatttgatgtgactcagtctccattcttccctgtcgtcctaggggttcgctggctgagcacacatgatcccaatatcacatggagcactcgatctatcgtctttgattctgaatactgccgctaccactgccggatgtattctccaataccaccatcgctcccaccaccagcaccacaaccgccactctattatccagtagatggatacagagtttaccaaccagtgaggtattactatgtccagaatgtgtacactccagtagatgagcacgtctacccagatcaccgcctggttgaccctcacatagaaatgatacctggagcacacagtattcccagtggacatgtgtattcactgtccgaacctgaaatggcagctcttcgagattttgtggcaagaaatgtaaaagatgggctaattactccaacgattgcacctaatggagcccaagttctccaggtgaagagggggtggaaactgcaagtttcttatgattgccgagctccaaacaattttactatccagaatcagtatcctcgcctatctattccaaatttagaagaccaagcacacctggcaacgtacactgaattcgtacctcaaatacctggataccaaacataccccacatatgccgcgtacccgacctacccagtaggattcgcctggtacccagtgggacgagacggacaaggaagatcactatatgtacctgtgatgatcacttggaatccacactggtaccgccagcctccggtaccacagtacccgccgccacagccgccgcctccaccaccaccaccgccgccgcctccatcttacagtaccctgtaaatacctgtcatgtccttcaggatctctgccctcaaaatttattcctgttcagcttctcaatcagtgactgtgtgctaaattttaggctactgtatcttcaggccacctgaggcacatcctctctgaaacggctatggaaggttagggccactctggactggcacacatcctaaagcaccaaaagaccttcaacattttctgagagcaacagagtatttgccaataaatgatctctcatttttccaccttgactgccaatctaactaaaataattaataagtttactttccagccagtcctggaagtctgggttttacctgccaaaacctccatcaccatctaaattataggctgccaaatttgctgtttaacatttacagagaagctgatacaaacgcaggaaatgctgatttctttatggagggggagacgaggaggaggaggacatgacttttcttgcggtttcggtaccctctttttaaatcactggaggactgaggccttattaaggaagccaaaattatcggtgcagtgtggaaaggcttccgtgatcctctcgctgcacccttagaaacttcaccgtcttcaaactccatttccatggttctgttaattctcaaggagcagcaactcgactggttctcccaggagcaggaaaaacccttgtgacatgaaacatctcaggcctgaaaagaaagtgctctctcagatggactcttgcatgttaagactatgtcttcacatcatggtgcaaatcacatgtacccaatgactccggctttgacacaacaccttaccatcatcatgccatgatggcttccacaaagcattaaacctggtaaccagagattactggtggctccagcgttgttagatgttcatgaaatgtgaccacctctcaatcacctttgagggctaaagagtagcacatcaaaaggactccaaaatcccatacccaactcttaagagatttgtcctggtacttcagaaagaattttcatgagtgttcttaattggctggaaaagcaccagctgacgttttggaagaatctatccatgtgtctgcctccatatgcatctgggcatttcatcttcagtcccctcattagactgtagcattaggatgtgtggagagaggagaaatgatttagcacccagattcacactcctatgcctggaagggggacatctttgaagaagaggaattagggctgtggacactgtcttgaggatgtggacttccttagtgagctccacattacttgatggtaaccacttcaaaaggatcagaatccacgtaatgaaaaaggtccctctagaggatggagctgatgtgaagctgccaatggatgaaaagcctcagaaagcaactcaaaggactcaaagcaacggacaacacaagagttgtcttcagcccagtgacacctctgatgtcccctggaagctttgtgctaacctgggactgcctgacttcctttagcctggtcccttgctactaccttgaactgttttatctaacctctctttttctgtttaattctttgctactgccattgaccctgctgcaggatttgtgtcattttcctgcctggttgctgagactccattttgctgccacacacagagatgtaagaggcaggctttaattgccaaagcacagtttgagcagtagaaaacaacatggtgtatatctcaaattgcctgacatgaagaggagtctaacggtgaagtttcacttttcatcagcatcatctttcacatgttcattatcatctgctcttattcttgcatgtttaaacacttaaaatttttagtataatttttagtgtgttttgaagtggtgactaggctttcaaaaacttccattgaattacaaagcactatccagttcttattgttaaactaagtaaaaatgataagtaacatagtgtaaaatattcctttactgtgaacttcttacaatgctgtgaatgagaggctcctcagaactggagcatttgtataataattcatcctgttcatcttcaattttaacatcatatataatttcaattctatcaattgggcctttaaaaatcatataaaaggatataaaatttgaaaagagaaacctaattggctatttaatccaaaacaactttttttttccttcaatggaatcagaaagcttgtcaatcactcatgtgttttagagtaattacttttaaaatggtgcatttgtgcttctgaactattttgaagagtcacttctgtttacctcaagtatcaattcatcctccatacatttgaattcaagttgtttttttgtcaaatttacagttgtcaattgatcttcaagctgcagggtgcctagaaatgggccgttgtctgtagccctggcatgtgcacacggacatttgccaccactgcaagcaaaagtctggagaagttcaccaacgacaagaacgattagggaaaatatgctgctgtgggttaacaactcagaaagtccctgatccacatttggctgtttactaaagcttgtgattaactttttggcagtgtgtactatgctctattgctatatatgctatctataaatgtagatgttaaggataagtaattctaaatttattattctatagttttgaagtttggttaagtttcctttcactcaattgatttattttgttgttaatcaaatttatgttaattggatcctttaaattttttttggcattttccaacaaaaatggctttattcataagaaaggaaaaaaatcaatggaatttgatatctaaagaagttagaaagggagcaaaataaaaaacataaaggagatagatgaattagtaagcaaatcagtagtcgagtttttcaaactggcaaaattaattaattgacttttagcccaaatttacattgttaattaaatcaagaaggaagaagatctaagagctcccattgataggcaagcctagagagaactagctaaatttatcatgctaggatattgaaacacagaaagtttacatacatttatgaagggtcaatttagtttggacagtgaggtatttgtcttagtggaaaaaaggagaattagtctgatcaaatcgtgaagtaatacagtgaacttgcaggtgcacaaaataagagggccacatctatatggtgcagtctggaattctgtttaagtttgtaggtacctcttggacttctgaattgatccagttgtcatccaccacagacatctcacatcagatacagacagttccaagattgacaacagagaacaacctgctggaaagacctgggcagaaatggagagccctgcgggaaccatgctacattttcatctaaagagagaatgcacatctgatgagactgaaagttctttgttgttttagattgtagaatggtattgaattggtctgtggaaaattgcattgcttttatttctttgtgtaatcaagtttaagtaataggggatatataatcataagcattttagggtgggagggactattaagtaattttaagtgggtggggttatttagaatgttagaataatattatgtattagatatcgctataagtggacatgcgtacttacttgtaaccctttaccctataattgctatccttaaagatttcaaataaactcggagggaactgcagggagaccaacttatttagagcgaattggacatggataaaaaccccagtgggagaaagttcaaaggtgattagattaataatttaatagaggatgagtgacctctgataaattactgctagaatgaacttgtcaatgatggatggtaaattttcatggaagttataaaagtgataaataaaaacccttgcttttacccctgtcagtagccctcctcctaccactgaaccccattgcccctacccctccttctaactttattgctgtattctcttcactctatatttctctctatttgctaatattgcattgctgttacaataaaaattcaataaagatttagtggttaagtgc

SEQ ID NO: 163940 - DNA, 2585 bp, Homo sapiens
  Payload ID: 12279
  Gene Symbol: PEG10
  Gene Name: paternally expressed 10
  ENST ID: ENST00000612748
  CDS Start-End: 218-2569
acacgcgcttcaacttcggttggtgtgtgtcgaagaaacctgactgcgccctgaggagaacagcggagaaggtccaccgagcctggcgaaaggtccgctgagcgggctgtcgtccggagccactccgggctgcggagcacccagtggagaccgcgcctggctcaggtgtgggaccccatccttcctgtcttcgcagaggagtcctcgcgtggtgagtatgcgaaataagcgggttttgaaaacaaaaaaaagaaggagtggaagagggggccaggatccaggcctccatccccacagaagtgaagctacagctgggaggtctcctcccaccccaaccgtcaccctgggtcccgactgcccacctcctcctcctccccctccccccaacaacaacaacaacaacaactccaagcacaccggccataagagtgcgtgtgtccccaacatgaccgaacgaagaagggacgagctctctgaagagatcaacaacttaagagagaaggtcatgaagcagtcggaggagaacaacaacctgcagagccaggtgcagaagctcacagaggagaacaccacccttcgagagcaagtggaacccacccctgaggatgaggatgatgacatcgagctccgcggtgctgcagcagctgctgccccaccccctccaatagaggaagagtgcccagaagacctcccagagaagttcgatggcaacccagacatgctggctcctttcatggcccagtgccagatcttcatggaaaagagcaccagggatttctcagttgatcgtgtccgtgtctgcttcgtgacaagcatgatgaccggccgtgctgcccgttgggcctcagcaaagctggagcgctcccactacctgatgcacaactacccagctttcatgatggaaatgaagcatgtctttgaagaccctcagaggcgagaggttgccaaacgcaagatcagacgcctgcgccaaggcatggggtctgtcatcgactactccaatgctttccagatgattgcccaggacctggattggaacgagcctgcgctgattgaccagtaccacgagggcctcagcgaccacattcaggaggagctctcccacctcgaggtcgccaagtcgctgtctgctctgattgggcagtgcattcacattgagagaaggctggccagggctgctgcagctcgcaagccacgctcgccaccccgggcgctggtgttgcctcacattgcaagccaccaccaggtagatccaaccgagccggtgggaggtgcccgcatgcgcctgacgcaggaagaaaaagaaagacgcagaaagctgaacctgtgcctctactgtggaacaggaggtcactacgctgacaattgtcctgccaaggcctcaaagtcttcgccggggaaactccccggccccgctgtagagggaccttcagcgaccgggccagaaataataaggtccccacaagatgatgcctcatctccacacttgcaagtgatgctccagattcatcttccgggcagacacaccctgttcgtccgagccatgatcgattctggtgcttctggcaacttcattgatcacgaatatgttgctcaaaatggaattcctctaagaatcaaggactggccaatacttgtggaagcaattgatgggcgccccatagcatcgggcccagttgtccacgaaactcacgacctgatagttgacctgggagatcaccgagaggtgctgtcatttgatgtgactcagtctccattcttccctgtcgtcctaggggttcgctggctgagcacacatgatcccaatatcacatggagcactcgatctatcgtctttgattctgaatactgccgctaccactgccggatgtattctccaataccaccatcgctcccaccaccagcaccacaaccgccactctattatccagtagatggatacagagtttaccaaccagtgaggtattactatgtccagaatgtgtacactccagtagatgagcacgtctacccagatcaccgcctggttgaccctcacatagaaatgatacctggagcacacagtattcccagtggacatgtgtattcactgtccgaacctgaaatggcagctcttcgagattttgtggcaagaaatgtaaaagatgggctaattactccaacgattgcacctaatggagcccaagttctccaggtgaagagggggtggaaactgcaagtttcttatgattgccgagctccaaacaattttactatccagaatcagtatcctcgcctatctattccaaatttagaagaccaagcacacctggcaacgtacactgaattcgtacctcaaatacctggataccaaacataccccacatatgccgcgtacccgacctacccagtaggattcgcctggtacccagtgggacgagacggacaaggaagatcactatatgtacctgtgatgatcacttggaatccacactggtaccgccagcctccggtaccacagtacccgccgccacagccgccgcctccaccaccaccaccgccgccgcctccatcttacagtaccctgtaaatacctgtcatgtcct

SEQ ID NO: 163941 - DNA, 6392 bp, Homo sapiens; identical to SEQ ID NO: 163939
  Payload ID: 12279
  Gene Symbol: PEG10
  Gene Name: paternally expressed 10
  ENST ID: ENST00000617526
  CDS Start-End: 259-2382

SEQ ID NO: 163942 - DNA, 574 bp, Homo sapiens
  Payload ID: 12279
  Gene Symbol: PEG10
  Gene Name: paternally expressed 10
  ENST ID: ENST00000613043
  CDS Start-End: 481-574
ttcggttggtgtgtgtcgaagaaacctgactgcgccctgaggagaacagcggagaaggtccaccgagcctggcgaaaggtccgctgagcgggctgtcgtccggagccactccgggctgcggagcacccagtggagaccgcgcctggctcaggtgtgggaccccatccttcctgtcttcgcagaggagtcctcgcgtgataataaaaccatcagacctgggcttcaataaagccccacttagtggccgtgattgacaaaaataagcgggttttgaaaacaaaaaaaagaaggagtggaagagggggccaggatccaggcctccatccccacagaagtgaagctacagctgggaggtctcctcccaccccaaccgtcaccctgggtcccgactgcccacctcctcctcctccccctccccccaacaacaacaacaacaacaactccaagcacaccggccataagagtgcgtgtgtccccaacatgaccgaacgaagaagggacgagctctctgaagagatcaacaacttaagagagaaggtcatgaagcagtcggaggagaacaacaacctgcaga

SEQ ID NO: 163943 - DNA, 6394 bp, Homo sapiens
  Payload ID: 12279
  Gene Symbol: PEG10
  Gene Name: paternally expressed 10
  ENST ID: ENST00000615790
  CDS Start-End: 157-1236
catccttcctgtcttcgcagaggagtcctcgcgtgaaataagcgggttttgaaaacaaaaaaaagaaggagtggaagagggggccaggatccaggcctccatccccacagaagtgaagctacagctgggaggtctcctcccaccccaaccgtcaccctgggtcccgactgcccacctcctcctcctccccctccccccaacaacaacaacaacaacaactccaagcacaccggccataagagtgcgtgtgtccccaacatgaccgaacgaagaagggacgagctctctgaagagatcaacaacttaagagagaaggtcatgaagcagtcggaggagaacaacaacctgcagagccaggtgcagaagctcacagaggagaacaccacccttcgagagcaagtggaacccacccctgaggatgaggatgatgacatcgagctccgcggtgctgcagcagctgctgccccaccccctccaatagaggaagagtgcccagaagacctcccagagaagttcgatggcaacccagacatgctggctcctttcatggcccagtgccagatcttcatggaaaagagcaccagggatttctcagttgatcgtgtccgtgtctgcttcgtgacaagcatgatgaccggccgtgctgcccgttgggcctcagcaaagctggagcgctcccactacctgatgcacaactacccagctttcatgatggaaatgaagcatgtctttgaagaccctcagaggcgagaggttgccaaacgcaagatcagacgcctgcgccaaggcatggggtctgtcatcgactactccaatgctttccagatgattgcccaggacctggattggaacgagcctgcgctgattgaccagtaccacgagggcctcagcgaccacattcaggaggagctctcccacctcgaggtcgccaagtcgctgtctgctctgattgggcagtgcattcacattgagagaaggctggccagggctgctgcagctcgcaagccacgctcgccaccccgggcgctggtgttgcctcacattgcaagccaccaccaggtagatccaaccgagccggtgggaggtgcccgcatgcgcctgacgcaggaagaaaaagaaagacgcagaaagctgaacctgtgcctctactgtggaacaggaggtcactacgctgacaattgtcctgccaaggcctcaaagtcttcgccggcgggaaactccccggccccgctgtagagggaccttcagcgaccgggccagaaataataaggtccccacaagatgatgcctcatctccacacttgcaagtgatgctccagattcatcttccgggcagacacaccctgttcgtccgagccatgatcgattctggtgcttctggcaacttcattgatcacgaatatgttgctcaaaatggaattcctctaagaatcaaggactggccaatacttgtggaagcaattgatgggcgccccatagcatcgggcccagttgtccacgaaactcacgacctgatagttgacctgggagatcaccgagaggtgctgtcatttgatgtgactcagtctccattcttccctgtcgtcctaggggttcgctggctgagcacacatgatcccaatatcacatggagcactcgatctatcgtctttgattctgaatactgccgctaccactgccggatgtattctccaataccaccatcgctcccaccaccagcaccacaaccgccactctattatccagtagatggatacagagtttaccaaccagtgaggtattactatgtccagaatgtgtacactccagtagatgagcacgtctacccagatcaccgcctggttgaccctcacatagaaatgatacctggagcacacagtattcccagtggacatgtgtattcactgtccgaacctgaaatggcagctcttcgagattttgtggcaagaaatgtaaaagatgggctaattactccaacgattgcacctaatggagcccaagttctccaggtgaagagggggtggaaactgcaagtttcttatgattgccgagctccaaacaattttactatccagaatcagtatcctcgcctatctattccaaatttagaagaccaagcacacctggcaacgtacactgaattcgtacctcaaatacctggataccaaacataccccacatatgccgcgtacccgacctacccagtaggattcgcctggtacccagtgggacgagacggacaaggaagatcactatatgtacctgtgatgatcacttggaatccacactggtaccgccagcctccggtaccacagtacccgccgccacagccgccgcctccaccaccaccaccgccgccgcctccatcttacagtaccctgtaaatacctgtcatgtccttcaggatctctgccctcaaaatttattcctgttcagcttctcaatcagtgactgtgtgctaaattttaggctactgtatcttcaggccacctgaggcacatcctctctgaaacggctatggaaggttagggccactctggactggcacacatcctaaagcaccaaaagaccttcaacattttctgagagcaacagagtatttgccaataaatgatctctcatttttccaccttgactgccaatctaactaaaataattaataagtttactttccagccagtcctggaagtctgggttttacctgccaaaacctccatcaccatctaaattataggctgccaaatttgctgtttaacatttacagagaagctgatacaaacgcaggaaatgctgatttctttatggagggggagacgaggaggaggaggacatgacttttcttgcggtttcggtaccctctttttaaatcactggaggactgaggccttattaaggaagccaaaattatcggtgcagtgtggaaaggcttccgtgatcctctcgctgcacccttagaaacttcaccgtcttcaaactccatttccatggttctgttaattctcaaggagcagcaactcgactggttctcccaggagcaggaaaaacccttgtgacatgaaacatctcaggcctgaaaagaaagtgctctctcagatggactcttgcatgttaagactatgtcttcacatcatggtgcaaatcacatgtacccaatgactccggctttgacacaacaccttaccatcatcatgccatgatggcttccacaaagcattaaacctggtaaccagagattactggtggctccagcgttgttagatgttcatgaaatgtgaccacctctcaatcacctttgagggctaaagagtagcacatcaaaaggactccaaaatcccatacccaactcttaagagatttgtcctggtacttcagaaagaattttcatgagtgttcttaattggctggaaaagcaccagctgacgttttggaagaatctatccatgtgtctgcctccatatgcatctgggcatttcatcttcagtcccctcattagactgtagcattaggatgtgtggagagaggagaaatgatttagcacccagattcacactcctatgcctggaagggggacatctttgaagaagaggaattagggctgtggacactgtcttgaggatgtggacttccttagtgagctccacattacttgatggtaaccacttcaaaaggatcagaatccacgtaatgaaaaaggtccctctagaggatggagctgatgtgaagctgccaatggatgaaaagcctcagaaagcaactcaaaggactcaaagcaacggacaacacaagagttgtcttcagcccagtgacacctctgatgtcccctggaagctttgtgctaacctgggactgcctgacttcctttagcctggtcccttgctactaccttgaactgttttatctaacctctctttttctgtttaattctttgctactgccattgaccctgctgcaggatttgtgtcattttcctgcctggttgctgagactccattttgctgccacacacagagatgtaagaggcaggctttaattgccaaagcacagtttgagcagtagaaaacaacatggtgtatatctcaaattgcctgacatgaagaggagtctaacggtgaagtttcacttttcatcagcatcatctttcacatgttcattatcatctgctcttattcttgcatgtttaaacacttaaaatttttagtataatttttagtgtgttttgaagtggtgactaggctttcaaaaacttccattgaattacaaagcactatccagttcttattgttaaactaagtaaaaatgataagtaacatagtgtaaaatattcctttactgtgaacttcttacaatgctgtgaatgagaggctcctcagaactggagcatttgtataataattcatcctgttcatcttcaattttaacatcatatataatttcaattctatcaattgggcctttaaaaatcatataaaaggatataaaatttgaaaagagaaacctaattggctatttaatccaaaacaactttttttttccttcaatggaatcagaaagcttgtcaatcactcatgtgttttagagtaattacttttaaaatggtgcatttgtgcttctgaactattttgaagagtcacttctgtttacctcaagtatcaattcatcctccatacatttgaattcaagttgtttttttgtcaaatttacagttgtcaattgatcttcaagctgcagggtgcctagaaatgggccgttgtctgtagccctggcatgtgcacacggacatttgccaccactgcaagcaaaagtctggagaagttcaccaacgacaagaacgattagggaaaatatgctgctgtgggttaacaactcagaaagtccctgatccacatttggctgtttactaaagcttgtgattaactttttggcagtgtgtactatgctctattgctatatatgctatctataaatgtagatgttaaggataagtaattctaaatttattattctatagttttgaagtttggttaagtttcctttcactcaattgatttattttgttgttaatcaaatttatgttaattggatcctttaaattttttttggcattttccaacaaaaatggctttattcataagaaaggaaaaaaatcaatggaatttgatatctaaagaagttagaaagggagcaaaataaaaaacataaaggagatagatgaattagtaagcaaatcagtagtcgagtttttcaaactggcaaaattaattaattgacttttagcccaaatttacattgttaattaaatcaagaaggaagaagatctaagagctcccattgataggcaagcctagagagaactagctaaatttatcatgctaggatattgaaacacagaaagtttacatacatttatgaagggtcaatttagtttggacagtgaggtatttgtcttagtggaaaaaaggagaattagtctgatcaaatcgtgaagtaatacagtgaacttgcaggtgcacaaaataagagggccacatctatatggtgcagtctggaattctgtttaagtttgtaggtacctcttggacttctgaattgatccagttgtcatccaccacagacatctcacatcagatacagacagttccaagattgacaacagagaacaacctgctggaaagacctgggcagaaatggagagccctgcgggaaccatgctacattttcatctaaagagagaatgcacatctgatgagactgaaagttctttgttgttttagattgtagaatggtattgaattggtctgtggaaaattgcattgcttttatttctttgtgtaatcaagtttaagtaataggggatatataatcataagcattttagggtgggagggactattaagtaattttaagtgggtggggttatttagaatgttagaataatattatgtattagatatcgctataagtggacatgcgtacttacttgtaaccctttaccctataattgctatccttaaagatttcaaataaactcggagggaactgcagggagaccaacttatttagagcgaattggacatggataaaaaccccagtgggagaaagttcaaaggtgattagattaataatttaatagaggatgagtgacctctgataaattactgctagaatgaacttgtcaatgatggatggtaaattttcatggaagttataaaagtgataaataaaaacccttgcttttacccctgtcagtagccctcctcctaccactgaaccccattgcccctacccctccttctaactttattgctgtattctcttcactctatatttctctctatttgctaatattgcattgctgttacaataaaaattcaataaagatttagtggttaagtgc

SEQ ID NO: 163944 - DNA, 8723 bp, Homo sapiens
  Payload ID: 12280
  Gene Symbol: PEG3
  Gene Name: paternally expressed 3
  Uniprot ID: Q9GZU2
  ENST ID: ENST00000326441
  CDS Start-End: 365-5131
gtttgggaggcgcgggagatgtccaccctgggctggtggcgccgccgggcgccgggcgccatgagggtgcgctaggcggctgttcgtgcccgaggctgcgcagcactgaggtgagctttgccttcttgatcttccgtccttcttggagacgactggcgagaggaagagggactaggtccaaacgctaggtggctgggtccagatacctgtgttttgactctgttcctgtggatagctgcttggtctgaagttccagaaaggatcctgttcccagacaggtccctgagtactgacggtcacaggctgccgcgtctttcctgttgactcatgtttggttcctccagtgaaaattttacttagagaaatgctgcctccaaagcacttgtctgccaccaaacctaagaagtcctgggccccaaatctgtatgagctagacagtgacttgactaaggagccggatgtcatcataggagaaggtccaactgactctgagttttttcatcagaggtttcggaacctaatctatgtggaatttgttgggcctcggaagaccctgatcaaactccgaaacctctgcctcgattggttgcagccggagacccgcaccaaggaggagatcatcgagctcttggtccttgagcagtacctgaccatcatccctgaaaagctcaagccttgggtgcgagcaaaaaagccggagaactgtgagaagctcgtcactctgctggagaattacaaggagatgtaccaaccagaagacgacaacaacagtgacgtgaccagcgacgacgacatgacccggaacagaagagagtcctcaccacctcactcagtccattctttcagtgaccgggactgggaccggaggggcagaagcagagacatggagccacgagaccgctggtcccacaccaggaacccaagaagcaggatgcctccgcgggatctttcccttcctgtggtggcgaaaacaagctttgaaatggacagagaggacgacagggactccagggcttatgagtcccgatctcaggatgctgaatcataccaaaatgtggtggacctcgctgaggacaggaaacctcacaacacaatccaggacaacatggaaaactacaggaagctgctctccctcgtgcagcttgctgaagacgatggccactcccacatgacgcagggccactcatcaagatccaagagaagtgcctacccaagcaccagtcgaggtctaaaaactatgcctgaagccaaaaaatcaacccaccggcgggggatttgtgaagatgaatcttcccacggagtgataatggaaaaattcatcaaggatgtgtcacgcagttccaaatcgggaagagcaagggagtcaagcgaccggtcacagagattccccagaatgtcagatgataactggaaggacatttcattgaacaagagggagtcagtgatccagcagcgggtttatgaagggaatgcatttaggggaggctttaggtttaattcaacccttgtttccagaaagagagttcttgaaagaaagaggcgctatcattttgacacagatgggaagggctcgattcacgatcaaaaaggctgtcccaggaagaagccctttgaatgtggtagtgagatgagaaaagccatgagcgtgagcagcctgagcagcctcagctccccctcctttaccgagtcacagccaattgattttggggcaatgccatatgtatgtgatgagtgtgggaggtcgttcagtgtcatctcagaatttgttgagcaccagatcatgcatactagagagaacctctatgagtatggtgagtcctttatccacagtgtggctgtcagtgaagttcagaaaagtcaggttggagggaaacgttttgaatgtaaggactgtggagagaccttcaataagagtgccgccttggctgaacatcggaagattcatgctagaggttatcttgtggaatgtaagaatcaggaatgtgaggaagccttcatgcctagccccacctttagtgagcttcagaaaatatatggcaaagacaaattctacgagtgcagggtgtgtaaggaaaccttccttcatagttctgccctgattgagcaccagaaaatccactttggggatgacaaagataatgagcgtgaacatgaacgtgaacgtgaacgtgagcgcggggaaacctttaggcccagcccagcccttaatgagtttcagaaaatgtatggtaaagagaaaatgtacgaatgtaaggtgtgtggggagactttccttcatagctcatccctgaaagaacatcagaaaatccatactagagggaacccatttgaaaacaagggtaaagtgtgtgaggaaacctttattcctggtcagtcccttaaaaggcgtcagaaaacttacaataaggagaagctctgtgactttacagatggccgggatgccttcatgcaaagctcagagctcagtgagcatcagaaaattcattctcgaaagaacctctttgaaggcagagggtatgagaaatctgtcattcatagtgggccattcactgaatctcagaagagtcatactataacaagacctcttgaaagtgatgaggacgaaaaggcgttcaccattagctctaacccctatgaaaaccagaagattcccactaaggaaaatgtctatgaggcaaaatcatatgagaggtctgttattcatagcttagcctctgtggaagctcagaaaagtcacagtgtagcagggcccagtaaaccaaaagtaatggcagagtctaccattcagagcttcgatgctatcaaccatcagagagttcgtgctggagggaacacctctgaaggaagggaatacagtaggtctgttatccatagcttagtggcttccaaacctccaagaagtcacaatggaaatgaattggtggaatctaatgagaagggagaatcctccatttatatctcagaccttaatgataagcgacagaagattcctgccagagagaacccttgtgaagggggcagtaagaatcgcaactatgaagactctgtcatacagagtgtattccgtgccaaacctcagaaaagtgttcctggagagggatctggtgagtttaagaaggatggcgaattctctgttcccagctcaaatgtccgtgaataccagaaggctcgtgctaaaaagaaatacattgagcataggagcaatgagacctctgtaattcactctctgccttttggtgaacaaacatttcgccctcgagggatgctctatgaatgtcaggagtgtggggagtgctttgctcatagctctgacctcactgagcaccagaagattcatgatagggagaagccctctggaagcagaaactatgaatggtctgtcattcgcagcttggcccctactgaccctcaaacaagttacgcccaagagcagtatgctaaagagcaagcgcggaacaaatgtaaggacttcagacaattttttgctaccagcgaagacctcaacacaaaccagaaaatctatgaccaagagaagtctcatggcgaggagtctcaaggcgagaatactgatggggaggagacccacagcgaggagacccatggtcaggagacaattgaagaccctgtcattcaaggctcagacatggaagaccctcagaaggatgaccctgatgacaaaatctatgaatgtgaggactgtggcctgggctttgtggatctcacagacctcacagaccatcagaaagtccacagcaggaagtgcctggttgacagtcgggagtacacacattctgtaattcacacccattccatcagcgagtatcagagagattacactggagagcagctgtatgaatgtccaaagtgtggggaatcttttattcatagctcattccttttcgagcatcagagaatccatgaacaagaccagttgtattccatgaaggggtgtgatgatggttttattgccctcttgcccatgaagccacggaggaatcgtgctgcagagaggaatcctgctcttgctgggtcggccattcgatgccttttgtgtggacaaggcttcattcatagctctgcccttaatgagcatatgagacttcatagggaagatgatttactggagcagagccagatggctgaggaagctatcattccaggcttagccctcactgagtttcagagaagtcagaccgaagagagactctttgaatgtgcagtctgtggagaatctttcgtcaacccagcagaacttgcagatcacgtaactgttcataagaatgagccctatgagtacgggtcctcctatactcacacctcatttcttactgagcccctcaaaggagctataccattctatgaatgcaaggattgtggtaagtcctttattcatagcacagtcctcactaaacataaggagcttcatctggaagaagaagaagaagatgaagcagcagcagctgcagcagcagcagcccaggaagttgaagccaatgtccatgttccacaagtagttctgaggattcagggcttaaacgtagaggctgctgagccagaagtggaggctgccgagccagaagtggaggctgctgagccagaagtggaggctgctgagccaaacggagaggctgaagggccagatggagaggctgcagagcccattggagaggctggacagccaaatggagaggccgagcagccaaatggggatgctgatgagccagatggtgcaggtattgaagacccagaagaaagagctgaagagccagagggaaaagctgaagagccagagggagatgccgacgagcctgacggtgtgggaattgaagacccagaagaaggtgaagatcaagagattcaggtagaagaaccatactatgactgccatgaatgcacagaaaccttcacttccagcacagcattcagtgaacacctgaaaactcatgccagcatgatcatatttgagcctgcaaatgcctttggggagtgctcaggctacatcgaacgtgccagcaccagcacaggtggtgccaatcaagctgatgagaagtacttcaaatgtgacgtctgtgggcagctcttcaatgaccgcctgtccctcgccagacaccagaatacccacactggctgagggcatggggtaaaggttagaaaaccttcacctaggacttgacccttaccaaaccacagagaatccaaaccaatccatgataatgtcagtaggagacttaaccttagtgtgttacacacctgacttaacatctctaaactcagattgaaaagagaccgaatgtgcagattccacagtcttaagctttccccttcagatgtcagtgtctgcatgtgggaaagccatagcacacatcttacctttccaagtaatcagattgagaaaaccctatgagtattccagactacagagtttgcccaaatcaactgtaaatgacacttgtgtaacgtatatatagtgtttcatgaggtgtatataaaatagcaaattatgacagaacagtgatcacatatatttggatttatatgatatacagttacagtttactctgcagaggtaccttacctggtattctttgaattttttttttttttggaggaggaagagagcaacaaatttgattatatttttaagtgtcttagatcctgagaaagatttattgtgcattatttgaaccctgtcaatatctttttgagtaattgttttgtttcttacccttaaatagtcttgtgaagctgtaggcatgatagataacatggcttttactccttactgtttgaaaagataagtactttagcttctttctgcagccatttcatctgcgccaacactttggaacctaatactgtgtaaggctttacaatatacggattggctttttgtgacccagattgattggttgccacatgttatgtttgttgaagtggttctcatgcaaaaatattacacatttgtgttctgggttttttttttttttaaccaactcaatatgtgtttgatgatagtgaattgataaaacccgaagcttttccctgtaaatcttacatctttgcctttaaagaatgggttacaaccatcactagatcacagtagtgcctaatgaaggttgagaaccgtaggagaggctctcatgctgtaaataatgttgcaggctaataacctttcatcacttcctttgtgcgcttcctgccttaagtgacaagtagcaacatggcttgggtcccctgtgcagcatcagcttatgctgccacaagtcagtttgcaccctaggtgcccaggagctagtatccttagatctttctatcgctaacttaattctcttcgttatttatctgaccctctaactccatgtctaacttgcattaaaaaaaaaaaaattctttacagtcaacccaagcttaacatggactcaggttccccagcagccttaatttgttttgttaacatctgttccttctttttcagctctcctagagtatttctgagtgttgtgttcatctaatcttagtattcttttaattacaaattgacctcacagcttgaggtttcttgtgtcctattctgtggactacctgtgctcctttgcttcccctcccctcgcataataactatattaagaaattttttttggccttgagttggctggaaaaaaaatataaaatttaaaaaatttaaaaaaaaagatttgcaaaatgtaagtgtagatcatttgaacaagcaaaattaaagtacccactgggggaaatgtgtctgaatcttactcttctggatctgcaggattagggcttggaagtatgtcaaagatgcagggagtgtcaaagtttaggaagattgtagagctgagagcaagaagcagaaatgagtgagtcaaagaagggagtcctaatatatcaccagatctaggaggggagaggagacagacagaagaaaacaccagaggcaagaactgtagaaggccaggtttctgagaatgaattgagcggggtgtcctgagcagtttggaaaaggagtttttgatggtatggtgtaggtgagggctggctgcataggaaggactgaggttggaacggacatcgggaaagctgaggggcagtgaggtttactacatgggaaaaggactcttgaaacgagaatcagtgttgatgtcggggtgaactttgtgggtacattacttggtgttaacattgttggcagtggtagccccttttcagaaagcaacttgctgtaagtcagggtgtccgttccaaccttcagctagtgaaaaggtagtaacaaatggtaaacaagagaatgattgtttaaacctatctgtggacacttaatgcaactgtttaaaaatgataatcacgagttatgtagcaacgtggaaatatatttacagaacattaagtggagaaagcaggacacgaaagtatatttatactacagttataactcaacagttcatttatatgctgttcatttaacagttcatttaaacagttcattataactgtttaaaaatatatatgcttatagtcaaaagctgttgtggtgttgttgttgtaggcttatagttgagcattattttcttaaatttcttgaatgttctttatggtagtgttactaaaaagtttatgatcacattttcattgtgaacataatttgaactcattatcacacacttggaaaatacagaaaagtggaggaaaaaaaatcatatccccaccatccaaagacatatactctcctcttatcttgttcattcttgtttctgtgcacaggtttatgattataactgtgtcaaaatgtatattcaaaatagctgttacattacctttgtggaattatggttaaatactttcactttaattttttcaaatgttccctataataatgtcctgataacagtgtattatgtgtgtctccattggtgtgcataatacatacccagaggaaaaattagaaaataaagtaaattattttaaaaaattacctatattcccaacacctaacaactactgctaacatcttgatctgtttcctctatcttgtttcagtgcacacgcttgtgataacagtgttaaatatgtgtgcataaagtcttaaatgaaaagatgtggaaaataactaaaatagtgttgtcattgtgggaatttggttaaatattttgtctcaaattccttaaataatctttggtgttttggtaataaattttatgtatgtattttccattacaaatataatacatactcatacaaaactttggaaattcagtaaagaaaattcacacatattcccaacacccaacaacaattaactgttaacatcttgatctgtgcactagtctgtgattattagggtgttagtgataagtatgcataaatgtcaaagatgggaagaaagatgaaaaacaagaaatagttgtgtggttgttgtgggattatggttattttgtttcggtttccttgaaaggtcatcattctagtgttttggtagtccacctttactacatatatttccattatatatgaaatgtgttcattatagaaactttgaagttacagaaatgtagaagagaaactcacccatgttttcaccatccaaagagtgtggttaacatcttgatatattttcttcatcttgtttctgtgcacaggtttttggtttgttaatatggttgtggtcattctatctgtaatagtgtcaacaataaaaataaagttaaaaataa

SEQ ID NO: 163945 - DNA, 411 bp, Homo sapiens
  Payload ID: 12280
  Gene Symbol: PEG3
  Gene Name: paternally expressed 3
  ENST ID: ENST00000594389
  CDS Start-End: 302-411
tgcgggaggagaggtttgggaggcgcgggagatgtccaccctgggctggtggcgccgccgggcgccgggcgccatgagggtgcgctaggcggctgttcgtgcccgaggctgcgcagcactgaggtgagctttgccttcttgatcttccgtccttcttggagacgactggcgagaggaagagggactaggtccaaacgctaggtggctgggtccaggtccctgagtactgacggtcacaggctgccgcgtctttcctgttgactcatgtttggttcctccagtgaaaattttacttagagaaatgctgcctccaaagcacttgtctgccaccaaacctaagaagtcctgggccccaaatctgtatgagctagacagtgacttgactaaggagccggatgtcatcataggaga

SEQ ID NO: 163946 - DNA, 5052 bp, Homo sapiens
  Payload ID: 12280
  Gene Symbol: PEG3
  Gene Name: paternally expressed 3
  Uniprot ID: Q9GZU2
  ENST ID: ENST00000599577
  CDS Start-End: 289-5052
gtttgggaggcgcgggagatgtccaccctgggctggtggcgccgccgggcgccgggcgccatgagggtgcgctaggcggctgttcgtgcccgaggctgcgcagcactgaggtgagctttgccttcttgatcttccgtccttcttggagacgactggcgagaggaagagggactaggtccaaacgctaggtggctgggtccaggtccctgagtactgacggtcacaggctgccgcgtctttcctgttgactcatgtttggttcctccagtgaaaattttacttagagaaatgctgcctccaaagcacttgtctgccaccaaacctaagaagtcctgggccccaaatctgtatgagctagacagtgacttgactaaggagccggatgtcatcataggagaaggtccaactgactctgagttttttcatcagaggtttcggaacctaatctatgtggaatttgttgggcctcggaagaccctgatcaaactccgaaacctctgcctcgattggttgcagccggagacccgcaccaaggaggagatcatcgagctcttggtccttgagcagtacctgaccatcatccctgaaaagctcaagccttgggtgcgagcaaaaaagccggagaactgtgagaagctcgtcactctgctggagaattacaaggagatgtaccaaccagaagacgacaacaacagtgacgtgaccagcgacgacgacatgacccggaacagaagagagtcctcaccacctcactcagtccattctttcagtgaccgggactgggaccggaggggcagaagcagagacatggagccacgagaccgctggtcccacaccaggaacccaagaagcaggatgcctccgcgggatctttcccttcctgtggtggcgaaaacaagctttgaaatggacagagaggacgacagggactccagggcttatgagtcccgatctcaggatgctgaatcataccaaaatgtggtggacctcgctgaggacaggaaacctcacaacacaatccaggacaacatggaaaactacaggaagctgctctccctcgtgcagcttgctgaagacgatggccactcccacatgacgcagggccactcatcaagatccaagagaagtgcctacccaagcaccagtcgaggtctaaaaactatgcctgaagccaaaaaatcaacccaccggcgggggatttgtgaagatgaatcttcccacggagtgataatggaaaaattcatcaaggatgtgtcacgcagttccaaatcgggaagagcaagggagtcaagcgaccggtcacagagattccccagaatgtcagatgataactggaaggacatttcattgaacaagagggagtcagtgatccagcagcgggtttatgaagggaatgcatttaggggaggctttaggtttaattcaacccttgtttccagaaagagagttcttgaaagaaagaggcgctatcattttgacacagatgggaagggctcgattcacgatcaaaaaggctgtcccaggaagaagccctttgaatgtggtagtgagatgagaaaagccatgagcgtgagcagcctgagcagcctcagctccccctcctttaccgagtcacagccaattgattttggggcaatgccatatgtatgtgatgagtgtgggaggtcgttcagtgtcatctcagaatttgttgagcaccagatcatgcatactagagagaacctctatgagtatggtgagtcctttatccacagtgtggctgtcagtgaagttcagaaaagtcaggttggagggaaacgttttgaatgtaaggactgtggagagaccttcaataagagtgccgccttggctgaacatcggaagattcatgctagaggttatcttgtggaatgtaagaatcaggaatgtgaggaagccttcatgcctagccccacctttagtgagcttcagaaaatatatggcaaagacaaattctacgagtgcagggtgtgtaaggaaaccttccttcatagttctgccctgattgagcaccagaaaatccactttggggatgacaaagataatgagcgtgaacatgaacgtgaacgtgaacgtgagcgcggggaaacctttaggcccagcccagcccttaatgagtttcagaaaatgtatggtaaagagaaaatgtacgaatgtaaggtgtgtggggagactttccttcatagctcatccctgaaagaacatcagaaaatccatactagagggaacccatttgaaaacaagggtaaagtgtgtgaggaaacctttattcctggtcagtcccttaaaaggcgtcagaaaacttacaataaggagaagctctgtgactttacagatggccgggatgccttcatgcaaagctcagagctcagtgagcatcagaaaattcattctcgaaagaacctctttgaaggcagagggtatgagaaatctgtcattcatagtgggccattcactgaatctcagaagagtcatactataacaagacctcttgaaagtgatgaggacgaaaaggcgttcaccattagctctaacccctatgaaaaccagaagattcccactaaggaaaatgtctatgaggcaaaatcatatgagaggtctgttattcatagcttagcctctgtggaagctcagaaaagtcacagtgtagcagggcccagtaaaccaaaagtaatggcagagtctaccattcagagcttcgatgctatcaaccatcagagagttcgtgctggagggaacacctctgaaggaagggaatacagtaggtctgttatccatagcttagtggcttccaaacctccaagaagtcacaatggaaatgaattggtggaatctaatgagaagggagaatcctccatttatatctcagaccttaatgataagcgacagaagattcctgccagagagaacccttgtgaagggggcagtaagaatcgcaactatgaagactctgtcatacagagtgtattccgtgccaaacctcagaaaagtgttcctggagagggatctggtgagtttaagaaggatggcgaattctctgttcccagctcaaatgtccgtgaataccagaaggctcgtgctaaaaagaaatacattgagcataggagcaatgagacctctgtaattcactctctgccttttggtgaacaaacatttcgccctcgagggatgctctatgaatgtcaggagtgtggggagtgctttgctcatagctctgacctcactgagcaccagaagattcatgatagggagaagccctctggaagcagaaactatgaatggtctgtcattcgcagcttggcccctactgaccctcaaacaagttacgcccaagagcagtatgctaaagagcaagcgcggaacaaatgtaaggacttcagacaattttttgctaccagcgaagacctcaacacaaaccagaaaatctatgaccaagagaagtctcatggcgaggagtctcaaggcgagaatactgatggggaggagacccacagcgaggagacccatggtcaggagacaattgaagaccctgtcattcaaggctcagacatggaagaccctcagaaggatgaccctgatgacaaaatctatgaatgtgaggactgtggcctgggctttgtggatctcacagacctcacagaccatcagaaagtccacagcaggaagtgcctggttgacagtcgggagtacacacattctgtaattcacacccattccatcagcgagtatcagagagattacactggagagcagctgtatgaatgtccaaagtgtggggaatcttttattcatagctcattccttttcgagcatcagagaatccatgaacaagaccagttgtattccatgaaggggtgtgatgatggttttattgccctcttgcccatgaagccacggaggaatcgtgctgcagagaggaatcctgctcttgctgggtcggccattcgatgccttttgtgtggacaaggcttcattcatagctctgcccttaatgagcatatgagacttcatagggaagatgatttactggagcagagccagatggctgaggaagctatcattccaggcttagccctcactgagtttcagagaagtcagaccgaagagagactctttgaatgtgcagtctgtggagaatctttcgtcaacccagcagaacttgcagatcacgtaactgttcataagaatgagccctatgagtacgggtcctcctatactcacacctcatttcttactgagcccctcaaaggagctataccattctatgaatgcaaggattgtggtaagtcctttattcatagcacagtcctcactaaacataaggagcttcatctggaagaagaagaagaagatgaagcagcagcagctgcagcagcagcagcccaggaagttgaagccaatgtccatgttccacaagtagttctgaggattcagggcttaaacgtagaggctgctgagccagaagtggaggctgccgagccagaagtggaggctgctgagccagaagtggaggctgctgagccaaacggagaggctgaagggccagatggagaggctgcagagcccattggagaggctggacagccaaatggagaggccgagcagccaaatggggatgctgatgagccagatggtgcaggtattgaagacccagaagaaagagctgaagagccagagggaaaagctgaagagccagagggagatgccgacgagcctgacggtgtgggaattgaagacccagaagaaggtgaagatcaagagattcaggtagaagaaccatactatgactgccatgaatgcacagaaaccttcacttccagcacagcattcagtgaacacctgaaaactcatgccagcatgatcatatttgagcctgcaaatgcctttggggagtgctcaggctacatcgaacgtgccagcaccagcacaggtggtgccaatcaagctgatgagaagtacttcaaatgtgacgtctgtgggcagctcttcaatgaccgcctgtccctcgccagacaccagaatacccacactggc

SEQ ID NO: 163947 - DNA, 1558 bp, Homo sapiens
  Payload ID: 12280
  Gene Symbol: PEG3
  Gene Name: paternally expressed 3
  ENST ID: ENST00000600833
  CDS Start-End: 372-1558
ctccaaagcacttgtctgccaccaaacctaagaagtcctgggccccaaatctgtatgagctagacagtgacttgactaaggagccggatgtcatcataggagaaggtccaactgactctgagttttttcatcagaggtttcggaacctaatctatgtggaatttgttgggcctcggaagaccctgatcaaactccgaaacctctgcctcgattggttgcagccggagacccgcaccaaggaggagatcatcgagctcttggtccttgagcagtacctgaccatcatccctgaaaagctcaagccttgggtgcgagcaaaaaagccggagaactgtgagaagctcgtcactctgctggagaattacaaggagatgtaccaaccagaagacgacaacaacagtgacgtgaccagcgacgacgacatgacccggaacagaagagagtcctcaccacctcactcagtccattctttcagtggtgaccgggactgggaccggaggggcagaagcagagacatggagccacgagaccgctggtcccacaccaggaacccaagaagcaggatgcctccgcgggatctttcccttcctgtggtggcgaaaacaagctttgaaatggacagagaggacgacagggactccagggcttatgagtcccgatctcaggatgctgaatcataccaaaatgtggtggacctcgctgaggacaggaaacctcacaacacaatccaggacaacatggaaaactacaggaagctgctctccctcggtctaaaaactatgcctgaagccaaaaaatcaacccaccggcgggggatttgtgaagatgaatcttcccacggagtgataatggaaaaattcatcaaggatgtgtcacgcagttccaaatcgggaagagcaagggagtcaagcgaccggtcacagagattccccagaatgtcagatgataactggaaggacatttcattgaacaagagggagtcagtgatccagcagcgggtttatgaagggaatgcatttaggggaggctttaggtttaattcaacccttgtttccagaaagagagttcttgaaagaaagaggcgctatcattttgacacagatgggaagggctcgattcacgatcaaaaaggctgtcccaggaagaagccctttgaatgtggtagtgagatgagaaaagccatgagcgtgagcagcctgagcagcctcagctccccctcctttaccgagtcacagccaattgattttggggcaatgccatatgtatgtgatgagtgtgggaggtcgttcagtgtcatctcagaatttgttgagcaccagatcatgcatactagagagaacctctatgagtatggtgagtcctttatccacagtgtggctgtcagtgaagttcagaaaagtcaggttggagggaaacgttttgaatgtaaggactgtggagagaccttcaataagagtgccgccttggctgaacatcggaagattcatgctagaggttatcttgtggaatgtaagaatcaggaatgtgaggaagccttcatgcctagccccacctttag

SEQ ID NO: 163948 - DNA, 5115 bp, Homo sapiens
  Payload ID: 12280
  Gene Symbol: PEG3
  Gene Name: paternally expressed 3
  Uniprot ID: Q9GZU2
  ENST ID: ENST00000599534
  CDS Start-End: 352-5115
acttctagggcattagacaagttgcccacagtcccaagttagtagcccaagttagtagccgagctaactcctcgagtaggtctctgtgaagcccagaggtcatgcttgtaactgctgtgctgaggccaactttgtgcggttgtttgcctatttactggggactcccatatcccaaaagcattgtcgatgcctctggtaaggtggcctccactgctgcctggtcttcaacttctgggacatgtgtatatctccttacgatccacaggtccctgagtactgacggtcacaggctgccgcgtctttcctgttgactcatgtttggttcctccagtgaaaattttacttagagaaatgctgcctccaaagcacttgtctgccaccaaacctaagaagtcctgggccccaaatctgtatgagctagacagtgacttgactaaggagccggatgtcatcataggagaaggtccaactgactctgagttttttcatcagaggtttcggaacctaatctatgtggaatttgttgggcctcggaagaccctgatcaaactccgaaacctctgcctcgattggttgcagccggagacccgcaccaaggaggagatcatcgagctcttggtccttgagcagtacctgaccatcatccctgaaaagctcaagccttgggtgcgagcaaaaaagccggagaactgtgagaagctcgtcactctgctggagaattacaaggagatgtaccaaccagaagacgacaacaacagtgacgtgaccagcgacgacgacatgacccggaacagaagagagtcctcaccacctcactcagtccattctttcagtgaccgggactgggaccggaggggcagaagcagagacatggagccacgagaccgctggtcccacaccaggaacccaagaagcaggatgcctccgcgggatctttcccttcctgtggtggcgaaaacaagctttgaaatggacagagaggacgacagggactccagggcttatgagtcccgatctcaggatgctgaatcataccaaaatgtggtggacctcgctgaggacaggaaacctcacaacacaatccaggacaacatggaaaactacaggaagctgctctccctcgtgcagcttgctgaagacgatggccactcccacatgacgcagggccactcatcaagatccaagagaagtgcctacccaagcaccagtcgaggtctaaaaactatgcctgaagccaaaaaatcaacccaccggcgggggatttgtgaagatgaatcttcccacggagtgataatggaaaaattcatcaaggatgtgtcacgcagttccaaatcgggaagagcaagggagtcaagcgaccggtcacagagattccccagaatgtcagatgataactggaaggacatttcattgaacaagagggagtcagtgatccagcagcgggtttatgaagggaatgcatttaggggaggctttaggtttaattcaacccttgtttccagaaagagagttcttgaaagaaagaggcgctatcattttgacacagatgggaagggctcgattcacgatcaaaaaggctgtcccaggaagaagccctttgaatgtggtagtgagatgagaaaagccatgagcgtgagcagcctgagcagcctcagctccccctcctttaccgagtcacagccaattgattttggggcaatgccatatgtatgtgatgagtgtgggaggtcgttcagtgtcatctcagaatttgttgagcaccagatcatgcatactagagagaacctctatgagtatggtgagtcctttatccacagtgtggctgtcagtgaagttcagaaaagtcaggttggagggaaacgttttgaatgtaaggactgtggagagaccttcaataagagtgccgccttggctgaacatcggaagattcatgctagaggttatcttgtggaatgtaagaatcaggaatgtgaggaagccttcatgcctagccccacctttagtgagcttcagaaaatatatggcaaagacaaattctacgagtgcagggtgtgtaaggaaaccttccttcatagttctgccctgattgagcaccagaaaatccactttggggatgacaaagataatgagcgtgaacatgaacgtgaacgtgaacgtgagcgcggggaaacctttaggcccagcccagcccttaatgagtttcagaaaatgtatggtaaagagaaaatgtacgaatgtaaggtgtgtggggagactttccttcatagctcatccctgaaagaacatcagaaaatccatactagagggaacccatttgaaaacaagggtaaagtgtgtgaggaaacctttattcctggtcagtcccttaaaaggcgtcagaaaacttacaataaggagaagctctgtgactttacagatggccgggatgccttcatgcaaagctcagagctcagtgagcatcagaaaattcattctcgaaagaacctctttgaaggcagagggtatgagaaatctgtcattcatagtgggccattcactgaatctcagaagagtcatactataacaagacctcttgaaagtgatgaggacgaaaaggcgttcaccattagctctaacccctatgaaaaccagaagattcccactaaggaaaatgtctatgaggcaaaatcatatgagaggtctgttattcatagcttagcctctgtggaagctcagaaaagtcacagtgtagcagggcccagtaaaccaaaagtaatggcagagtctaccattcagagcttcgatgctatcaaccatcagagagttcgtgctggagggaacacctctgaaggaagggaatacagtaggtctgttatccatagcttagtggcttccaaacctccaagaagtcacaatggaaatgaattggtggaatctaatgagaagggagaatcctccatttatatctcagaccttaatgataagcgacagaagattcctgccagagagaacccttgtgaagggggcagtaagaatcgcaactatgaagactctgtcatacagagtgtattccgtgccaaacctcagaaaagtgttcctggagagggatctggtgagtttaagaaggatggcgaattctctgttcccagctcaaatgtccgtgaataccagaaggctcgtgctaaaaagaaatacattgagcataggagcaatgagacctctgtaattcactctctgccttttggtgaacaaacatttcgccctcgagggatgctctatgaatgtcaggagtgtggggagtgctttgctcatagctctgacctcactgagcaccagaagattcatgatagggagaagccctctggaagcagaaactatgaatggtctgtcattcgcagcttggcccctactgaccctcaaacaagttacgcccaagagcagtatgctaaagagcaagcgcggaacaaatgtaaggacttcagacaattttttgctaccagcgaagacctcaacacaaaccagaaaatctatgaccaagagaagtctcatggcgaggagtctcaaggcgagaatactgatggggaggagacccacagcgaggagacccatggtcaggagacaattgaagaccctgtcattcaaggctcagacatggaagaccctcagaaggatgaccctgatgacaaaatctatgaatgtgaggactgtggcctgggctttgtggatctcacagacctcacagaccatcagaaagtccacagcaggaagtgcctggttgacagtcgggagtacacacattctgtaattcacacccattccatcagcgagtatcagagagattacactggagagcagctgtatgaatgtccaaagtgtggggaatcttttattcatagctcattccttttcgagcatcagagaatccatgaacaagaccagttgtattccatgaaggggtgtgatgatggttttattgccctcttgcccatgaagccacggaggaatcgtgctgcagagaggaatcctgctcttgctgggtcggccattcgatgccttttgtgtggacaaggcttcattcatagctctgcccttaatgagcatatgagacttcatagggaagatgatttactggagcagagccagatggctgaggaagctatcattccaggcttagccctcactgagtttcagagaagtcagaccgaagagagactctttgaatgtgcagtctgtggagaatctttcgtcaacccagcagaacttgcagatcacgtaactgttcataagaatgagccctatgagtacgggtcctcctatactcacacctcatttcttactgagcccctcaaaggagctataccattctatgaatgcaaggattgtggtaagtcctttattcatagcacagtcctcactaaacataaggagcttcatctggaagaagaagaagaagatgaagcagcagcagctgcagcagcagcagcccaggaagttgaagccaatgtccatgttccacaagtagttctgaggattcagggcttaaacgtagaggctgctgagccagaagtggaggctgccgagccagaagtggaggctgctgagccagaagtggaggctgctgagccaaacggagaggctgaagggccagatggagaggctgcagagcccattggagaggctggacagccaaatggagaggccgagcagccaaatggggatgctgatgagccagatggtgcaggtattgaagacccagaagaaagagctgaagagccagagggaaaagctgaagagccagagggagatgccgacgagcctgacggtgtgggaattgaagacccagaagaaggtgaagatcaagagattcaggtagaagaaccatactatgactgccatgaatgcacagaaaccttcacttccagcacagcattcagtgaacacctgaaaactcatgccagcatgatcatatttgagcctgcaaatgcctttggggagtgctcaggctacatcgaacgtgccagcaccagcacaggtggtgccaatcaagctgatgagaagtacttcaaatgtgacgtctgtgggcagctcttcaatgaccgcctgtccctcgccagacaccagaatacccacactggc

SEQ ID NO: 163949 - DNA, 4741 bp, Homo sapiens
  Payload ID: 12280
  Gene Symbol: PEG3
  Gene Name: paternally expressed 3
  Uniprot ID: Q9GZU2
  ENST ID: ENST00000593695
  CDS Start-End: 353-4741
gtttgggaggcgcgggagatgtccaccctgggctggtggcgccgccgggcgccgggcgccatgagggtgcgctaggcggctgttcgtgcccgaggctgcgcagcactgaggtgagctttgccttcttgatcttccgtccttcttggagacgactggcgagaggaagagggactaggtccaaacgctaggtggctgggtccagccggagacccgcaccaaggaggagatcatcgagctcttggtccttgagcagtacctgaccatcatccctgaaaagctcaagccttgggtgcgagcaaaaaagccggagaactgtgagaagctcgtcactctgctggagaattacaaggagatgtaccaaccagaagacgacaacaacagtgacgtgaccagcgacgacgacatgacccggaacagaagagagtcctcaccacctcactcagtccattctttcagtgaccgggactgggaccggaggggcagaagcagagacatggagccacgagaccgctggtcccacaccaggaacccaagaagcaggatgcctccgcgggatctttcccttcctgtggtggcgaaaacaagctttgaaatggacagagaggacgacagggactccagggcttatgagtcccgatctcaggatgctgaatcataccaaaatgtggtggacctcgctgaggacaggaaacctcacaacacaatccaggacaacatggaaaactacaggaagctgctctccctcgtgcagcttgctgaagacgatggccactcccacatgacgcagggccactcatcaagatccaagagaagtgcctacccaagcaccagtcgaggtctaaaaactatgcctgaagccaaaaaatcaacccaccggcgggggatttgtgaagatgaatcttcccacggagtgataatggaaaaattcatcaaggatgtgtcacgcagttccaaatcgggaagagcaagggagtcaagcgaccggtcacagagattccccagaatgtcagatgataactggaaggacatttcattgaacaagagggagtcagtgatccagcagcgggtttatgaagggaatgcatttaggggaggctttaggtttaattcaacccttgtttccagaaagagagttcttgaaagaaagaggcgctatcattttgacacagatgggaagggctcgattcacgatcaaaaaggctgtcccaggaagaagccctttgaatgtggtagtgagatgagaaaagccatgagcgtgagcagcctgagcagcctcagctccccctcctttaccgagtcacagccaattgattttggggcaatgccatatgtatgtgatgagtgtgggaggtcgttcagtgtcatctcagaatttgttgagcaccagatcatgcatactagagagaacctctatgagtatggtgagtcctttatccacagtgtggctgtcagtgaagttcagaaaagtcaggttggagggaaacgttttgaatgtaaggactgtggagagaccttcaataagagtgccgccttggctgaacatcggaagattcatgctagaggttatcttgtggaatgtaagaatcaggaatgtgaggaagccttcatgcctagccccacctttagtgagcttcagaaaatatatggcaaagacaaattctacgagtgcagggtgtgtaaggaaaccttccttcatagttctgccctgattgagcaccagaaaatccactttggggatgacaaagataatgagcgtgaacatgaacgtgaacgtgaacgtgagcgcggggaaacctttaggcccagcccagcccttaatgagtttcagaaaatgtatggtaaagagaaaatgtacgaatgtaaggtgtgtggggagactttccttcatagctcatccctgaaagaacatcagaaaatccatactagagggaacccatttgaaaacaagggtaaagtgtgtgaggaaacctttattcctggtcagtcccttaaaaggcgtcagaaaacttacaataaggagaagctctgtgactttacagatggccgggatgccttcatgcaaagctcagagctcagtgagcatcagaaaattcattctcgaaagaacctctttgaaggcagagggtatgagaaatctgtcattcatagtgggccattcactgaatctcagaagagtcatactataacaagacctcttgaaagtgatgaggacgaaaaggcgttcaccattagctctaacccctatgaaaaccagaagattcccactaaggaaaatgtctatgaggcaaaatcatatgagaggtctgttattcatagcttagcctctgtggaagctcagaaaagtcacagtgtagcagggcccagtaaaccaaaagtaatggcagagtctaccattcagagcttcgatgctatcaaccatcagagagttcgtgctggagggaacacctctgaaggaagggaatacagtaggtctgttatccatagcttagtggcttccaaacctccaagaagtcacaatggaaatgaattggtggaatctaatgagaagggagaatcctccatttatatctcagaccttaatgataagcgacagaagattcctgccagagagaacccttgtgaagggggcagtaagaatcgcaactatgaagactctgtcatacagagtgtattccgtgccaaacctcagaaaagtgttcctggagagggatctggtgagtttaagaaggatggcgaattctctgttcccagctcaaatgtccgtgaataccagaaggctcgtgctaaaaagaaatacattgagcataggagcaatgagacctctgtaattcactctctgccttttggtgaacaaacatttcgccctcgagggatgctctatgaatgtcaggagtgtggggagtgctttgctcatagctctgacctcactgagcaccagaagattcatgatagggagaagccctctggaagcagaaactatgaatggtctgtcattcgcagcttggcccctactgaccctcaaacaagttacgcccaagagcagtatgctaaagagcaagcgcggaacaaatgtaaggacttcagacaattttttgctaccagcgaagacctcaacacaaaccagaaaatctatgaccaagagaagtctcatggcgaggagtctcaaggcgagaatactgatggggaggagacccacagcgaggagacccatggtcaggagacaattgaagaccctgtcattcaaggctcagacatggaagaccctcagaaggatgaccctgatgacaaaatctatgaatgtgaggactgtggcctgggctttgtggatctcacagacctcacagaccatcagaaagtccacagcaggaagtgcctggttgacagtcgggagtacacacattctgtaattcacacccattccatcagcgagtatcagagagattacactggagagcagctgtatgaatgtccaaagtgtggggaatcttttattcatagctcattccttttcgagcatcagagaatccatgaacaagaccagttgtattccatgaaggggtgtgatgatggttttattgccctcttgcccatgaagccacggaggaatcgtgctgcagagaggaatcctgctcttgctgggtcggccattcgatgccttttgtgtggacaaggcttcattcatagctctgcccttaatgagcatatgagacttcatagggaagatgatttactggagcagagccagatggctgaggaagctatcattccaggcttagccctcactgagtttcagagaagtcagaccgaagagagactctttgaatgtgcagtctgtggagaatctttcgtcaacccagcagaacttgcagatcacgtaactgttcataagaatgagccctatgagtacgggtcctcctatactcacacctcatttcttactgagcccctcaaaggagctataccattctatgaatgcaaggattgtggtaagtcctttattcatagcacagtcctcactaaacataaggagcttcatctggaagaagaagaagaagatgaagcagcagcagctgcagcagcagcagcccaggaagttgaagccaatgtccatgttccacaagtagttctgaggattcagggcttaaacgtagaggctgctgagccagaagtggaggctgccgagccagaagtggaggctgctgagccagaagtggaggctgctgagccaaacggagaggctgaagggccagatggagaggctgcagagcccattggagaggctggacagccaaatggagaggccgagcagccaaatggggatgctgatgagccagatggtgcaggtattgaagacccagaagaaagagctgaagagccagagggaaaagctgaagagccagagggagatgccgacgagcctgacggtgtgggaattgaagacccagaagaaggtgaagatcaagagattcaggtagaagaaccatactatgactgccatgaatgcacagaaaccttcacttccagcacagcattcagtgaacacctgaaaactcatgccagcatgatcatatttgagcctgcaaatgcctttggggagtgctcaggctacatcgaacgtgccagcaccagcacaggtggtgccaatcaagctgatgagaagtacttcaaatgtgacgtctgtgggcagctcttcaatgaccgcctgtccctcgccagacaccagaatacccacactggctga

SEQ ID NO: 163950 - DNA, 5304 bp, Homo sapiens
  Payload ID: 12280
  Gene Symbol: PEG3
  Gene Name: paternally expressed 3
  Uniprot ID: Q9GZU2
  ENST ID: ENST00000598410
  CDS Start-End: 383-4777
gcagaagtctgggcagctgcgggaggagaggtttgggaggcgcgggagatgtccaccctgggctggtggcgccgccgggcgccgggcgccatgagggtgcgctaggcggctgttcgtgcccgaggctgcgcagcactgaggtgagctttgccttcttgatcttccgtccttcttggagacgactggcgagaggaagagggactaggtccaaacgctaggtggctgggtccagccggagacccgcaccaaggaggagatcatcgagctcttggtccttgagcagtacctgaccatcatccctgaaaagctcaagccttgggtgcgagcaaaaaagccggagaactgtgagaagctcgtcactctgctggagaattacaaggagatgtaccaaccagaagacgacaacaacagtgacgtgaccagcgacgacgacatgacccggaacagaagagagtcctcaccacctcactcagtccattctttcagtggtgaccgggactgggaccggaggggcagaagcagagacatggagccacgagaccgctggtcccacaccaggaacccaagaagcaggatgcctccgcgggatctttcccttcctgtggtggcgaaaacaagctttgaaatggacagagaggacgacagggactccagggcttatgagtcccgatctcaggatgctgaatcataccaaaatgtggtggacctcgctgaggacaggaaacctcacaacacaatccaggacaacatggaaaactacaggaagctgctctccctcggagtgcagcttgctgaagacgatggccactcccacatgacgcagggccactcatcaagatccaagagaagtgcctacccaagcaccagtcgaggtctaaaaactatgcctgaagccaaaaaatcaacccaccggcgggggatttgtgaagatgaatcttcccacggagtgataatggaaaaattcatcaaggatgtgtcacgcagttccaaatcgggaagagcaagggagtcaagcgaccggtcacagagattccccagaatgtcagatgataactggaaggacatttcattgaacaagagggagtcagtgatccagcagcgggtttatgaagggaatgcatttaggggaggctttaggtttaattcaacccttgtttccagaaagagagttcttgaaagaaagaggcgctatcattttgacacagatgggaagggctcgattcacgatcaaaaaggctgtcccaggaagaagccctttgaatgtggtagtgagatgagaaaagccatgagcgtgagcagcctgagcagcctcagctccccctcctttaccgagtcacagccaattgattttggggcaatgccatatgtatgtgatgagtgtgggaggtcgttcagtgtcatctcagaatttgttgagcaccagatcatgcatactagagagaacctctatgagtatggtgagtcctttatccacagtgtggctgtcagtgaagttcagaaaagtcaggttggagggaaacgttttgaatgtaaggactgtggagagaccttcaataagagtgccgccttggctgaacatcggaagattcatgctagaggttatcttgtggaatgtaagaatcaggaatgtgaggaagccttcatgcctagccccacctttagtgagcttcagaaaatatatggcaaagacaaattctacgagtgcagggtgtgtaaggaaaccttccttcatagttctgccctgattgagcaccagaaaatccactttggggatgacaaagataatgagcgtgaacatgaacgtgaacgtgaacgtgagcgcggggaaacctttaggcccagcccagcccttaatgagtttcagaaaatgtatggtaaagagaaaatgtacgaatgtaaggtgtgtggggagactttccttcatagctcatccctgaaagaacatcagaaaatccatactagagggaacccatttgaaaacaagggtaaagtgtgtgaggaaacctttattcctggtcagtcccttaaaaggcgtcagaaaacttacaataaggagaagctctgtgactttacagatggccgggatgccttcatgcaaagctcagagctcagtgagcatcagaaaattcattctcgaaagaacctctttgaaggcagagggtatgagaaatctgtcattcatagtgggccattcactgaatctcagaagagtcatactataacaagacctcttgaaagtgatgaggacgaaaaggcgttcaccattagctctaacccctatgaaaaccagaagattcccactaaggaaaatgtctatgaggcaaaatcatatgagaggtctgttattcatagcttagcctctgtggaagctcagaaaagtcacagtgtagcagggcccagtaaaccaaaagtaatggcagagtctaccattcagagcttcgatgctatcaaccatcagagagttcgtgctggagggaacacctctgaaggaagggaatacagtaggtctgttatccatagcttagtggcttccaaacctccaagaagtcacaatggaaatgaattggtggaatctaatgagaagggagaatcctccatttatatctcagaccttaatgataagcgacagaagattcctgccagagagaacccttgtgaagggggcagtaagaatcgcaactatgaagactctgtcatacagagtgtattccgtgccaaacctcagaaaagtgttcctggagagggatctggtgagtttaagaaggatggcgaattctctgttcccagctcaaatgtccgtgaataccagaaggctcgtgctaaaaagaaatacattgagcataggagcaatgagacctctgtaattcactctctgccttttggtgaacaaacatttcgccctcgagggatgctctatgaatgtcaggagtgtggggagtgctttgctcatagctctgacctcactgagcaccagaagattcatgatagggagaagccctctggaagcagaaactatgaatggtctgtcattcgcagcttggcccctactgaccctcaaacaagttacgcccaagagcagtatgctaaagagcaagcgcggaacaaatgtaaggacttcagacaattttttgctaccagcgaagacctcaacacaaaccagaaaatctatgaccaagagaagtctcatggcgaggagtctcaaggcgagaatactgatggggaggagacccacagcgaggagacccatggtcaggagacaattgaagaccctgtcattcaaggctcagacatggaagaccctcagaaggatgaccctgatgacaaaatctatgaatgtgaggactgtggcctgggctttgtggatctcacagacctcacagaccatcagaaagtccacagcaggaagtgcctggttgacagtcgggagtacacacattctgtaattcacacccattccatcagcgagtatcagagagattacactggagagcagctgtatgaatgtccaaagtgtggggaatcttttattcatagctcattccttttcgagcatcagagaatccatgaacaagaccagttgtattccatgaaggggtgtgatgatggttttattgccctcttgcccatgaagccacggaggaatcgtgctgcagagaggaatcctgctcttgctgggtcggccattcgatgccttttgtgtggacaaggcttcattcatagctctgcccttaatgagcatatgagacttcatagggaagatgatttactggagcagagccagatggctgaggaagctatcattccaggcttagccctcactgagtttcagagaagtcagaccgaagagagactctttgaatgtgcagtctgtggagaatctttcgtcaacccagcagaacttgcagatcacgtaactgttcataagaatgagccctatgagtacgggtcctcctatactcacacctcatttcttactgagcccctcaaaggagctataccattctatgaatgcaaggattgtggtaagtcctttattcatagcacagtcctcactaaacataaggagcttcatctggaagaagaagaagaagatgaagcagcagcagctgcagcagcagcagcccaggaagttgaagccaatgtccatgttccacaagtagttctgaggattcagggcttaaacgtagaggctgctgagccagaagtggaggctgccgagccagaagtggaggctgctgagccagaagtggaggctgctgagccaaacggagaggctgaagggccagatggagaggctgcagagcccattggagaggctggacagccaaatggagaggccgagcagccaaatggggatgctgatgagccagatggtgcaggtattgaagacccagaagaaagagctgaagagccagagggaaaagctgaagagccagagggagatgccgacgagcctgacggtgtgggaattgaagacccagaagaaggtgaagatcaagagattcaggtagaagaaccatactatgactgccatgaatgcacagaaaccttcacttccagcacagcattcagtgaacacctgaaaactcatgccagcatgatcatatttgagcctgcaaatgcctttggggagtgctcaggctacatcgaacgtgccagcaccagcacaggtggtgccaatcaagctgatgagaagtacttcaaatgtgacgtctgtgggcagctcttcaatgaccgcctgtccctcgccagacaccagaatacccacactggctgagggcatggggtaaaggttagaaaaccttcacctaggacttgacccttaccaaaccacagagaatccaaaccaatccatgataatgtcagtaggagacttaaccttagtgtgttacacacctgacttaacatctctaaactcagattgaaaagagaccgaatgtgcagattccacagtcttaagctttccccttcagatgtcagtgtctgcatgtgggaaagccatagcacacatcttacctttccaagtaatcagattgagaaaaccctatgagtattccagactacagagtttgcccaaatcaactgtaaatgacacttgtgtaacgtatatatagtgtttcatgaggtgtatataaaatagcaaattatgacagaacagtgatcacatatatttggatttatatgatatacagttacagtttactctgcagaggtaccttacctggtattctttgaattttttttttttttggaggaggaagagagcaacaaatttgattatatttttaagtgtcttagatcctg

SEQ ID NO: 163951 - DNA, 3711 bp, Homo sapiens
  Payload ID: 12281
  Gene Symbol: PAXIP1
  Gene Name: PAX interacting (with transcription-activation domain) protein 1
  Uniprot ID: Q6ZW49
  ENST ID: ENST00000397192
  CDS Start-End: 44-3253
cggggccgggcgccgccgcggagcctcccgggccgccgcgatcatgtcggaccaggcgcccaaagttcctgaggagatgttcagggaggtcaagtattacgcggtgggcgacatcgacccgcaggttattcagcttctcaaggctggaaaagcgaaggaagtttcctacaatgcactagcctcacacataatctcagaggatggggacaatccagaggtgggagaagctcgggaagtctttgacttacctgttgtaaagccttcttgggtgattctgtccgttcagtgtggaactcttctgccagtaaatggtttttctccagaatcatgtcagattttttttggaatcactgcctgcctttctcaggtgtcatctgaagacagaagtgccctgtgggctttggttacgttctatgggggagattgccagctaaccctcaataagaaatgcacgcatttgattgttccagagccaaagggggagaaatacgaatgtgctttaaagcgagcaagtattaaaattgtgactcctgactgggttctggattgcgtatcagagaaaaccaaaaaggacgaagcattttatcatcctcgtctgattatttatgaagaggaagaagaggaagaggaagaggaggaggaagtagaaaatgaggaacaagattctcagaatgagggtagtacagatgagaagtcaagccctgccagctctcaagaagggtctccttcaggtgaccagcagttttcacctaaatccaacactgaaaaatctaaaggggaattaatgtttgatgattcttcagattcatcaccggaaaaacaggagagaaatttaaactggaccccggccgaagtcccacagttagctgcagcaaaacgcaggctgcctcagggaaaggagcctgggttgattaacttgtgtgccaatgtcccacccgtcccaggtaacattttgccccctgaggtccggggtaatttaatggctgctggacaaaacctccaaagttctgaaagatcagaaatgatagctacctggagtccagctgtacggacactgaggaatattactaataatgctgacattcagcagatgaaccggccatcaaatgtagcacatatcttacagactctttcagcacctacgaaaaatttagaacagcaggtgaatcacagccagcagggacatacaaatgccaatgcagtgctgtttagccaagtgaaagtgactccagagacacacatgctacagcagcagcagcaggcccagcagcagcagcagcagcacccggttttacaccttcagccccagcagataatgcagctccagcagcagcagcagcagcagatctctcagcaaccttacccccagcagccgccgcatccattttcacagcaacagcagcagcagcagcaagcccatccgcatcagttttcacagcaacagctacagtttccacagcaacagttgcatcctccacagcagctgcatcgccctcagcagcagctccagccctttcagcagcagcatgccctgcagcagcagttccatcagctgcagcagcaccagctccagcagcagcagcttgcccagctccagcagcagcacagcctgctccagcagcagcagcaacagcagattcagcagcagcagctccagcgcatgcaccagcagcagcagcagcagcagatgcaaagtcagacagcgccacacttgagtcagacgtcacaggcgctgcagcatcaggttccacctcagcagcccccgcagcagcagcagcaacagcagccaccaccatcgcctcagcagcatcagctttttggacatgatccagcagtggagattccagaagaaggcttcttattgggatgtgtgtttgcaattgcggattatccagagcagatgtctgataagcaactgctggccacctggaaaaggataatccaggcacatggcggcactgttgaccccaccttcacgagtcgatgcacgcaccttctctgtgagagtcaagtcagcagcgcgtatgcacaggcaataagagaaagaaagagatgtgttactgcacactggttaaacacagtcttaaagaagaagaaaatggtaccgccgcaccgagcccttcacttcccagtggccttcccaccaggaggaaagccatgttcacagcatattatttctgtgactggatttgttgatagtgacagagatgacctaaaattaatggcttatttggcaggtgccaaatatacgggttatctatgccgcagcaacacagtcctcatctgtaaagaaccaactggtttaaagtatgaaaaagccaaagagtggaggataccctgtgtcaacgcccagtggcttggcgacattcttctgggaaactttgaggcactgaggcagattcagtatagtcgctacacggcattcagtctgcaggatccatttgcccctacccagcatttagttttaaatcttttagatgcttggagagttcccttaaaagtgtctgcagagttgttgatgagtataagactacctcccaaactgaaacagaatgaagtagctaatgtccagccttcttccaaaagagccagaattgaagacgtaccacctcccactaaaaagctaactccagaattgaccccttttgtgcttttcactggattcgagcctgtccaggttcaacagtatattaagaagctctacattcttggtggagaggttgcggagtctgcacagaagtgcacacacctcattgccagcaaagtgactcgcaccgtgaagttcctgacggcgatttctgtcgtgaagcacatagtgacgccagagtggctggaagaatgcttcaggtgtcagaagttcattgatgagcagaactacattctccgagatgctgaggcagaagtacttttctctttcagcttggaagaatccttaaaacgggcacacgtttctccactctttaaggcaaaatatttttacatcacacctggaatctgcccaagtctttccactatgaaggcaatcgtagagtgtgcaggaggaaaggtgttatccaagcagccatctttccggaagctcatggagcacaagcagaactcgagtttgtcggaaataattttaatatcctgtgaaaatgaccttcatttatgccgagaatattttgccagaggcatagatgttcacaatgcagagttcgttctgactggagtgctcactcaaacgctggactatgaatcatataagtttaactgatggcgtctaggctgccgtgcatgtcgactcctgcggtgcggggctggctgtctggctggcgaggagctgctgcgcttccttcacatgctcttgttttccagctgctttcctgggggatcagactgtgaagcaggaagacagatataataaatatactgcatctttttaagatgtgcaattttattctgaggaaacataaattatgttttgtattatatgactttaagagcccacattaggttttatgattcatttgccaggtttttaaatgttttcacaaaactgttacgggacttcaactagaaataaaatggtgtaaataaagaccttgctatctctaaattatggatgttaaagatttgaaatgttttgtactttgattatttttatttcttatactctgttttcttttatattgatatcttgcccacattttaaataaatgtacttttgaactt

SEQ ID NO: 163952 - DNA, 3827 bp, Homo sapiens
  Payload ID: 12281
  Gene Symbol: PAXIP1
  Gene Name: PAX interacting (with transcription-activation domain) protein 1
  Uniprot ID: Q6ZW49
  ENST ID: ENST00000404141
  CDS Start-End: 156-3365
ggcgggggagcggaccccgattcgcaggaccgggcccgggctgcgcgggcagggccgttggcggggcgagtgggggcgccgggcgccgcgggggccgggggcggggggtgggcggggccgggcgccgccgcggagcctcccgggccgccgcgatcatgtcggaccaggcgcccaaagttcctgaggagatgttcagggaggtcaagtattacgcggtgggcgacatcgacccgcaggttattcagcttctcaaggctggaaaagcgaaggaagtttcctacaatgcactagcctcacacataatctcagaggatggggacaatccagaggtgggagaagctcgggaagtctttgacttacctgttgtaaagccttcttgggtgattctgtccgttcagtgtggaactcttctgccagtaaatggtttttctccagaatcatgtcagattttttttggaatcactgcctgcctttctcaggtgtcatctgaagacagaagtgccctgtgggctttggttacgttctatgggggagattgccagctaaccctcaataagaaatgcacgcatttgattgttccagagccaaagggggagaaatacgaatgtgctttaaagcgagcaagtattaaaattgtgactcctgactgggttctggattgcgtatcagagaaaaccaaaaaggacgaagcattttatcatcctcgtctgattatttatgaagaggaagaagaggaagaggaagaggaggaggaagtagaaaatgaggaacaagattctcagaatgagggtagtacagatgagaagtcaagccctgccagctctcaagaagggtctccttcaggtgaccagcagttttcacctaaatccaacactgaaaaatctaaaggggaattaatgtttgatgattcttcagattcatcaccggaaaaacaggagagaaatttaaactggaccccggccgaagtcccacagttagctgcagcaaaacgcaggctgcctcagggaaaggagcctgggttgattaacttgtgtgccaatgtcccacccgtcccaggtaacattttgccccctgaggtccggggtaatttaatggctgctggacaaaacctccaaagttctgaaagatcagaaatgatagctacctggagtccagctgtacggacactgaggaatattactaataatgctgacattcagcagatgaaccggccatcaaatgtagcacatatcttacagactctttcagcacctacgaaaaatttagaacagcaggtgaatcacagccagcagggacatacaaatgccaatgcagtgctgtttagccaagtgaaagtgactccagagacacacatgctacagcagcagcagcaggcccagcagcagcagcagcagcacccggttttacaccttcagccccagcagataatgcagctccagcagcagcagcagcagcagatctctcagcaaccttacccccagcagccgccgcatccattttcacagcaacagcagcagcagcagcaagcccatccgcatcagttttcacagcaacagctacagtttccacagcaacagttgcatcctccacagcagctgcatcgccctcagcagcagctccagccctttcagcagcagcatgccctgcagcagcagttccatcagctgcagcagcaccagctccagcagcagcagcttgcccagctccagcagcagcacagcctgctccagcagcagcagcaacagcagattcagcagcagcagctccagcgcatgcaccagcagcagcagcagcagcagatgcaaagtcagacagcgccacacttgagtcagacgtcacaggcgctgcagcatcaggttccacctcagcagcccccgcagcagcagcagcaacagcagccaccaccatcgcctcagcagcatcagctttttggacatgatccagcagtggagattccagaagaaggcttcttattgggatgtgtgtttgcaattgcggattatccagagcagatgtctgataagcaactgctggccacctggaaaaggataatccaggcacatggcggcactgttgaccccaccttcacgagtcgatgcacgcaccttctctgtgagagtcaagtcagcagcgcgtatgcacaggcaataagagaaagaaagagatgtgttactgcacactggttaaacacagtcttaaagaagaagaaaatggtaccgccgcaccgagcccttcacttcccagtggccttcccaccaggaggaaagccatgttcacagcatattatttctgtgactggatttgttgatagtgacagagatgacctaaaattaatggcttatttggcaggtgccaaatatacgggttatctatgccgcagcaacacagtcctcatctgtaaagaaccaactggtttaaagtatgaaaaagccaaagagtggaggataccctgtgtcaacgcccagtggcttggcgacattcttctgggaaactttgaggcactgaggcagattcagtatagtcgctacacggcattcagtctgcaggatccatttgcccctacccagcatttagttttaaatcttttagatgcttggagagttcccttaaaagtgtctgcagagttgttgatgagtataagactacctcccaaactgaaacagaatgaagtagctaatgtccagccttcttccaaaagagccagaattgaagacgtaccacctcccactaaaaagctaactccagaattgaccccttttgtgcttttcactggattcgagcctgtccaggttcaacagtatattaagaagctctacattcttggtggagaggttgcggagtctgcacagaagtgcacacacctcattgccagcaaagtgactcgcaccgtgaagttcctgacggcgatttctgtcgtgaagcacatagtgacgccagagtggctggaagaatgcttcaggtgtcagaagttcattgatgagcagaactacattctccgagatgctgaggcagaagtacttttctctttcagcttggaagaatccttaaaacgggcacacgtttctccactctttaaggcaaaatatttttacatcacacctggaatctgcccaagtctttccactatgaaggcaatcgtagagtgtgcaggaggaaaggtgttatccaagcagccatctttccggaagctcatggagcacaagcagaactcgagtttgtcggaaataattttaatatcctgtgaaaatgaccttcatttatgccgagaatattttgccagaggcatagatgttcacaatgcagagttcgttctgactggagtgctcactcaaacgctggactatgaatcatataagtttaactgatggcgtctaggctgccgtgcatgtcgactcctgcggtgcggggctggctgtctggctggcgaggagctgctgcgcttccttcacatgctcttgttttccagctgctttcctgggggatcagactgtgaagcaggaagacagatataataaatatactgcatctttttaagatgtgcaattttattctgaggaaacataaattatgttttgtattatatgactttaagagcccacattaggttttatgattcatttgccaggtttttaaatgttttcacaaaactgttacgggacttcaactagaaataaaatggtgtaaataaagaccttgctatctctaaattatggatgttaaagatttgaaatgttttgtactttgattatttttatttcttatactctgttttcttttatattgatatcttgcccacattttaaataaatgtacttttgaacttagaa

SEQ ID NO: 163953 - DNA, 521 bp, Homo sapiens
  Payload ID: 12281
  Gene Symbol: PAXIP1
  Gene Name: PAX interacting (with transcription-activation domain) protein 1
  ENST ID: ENST00000419436
  CDS Start-End: 1-521
aaagttcctgaggagatgttcagggaggtcaagtattacgcggtgggcgacatcgacccgcaggttattcagcttctcaaggctggaaaagcgaaggaagtttcctacaatgcactagcctcacacataatctcagaggatggggacaatccagaggtgggagaagctcgggaagtctttgacttacctgttgtaaaggtgtcatctgaagacagaagtgccctgtgggctttggttacgttctatgggggagattgccagctaaccctcaataagaaatgcacgcatttgattgttccagagccaaagggggagaaatacgaatgtgctttaaagcgagcaagtattaaaattgtgactcctgactgggttctggattgcgtatcagagaaaaccaaaaaggacgaagcattttatcatcctcgtctgattatttatgaagaggaagaagaggaagaggaagaggaggaggaagtagaaaatgaggaacaagattctcagaatgagggtagtacagatga

SEQ ID NO: 163954 - DNA, 3990 bp, Homo sapiens
  Payload ID: 12281
  Gene Symbol: PAXIP1
  Gene Name: PAX interacting (with transcription-activation domain) protein 1
  ENST ID: ENST00000457196
  CDS Start-End: 156-599
ggcgggggagcggaccccgattcgcaggaccgggcccgggctgcgcgggcagggccgttggcggggcgagtgggggcgccgggcgccgcgggggccgggggcggggggtgggcggggccgggcgccgccgcggagcctcccgggccgccgcgatcatgtcggaccaggcgcccaaagttcctgaggagatgttcagggaggtcaagtattacgcggtgggcgacatcgacccgcaggttattcagcttctcaaggctggaaaagcgaaggaagtttcctacaatgcactagcctcacacataatctcagaggatggggacaatccagaggtgggagaagctcgggaagtctttgacttacctgttgtaaagccttcttgggtgattctgtccgttcagtgtggaactcttctgccagtaaatggtttttctccagaatcatgtcagattttttttggaatcactgcctgcctttctcagggtgttgatacaagctggagctctttgttggagtcttccagagctctcccagggagaggtagggaagggagcttgtccagcagaagttgggaagcacagagatcatctgccttcttctgacccggtattgatgcaggctgaggcctctgttgtaatgtgctgggtgtcatctgaagacagaagtgccctgtgggctttggttacgttctatgggggagattgccagctaaccctcaataagaaatgcacgcatttgattgttccagagccaaagggggagaaatacgaatgtgctttaaagcgagcaagtattaaaattgtgactcctgactgggttctggattgcgtatcagagaaaaccaaaaaggacgaagcattttatcatcctcgtctgattatttatgaagaggaagaagaggaagaggaagaggaggaggaagtagaaaatgaggaacaagattctcagaatgagggtagtacagatgagaagtcaagccctgccagctctcaagaagggtctccttcaggtgaccagcagttttcacctaaatccaacactgaaaaatctaaaggggaattaatgtttgatgattcttcagattcatcaccggaaaaacaggagagaaatttaaactggaccccggccgaagtcccacagttagctgcagcaaaacgcaggctgcctcagggaaaggagcctgggttgattaacttgtgtgccaatgtcccacccgtcccaggtaacattttgccccctgaggtccggggtaatttaatggctgctggacaaaacctccaaagttctgaaagatcagaaatgatagctacctggagtccagctgtacggacactgaggaatattactaataatgctgacattcagcagatgaaccggccatcaaatgtagcacatatcttacagactctttcagcacctacgaaaaatttagaacagcaggtgaatcacagccagcagggacatacaaatgccaatgcagtgctgtttagccaagtgaaagtgactccagagacacacatgctacagcagcagcagcaggcccagcagcagcagcagcagcacccggttttacaccttcagccccagcagataatgcagctccagcagcagcagcagcagcagatctctcagcaaccttacccccagcagccgccgcatccattttcacagcaacagcagcagcagcagcaagcccatccgcatcagttttcacagcaacagctacagtttccacagcaacagttgcatcctccacagcagctgcatcgccctcagcagcagctccagccctttcagcagcagcatgccctgcagcagcagttccatcagctgcagcagcaccagctccagcagcagcagcttgcccagctccagcagcagcacagcctgctccagcagcagcagcaacagcagattcagcagcagcagctccagcgcatgcaccagcagcagcagcagcagcagatgcaaagtcagacagcgccacacttgagtcagacgtcacaggcgctgcagcatcaggttccacctcagcagcccccgcagcagcagcagcaacagcagccaccaccatcgcctcagcagcatcagctttttggacatgatccagcagtggagattccagaagaaggcttcttattgggatgtgtgtttgcaattgcggattatccagagcagatgtctgataagcaactgctggccacctggaaaaggataatccaggcacatggcggcactgttgaccccaccttcacgagtcgatgcacgcaccttctctgtgagagtcaagtcagcagcgcgtatgcacaggcaataagagaaagaaagagatgtgttactgcacactggttaaacacagtcttaaagaagaagaaaatggtaccgccgcaccgagcccttcacttcccagtggccttcccaccaggaggaaagccatgttcacagcatattatttctgtgactggatttgttgatagtgacagagatgacctaaaattaatggcttatttggcaggtgccaaatatacgggttatctatgccgcagcaacacagtcctcatctgtaaagaaccaactggtttaaagtatgaaaaagccaaagagtggaggataccctgtgtcaacgcccagtggcttggcgacattcttctgggaaactttgaggcactgaggcagattcagtatagtcgctacacggcattcagtctgcaggatccatttgcccctacccagcatttagttttaaatcttttagatgcttggagagttcccttaaaagtgtctgcagagttgttgatgagtataagactacctcccaaactgaaacagaatgaagtagctaatgtccagccttcttccaaaagagccagaattgaagacgtaccacctcccactaaaaagctaactccagaattgaccccttttgtgcttttcactggattcgagcctgtccaggttcaacagtatattaagaagctctacattcttggtggagaggttgcggagtctgcacagaagtgcacacacctcattgccagcaaagtgactcgcaccgtgaagttcctgacggcgatttctgtcgtgaagcacatagtgacgccagagtggctggaagaatgcttcaggtgtcagaagttcattgatgagcagaactacattctccgagatgctgaggcagaagtacttttctctttcagcttggaagaatccttaaaacgggcacacgtttctccactctttaaggcaaaatatttttacatcacacctggaatctgcccaagtctttccactatgaaggcaatcgtagagtgtgcaggaggaaaggtgttatccaagcagccatctttccggaagctcatggagcacaagcagaactcgagtttgtcggaaataattttaatatcctgtgaaaatgaccttcatttatgccgagaatattttgccagaggcatagatgttcacaatgcagagttcgttctgactggagtgctcactcaaacgctggactatgaatcatataagtttaactgatggcgtctaggctgccgtgcatgtcgactcctgcggtgcggggctggctgtctggctggcgaggagctgctgcgcttccttcacatgctcttgttttccagctgctttcctgggggatcagactgtgaagcaggaagacagatataataaatatactgcatctttttaagatgtgcaattttattctgaggaaacataaattatgttttgtattatatgactttaagagcccacattaggttttatgattcatttgccaggtttttaaatgttttcacaaaactgttacgggacttcaactagaaataaaatggtgtaaataaagaccttgctatctctaaattatggatgttaaagatttgaaatgttttgtactttgattatttttatttcttatactctgttttcttttatattgatatcttgcccacattttaaataaatgtacttttgaacttagaa

SEQ ID NO: 163955 - DNA, 2564 bp, Homo sapiens
  Payload ID: 12282
  Gene Symbol: PAXBP1
  Gene Name: PAX3 and PAX7 binding protein 1
  Uniprot ID: Q9Y5B6
  ENST ID: ENST00000290178
  CDS Start-End: 1-2448
atgttccgaaaggcccggcgggtgaacgtgcgcaagcggaacgactccgaagaggaagagcgggaacgcgatgaggagcaggagccgccgccgttgttgccgccgccgggcacgggcgaagaggcgggccccggtggcggcgacagggcccctggcggggagtcgctgctgggcccggggccgtcgccgccttccgcgctgaccccgggcctcggggctgaggccgggggcggcttccccggcggcgcggagcccggcaacgggctgaagccgcgcaagaggcctcgcgagaacaaagaggtgccccgggccagcctgctcagcttccaggacgaggaggaagaaaatgaagaagttttcaaagtgaagaaatcaagttatagcaaaaagatagtaaaattgctcaagaaggaatataaagaagatcttgaaaaatcgaagattaagacagaactcaactcatcagctgaaagtgaacaacctttggacaaaacaggacatgttaaggatacaaatcaagaagatggagttatcatcagtgaacatggtgaagatgaaatggatatggaaagtgaaaaagaggaagaaaagccaaagactggtggagctttttcaaatgctttatcttcattgaatgttcttcgtccaggagaaattccagatgcagcttttatacatgctgcaaggaaaaagcgccaaatggcccgagaattgggagatttcactcctcatgataatgagcctggtaaaggccgccttgttagagaagatgagaatgatgccagtgatgatgaagatgacgatgagaaacgccggatagttttttctgtgaaagaaaagtcacaaagacaaaaaattgctgaggaaataggaattgaggggagtgatgatgatgctttagtaactggagaacaggatgaagagctcagccgatgggaacaggagcagataaggaaaggaattaatatccctcaggttcaagccagtcaacccgcagaagtgaatatgtactaccagaacacttaccagacaatgccttacggctcatcctatggcattccttatagttatacggcctatggatcatcagatgccaaatctcaaaaaacagataatacagtccctttcaaaactcccagtaatgagatgactcccgttactattgatttggtaaagaaacagcttaaagacaggttggactccatgaaagaattgcacaaaacaaatcgacagcagcatgagaaacatctgcaaagccgagtggactctaccagggctattgaaagattagaagggtcttctgggggtattggtgaacggtataaatttttgcaagaaatgcgagggtatgtccaagacttgcttgagtgtttcagtgaaaaggtgccactgattaatgaacttgaatcagcaatacatcagctgtacaaacagcgagcttcccgccttgtccaaagacgacaagatgatattaaagatgaatcttcggagttttcaagccattcaaacaaagctctgatggcaccaaatcttgactcctttggacgcgatcgggcactgtatcaagagcatgcaaaacgtcgcattgcagagcgggaggccaggaggactcgtcgtagacaagccagagaacaaaccggtaagatggcagatcaccttgaaggcctttccagtgatgatgaagaaacttctacagatattactaatttcaatctggaaaaagatcgaatttcaaaagaatccggcaaagtttttgaagatgtccttgaaagtttctattcaattgactgtattaaatcacagtttgaagcatggcgttcaaaatactacacatcctacaaagatgcttacattggcctttgtttgccaaaattattcaaccccctcatacgacttcagctcctcacttggactcctcttgaggcaaaatgtcgtgactttgagaatatgctgtggtttgaatctttgctgttttatggttgtgaagaacgagagcaagaaaaagatgatgtagatgttgccctactacctaccattgtggaaaaggtgattcttcctaaactaacagtgatagctgaaaatatgtgggaccctttttctacaacacagacttcaagaatggtgggaattacactaaaattaatcaatggatatccttcagtagtgaatgcagaaaataaaaatacacaggtatacctaaaggcacttttattgagaatgagaagaactttagatgatgatgtatttatgcccttatatcccaaaaatgtcttagaaaataaaaattctgggccttacttgttttttcaacgacagttttggtcttcagttaaggtcataaaacccccattccagagagggtcctgccccatacccagaaggaaagaatgctgctcagagaggccaagaagaatctggacggacaggccttgtgttgtcttctcttgagcagtagatcatacctttttgtccagtcatgtttctgcatgcctgtacatatttcgttaaacctaaacatagtagacaatttctcctccatctttgggtcttcattctgaaggctg

SEQ ID NO: 163956 - DNA, 3995 bp, Homo sapiens
  Payload ID: 12282
  Gene Symbol: PAXBP1
  Gene Name: PAX3 and PAX7 binding protein 1
  Uniprot ID: Q9Y5B6
  ENST ID: ENST00000331923
  CDS Start-End: 191-2944
ctctctctctttctccaagtattgagagcgcgtgggagcataggcgcatgcgcgctcgtggggtgcgcggtagcaacagaggactcgacccggctggagctccggagagcgcgcgtgcgccgtcacgagctcggcgctgccggggccgcggtgtggaagcgagtattcgaccgccgtgcgggccgcggggatgttccgaaaggcccggcgggtgaacgtgcgcaagcggaacgactccgaagaggaagagcgggaacgcgatgaggagcaggagccgccgccgttgttgccgccgccgggcacgggcgaagaggcgggccccggtggcggcgacagggcccctggcggggagtcgctgctgggcccggggccgtcgccgccttccgcgctgaccccgggcctcggggctgaggccgggggcggcttccccggcggcgcggagcccggcaacgggctgaagccgcgcaagaggcctcgcgagaacaaagaggtgccccgggccagcctgctcagcttccaggacgaggaggaagaaaatgaagaagttttcaaagtgaagaaatcaagttatagcaaaaagatagtaaaattgctcaagaaggaatataaagaagatcttgaaaaatcgaagattaagacagaactcaactcatcagctgaaagtgaacaacctttggacaaaacaggacatgttaaggatacaaatcaagaagatggagttatcatcagtgaacatggtgaagatgaaatggatatggaaagtgaaaaagaggaagaaaagccaaagactggtggagctttttcaaatgctttatcttcattgaatgttcttcgtccaggagaaattccagatgcagcttttatacatgctgcaaggaaaaagcgccaaatggcccgagaattgggagatttcactcctcatgataatgagcctggtaaaggccgccttgttagagaagatgagaatgatgccagtgatgatgaagatgacgatgagaaacgccggatagttttttctgtgaaagaaaagtcacaaagacaaaaaattgctgaggaaataggaattgaggggagtgatgatgatgctttagtaactggagaacaggatgaagagctcagccgatgggaacaggagcagataaggaaaggaattaatatccctcaggttcaagccagtcaacccgcagaagtgaatatgtactaccagaacacttaccagacaatgccttacggctcatcctatggcattccttatagttatacggcctatggatcatcagatgccaaatctcaaaaaacagataatacagtccctttcaaaactcccagtaatgagatgactcccgttactattgatttggtaaagaaacagcttaaagacaggttggactccatgaaagaattgcacaaaacaaatcgacagcagcatgagaaacatctgcaaagccgagtggactctaccagggctattgaaagattagaagggtcttctgggggtattggtgaacggtataaatttttgcaagaaatgcgagggtatgtccaagacttgcttgagtgtttcagtgaaaaggtgccactgattaatgaacttgaatcagcaatacatcagctgtacaaacagcgagcttcccgccttgtccaaagacgacaagatgatattaaagatgaatcttcggagttttcaagccattcaaacaaagctctgatggcaccaaatcttgactcctttggacgcgatcgggcactgtatcaagagcatgcaaaacgtcgcattgcagagcgggaggccaggaggactcgtcgtagacaagccagagaacaaaccggtaagatggcagatcaccttgaaggcctttccagtgatgatgaagaaacttctacagatattactaatttcaatctggaaaaagatcgaatttcaaaagaatccggcaaagtttttgaagatgtccttgaaagtttctattcaattgactgtattaaatcacagtttgaagcatggcgttcaaaatactacacatcctacaaagatgcttacattggcctttgtttgccaaaattattcaaccccctcatacgacttcagctcctcacttggactcctcttgaggcaaaatgtcgtgactttgagaatatgctgtggtttgaatctttgctgttttatggttgtgaagaacgagagcaagaaaaagatgatgtagatgttgccctactacctaccattgtggaaaaggtgattcttcctaaactaacagtgatagctgaaaatatgtgggaccctttttctacaacacagacttcaagaatggtgggaattacactaaaattaatcaatggatatccttcagtagtgaatgcagaaaataaaaatacacaggtatacctaaaggcacttttattgagaatgagaagaactttagatgatgatgtatttatgcccttatatcccaaaaatgtcttagaaaataaaaattctgggccttacttgttttttcaacgacagttttggtcttcagttaagctgttaggcaattttcttcagtggtatggcattttctcaaataaaactctgcaagagttatcaatagatggtttattaaatcgatatattctcatggcttttcagaattcagaatatggagatgacagcatcaaaaaagcccaaaatgtaatcaattgtttccccaaacaatggttcatgaatctgaaaggagaaaggactatttctcagttagaaaacttttgccgataccttgtacacttagcggatacaatttatagaaatagtatcgggtgttctgatgtggaaaaaagaaatgcaagggaaaacataaaacagatagtaaaactccttgcaagtgttcgagctttggatcatgctatgtctgttgcaagtgaccacaatgtgaaagaatttaagtctttgatcgaaggaaaatagatctatgagactgaaaaacctatttgcttgattaccattcccaatgtgtaaattttgtatatatgtaaagtttcttaaactgtaaaatagcaattcttgttttaatacaaaaaacattatattcaatactgtgtccttaaatgatatttcttcagaatgaaaggaattcagattatttctaggagtctatgaatgttttctttactgcctgtcatactttgtttactgaagtattttgtatggtcatttaaattaaccctctcagttaattgtcccctgtaaacgatgtgtgcagtgtaaattgtgtaattatgcatatatatatttataccaccatggacttactttcacactggaaatttgtggtgtttttccacagaggaagccttttaacagcagaaaattatccggtagcaaattgtcttagggaaattactacactgttgtaacaaaagggctggcaagtgactaaatgttcattaccttttggttagcgttgctatcactgtagctgtgctgccttaacattgagagttgagttgtggacttagtcattgagtgaatgttgaactttcttccttgaatcagcgttagagtcaaatgtgggtttaatgtgaatgctaaatgaatatgcaacatagtttcaaatggaacatagaaatttcacttttgaaaataataaacccacaacctaattgcatggttttgggctgaccgtcctgtctcattcatgattttactccctgcccagcttgcagatacatgcatttgaattttagtagtctgtcatatttaaaatcccacatatgtgagttaaatatgcaataaagaatacgccttgctgattagccacacccaggcaatttaatatccatggtcttctataatgtttataccacattgtaaatattcagagaacttgttttaaagtttatgctttctgattctgtgattttcaaaagaggaatttttttggaaattaaggactatcgtttgataattatatatgtaattaagatttagccaagcattaaattaatttttaaatata

SEQ ID NO: 163957 - DNA, 339 bp, Homo sapiens
  Payload ID: 12282
  Gene Symbol: PAXBP1
  Gene Name: PAX3 and PAX7 binding protein 1
  ENST ID: ENST00000421049
  CDS Start-End: 1-111
tacaaacagcgagcttcccgccttgtccaaagacgacaagatgatattaaagatgaatcttcggagttttcaagccattcaagtcagtccatcttgaagacaaagctctgatggcaccaaatcttgactcctttggacgcgatcgggcactgtatcaagagcatgcaaaacgtcgcattgcagagcgggaggccaggagatcgaatttcaaaagaatccggcaaagtttttgaagatgtccttgaaagtttctattcaattgactgtattaaatcacagtttgaagcatggcgttcaaaatactacacatcctacaaagatgcttacattggcctttgt

SEQ ID NO: 163958 - DNA, 2920 bp, Homo sapiens
  Payload ID: 12282
  Gene Symbol: PAXBP1
  Gene Name: PAX3 and PAX7 binding protein 1
  Uniprot ID: Q9Y5B6
  ENST ID: ENST00000443785
  CDS Start-End: 20-1555
cgccgtgcgggccgcggggatgttccgaaaggcccggcgggtgaacgtgcgcaagcggaacgactccgaagaggaagagcgggaacgcgatgaggagcaggagccgccgccgttgttgccgccgccgggcacgggcgaagaggcgggccccggtggcggcgacagggcccctggcggggagtcgctgctgggcccggggccgtcgccgccttccgcgctgaccccgggcctcggggctgaggccgggggcggcttccccggcggcgcggagcccggcaacgggctgaagccgcgcaagaggcctcgcgagaacaaagaggtgccccgggccagcctgctcagcttccaggacgaggaggaagaaaatgaagaagttttcaaagtgaagaaatcaagttatagcaaaaagatagtaaaattgctcaagaaggaatataaagaagatcttgaaaaatcgaagattaagacagaactcaactcatcagctgaaagtgaacaacctttggacaaaacaggacatgttaaggatacaaatcaagaagatggagttatcatcagtgaacatggtgaagatgaaatggatatggaaagtgaaaaagaggaagaaaagccaaagactggtggagctttttcaaatgctttatcttcattgaatgttcttcgtccaggagaaattccagatgcagcttttatacatgctgcaaggaaaaagcgccaaatggcccgagaattgggagatttcactcctcatgataatgagcctggtaaaggccgccttgttagagaagatgagaatgatgccagtgatgatgaagatgacgatgagaaacgccggatagttttttctgtgaaagaaaagtcacaaagacaaaaaattgctgaggaaataggaattgaggggagtgatgatgatgctttagtaactggagaacaggatgaagagctcagccgatgggaacaggagcagataaggaaaggaattaatatccctcaggttcaagccagtcaacccgcagaagtgaatatgtactaccagaacacttaccagacaatgccttacggctcatcctatggcattccttatagttatacggcctatggatcatcagatgccaaatctcaaaaaacagataatacagtccctttcaaaactcccagtaatgagatgactcccgttactattgatttggtaaagaaacagcttaaagacaggttggactccatgaaagaattgcacaaaacaaatcgacagcagcatgagaaacatctgcaaagccgagtggactctaccagggctattgaaagattagaagggtcttctgggggtattggtgaacggtataaatttttgcaagaaatgcgagggtatgtccaagacttgcttgagtgtttcagtgaaaaggtgccactgattaatgaacttgaatcagcaatacatcagctgtacaaacagcgagcttcccgccttgtccaaagacgacaagatgatattaaagatgaatcttcggagttttcaagccattcaagtcagtccatcttgaagacaaagctctgatggcaccaaatcttgactcctttggacgcgatcgggcactgtatcaagagcatgcaaaacgtcgcattgcagagcgggaggccaggaggactcgtcgtagacaagccagagaacaaaccggtaagatggcagatcaccttgaaggcctttccagtgatgatgaagaaacttctacagatattactaatttcaatctggaaaaagatcgaatttcaaaagaatccggcaaagtttttgaagatgtccttgaaagtttctattcaattgactgtattaaatcacagtttgaagcatggcgttcaaaatactacacatcctacaaagatgcttacattggcctttgtttgccaaaattattcaaccccctcatacgacttcagctcctcacttggactcctcttgaggcaaaatgtcgtgactttgagaatatgctgtggtttgaatctttgctgttttatggttgtgaagaacgagagcaagaaaaagatgatgtagatgttgccctactacctaccattgtggaaaaggtgattcttcctaaactaacagtgatagctgaaaatatgtgggaccctttttctacaacacagacttcaagaatggtgggaattacactaaaattaatcaatggatatccttcagtagtgaatgcagaaaataaaaatacacaggtatacctaaaggcacttttattgagaatgagaagaactttagatgatgatgtatttatgcccttatatcccaaaaatgtcttagaaaataaaaattctgggccttacttgttttttcaacgacagttttggtcttcagttaagctgttaggcaattttcttcagtggtatggcattttctcaaataaaactctgcaagagttatcaatagatggtttattaaatcgatatattctcatggcttttcagaattcagaatatggagatgacagcatcaaaaaagcccaaaatgtaatcaattgtttccccaaacaatggttcatgaatctgaaaggagaaaggactatttctcagttagaaaacttttgccgataccttgtacacttagcggatacaatttatagaaatagtatcgggtgttctgatgtggaaaaaagaaatgcaagggaaaacataaaacagatagtaaaactccttgcaagtgttcgagctttggatcatgctatgtctgttgcaagtgaccacaatgtgaaagaatttaagtctttgatcgaaggaaaatagatctatgagactgaaaaacctatttgcttgattaccattcccaatgtgtaaattttgtatatatgtaaagtttcttaaactgtaaaatagcaattcttgttttaatacaaaaaacattatattcaatact

SEQ ID NO: 163959 - DNA, 473 bp, Homo sapiens
  Payload ID: 12282
  Gene Symbol: PAXBP1
  Gene Name: PAX3 and PAX7 binding protein 1
  ENST ID: ENST00000445049
  CDS Start-End: 1-78
cagttttggtcttcagttaaggagaaagtgatttctgagttccaaagtaaggtccatcgtactcaacgaaatgcctgactaagccacaattaattttttcagcaagtagactacagtagtcctcccttcccagaagatttccttccaccctgaggaagtgatatttagatcattcgacctggagaaaaaatagaagttagccctgaggtgaaagagagcaggctacactggaggcgctgaagaaagcataggacagctggagtgagcaagtcataaaacccccattccagagagggtcctgccccatacccagaaggaaagaatgctgctcagagaggccaagaagaatctggacggacaggccttgtgttgtcttctcttgagcagtagatcatacctttttgtccagtcatgtttctgcatgcctgtacatatttcgttaaacctaaacatagtagacaatttctcctcca

SEQ ID NO: 163960 - DNA, 662 bp, Homo sapiens
  Payload ID: 12282
  Gene Symbol: PAXBP1
  Gene Name: PAX3 and PAX7 binding protein 1
  Uniprot ID: Q9Y5B6
  ENST ID: ENST00000574159
  CDS Start-End: 191-662
ctctctctctttctccaagtattgagagcgcgtgggagcataggcgcatgcgcgctcgtggggtgcgcggtagcaacagaggactcgacccggctggagctccggagagcgcgcgtgcgccgtcacgagctcggcgctgccggggccgcggtgtggaagcgagtattcgaccgccgtgcgggccgcggggatgttccgaaaggcccggcgggtgaacgtgcgcaagcggaacgactccgaagaggaagagcgggaacgcgatgaggagcaggagccgccgccgttgttgccgccgccgggcacgggcgaagaggcgggccccggtggcggcgacagggcccctggcggggagtcgctgctgggcccggggccgtcgccgccttccgcgctgaccccgggcctcggggctgaggccgggggcggcttccccggcggcgcggagcccggcaacgggctgaagccgcgcaagaggcctcgcgagaacaaagaggtgccccgggccagcctgctcagcttccaggacgaggaggaagaaaatgaagaagttttcaaagtgaagaaatcaagttatagcaaaaagatagtaaaattgctcaagaaggaatataaagaagatcttgaaaaatcgaagattaagacagaactcaactcatcagctgaaa

SEQ ID NO: 163961 - DNA, 472 bp, Homo sapiens
  Payload ID: 12282
  Gene Symbol: PAXBP1
  Gene Name: PAX3 and PAX7 binding protein 1
  Uniprot ID: Q9Y5B6
  ENST ID: ENST00000573680
  CDS Start-End: 1-472
atgttccgaaaggcccggcgggtgaacgtgcgcaagcggaacgactccgaagaggaagagcgggaacgcgatgaggagcaggagccgccgccgttgttgccgccgccgggcacgggcgaagaggcgggccccggtggcggcgacagggcccctggcggggagtcgctgctgggcccggggccgtcgccgccttccgcgctgaccccgggcctcggggctgaggccgggggcggcttccccggcggcgcggagcccggcaacgggctgaagccgcgcaagaggcctcgcgagaacaaagaggtgccccgggccagcctgctcagcttccaggacgaggaggaagaaaatgaagaagttttcaaagtgaagaaatcaagttatagcaaaaagatagtaaaattgctcaagaaggaatataaagaagatcttgaaaaatcgaagattaagacagaactcaactcatcagctgaaa

SEQ ID NO: 163962 - DNA, 3785 bp, Homo sapiens
  Payload ID: 12283
  Gene Symbol: PXN
  Gene Name: paxillin
  Uniprot ID: P49023
  ENST ID: ENST00000228307
  CDS Start-End: 143-1918
ggcgggcgcgggcgcgggcgcgcgcggcggcggcgcgttccgttccgggccgaggctcgcggcggaaaagttgcggggcatagacgagcggccccgggacgggcagctagcgcgaccctgagccggcgcccgtggtccggccatggacgacctcgacgccctgctggcggacttggagtctaccacctcccacatctccaaacggcctgtgttcttgtcggaggagaccccctactcatacccaactggaaaccacacataccaggagattgccgtgccaccccccgtccccccacccccgtccagcgaggccctcaatggcacaatccttgaccccttagaccagtggcagcccagcagctcccgattcatccaccagcagcctcagtcctcatcacctgtgtacggctccagtgccaaaacttccagtgtctccaaccctcaggacagtgttggctctccgtgctcccgagtgggtgaggaggagcacgtctacagcttccccaacaagcagaaatcagctgagccttcacccaccgtaatgagcacgtccctgggcagcaacctttctgaactcgaccgcctgctgctggaactgaacgctgtacagcataacccgccaggcttccctgcagatgaggccaactcaagccccccgcttcctggggccctgagccccctctatggtgtcccagagactaacagccccttgggaggcaaagctgggcccctgacgaaagagaagcctaagcggaatgggggccggggcctggaggacgtgcggcccagtgtggagagtctcttggatgaactggagagctccgtgcccagccccgtccctgccatcactgtgaaccagggcgagatgagcagcccgcagcgcgtcacctccacccaacagcagacacgcatctcggcctcctctgccaccagggagctggacgagctgatggcttcgctgtcggatttcaagatccagggcctggagcaaagagcggatggggagcggtgctgggcggccggctggcctcgggacggcgggcggagcagccccggagggcaggacgagggagggttcatggcccaggggaagacagggagcagctcaccccctggggggcccccgaagcccgggagccagctggacagcatgctggggagcctgcagtctgacctgaacaagctgggggtcgccacagtcgccaaaggagtctgcggggcctgcaagaagcccatcgccgggcaggttgtgaccgccatggggaagacgtggcaccccgagcacttcgtctgcacccactgccaggaggagatcggatcccggaacttcttcgagcgggatggacagccctactgtgaaaaggactaccacaacctcttctccccgcgctgctactactgcaacggccccatcctggataaagtggtgacagcccttgaccggacgtggcaccctgaacacttcttctgtgcacagtgtggagccttctttggtcccgaagggttccacgagaaggacggcaaggcctactgtcgcaaggactacttcgacatgttcgcacccaagtgtggcggctgcgcccgggccatcctggagaactatatctcagccctcaacacgctgtggcatcctgagtgctttgtgtgccgggaatgcttcacgccattcgtgaacggcagcttcttcgagcacgacgggcagccctactgtgaggtgcactaccacgagcggcgcggctcgctgtgttctggctgccagaagcccatcaccggccgctgcatcaccgccatggccaagaagttccaccccgagcacttcgtctgtgccttctgcctcaagcagctcaacaagggcaccttcaaggagcagaacgacaagccttactgtcagaactgcttcctcaagctcttctgctaggtgccctgcccctgtctctgccccccttccccagccagcatccccaactgcgactgtgacctagagacttcacccgggggtgaaggggtaaacccgactgaaactggaacccttgtcctccgctggtgcgggatggacagagggccgtgaggggtccccctgcttgtcttcacccctgccagagcctctgggccccctcctccctcctgtagctctccctaggctgcccactctccatcctccccaggggtagaggctgggggctccaccccagcccatgtacgtccccacgaactggcctggccagcaccccacactggagccatctcttcctcatatttcagcagtgcagccggggggcagggaagggcaggcagggtctgttggggtctctttttatccttattcctcccccgacctaattgtctttgttctgtgattattgggggacacccggctccctccagacaatgccagcataaatccatccatccaaaggcagagaaccaaaggggccatggaaggttctctgtgctcctcctacccttccagtgccctaggcctggcgactgcccctgccttttagacccgccctccccttttatacctgctcttgttctactgagaaaagcctctccagcaataatgttttctagtcacttcctccgtctccgggacggcgtgcctggacactgtaccgactttgatagatttctacactgaggtttgaattcatatcgcctgagttgcttttacttctctatacaaaatgattttgaagagattttaaagacgttcccttttgtattctcttcctcatccaccgccactgggcctgtcactgatggtggctctggtgtgaagtttgctttgtactgagggttggggtggggaagcaatttgtattttattgtttcttagcacaagcaggtgaactgggagcagctctgtgactccccctctttcacttcatagctcaccaggactgttttataaactgctgtatttggaaaccccttctttacttcccaggccagcaagctcttcactgaaactggttgaagggtgttgcacccttttgggcctagaattctgaactttatctgttctgtttctgtgggaggagaaggggaagtatgttttggggggctgcttcctgtctgagtaagccctcaggagcctctgctcccctgtgaacccactgaaccttctgagcccccactgcttctatggggctctctcttctgccttctcaggaaagctggtgtctgattttggccatcaggactctgacgtctctttggtcttgttgatttcctctgggcatatcccttccccagatctgctcctcccctttcacaggtgggatcggcactcagggggtctggaaagaaggtcataagggagcatgataggatttggggcagagggacaggctcctctggggaaaccccccagagctctttaccaaggatgaaagaggagccaggccttgggctcctgatgaggagaaaggggccccaccggggtctaatggtgacagtccaaaccactccactggcctcctggcagaagccgagtgtgctggggtctccgaagagggtccctcctttttgggggaaggtcagcccagcccctccaaaggtctgatgtctccactttcacccgcaggccttaccgctctgtttatagtgacccaccctagatcttccccaagagggactggggtttctggggtccattctctgagtcagtggttatttgaaaatttgattttgattttattttttctctgtaaacttccaagctggcttttcccatttcaattcctgtgatttatgccaataaagtttgcccatgattttca

SEQ ID NO: 163963 - DNA, 3835 bp, Homo sapiens
  Payload ID: 12283
  Gene Symbol: PXN
  Gene Name: paxillin
  Uniprot ID: P49023
  ENST ID: ENST00000267257
  CDS Start-End: 143-1960
ggcgggcgcgggcgcgggcgcgcgcggcggcggcgcgttccgttccgggccgaggctcgcggcggaaaagttgcggggcatagacgagcggccccgggacgggcagctagcgcgaccctgagccggcgcccgtggtccggccatggacgacctcgacgccctgctggcggacttggagtctaccacctcccacatctccaaacggcctgtgttcttgtcggaggagaccccctactcatacccaactggaaaccacacataccaggagattgccgtgccaccccccgtccccccacccccgtccagcgaggccctcaatggcacaatccttgaccccttagaccagtggcagcccagcagctcccgattcatccaccagcagcctcagtcctcatcacctgtgtacggctccagtgccaaaacttccagtgtctccaaccctcaggacagtgttggctctccgtgctcccgagtgggtgaggaggagcacgtctacagcttccccaacaagcagaaatcagctgagccttcacccaccgtaatgagcacgtccctgggcagcaacctttctgaactcgaccgcctgctgctggaactgaacgctgtacagcataacccgccaggcttccctgcagatgaggccaactcaagccccccgcttcctggggccctgagccccctctatggtgtcccagagactaacagccccttgggaggcaaagctgggcccctgacgaaagagaagcctaagcggaatgggggccggggcctggaggacgtgcggcccagtgtggagagtctcttggatgaactggagagctccgtgcccagccccgtccctgccatcactgtgaaccagggcgagatgagcagcccgcagcgcgtcacctccacccaacagcagacacgcatctcggcctcctctgccaccagggagctggacgagctgatggcttcgctgtcggatttcaagggctcctggcccctggaggaggttgtacttcttgtctccatcagctcatctgtccaggagggagaaaagtacccccatccctgtgctgccagacaccgtaccccgagcctcaggagtcctgaccagccccctccgtgtccacagttcatggcccaggggaagacagggagcagctcaccccctggggggcccccgaagcccgggagccagctggacagcatgctggggagcctgcagtctgacctgaacaagctgggggtcgccacagtcgccaaaggagtctgcggggcctgcaagaagcccatcgccgggcaggttgtgaccgccatggggaagacgtggcaccccgagcacttcgtctgcacccactgccaggaggagatcggatcccggaacttcttcgagcgggatggacagccctactgtgaaaaggactaccacaacctcttctccccgcgctgctactactgcaacggccccatcctggataaagtggtgacagcccttgaccggacgtggcaccctgaacacttcttctgtgcacagtgtggagccttctttggtcccgaagggttccacgagaaggacggcaaggcctactgtcgcaaggactacttcgacatgttcgcacccaagtgtggcggctgcgcccgggccatcctggagaactatatctcagccctcaacacgctgtggcatcctgagtgctttgtgtgccgggaatgcttcacgccattcgtgaacggcagcttcttcgagcacgacgggcagccctactgtgaggtgcactaccacgagcggcgcggctcgctgtgttctggctgccagaagcccatcaccggccgctgcatcaccgccatggccaagaagttccaccccgagcacttcgtctgtgccttctgcctcaagcagctcaacaagggcaccttcaaggagcagaacgacaagccttactgtcagaactgcttcctcaagctcttctgctaggtgccctgcccctgtctctgccccccttccccagccagcatccccaactgcgactgtgacctagagacttcacccgggggtgaaggggtaaacccgactgaaactggaacccttgtcctccgctggtgcgggatggacagagggccgtgaggggtccccctgcttgtcttcacccctgccagagcctctgggccccctcctccctcctgtagctctccctaggctgcccactctccatcctccccaggggtagaggctgggggctccaccccagcccatgtacgtccccacgaactggcctggccagcaccccacactggagccatctcttcctcatatttcagcagtgcagccggggggcagggaagggcaggcagggtctgttggggtctctttttatccttattcctcccccgacctaattgtctttgttctgtgattattgggggacacccggctccctccagacaatgccagcataaatccatccatccaaaggcagagaaccaaaggggccatggaaggttctctgtgctcctcctacccttccagtgccctaggcctggcgactgcccctgccttttagacccgccctccccttttatacctgctcttgttctactgagaaaagcctctccagcaataatgttttctagtcacttcctccgtctccgggacggcgtgcctggacactgtaccgactttgatagatttctacactgaggtttgaattcatatcgcctgagttgcttttacttctctatacaaaatgattttgaagagattttaaagacgttcccttttgtattctcttcctcatccaccgccactgggcctgtcactgatggtggctctggtgtgaagtttgctttgtactgagggttggggtggggaagcaatttgtattttattgtttcttagcacaagcaggtgaactgggagcagctctgtgactccccctctttcacttcatagctcaccaggactgttttataaactgctgtatttggaaaccccttctttacttcccaggccagcaagctcttcactgaaactggttgaagggtgttgcacccttttgggcctagaattctgaactttatctgttctgtttctgtgggaggagaaggggaagtatgttttggggggctgcttcctgtctgagtaagccctcaggagcctctgctcccctgtgaacccactgaaccttctgagcccccactgcttctatggggctctctcttctgccttctcaggaaagctggtgtctgattttggccatcaggactctgacgtctctttggtcttgttgatttcctctgggcatatcccttccccagatctgctcctcccctttcacaggtgggatcggcactcagggggtctggaaagaaggtcataagggagcatgataggatttggggcagagggacaggctcctctggggaaaccccccagagctctttaccaaggatgaaagaggagccaggccttgggctcctgatgaggagaaaggggccccaccggggtctaatggtgacagtccaaaccactccactggcctcctggcagaagccgagtgtgctggggtctccgaagagggtccctcctttttgggggaaggtcagcccagcccctccaaaggtctgatgtctccactttcacccgcaggccttaccgctctgtttatagtgacccaccctagatcttccccaagagggactggggtttctggggtccattctctgagtcagtggttatttgaaaatttgattttgattttattttttctctgtaaacttccaagctggcttttcccatttcaattcctgtgatttatgccaataaagtttgcccatgattttcacctgtgct

SEQ ID NO: 163964 - DNA, 3683 bp, Homo sapiens
  Payload ID: 12283
  Gene Symbol: PXN
  Gene Name: paxillin
  Uniprot ID: P49023
  ENST ID: ENST00000424649
  CDS Start-End: 143-1816
ggcgggcgcgggcgcgggcgcgcgcggcggcggcgcgttccgttccgggccgaggctcgcggcggaaaagttgcggggcatagacgagcggccccgggacgggcagctagcgcgaccctgagccggcgcccgtggtccggccatggacgacctcgacgccctgctggcggacttggagtctaccacctcccacatctccaaacggcctgtgttcttgtcggaggagaccccctactcatacccaactggaaaccacacataccaggagattgccgtgccaccccccgtccccccacccccgtccagcgaggccctcaatggcacaatccttgaccccttagaccagtggcagcccagcagctcccgattcatccaccagcagcctcagtcctcatcacctgtgtacggctccagtgccaaaacttccagtgtctccaaccctcaggacagtgttggctctccgtgctcccgagtgggtgaggaggagcacgtctacagcttccccaacaagcagaaatcagctgagccttcacccaccgtaatgagcacgtccctgggcagcaacctttctgaactcgaccgcctgctgctggaactgaacgctgtacagcataacccgccaggcttccctgcagatgaggccaactcaagccccccgcttcctggggccctgagccccctctatggtgtcccagagactaacagccccttgggaggcaaagctgggcccctgacgaaagagaagcctaagcggaatgggggccggggcctggaggacgtgcggcccagtgtggagagtctcttggatgaactggagagctccgtgcccagccccgtccctgccatcactgtgaaccagggcgagatgagcagcccgcagcgcgtcacctccacccaacagcagacacgcatctcggcctcctctgccaccagggagctggacgagctgatggcttcgctgtcggatttcaagttcatggcccaggggaagacagggagcagctcaccccctggggggcccccgaagcccgggagccagctggacagcatgctggggagcctgcagtctgacctgaacaagctgggggtcgccacagtcgccaaaggagtctgcggggcctgcaagaagcccatcgccgggcaggttgtgaccgccatggggaagacgtggcaccccgagcacttcgtctgcacccactgccaggaggagatcggatcccggaacttcttcgagcgggatggacagccctactgtgaaaaggactaccacaacctcttctccccgcgctgctactactgcaacggccccatcctggataaagtggtgacagcccttgaccggacgtggcaccctgaacacttcttctgtgcacagtgtggagccttctttggtcccgaagggttccacgagaaggacggcaaggcctactgtcgcaaggactacttcgacatgttcgcacccaagtgtggcggctgcgcccgggccatcctggagaactatatctcagccctcaacacgctgtggcatcctgagtgctttgtgtgccgggaatgcttcacgccattcgtgaacggcagcttcttcgagcacgacgggcagccctactgtgaggtgcactaccacgagcggcgcggctcgctgtgttctggctgccagaagcccatcaccggccgctgcatcaccgccatggccaagaagttccaccccgagcacttcgtctgtgccttctgcctcaagcagctcaacaagggcaccttcaaggagcagaacgacaagccttactgtcagaactgcttcctcaagctcttctgctaggtgccctgcccctgtctctgccccccttccccagccagcatccccaactgcgactgtgacctagagacttcacccgggggtgaaggggtaaacccgactgaaactggaacccttgtcctccgctggtgcgggatggacagagggccgtgaggggtccccctgcttgtcttcacccctgccagagcctctgggccccctcctccctcctgtagctctccctaggctgcccactctccatcctccccaggggtagaggctgggggctccaccccagcccatgtacgtccccacgaactggcctggccagcaccccacactggagccatctcttcctcatatttcagcagtgcagccggggggcagggaagggcaggcagggtctgttggggtctctttttatccttattcctcccccgacctaattgtctttgttctgtgattattgggggacacccggctccctccagacaatgccagcataaatccatccatccaaaggcagagaaccaaaggggccatggaaggttctctgtgctcctcctacccttccagtgccctaggcctggcgactgcccctgccttttagacccgccctccccttttatacctgctcttgttctactgagaaaagcctctccagcaataatgttttctagtcacttcctccgtctccgggacggcgtgcctggacactgtaccgactttgatagatttctacactgaggtttgaattcatatcgcctgagttgcttttacttctctatacaaaatgattttgaagagattttaaagacgttcccttttgtattctcttcctcatccaccgccactgggcctgtcactgatggtggctctggtgtgaagtttgctttgtactgagggttggggtggggaagcaatttgtattttattgtttcttagcacaagcaggtgaactgggagcagctctgtgactccccctctttcacttcatagctcaccaggactgttttataaactgctgtatttggaaaccccttctttacttcccaggccagcaagctcttcactgaaactggttgaagggtgttgcacccttttgggcctagaattctgaactttatctgttctgtttctgtgggaggagaaggggaagtatgttttggggggctgcttcctgtctgagtaagccctcaggagcctctgctcccctgtgaacccactgaaccttctgagcccccactgcttctatggggctctctcttctgccttctcaggaaagctggtgtctgattttggccatcaggactctgacgtctctttggtcttgttgatttcctctgggcatatcccttccccagatctgctcctcccctttcacaggtgggatcggcactcagggggtctggaaagaaggtcataagggagcatgataggatttggggcagagggacaggctcctctggggaaaccccccagagctctttaccaaggatgaaagaggagccaggccttgggctcctgatgaggagaaaggggccccaccggggtctaatggtgacagtccaaaccactccactggcctcctggcagaagccgagtgtgctggggtctccgaagagggtccctcctttttgggggaaggtcagcccagcccctccaaaggtctgatgtctccactttcacccgcaggccttaccgctctgtttatagtgacccaccctagatcttccccaagagggactggggtttctggggtccattctctgagtcagtggttatttgaaaatttgattttgattttattttttctctgtaaacttccaagctggcttttcccatttcaattcctgtgatttatgccaataaagtttgcccatgattttca

SEQ ID NO: 163965 - DNA, 3807 bp, Homo sapiens
  Payload ID: 12283
  Gene Symbol: PXN
  Gene Name: paxillin
  Uniprot ID: P49023
  ENST ID: ENST00000458477
  CDS Start-End: 666-1940
ttcccctgtgtactcctggctcggctggccggctaaggcagtttctcatcactgatgtgctctgggacagctgagtgggatgggctcctctggggtgggtgtggaggagtggtcgtgatgcctggaacactgcagtcactcctcagagacacgacttggcagccctcctgagcctgcctggtcacatgctgcctgtcttggaaggtcctctgtcccaagcagtggatgtgcagtttcttcacccctgcttagcttcatcaggcacaatgcgtctttgagacgccctgctggcggacttggagtctaccacctcccacatctccaaacggcctgtgttcttgtcggaggagaccccctactcatacccaactggaaaccacacataccaggagattgccgtgccaccccccgtccccccacccccgtccagcgaggccctcaatggcacaatccttgaccccttagaccagtggcagcccagcagctcccgattcatccaccagcagcctcagtcctcatcacctgtgtacggctccagtgccaaaacttccagtgtctccaaccctcaggacagtgttggctctccgtgctcccgagtgggtgaggaggagcacgtctacagcttccccaacaagcagaaatcagctgagccttcacccaccgtaatgagcacgtccctgggcagcaacctttctgaactcgaccgcctgctgctggaactgaacgctgtacagcataacccgccaggcttccctgcagatgaggccaactcaagccccccgcttcctggggccctgagccccctctatggtgtcccagagactaacagccccttgggaggcaaagctgggcccctgacgaaagagaagcctaagcggaatgggggccggggcctggaggacgtgcggcccagtgtggagagtctcttggatgaactggagagctccgtgcccagccccgtccctgccatcactgtgaaccagggcgagatgagcagcccgcagcgcgtcacctccacccaacagcagacacgcatctcggcctcctctgccaccagggagctggacgagctgatggcttcgctgtcggatttcaagttcatggcccaggggaagacagggagcagctcaccccctggggggcccccgaagcccgggagccagctggacagcatgctggggagcctgcagtctgacctgaacaagctgggggtcgccacagtcgccaaaggagtctgcggggcctgcaagaagcccatcgccgggcaggttgtgaccgccatggggaagacgtggcaccccgagcacttcgtctgcacccactgccaggaggagatcggatcccggaacttcttcgagcgggatggacagccctactgtgaaaaggactaccacaacctcttctccccgcgctgctactactgcaacggccccatcctggataaagtggtgacagcccttgaccggacgtggcaccctgaacacttcttctgtgcacagtgtggagccttctttggtcccgaagggttccacgagaaggacggcaaggcctactgtcgcaaggactacttcgacatgttcgcacccaagtgtggcggctgcgcccgggccatcctggagaactatatctcagccctcaacacgctgtggcatcctgagtgctttgtgtgccgggaatgcttcacgccattcgtgaacggcagcttcttcgagcacgacgggcagccctactgtgaggtgcactaccacgagcggcgcggctcgctgtgttctggctgccagaagcccatcaccggccgctgcatcaccgccatggccaagaagttccaccccgagcacttcgtctgtgccttctgcctcaagcagctcaacaagggcaccttcaaggagcagaacgacaagccttactgtcagaactgcttcctcaagctcttctgctaggtgccctgcccctgtctctgccccccttccccagccagcatccccaactgcgactgtgacctagagacttcacccgggggtgaaggggtaaacccgactgaaactggaacccttgtcctccgctggtgcgggatggacagagggccgtgaggggtccccctgcttgtcttcacccctgccagagcctctgggccccctcctccctcctgtagctctccctaggctgcccactctccatcctccccaggggtagaggctgggggctccaccccagcccatgtacgtccccacgaactggcctggccagcaccccacactggagccatctcttcctcatatttcagcagtgcagccggggggcagggaagggcaggcagggtctgttggggtctctttttatccttattcctcccccgacctaattgtctttgttctgtgattattgggggacacccggctccctccagacaatgccagcataaatccatccatccaaaggcagagaaccaaaggggccatggaaggttctctgtgctcctcctacccttccagtgccctaggcctggcgactgcccctgccttttagacccgccctccccttttatacctgctcttgttctactgagaaaagcctctccagcaataatgttttctagtcacttcctccgtctccgggacggcgtgcctggacactgtaccgactttgatagatttctacactgaggtttgaattcatatcgcctgagttgcttttacttctctatacaaaatgattttgaagagattttaaagacgttcccttttgtattctcttcctcatccaccgccactgggcctgtcactgatggtggctctggtgtgaagtttgctttgtactgagggttggggtggggaagcaatttgtattttattgtttcttagcacaagcaggtgaactgggagcagctctgtgactccccctctttcacttcatagctcaccaggactgttttataaactgctgtatttggaaaccccttctttacttcccaggccagcaagctcttcactgaaactggttgaagggtgttgcacccttttgggcctagaattctgaactttatctgttctgtttctgtgggaggagaaggggaagtatgttttggggggctgcttcctgtctgagtaagccctcaggagcctctgctcccctgtgaacccactgaaccttctgagcccccactgcttctatggggctctctcttctgccttctcaggaaagctggtgtctgattttggccatcaggactctgacgtctctttggtcttgttgatttcctctgggcatatcccttccccagatctgctcctcccctttcacaggtgggatcggcactcagggggtctggaaagaaggtcataagggagcatgataggatttggggcagagggacaggctcctctggggaaaccccccagagctctttaccaaggatgaaagaggagccaggccttgggctcctgatgaggagaaaggggccccaccggggtctaatggtgacagtccaaaccactccactggcctcctggcagaagccgagtgtgctggggtctccgaagagggtccctcctttttgggggaaggtcagcccagcccctccaaaggtctgatgtctccactttcacccgcaggccttaccgctctgtttatagtgacccaccctagatcttccccaagagggactggggtttctggggtccattctctgagtcagtggttatttgaaaatttgattttgattttattttttctctgtaaacttccaagctggcttttcccatttcaattcctgtgatttatgccaataaagtttgcccatgattttca

SEQ ID NO: 163966 - DNA, 957 bp, Homo sapiens
  Payload ID: 12283
  Gene Symbol: PXN
  Gene Name: paxillin
  ENST ID: ENST00000543331
  CDS Start-End: 428-957
agctaagcgatttgccctgtggcatggatggtagagaggggagctggcacttgaactcaggtctggctcgacctcagaatgagtgatcttgtgtctctgtgccccaggactgcatcctctcaccaatacttcaccagcctagggatctgtgctcccaagagcctgttgacattgtaaacctgaatccaatccataaaccaaaagcccaggcttagaatcacattgtggtggagcgggtgtttggtggagtccctgattcaaaatgtttgacaaggaagcctgaccatttgtcttctgttgggtgtttggagtccaagagacctgagatcagagtccagcattgtcacttcatccagccttggcagtgtgggatgtgactctgcctctgaaccgcagttataccatctgtgctggtggcgttgtgaggatggcaggtaacaaagacgccctgctggcggacttggagtctaccacctcccacatctccaaacggcctgtgttcttgtcggaggagaccccctactcatacccaactggaaaccacacataccaggagattgccgtgccaccccccgtccccccacccccgtccagcgaggccctcaatggcacaatccttgaccccttagaccagtggcagcccagcagctcccgattcatccaccagcagcctcagtcctcatcacctgtgtacggctccagtgccaaaacttccagtgtctccaaccctcaggacagtgttggctctccgtgctcccgagtgggtgaggaggagcacgtctacagcttccccaacaagcagaaatcagctgagccttcacccaccgtaatgagcacgtccctgggcagcaacctttctgaactcgaccgcctgctgctggaactgaacgctgtacagcataacccgccaggcttccctgcagatgaggccaactcaagccccccgcttcctggggc

SEQ ID NO: 163967 - DNA, 4112 bp, Homo sapiens
  Payload ID: 12283
  Gene Symbol: PXN
  Gene Name: paxillin
  ENST ID: ENST00000536957
  CDS Start-End: 477-2246
tttgaggtcagagttattcaagagcttactgagacaacaggccctgagaagctaagcgatttgccctgtggcatggatggtagagaggggagctggcacttgaactcaggtctggctcgacctcagaatgagtgatcttgtgtctctgtgccccaggactgcatcctctcaccaatacttcaccagcctagggatctgtgctcccaagagcctgttgacattgtaaacctgaatccaatccataaaccaaaagcccaggcttagaatcacattgtggtggagcgggtgtttggtggagtccctgattcaaaatgtttgacaaggaagcctgaccatttgtcttctgttgggtgtttggagtccaagagacctgagatcagagtccagcattgtcacttcatccagccttggcagtgtgggatgtgactctgcctctgaaccgcagttataccatctgtgctggtggcgttgtgaggatggcagacgccctgctggcggacttggagtctaccacctcccacatctccaaacggcctgtgttcttgtcggaggagaccccctactcatacccaactggaaaccacacataccaggagattgccgtgccaccccccgtccccccacccccgtccagcgaggccctcaatggcacaatccttgaccccttagaccagtggcagcccagcagctcccgattcatccaccagcagcctcagtcctcatcacctgtgtacggctccagtgccaaaacttccagtgtctccaaccctcaggacagtgttggctctccgtgctcccgagtgggtgaggaggagcacgtctacagcttccccaacaagcagaaatcagctgagccttcacccaccgtaatgagcacgtccctgggcagcaacctttctgaactcgaccgcctgctgctggaactgaacgctgtacagcataacccgccaggcttccctgcagatgaggccaactcaagccccccgcttcctggggccctgagccccctctatggtgtcccagagactaacagccccttgggaggcaaagctgggcccctgacgaaagagaagcctaagcggaatgggggccggggcctggaggacgtgcggcccagtgtggagagtctcttggatgaactggagagctccgtgcccagccccgtccctgccatcactgtgaaccagggcgagatgagcagcccgcagcgcgtcacctccacccaacagcagacacgcatctcggcctcctctgccaccagggagctggacgagctgatggcttcgctgtcggatttcaagatccagggcctggagcaaagagcggatggggagcggtgctgggcggccggctggcctcgggacggcgggcggagcagccccggagggcaggacgagggagggttcatggcccaggggaagacagggagcagctcaccccctggggggcccccgaagcccgggagccagctggacagcatgctggggagcctgcagtctgacctgaacaagctgggggtcgccacagtcgccaaaggagtctgcggggcctgcaagaagcccatcgccgggcaggttgtgaccgccatggggaagacgtggcaccccgagcacttcgtctgcacccactgccaggaggagatcggatcccggaacttcttcgagcgggatggacagccctactgtgaaaaggactaccacaacctcttctccccgcgctgctactactgcaacggccccatcctggataaagtggtgacagcccttgaccggacgtggcaccctgaacacttcttctgtgcacagtgtggagccttctttggtcccgaagggttccacgagaaggacggcaaggcctactgtcgcaaggactacttcgacatgttcgcacccaagtgtggcggctgcgcccgggccatcctggagaactatatctcagccctcaacacgctgtggcatcctgagtgctttgtgtgccgggaatgcttcacgccattcgtgaacggcagcttcttcgagcacgacgggcagccctactgtgaggtgcactaccacgagcggcgcggctcgctgtgttctggctgccagaagcccatcaccggccgctgcatcaccgccatggccaagaagttccaccccgagcacttcgtctgtgccttctgcctcaagcagctcaacaagggcaccttcaaggagcagaacgacaagccttactgtcagaactgcttcctcaagctcttctgctaggtgccctgcccctgtctctgccccccttccccagccagcatccccaactgcgactgtgacctagagacttcacccgggggtgaaggggtaaacccgactgaaactggaacccttgtcctccgctggtgcgggatggacagagggccgtgaggggtccccctgcttgtcttcacccctgccagagcctctgggccccctcctccctcctgtagctctccctaggctgcccactctccatcctccccaggggtagaggctgggggctccaccccagcccatgtacgtccccacgaactggcctggccagcaccccacactggagccatctcttcctcatatttcagcagtgcagccggggggcagggaagggcaggcagggtctgttggggtctctttttatccttattcctcccccgacctaattgtctttgttctgtgattattgggggacacccggctccctccagacaatgccagcataaatccatccatccaaaggcagagaaccaaaggggccatggaaggttctctgtgctcctcctacccttccagtgccctaggcctggcgactgcccctgccttttagacccgccctccccttttatacctgctcttgttctactgagaaaagcctctccagcaataatgttttctagtcacttcctccgtctccgggacggcgtgcctggacactgtaccgactttgatagatttctacactgaggtttgaattcatatcgcctgagttgcttttacttctctatacaaaatgattttgaagagattttaaagacgttcccttttgtattctcttcctcatccaccgccactgggcctgtcactgatggtggctctggtgtgaagtttgctttgtactgagggttggggtggggaagcaatttgtattttattgtttcttagcacaagcaggtgaactgggagcagctctgtgactccccctctttcacttcatagctcaccaggactgttttataaactgctgtatttggaaaccccttctttacttcccaggccagcaagctcttcactgaaactggttgaagggtgttgcacccttttgggcctagaattctgaactttatctgttctgtttctgtgggaggagaaggggaagtatgttttggggggctgcttcctgtctgagtaagccctcaggagcctctgctcccctgtgaacccactgaaccttctgagcccccactgcttctatggggctctctcttctgccttctcaggaaagctggtgtctgattttggccatcaggactctgacgtctctttggtcttgttgatttcctctgggcatatcccttccccagatctgctcctcccctttcacaggtgggatcggcactcagggggtctggaaagaaggtcataagggagcatgataggatttggggcagagggacaggctcctctggggaaaccccccagagctctttaccaaggatgaaagaggagccaggccttgggctcctgatgaggagaaaggggccccaccggggtctaatggtgacagtccaaaccactccactggcctcctggcagaagccgagtgtgctggggtctccgaagagggtccctcctttttgggggaaggtcagcccagcccctccaaaggtctgatgtctccactttcacccgcaggccttaccgctctgtttatagtgacccaccctagatcttccccaagagggactggggtttctggggtccattctctgagtcagtggttatttgaaaatttgattttgattttattttttctctgtaaacttccaagctggcttttcccatttcaattcctgtgatttatgccaataaagtttgcccatgattttc

SEQ ID NO: 163968 - DNA, 655 bp, Homo sapiens
  Payload ID: 12283
  Gene Symbol: PXN
  Gene Name: paxillin
  ENST ID: ENST00000548912
  CDS Start-End: 548-655
agttccggtttgctagagacaggaagccaggcctcctccatgggacccggagggcggggcgggctgtaggacctgaacttccttggaggtcaggcgaccagacccggggtcctgggccttggaacagacatcccctctgtccatctgggcaggagcatgggacgccctgctggcggacttggagtctaccacctcccacatctccaaacggcctgtgttcttgtcggaggagaccccctactcatacccaactggaaaccacacataccaggagattgccgtgccaccccccgtccccccacccccgtccagcgaggccctcaatggcacaatccttgaccccttagaccagtggcagcccagcagctcccgattcatccaccagcagcctcagtcctcatcacctgtgtacggctccagtgccaaaacttccagtgtctccaaccctcaggacagtgttggctctccgtgctcccgagtgggtgaggaggagcacgtctacagcttccccaacaagcagaaatcagctgagccttcacccaccgtaatgagcacgtccctgggcagcaacctttctgaactcgaccgcctgctgctggaactgaacgctgtacagcataacccgccaggcttccctgcagatgaggccaactca

SEQ ID NO: 163969 - DNA, 588 bp, Homo sapiens
  Payload ID: 12283
  Gene Symbol: PXN
  Gene Name: paxillin
  ENST ID: ENST00000552550
  CDS Start-End: 495-588
attctctccgcgttgccctgcagattcagagttccagacaggcacttcactcgcggctgcgcggccctgtcaggagggaacgcagtgccaggtgcctgactcccagagacgccctgctggcggacttggagtctaccacctcccacatctccaaacggcctgtgttcttgtcggaggagaccccctactcatacccaactggaaaccacacataccaggagattgccgtgccaccccccgtccccccacccccgtccagcgaggccctcaatggcacaatccttgaccccttagaccagtggcagcccagcagctcccgattcatccaccagcagcctcagtcctcatcacctgtgtacggctccagtgccaaaacttccagtgtctccaaccctcaggacagtgttggctctccgtgctcccgagtgggtgaggaggagcacgtctacagcttccccaacaagcagaaatcagctgagccttcacccaccgtaatgagcacgtccctgggcagcaacctttctgaactcgaccgcctgctgctggaactgaacgctgtacagcataacccgccaggcttccctgcag

SEQ ID NO: 163970 - DNA, 1004 bp, Homo sapiens
  Payload ID: 12283
  Gene Symbol: PXN
  Gene Name: paxillin
  ENST ID: ENST00000547983
  CDS Start-End: 109-384
gcgttccgttccgggccgaggctcgcggcggaaaagttgcggggcatagacgagcggccccgggacgggcagctagcgcgaccctgagccggcgcccgtggtccggccatggacgacctcgattcagagttccagacaggcacttcactcgcggctgcgcggccctgtcaggagggaacgcagtgccaggtgcctgactcccagagacgccctgctggcggacttggagtctaccacctcccacatctccaaacggcctgtgttcttgtcggaggagaccccctactcatacccaactggaaaccacacataccaggagattgccgtgccaccccccgtccccccacccccgtccagcgaggccctcaatggcacaatccttgaccccttagaccagtggcagcccagcagctcccgattcatccaccagcagcctcagtcctcatcacctgtgtacggctccagtgccaaaacttccagtgtctccaaccctcaggacagtgttggctctccgtgctcccgagtgggtgaggaggagcacgtctacagcttccccaacaagcagaaatcagctgagccttcacccaccgtaatgagcacgtccctgggcagcaacctttctgaactcgaccgcctgctgctggaactgaacgctgtacagcataacccgccaggcttccctgcagatgaggccaactcaagccccccgcttcctggggccctgagccccctctatggtgtcccagagactaacagccccttgggaggcaaagctgggcccctgacgaaagagaagcctaagcggaatgggggccggggcctggaggacgtgcggcccagtgtggagagtctcttggatgaactggagagctccgtgcccagccccgtccctgccatcactgtgaaccagggcgagatgagcagcccgcagcgcgtcacctccacccaacagcagacacgcatctcggcctcctctgccaccagggagctggacgagctgatgg

SEQ ID NO: 163971 - DNA, 729 bp, Homo sapiens
  Payload ID: 12283
  Gene Symbol: PXN
  Gene Name: paxillin
  ENST ID: ENST00000546532
  CDS Start-End: 619-729
agagacaggaagccaggcctcctccatgggacccggagggcggggcgggctgtaggacctgaacttccttggaggtcaggcgaccagacccggggtcctgggccttggaacagacatcccctctgtccatctgggcaggagcatgggattcagagttccagacaggcacttcactcgcggctgcgcggccctgtcaggagggaacgcagtgccaggtgcctgactcccagagacgccctgctggcggacttggagtctaccacctcccacatctccaaacggcctgtgttcttgtcggaggagaccccctactcatacccaactggaaaccacacataccaggagattgccgtgccaccccccgtccccccacccccgtccagcgaggccctcaatggcacaatccttgaccccttagaccagtggcagcccagcagctcccgattcatccaccagcagcctcagtcctcatcacctgtgtacggctccagtgccaaaacttccagtgtctccaaccctcaggacagtgttggctctccgtgctcccgagtgggtgaggaggagcacgtctacagcttccccaacaagcagaaatcagctgagccttcacccaccgtaatgagcacgtccctgggcagcaacctttctgaactcgaccgcctgctgctggaactgaacgctgtacagcataacccgccaggcttccctgcagatgaggccaactcaagc

SEQ ID NO: 163972 - DNA, 513 bp, Homo sapiens
  Payload ID: 12283
  Gene Symbol: PXN
  Gene Name: paxillin
  ENST ID: ENST00000550795
  CDS Start-End: 1-513
catcgaggaaagaagccactccagaagggagaccagaaacctgtctcctcccttccagcccccaggcccagcgcccgatccagggcctggagcaaagagcggatggggagcggtgctgggcggccggctggcctcgggacggcgggcggagcagccccggagggcaggacgagggagggttcatggcccaggggaagacagggagcagctcaccccctggggggcccccgaagcccgggagccagctggacagcatgctggggagcctgcagtctgacctgaacaagctgggggtcgccacagtcgccaaaggagtctgcggggcctgcaagaagcccatcgccgggcaggttgtgaccgccatggggaagacgtggcaccccgagcacttcgtctgcacccactgccaggaggagatcggatcccggaacttcttcgagcgggatggacagccctactgtgaaaaggactaccacaacctcttctccccgcgctgctactactgcaacggcc

SEQ ID NO: 163973 - DNA, 1702 bp, Homo sapiens
  Payload ID: 12284
  Gene Symbol: PAGR1
  Gene Name: PAXIP1 associated glutamate-rich protein 1
  Uniprot ID: Q9BTK6
  ENST ID: ENST00000320330
  CDS Start-End: 575-1339
cttactgggtggtatacgcatgcgacttcccggtggccatctttactgtgggctgaagcctgtgcgcttactcgcgcatgtgcaagccttccctcgctttcctcttccaagtagccttgcctagagcggagcctcccgcgccatttctgtgcgcctgcgtagcgtgaccctgcgcagcctgggaggcgggtcttagctccaggtgcgtacggcatctgacttgacgtggcccacaactgaaaggtctggggagaaggcgccgtgtccgggtgtggagaggggcgtcgtggaagcgagaagagtggcccgtccctctcctccccctttccctctttcggaaagtggtttctgcggggcccgggagcctcggagtaccgaacctcgatctccggggcggggtccttggtggggactgagcgccccctcccggggacgggcggtctggccgcggagtcccctgcgggagcgtgattggctggaaacggtcccgaacccccaggggagcccgatccctgggggaccctggcttcggactccagtatctgtcgtcgcagggtccctgccctagtggcctatgtcccttgctcggggccatggagacactgcggccagtacggcggcgcctctgtctgaagaaggggaagtgacctccggcctccaggctctggccgtggaggataccggaggcccctctgcctcggccggtaaggccgaggacgagggggaaggaggccgagaggagaccgagcgtgaggggtccgggggcgaggaggcgcagggagaagtccccagcgctgggggagaagagcctgccgaggaggactccgaggactggtgcgtgccctgcagcgacgaggaggtggagctgcctgcggatgggcagccctggatgcccccgccctccgaaatccagcggctctatgaactgctggctgcccacggtactctggagctgcaagccgagatcctgccccgccggcctcccacgccggaggcccagagcgaagaggagagatccgatgaggagccggaggccaaagaagaggaagaggaaaaaccacacatgcccacggaatttgattttgatgatgagccagtgacaccaaaggactccctgattgaccggagacgcaccccaggaagctcagcccggagccagaaacgggaggcccgcctggacaaggtgctgtcggacatgaagagacacaagaagctggaggagcagatccttcgtaccgggagggacctcttcagcctggactcggaggaccccagccccgccagccccccactccgatcctccgggagtagtctcttccctcggcagcggaaatactgattcccactgctcctgcctctagggtgcagtgtccgtacctgctggagcctgggccctccttccccagcccagacattgagaaacttgggaagaagagagaaacctcaagctcccaaacagcacgttgcgggaaagaggaagagagagtgtgagtgtgtgtgtgtgttttttctattgaacacctgtagagtgtgtgtgtgtgttttctattgaacacctatagagagagtgtgtgtgttttctattgaacatctatatagagagagtgtgtgagtgtgtgttttctattgaacacctattcagagacctggactgaattttctgagtctgaaataaaagatgcagagctatcatctcttaaaa

SEQ ID NO: 163974 - DNA, 5003 bp, Homo sapiens
  Payload ID: 12285
  Gene Symbol: PKNOX1
  Gene Name: PBX/knotted 1 homeobox 1
  Uniprot ID: P55347
  ENST ID: ENST00000291547
  CDS Start-End: 212-1522
gaatattgatgcggcgcgcgtcggcgtcgccctcctcccattgagcgaggctgtgtcgcgtggcccagcgtcggcgtgacggttggacgcgggcgcggcactgcgggtcccgattgctgcagccgcttgtcagtgtgatgaagattggcacccagacaccattcgcttttcacccaagatgatttgatgtcttataaaactctgatgaaccatgatggctacacagacattaagtatagacagctatcaagatgggcaacagatgcaagtagtaacagagttaaagacagaacaagatccaaactgctctgaacccgatgcagaaggagtgagccctccccctgtggagtctcagaccccgatggatgtggacaagcaggccatttataggcatccactatttccattattagctttgttgtttgaaaaatgtgaacaatctacacagggctctgaaggcacaacttctgccagttttgatgtagacatcgaaaattttgtaagaaagcaagagaaggaagggaaacctttcttttgtgaagatccagaaactgataatttaatggtaaaagcaatccaggttttgcgcattcatcttcttgagctggaaaaggttaacgaactctgcaaagatttctgcagtcgatacattgcttgtctgaaaacaaaaatgaacagtgaaactctgttgagtggagagcctggaagcccgtactcaccagtgcagtcccagcagattcaaagtgccatcacaggcaccatcagccctcagggaattgtggtgccggcgtccgcgctgcagcagggaaacgtagccatggcgacggtggcaggtggcacagtgtatcagcctgtcacggtcgtcactccccaaggccaagtggtcacacagacattgtcgcctgggacaattaggatccagaactcccagcttcagttacagttaaaccaagatctcagcatcttgcatcaagatgatggttcatctaagaacaagaggggcgtcctgccaaagcatgccacgaacgtgatgcggtcctggctcttccagcacatcgggcatccctacccaacagaggatgagaaaaaacagattgctgctcagacaaatttgacactactccaagtcaacaactggttcatcaatgccagaagacgaattcttcagccaatgttggattcaagttgttcagagacccccaaaacaaagaaaaaaactgctcagaaccggccagttcagaggttttggcctgattctattgcatcaggagtcgcacagccaccgccgagcgagctcaccatgtcggaaggagctgttgtcaccatcaccacgcccgtgaacatgaacgtggacagccttcagtctctgtcctcggacggggccaccctggcggtgcagcaggtcatgatggcagggcagagcgaggacgagtctgtggacagcacagaggaggatgcgggtgccctggcccctgcccacatcagcgggctggtcttggagaacagtgactccctgcagtaggggcaggagcagacgcacctgactttttggagtttgcacagcaaacattttacacagttttatttctaatatgttttatatgtagatatagaagagtgcacttttgtatttcatagtaagcttaaagcgcgtctttgccggtgcagcgacttctttcaagtgtgtgtgtgtgtgtgtgtgtgtgtgtgtgtgcgtgtgtgcgtgtgtgtggatttttaaagaaattctttaaaggtttaacgctagattgtgaggaatgacacaccactccctccccaccttgaatccctaattagattaaggaatagcgctgccattttctaaaccgtgatgcggttgtcacttagttctgtggttccagcagatctcagtgggctggttgatttgtgtggcccatggatttgaaagaagctgctgcacccgaaactgccagtgtgcggtgacaacggcacacgcctagactgagtgtggtttcgtcgtgagtggatggacggcaagcttagcaagcctaagtcccctcatgttcagtgagcctgtttcatttgctatatagaaaaagaaactcctatttttaccttgctggaattattggataaaaaagctatttttataaattcgttatgaattggatgatgactatattgaggataaaatttctagagaagaaacaatacatgcttgctattaatatttcaatttggaatgttctgaattgaccaaatttaatgaacctgcccaaagttagctaccgttccatggttctttgctctccccgggtagtgatgaacatttactactataaaagaaacagctatttaatgaaattttgatatctgcaaatttttgttgatatgtaatgctcagattgcattttacacttgatctaaacatatatcgaaagatatctgctaaacaggacttcaggtaagtgaggtgaaatggtagccagtgacccgttaggagctctcaccgtacatactccagtctaatttaaatctgaccacagttgcatggtcgctttaccatgttagctgtgtattgttttaaaagttttaacttcaaaatatgttatgcacagaatgtttattataaactaatataaaatgtgctctaccccattggctcagagctagggcaaacagcagatattcagactttattacttaactagcggacatccctggagtcccagcagcgagctggtctggcgagggcacctcggcagcccccacgggttggctcctacgtttgcgtttgtggctggtctcctggtgtcagtgttctcttgtacgttgttgctttcgacttttcagagccctcctgctcacttgaccacgtgagatttggaataactgtaggacttctgtttcctggtaacaagatgaaccgagagagtgggctgggttctgttttctttggttttgatttgttttcattgtttacttaggagtggtgctttttctcagaaaacaggccacggtgtttcatacagaatgtcttcatatcatctgaaatggtatggctgaagttcatttgtttacagggtcgggaatgtcttcagttcttgagagtcaacagtaatgattggttgtaagccaagggacattttaagctagtgaagagttttttctggaattgatttttcccaaaagaatatattaattgaggttaagaagtcagtgggaaacacacagaaatttgttttaaaatctttcaggagctttactgaaagacttggttatcaagtcttttggggagagaatgacattttttttttgagacagagttttgctcttgttgcccaggctggagggcaatggtgcaatctcagctcactgcaacctccacctcttatgttcaagcaattctccttccttagcctcctgagtagctgggattacaggcatgcgccaccacacccggctaattttgtatttttagtagagatgggtttctccatgttggtcgggctggtctcgaactcccgacctcaggtgatctgcctgcctcagcctcccaaagtgctgggattacaggtgtgagccaccgcgcccggccgagaatgacatcttaaagccaccattgcgttcctcatttgtgaactgtcttctcatattttaagtcaagtctataagatcatttttaacctaagttccaactttgttggactccttaaaataagcacccatgaaagccagccagcccttcctccttccctcaccaccctccgtctcttcggctgcttgctctttagtgtagattagtggaagccattcacagaatgtagactcatgtataggtcaccgtttctttcccccactagaaatcacattcactaagcagtggattgaatttaagagtgctgcccctgcccggcgcagtagggcgtgcctctagttccagctactcgggagtctgaggcagaggatggcatgtgccaggagtttgaggctgcagtgcactatgcttgcacctgtgaatagccactgcactccatcttgggcaacacagtgagacccccatctataaaaagagagcactgcctgaacctcggtggcactgggaagctctggcctgagagttaaacacccatgctgaatgatacagtgtgcattctctccagctgcaaactttcttcaactttcctaaattcttactaaattcagaggaataggataaagatcacttagagaaagggtgcttatggacatagcctgagtttcctttaacctctctgcaatgggtgcttttaactagcttctacatggcaagctgtttcagtttgcaaaatcactgcccagcatgtttgaggtcagttggcaccttaaaacacctgttctccagcccttggacagtggagagaatctgtaaaagtgtgaccccctctaagatttcgttttaaatgatcagattcggttccagttttattcttgttgagtttttccctatgaaggctccttttgaatgtgtcttgagacccaaattgagcatgttgctgttattcctgccctgcacctgtggagcaggagtggcagggctggctgtgctgggttccagctcgctcccaccgagggactagcttggcctttgcgctttgattccagatagtaagatgagtggaagtgtttatcgagcatgcaaaagaaaccctcacggctaagggctctgggagttgtgtctgtgtgacctgagagtgatccatctcctgcctgtgtgaggtagcagtgggcacttttcattgagacaaactccagggtgtccagagggggttctgccccttgtgaaggcccattcctggcacttagagacagaaagaactcagcaatctttcgttctagttatattcggtctttgaaactgacaatctttgaaatgtgaatactgtaacaatatgttttcttggattgttgtctttaaaaaggatttttgtgaagcaattgatttatcaaagcaaaaaaattaaaaatagaaacttgcttta

SEQ ID NO: 163975 - DNA, 5180 bp, Homo sapiens
  Payload ID: 12285
  Gene Symbol: PKNOX1
  Gene Name: PBX/knotted 1 homeobox 1
  ENST ID: ENST00000432907
  CDS Start-End: 391-1350
gaatattgatgcggcgcgcgtcggcgtcgccctcctcccattgagcgaggctgtgtcgcgtggcccagcgtcggcgtgacggttggacgcgggcgcggcactgcgggtcccgattgctgcagccgcttgtcagtgtgatgaagattggcacccagacaccattcgcttttcacccaagatgatttgatgtcttataaaactctgatgaaccatgatggctacacagacattaagtatagacagctatcaagatgggcaacagatgcaagtagtaacagagttaaagacagaacaagatccaaactgctctgaacccgatgcagaaggagtgagccctccccctgtggagtctcagaccccgatggatgtggacaagcaggccatttatagatggtaaaagcaatccaggttttgcgcattcatcttcttgagctggaaaaggttaacgaactctgcaaagatttctgcagtcgatacattgcttgtctgaaaacaaaaatgaacagtgaaactctgttgagtggagagcctggaagcccgtactcaccagtgcagtcccagcagattcaaagtgccatcacaggcaccatcagccctcagggaattgtggtgccggcgtccgcgctgcagcagggaaacgtagccatggcgacggtggcaggtggcacagtgtatcagcctgtcacggtcgtcactccccaaggccaagtggtcacacagacattgtcgcctgggacaattaggatccagaactcccagcttcagttacagttaaaccaagatctcagcatcttgcatcaagatgatggttcatctaagaacaagaggggcgtcctgccaaagcatgccacgaacgtgatgcggtcctggctcttccagcacatcgggcatccctacccaacagaggatgagaaaaaacagattgctgctcagacaaatttgacactactccaagtcaacaactggttcatcaatgccagaagacgaattcttcagccaatgttggattcaagttgttcagagacccccaaaacaaagaaaaaaactgctcagaaccggccagttcagaggttttggcctgattctattgcatcaggagtcgcacagccaccgccgagcgagctcaccatgtcggaaggagctgttgtcaccatcaccacgcccgtgaacatgaacgtggacagccttcagtctctgtcctcggacggggccaccctggcggtgcagcaggtcatgatggcagggcagagcgaggacgagtctgtggacagcacagaggaggatgcgggtgccctggcccctgcccacatcagcgggctggtcttggagaacagtgactccctgcagtaggggcaggagcagacgcacctgactttttggagtttgcacagcaaacattttacacagttttatttctaatatgttttatatgtagatatagaagagtgcacttttgtatttcatagtaagcttaaagcgcgtctttgccggtgcagcgacttctttcaagtgtgtgtgtgtgtgtgtgtgtgtgtgtgtgtgcgtgtgtgcgtgtgtgtggatttttaaagaaattctttaaaggtttaacgctagattgtgaggaatgacacaccactccctccccaccttgaatccctaattagattaaggaatagcgctgccattttctaaaccgtgatgcggttgtcacttagttctgtggttccagcagatctcagtgggctggttgatttgtgtggcccatggatttgaaagaagctgctgcacccgaaactgccagtgtgcggtgacaacggcacacgcctagactgagtgtggtttcgtcgtgagtggatggacggcaagcttagcaagcctaagtcccctcatgttcagtgagcctgtttcatttgctatatagaaaaagaaactcctatttttaccttgctggaattattggataaaaaagctatttttataaattcgttatgaattggatgatgactatattgaggataaaatttctagagaagaaacaatacatgcttgctattaatatttcaatttggaatgttctgaattgaccaaatttaatgaacctgcccaaagttagctaccgttccatggttctttgctctccccgggtagtgatgaacatttactactataaaagaaacagctatttaatgaaattttgatatctgcaaatttttgttgatatgtaatgctcagattgcattttacacttgatctaaacatatatcgaaagatatctgctaaacaggacttcaggtaagtgaggtgaaatggtagccagtgacccgttaggagctctcaccgtacatactccagtctaatttaaatctgaccacagttgcatggtcgctttaccatgttagctgtgtattgttttaaaagttttaacttcaaaatatgttatgcacagaatgtttattataaactaatataaaatgtgctctaccccattggctcagagctagggcaaacagcagatattcagactttattacttaactagcggacatccctggagtcccagcagcgagctggtctggcgagggcacctcggcagcccccacgggttggctcctacgtttgcgtttgtggctggtctcctggtgtcagtgttctcttgtacgttgttgctttcgacttttcagagccctcctgctcacttgaccacgtgagatttggaataactgtaggacttctgtttcctggtaacaagatgaaccgagagagtgggctgggttctgttttctttggttttgatttgttttcattgtttacttaggagtggtgctttttctcagaaaacaggccacggtgtttcatacagaatgtcttcatatcatctgaaatggtatggctgaagttcatttgtttacagggtcgggaatgtcttcagttcttgagagtcaacagtaatgattggttgtaagccaagggacattttaagctagtgaagagttttttctggaattgatttttcccaaaagaatatattaattgaggttaagaagtcagtgggaaacacacagaaatttgttttaaaatctttcaggagctttactgaaagacttggttatcaagtcttttggggagagaatgacattttttttttgagacagagttttgctcttgttgcccaggctggagggcaatggtgcaatctcagctcactgcaacctccacctcttatgttcaagcaattctccttccttagcctcctgagtagctgggattacaggcatgcgccaccacacccggctaattttgtatttttagtagagatgggtttctccatgttggtcgggctggtctcgaactcccgacctcaggtgatctgcctgcctcagcctcccaaagtgctgggattacaggtgtgagccaccgcgcccggccgagaatgacatcttaaagccaccattgcgttcctcatttgtgaactgtcttctcatattttaagtcaagtctataagatcatttttaacctaagttccaactttgttggactccttaaaataagcacccatgaaagccagccagcccttcctccttccctcaccaccctccgtctcttcggctgcttgctctttagtgtagattagtggaagccattcacagaatgtagactcatgtataggtcaccgtttctttcccccactagaaatcacattcactaagcagtggattgaatttaagagtgctgcccctgcccggcgcagtagggcgtgcctctagttccagctactcgggagtctgaggcagaggatggcatgtgccaggagtttgaggctgcagtgcactatgcttgcacctgtgaatagccactgcactccatcttgggcaacacagtgagacccccatctataaaaagagagcactgcctgaacctcggtggcactgggaagctctggcctgagagttaaacacccatgctgaatgatacagtgtgcattctctccagctgcaaactttcttcaactttcctaaattcttactaaattcagaggaataggataaagatcacttagagaaagggtgcttatggacatagcctgagtttcctttaacctctctgcaatgggtgcttttaactagcttctacatggcaagctgtttcagtttgcaaaatcactgcccagcatgtttgaggtcagttggcaccttaaaacacctgttctccagcccttggacagtggagagaatctgtaaaagtgtgaccccctctaagatttcgttttaaatgatcagattcggttccagttttattcttgttgagtttttccctatgaaggctccttttgaatgtgtcttgagacccaaattgagcatgttgctgttattcctgccctgcacctgtggagcaggagtggcagggctggctgtgctgggttccagctcgctcccaccgagggactagcttggcctttgcgctttgattccagatagtaagatgagtggaagtgtttatcgagcatgcaaaagaaaccctcacggctaagggctctgggagttgtgtctgtgtgacctgagagtgatccatctcctgcctgtgtgaggtagcagtgggcacttttcattgagacaaactccagggtgtccagagggggttctgccccttgtgaaggcccattcctggcacttagagacagaaagaactcagcaatctttcgttctagttatattcggtctttgaaactgacaatctttgaaatgtgaatactgtaacaatatgttttcttggattgttgtctttaaaaaggatttttgtgaagcaattgatttatcaaagcaaaaaaattaaaaatagaaacttgctttatggatgttttattttataaagctcatgtcaccaaaagctgcttctccattttatgtaaaacattgagaatgttttcatgttttctggtgacatgtagggtctgtagtcacccctgcatattgagaaactaggaccacactgcatcggactagtcaggtccatttacatgtccaagaatcttttcttaaattccttactttgttcattcattggctgttcaggcagaaaatggaaacaggtagcttttatgttttttattatagttttccacaaatctaattattttgatagttacaagaagataatgattcatcagtaagctaacataatccctttcatagttcatatt

SEQ ID NO: 163976 - DNA, 1429 bp, Homo sapiens
  Payload ID: 12285
  Gene Symbol: PKNOX1
  Gene Name: PBX/knotted 1 homeobox 1
  ENST ID: ENST00000560448
  CDS Start-End: 61-246
ccagacaccattcgcttttcacccaagatgatttgatgtcttataaaactctgatgaaccatgatggctacacagacattaagtatagacagctatcaagatgggcaacagatgcaagtagtaacagagttaaagacagaacaagatccaaactgctctgaacccgatgcagaaggagtgagccctccccctgtggagtctcagaccccgatggatgtggacaagcaggccatttatagatggtaaaagcaatccaggttttgcgcattcatcttcttgagctggaaaaggttaacgaactctgcaaagatttctgcagtcgatacattgcttgtctgaaaacaaaaatgaacagtgaaactctgttgagtggagagcctggaagcccgtactcaccagtgcagtcccagcagattcaaagtgccatcacaggcaccatcagccctcagggaattgtggtgccggcgtccgcgctgcagcagggaaacgtagccatggcgacggtggcaggtggcacagtgtatcagcctgtcacggtcgtcactccccaaggccaagtggtcacacagacattgtcgcctgggacaattaggatccagaactcccagcttcagttacagttaaaccaagatctcagcatcttgcatcaagatgatggttcatctaagaacaagaggggcgtcctgccaaagcatgccacgaacgtgatgcggtcctggctcttccagcacatcgggcatccctacccaacagaggatgagaaaaaacagattgctgctcagacaaatttgacactactccaagtcaacaactggttcatcaatgccagaagacgaattcttcagccaatgttggattcaagttgttcagagacccccaaaacaaagaaaaaaactgctcagaaccggccagttcagaggttttggcctgattctattgcatcaggagtcgcacagccaccgccgagcgagctcaccatgtcggaaggagctgttgtcaccatcaccacgcccgtgaacatgaacgtggacagccttcagtctctgtcctcggacggggccaccctggcggtgcagcaggtcatgatggcagggcagagcgaggacgagtctgtggacagcacagaggaggatgcgggtgccctggcccctgcccacatcagcgggctggtcttggagaacagtgactccctgcagtaggggcaggagcagacgcacctgactttttggagtttgcacagcaaacattttacacagttttatttctaatatgttttatatgtagatatagaagagtgcacttttgtatttcatagtaagcttaaagcgcgtctttgccggtgcagcgacttctttcaagtgtgtgtgtgtgtgtgtgtgtgtgtgtgtgtgcgtgtgtgcgtgtgtgtggatttttaaagaaattcttt

SEQ ID NO: 163977 - DNA, 3687 bp, Homo sapiens
  Payload ID: 12286
  Gene Symbol: PKNOX2
  Gene Name: PBX/knotted 1 homeobox 2
  Uniprot ID: Q96KN3
  ENST ID: ENST00000298282
  CDS Start-End: 272-1690
gtcccgagcagtgctgggaagtataggctgtgttgtcacgccggtgtcagtctgatgaagattggcatcaggtgaagtctggagcaggacttctgaggctttctatcctccatgctgctcactagaaaaggggctgtgaactgtgctttggctctagcagacaggaagaaattctggcccagctggaagtagaaagaggggagtgagtctcctgaggaccatctcagaggccccgggatcacccgaacagtcctccatgtgaatcaatcccatgatgcaacatgcctccccagcccccgctctgacgatgatggccacgcagaatgtcccgcccccaccctaccaggacagcccacagatgacggcaaccgcccagccaccctccaaggcccaggctgtccacatctctgccccctcagctgctgccagcacacctgtgcccagtgcccccatcgacccccaggcccagctggaggctgacaagcgagctgtatacaggcaccctcttttcccgctcctgacgctgctgtttgagaaatgtgaacaggccacccagggctctgagtgcatcacctccgccagctttgatgtggacatcgagaactttgtccaccagcaggaacaggagcacaaacccttcttcagcgatgacccagaactggacaatctgatggtgaaggcaatccaggtcctgagaatccacctgctggagctggagaaagtcaatgaactctgcaaggacttttgtaaccgttacatcacctgcctcaaaaccaagatgcacagcgacaacctgctcaggaatgatctaggggggccctactcccccaaccagccctccatcaaccttcactcacaggacctcctgcagaattcccccaattccatgtccggagtctccaataacccccaggggattgtggtcccagcctcagcgctccagcagggcaacatcgccatgacaaccgtcaactcacaagttgtgtcaggtggagccttataccaaccggttaccatggtaacctcccagggtcaggtggtcacccaagcaatcccccagggagccatccagatccagaacacacaggttaaccttgacctcacctccctcctggacaatgaggataagaagtccaagaacaaacgaggagtcttgcccaagcatgccaccaatataatgcgttcttggctcttccagcatctcatgcacccctaccccacggaggatgagaagaggcagatcgcagcccagaccaacctcaccctcctgcaagtaaacaactggttcatcaatgcccggaggcgcatcctgcagcccatgcttgatgccagcaacccagatcctgcccccaaagccaagaagatcaagtctcagcaccggcccacccaaagattctggcccaactccatcgctgcgggggtgctgcagcagcagggcggtgccccagggacaaaccccgatggttccatcaacttggacaacctgcagtccctgtcctcagacagtgccaccatggccatgcagcaggctatgatggctgcacacgatgactcattggatgggacagaagaagaggatgaggatgagatggaagaggaggaggaggaggagctggaggaggaggtcgacgagctgcagacgacaaatgtcagcgacctgggcttggaacacagtgactccctggagtagtcgggcagcccagatggcactgatcactgagcaggagaggagtgtcgccgggaggccttcagggtgggggggaaggggacatgggcaggaagcaccgagggagttgggccctagcttccccaaatcagtagcttgaagaaaggcaaaggagacacctgttccttcccaaccaccgagcttcaatgaggaccccagccccacttccctggaactgccgaggactctgtttggcggggccagtcgagcagcctgtgtggaaagacaggagtgagatctggactcaccaaatccctgaggatagatggcacccatggcccccacccacggaaggacttgagttgtttacaagccctgcactgaggcagattggtgctgttcgcagagtaggcctttgcccgggggcagacttagaaggaaggggagagacaaagggggactgagtttcatccccagaagtttctcagctcctttgacagacattcaagggcaggagggagccccaaagcataaccagtggccagaggagtgggagggcctgaggcatcacatcttgcagatcagaatgggatggaatccaccaggctccagctcatccctccaaggccctgtctctgcgcacagcaaccatggacatgggagaaagggatgggagccacagtgcccttcactctctcctggaaaccaactgtaagctggtgggctcaacctgtgggaggttaagaggagtcccttctgggttgactccaagagccaaggagatggcagaccctgggctaggaaccatatggaggtgactttgaggccacagctgtccctaggtgatcacagaacttagctcctttaacaacaggacaatggttttttaccctagatgttcccaccttcagtgctccacgccctccatagaccttcagagaaggtgaaaccaggttatctgggaatctttccagcccgcaggtcgccacggccatccctttgctcccagcctggctccatcagcctccagcttcctttcttcattctgtccttcagggaaggcagaagaaacattggaaagcatctagtccagtgggaagccaggggttggagaaggtgctacatccctcttcccatcaatatcctaaatgtgggggagggcccagagaatggcacccaagagcctgcggggatgcccatcccacacaccccacccagctgttctaaccctgctatccacagccctggaggaactggggctcctggaaggaggaggaggctctccactgtccaccctaacacataccctcccacccaccttccagacccccttggttggcaccctctcctccggttccctctcaccccatggctgtgaatgacaggacaggtcacacgtgtgttttccattgggtttaatttaatggacgtgcagtttcatttgtaaattgtgcattggccacctccttcagtggcaggatgtgagtggctacctggctcaactggaggggaccccttgggccctctggggcttcccctcccccacctggttggggtagagcaaaaggatggtcactcttccgaggtctccctgaaatgaatgtatttctcccccaaaagagctgatatttaatgttttaataaggatttttgagaaacaaataaccttatttataatctgggtgatccaatcattttttactcccttttgatgccatacatagaggaaagtctagcttttttggcgtgagacttttgcaatgtgcagtgggataaaatgcatttccttttctggttcgtttttcttgttaacacgcgcacacagacacacacacacaccgttccactcaccacctggacaggcgtcccccagcacggacacactggcacacaggtgcccacatctcttcctctcagcccctccacctgcctaatgttatgcaacctccttctgatgtatccaccaaaccagtactgaatgtggccgagacgttttcagtaaatcttattacctaccgtaa

SEQ ID NO: 163978 - DNA, 545 bp, Homo sapiens
  Payload ID: 12286
  Gene Symbol: PKNOX2
  Gene Name: PBX/knotted 1 homeobox 2
  ENST ID: ENST00000527238
  CDS Start-End: 429-545
gtgttgtcacgccggtgtcagtctgatgaagattggcatcaggtgaagtctggagcaggacttctgaggctttctatcctccatgctgctcactagaaaaggggctgtgaactattgcatctacagacagtcagagtgcccgcaagaaatcaggcaatgagcgtaaaaacaacagactcgatccaccccgctcgaccagatcttgatgggaacctatgctcgaagggtgctttggctctagcagacaggaagaaattctggcccagctggaagtagaaagaggggagtgagtctcctgaggaccatctcagaggccccgggatcacccgaacatatgccatgataagggctggatctgttatggtgagattgggccccaactccaaaggaccttgcccaggattttgtcctccatgtgaatcaatcccatgatgcaacatgcctccccagcccccgctctgacgatgatggccacgcagaatgtcccgcccccaccctaccaggacagcccacagatgacggcaaccgcccagccaccctccaag

SEQ ID NO: 163979 - DNA, 521 bp, Homo sapiens
  Payload ID: 12286
  Gene Symbol: PKNOX2
  Gene Name: PBX/knotted 1 homeobox 2
  ENST ID: ENST00000531212
  CDS Start-End: 400-521
attgccaaatgagcgacactaacaagagtgatgctctcagaggaaggacagactgagtggactgcaaggataggggagacttctggaagaggtggatggtgtggcagacccttgacactcattccccttcagcaggcttggaatgtggggatgactatccccattttcacatatggcaaaggcccaagccacacagctggtgaagtctggagcaggacttctgaggctttctatcctccatgctgctcactagaaaaggggctgtgaactgtgctttggctctagcagacaggaagaaattctggcccagctggaagtagaaagaggggagtgagtctcctgaggaccatctcagaggccccgggatcacccgaacagtcctccatgtgaatcaatcccatgatgcaacatgcctccccagcccccgctctgacgatgatggccacgcagaatgtcccgcccccaccctaccaggacagcccacagatgacggcaaccgcccagccaccctccaaggccca

SEQ ID NO: 163980 - DNA, 1654 bp, Homo sapiens
  Payload ID: 12286
  Gene Symbol: PKNOX2
  Gene Name: PBX/knotted 1 homeobox 2
  ENST ID: ENST00000532623
  CDS Start-End: 224-346
agtctgatgaagattggcatcaggtgaagtctggagcaggacttctgaggctttctatcctccatgctgctcactagaaaaggggctgtgaactgtgctttggctctagcagacaggaagaaattctggcccagctggaagtagaaagaggggagtgagtctcctgaggaccatctcagaggccccgggatcacccgaacagtcctccatgtgaatcaatcccatgatgcaacatgcctccccagcccccgctctgacgatgatggccacgcagaatgtcccgcccccaccctaccaggacagcccacaggcaccctcttttcccgctcctgacgctgctgtttgagaaatgtgaacaggccacccagggctctgagtgcatcacctccgccagctttgatgtggacatcgagaactttgtccaccagcaggaacaggagcacaaacccttcttcagcgatgacccagaactggacaatctgatggtgaaggcaatccaggtcctgagaatccacctgctggagctggagaaagtcaatgaactctgcaaggacttttgtaaccgttacatcacctgcctcaaaaccaagatgcacagcgacaacctgctcaggaatgatctaggggggccctactcccccaaccagccctccatcaaccttcactcacaggacctcctgcagaattcccccaattccatgtccggagtctccaataacccccaggggattgtggtcccagcctcagcgctccagcagggcaacatcgccatgacaaccgtcaactcacaagttgtgtcaggtggagccttataccaaccggttaccatggtaacctcccagggtcaggtggtcacccaagcaatcccccagggagccatccagatccagaacacacaggttaaccttgacctcacctccctcctggacaatgaggataagaagtccaagaacaaacgaggagtcttgcccaagcatgccaccaatataatgcgttcttggctcttccagcatctcatgcacccctaccccacggaggatgagaagaggcagatcgcagcccagaccaacctcaccctcctgcaagtaaacaactggttcatcaatgcccggaggcgcatcctgcagcccatgcttgatgccagcaacccagatcctgcccccaaagccaagaagatcaagtctcagcaccggcccacccaaagattctggcccaactccatcgctgcgggggtgctgcagcagcagggcggtgccccagggacaaaccccgatggttccatcaacttggacaacctgcagtccctgtcctcagacagtgccaccatggccatgcagcaggctatgatggctgcacacgatgactcattggatgggacagaagaagaggatgaggatgagatggaagaggaggaggaggaggagctggaggaggaggtcgacgagctgcagacgacaaatgtcagcgacctgggcttggaacacagtgactccctggagtagtcgggcagcccagatggcactgatcactgagcaggagaggagtgtcgccgggaggccttcagggtgggggggaaggggacatgggcaggaagcaccgagggagttgggccctagcttccccaaatcagtagcttgaagaaaggcaaaggaga

SEQ ID NO: 163981 - DNA, 554 bp, Homo sapiens
  Payload ID: 12286
  Gene Symbol: PKNOX2
  Gene Name: PBX/knotted 1 homeobox 2
  ENST ID: ENST00000558705
  CDS Start-End: 260-554
tatctcccaggtttgctgctggggtggccgcagaaccgggagtcggtcacagagttcacagacgaggtcacatggaggagaagcctggtgccaggaacaagctaggagtaactggaccacgatgacgcctgtgctttggctctagcagacaggaagaaattctggcccagctggaagtagaaagaggggagtgagtctcctgaggaccatctcagaggccccgggatcacccgaacagtcctccatgtgaatcaatcccatgatgcaacatgcctccccagcccccgctctgacgatgatggccacgcagaatgtcccgcccccaccctaccaggacagcccacagatgacggcaaccgcccagccaccctccaaggcccaggctgtccacatctctgccccctcagctgctgccagcacacctgtgcccagtgcccccatcgacccccaggcccagctggaggctgacaagcgagctgtatacaggcaccctcttttcccgctcctgacgctgctgtttgagaaatgtgaacaggccacccagggctctgagt

SEQ ID NO: 163982 - DNA, 1966 bp, Homo sapiens
  Payload ID: 12287
  Gene Symbol: PSIP1
  Gene Name: PC4 and SFRS1 interacting protein 1
  Uniprot ID: O75475
  ENST ID: ENST00000380715
  CDS Start-End: 314-1303
gccgagcgggagccgcgcgggagcagcgcagctacggcggcggcagcggcggcgcggttgcgattccgagccgttgagacgcctctgcggcagctggtggcgcaggtggcttgcgtggacgcgggtagaggcgaccggccagcaaccgcagcgtcggcgcccgcggccccggcaggcgcgtcgggacgccccgaggcatcctcccccgcccgcgggcccggtagctgggcccgcgtccgccgcccgcatccccgcgccgccgcatctcctcgccgcctcccgggcttcggacccccggtctcgcccccgaaacatgactcgcgatttcaaacctggagacctcatcttcgccaagatgaaaggttatccccattggccagctcgagtagacgaagttcctgatggagctgtaaagccacccacaaacaaactacccattttcttttttggaactcatgagactgcttttttaggaccaaaggatatatttccttactcagaaaataaggaaaagtatggcaaaccaaataaaagaaaaggttttaatgaaggtttatgggagatagataacaatccaaaagtgaaattttcaagtcaacaggcagcaactaaacaatcaaatgcatcatctgatgttgaagttgaagaaaaggaaactagtgtttcaaaggaagataccgaccatgaagaaaaagccagcaatgaggatgtgactaaagcagttgacataactactccaaaagctgccagaagggggagaaagagaaaggcagaaaaacaagtagaaactgaggaggcaggagtagtgacaacagcaacagcatctgttaatctaaaagtgagtcctaaaagaggacgacctgcagctacagaagtcaagattccaaaaccaagaggcagacccaaaatggtaaaacagccctgtccttcagagagtgacatcattactgaagaggacaaaagtaagaaaaaggggcaagaggaaaaacaacctaaaaagcagcctaagaaggatgaagagggccagaaggaagaagataagccaagaaaagagccggataaaaaagaggggaagaaagaagttgaatcaaaaaggaaaaatttagctaaaacaggggttacttcaacctccgattctgaagaagaaggagatgatcaagaaggtgaaaagaagagaaaaggtgggaggaactttcagactgctcacagaaggaatatgctgaaaggccaacatgagaaagaagcagcagatcgaaaacgcaagcaagaggaacaaatggaaactgagcattttgctctgtaaagcatttcagatgcagcttgtgtgaaatgcattatgcaaaataaagtttattgtattgtattcccagccaaacaacatgtaatctacagtaataaaaaatatatctcattttgggctcaaagcattaatccagttactgaaaagagaatacaagtggagcaaacaagagatgaagatcttgatacagactcattggactgaatttcccccttccccccattgatggaagaatgttccagattctaaattgaggacttcattattaatggcattactgtgttatgattaacaaatttcctgtaaggtacacactacatactaaggtcggccatcattcctgttttttttttttttttttttttttaaccaagcttaaaatgaagctttgtgtttgaaagtaataacaagctcagacgaagatggtggttgtacattattcatctagaaaatataaaaattcattttgttttgaagctagttattaaactggaatagcagttatatccctgagaatggggcccttctcttgacattcctttgttgtttaattctttagaatcttaataaatgtttttttaatcctgagagattaaacagtagtagacttgttaagaatgaaactgtaaccaaaattttaaaataaagttttttttaaaaaaaaaa

SEQ ID NO: 163983 - DNA, 1889 bp, Homo sapiens
  Payload ID: 12287
  Gene Symbol: PSIP1
  Gene Name: PC4 and SFRS1 interacting protein 1
  Uniprot ID: O75475
  ENST ID: ENST00000380716
  CDS Start-End: 317-1318
ggcgccgagcgggagccgcgcgggagcagcgcagctacggcggcggcagcggcggcgcggttgcgattccgagccgttgagacgcctctgcggcagctggtggcgcaggtggcttgcgtggacgcgggtagaggcgaccggccagcaaccgcagcgtcggcgcccgcggccccggcaggcgcgtcgggacgccccgaggcatcctcccccgcccgcgggcccggtagctgggcccgcgtccgccgcccgcatccccgcgccgccgcatctcctcgccgcctcccgggcttcggacccccggtctcgcccccgaaacatgactcgcgatttcaaacctggagacctcatcttcgccaagatgaaaggttatccccattggccagctcgagtagacgaagttcctgatggagctgtaaagccacccacaaacaaactacccattttcttttttggaactcatgagactgcttttttaggaccaaaggatatatttccttactcagaaaataaggaaaagtatggcaaaccaaataaaagaaaaggttttaatgaaggtttatgggagatagataacaatccaaaagtgaaattttcaagtcaacaggcagcaactaaacaatcaaatgcatcatctgatgttgaagttgaagaaaaggaaactagtgtttcaaaggaagataccgaccatgaagaaaaagccagcaatgaggatgtgactaaagcagttgacataactactccaaaagctgccagaagggggagaaagagaaaggcagaaaaacaagtagaaactgaggaggcaggagtagtgacaacagcaacagcatctgttaatctaaaagtgagtcctaaaagaggacgacctgcagctacagaagtcaagattccaaaaccaagaggcagacccaaaatggtaaaacagccctgtccttcagagagtgacatcattactgaagaggacaaaagtaagaaaaaggggcaagaggaaaaacaacctaaaaagcagcctaagaaggatgaagagggccagaaggaagaagataagccaagaaaagagccggataaaaaagaggggaagaaagaagttgaatcaaaaaggaaaaatttagctaaaacaggggttacttcaacctccgattctgaagaagaaggagatgatcaagaaggtgaaaagaagagaaaaggtgggaggaactttcagactgctcacagaaggaatatgctgaaaggccaacatgagaaagaagcagcagatcgaaaacgcaagcaagaggaacaaatggaaactgagcaccaaacaacatgtaatctacagtaataaaaaatatatctcattttgggctcaaagcattaatccagttactgaaaagagaatacaagtggagcaaacaagagatgaagatcttgatacagactcattggactgaatttcccccttccccccattgatggaagaatgttccagattctaaattgaggacttcattattaatggcattactgtgttatgattaacaaatttcctgtaaggtacacactacatactaaggtcggccatcattcctgttttttttttttttttttttttttaaccaagcttaaaatgaagctttgtgtttgaaagtaataacaagctcagacgaagatggtggttgtacattattcatctagaaaatataaaaattcattttgttttgaagctagttattaaactggaatagcagttatatccctgagaatggggcccttctcttgacattcctttgttgtttaattctttagaatcttaataaatgtttttttaatcctgagagattaaacagtagtagacttgttaagaatgaaactgtaaccaaaattttaaaataaagttttttttaaaaaaaaaa

SEQ ID NO: 163984 - DNA, 3391 bp, Homo sapiens
  Payload ID: 12287
  Gene Symbol: PSIP1
  Gene Name: PC4 and SFRS1 interacting protein 1
  Uniprot ID: O75475
  ENST ID: ENST00000380733
  CDS Start-End: 345-1937
agttggtcgcgccccagtgctagcgggcgccgagcgggagccgcgcgggagcagcgcagctacggcggcggcagcggcggcgcggttgcgattccgagccgttgagacgcctctgcggcagctggtggcgcaggtggcttgcgtggacgcgggtagaggcgaccggccagcaaccgcagcgtcggcgcccgcggccccggcagcaggcgcgtcgggacgccccgaggcatcctcccccgcccgcgggcccggtagctgggcccgcgtccgccgcccgcatccccgcgccgccgcatctcctcgccgcctcccgggcttcggacccccggtctcgcccccgaaacatgactcgcgatttcaaacctggagacctcatcttcgccaagatgaaaggttatccccattggccagctcgagtagacgaagttcctgatggagctgtaaagccacccacaaacaaactacccattttcttttttggaactcatgagactgcttttttaggaccaaaggatatatttccttactcagaaaataaggaaaagtatggcaaaccaaataaaagaaaaggttttaatgaaggtttatgggagatagataacaatccaaaagtgaaattttcaagtcaacaggcagcaactaaacaatcaaatgcatcatctgatgttgaagttgaagaaaaggaaactagtgtttcaaaggaagataccgaccatgaagaaaaagccagcaatgaggatgtgactaaagcagttgacataactactccaaaagctgccagaagggggagaaagagaaaggcagaaaaacaagtagaaactgaggaggcaggagtagtgacaacagcaacagcatctgttaatctaaaagtgagtcctaaaagaggacgacctgcagctacagaagtcaagattccaaaaccaagaggcagacccaaaatggtaaaacagccctgtccttcagagagtgacatcattactgaagaggacaaaagtaagaaaaaggggcaagaggaaaaacaacctaaaaagcagcctaagaaggatgaagagggccagaaggaagaagataagccaagaaaagagccggataaaaaagaggggaagaaagaagttgaatcaaaaaggaaaaatttagctaaaacaggggttacttcaacctccgattctgaagaagaaggagatgatcaagaaggtgaaaagaagagaaaaggtgggaggaactttcagactgctcacagaaggaatatgctgaaaggccaacatgagaaagaagcagcagatcgaaaacgcaagcaagaggaacaaatggaaactgagcagcagaataaagatgaaggaaagaagccagaagttaagaaagtggagaagaagcgagaaacatcaatggattctcgacttcaaaggatacatgctgagattaaaaattcactcaaaattgataatcttgatgtgaacagatgcattgaggccttggatgaacttgcttcacttcaggtcacaatgcaacaagctcagaaacacacagagatgattactacactgaaaaaaatacggcgattcaaagttagtcaggtaatcatggaaaagtctacaatgttgtataacaagtttaagaacatgttcttggttggtgaaggagattccgtgatcacccaagtgctgaataaatctcttgctgaacaaagacagcatgaggaagcgaataaaaccaaagatcaagggaagaaagggccaaacaaaaagctagagaaggaacaaacagggtcaaagactctaaatggaggatctgatgctcaagatggtaatcagccacaacataacggggagagcaatgaagacagcaaagacaaccatgaagccagcacgaagaaaaagccatccagtgaagagagagagactgaaatatctctgaaggattctacactagataactaggttgacatacctggaatatagagaacacttgagaagtttgtaatggttttcatttgaaatagactgctgaaagttttaaatttttataagcataggtttgatgttgaaaacttgttttgagggagaaaatccctttgttttaaagtaaagtaaacattatcgctaagtgtacttgtgcagtattaacagctacattatacagtaaatgtgggataaaatccatttagaaaatgttaaactgcttttccagacatggttgtagcatattttcaattagtgtgtgtatgttaatgtgtaattgatagtagaacaaagttacatttttaaaactgctacttgtataaaccttgcctcttttcccaaatactgtgggttttgtgcatagtttttacaaaccttggatttaccagactgtcttttcactgtttgtgggttttgtagaagttacacatttttatggtagataaaatgttacttctatacaagtactcactccctttttatcaaaagttaattttaatctcacagtctacattgtgctacattatccagcttctttggaacaatgtgtgctctgtatggttttttttggtatgacaactaattaagcaactgacatggaactgagaattctacaaactataaaacattaatttttgaaggtaatttagttttgtggctgggcattcagtgaagtcttaggacttctttgcagacaactgactgggtatatataggaatgaatctggctttagggttaaatcatttaaggtccttttataggcaggcactagtaactaaaactgaaaactaagtaagtttatttttgaggaatgttgttaaaaatgtctttaggaagtcactaaaacttaattggaagaaaaaatcatgatgcttatacaataaatatgaataaatgttatataaggaaactcacctatttgaaatcatggctatattgtttttattttctagattccaaaaatacaaacactagttgttccagcattgtactttgataagtctgtacattgacgtgtatggactaaatccagggtaaaatcaatgttacaaaatttaagggtatgttaactaaaggatagcatttctaagatattttgaatattagggtcatttggcacttctcagcaagtaggatacttctcatgttttgaaattatatgaatatggaaaaaaatggcttaagaccagcgtctctgtatgacattgtgtggttgaccctctgagataactgttttcatctacagaattgcatttttgcttttaaagaggtcttataatggaactaggaatcaccgttttgagagaacctgcatatataccagtcattatctgtttggtccttatacagttttaacttacttagatttattctagttaagccataagttcaacgtgtaaacttgttttcattaaagaatttttctatcaaa

SEQ ID NO: 163985 - DNA, 3364 bp, Homo sapiens
  Payload ID: 12287
  Gene Symbol: PSIP1
  Gene Name: PC4 and SFRS1 interacting protein 1
  Uniprot ID: O75475
  ENST ID: ENST00000380738
  CDS Start-End: 318-1910
gggcgccgagcgggagccgcgcgggagcagcgcagctacggcggcggcagcggcggcgcggttgcgattccgagccgttgagacgcctctgcggcagctggtggcgcaggtggcttgcgtggacgcgggtagaggcgaccggccagcaaccgcagcgtcggcgcccgcggccccggcaggcgcgtcgggacgccccgaggcatcctcccccgcccgcgggcccggtagctgggcccgcgtccgccgcccgcatccccgcgccgccgcatctcctcgccgcctcccgggcttcggacccccggtctcgcccccgaaacatgactcgcgatttcaaacctggagacctcatcttcgccaagatgaaaggttatccccattggccagctcgagtagacgaagttcctgatggagctgtaaagccacccacaaacaaactacccattttcttttttggaactcatgagactgcttttttaggaccaaaggatatatttccttactcagaaaataaggaaaagtatggcaaaccaaataaaagaaaaggttttaatgaaggtttatgggagatagataacaatccaaaagtgaaattttcaagtcaacaggcagcaactaaacaatcaaatgcatcatctgatgttgaagttgaagaaaaggaaactagtgtttcaaaggaagataccgaccatgaagaaaaagccagcaatgaggatgtgactaaagcagttgacataactactccaaaagctgccagaagggggagaaagagaaaggcagaaaaacaagtagaaactgaggaggcaggagtagtgacaacagcaacagcatctgttaatctaaaagtgagtcctaaaagaggacgacctgcagctacagaagtcaagattccaaaaccaagaggcagacccaaaatggtaaaacagccctgtccttcagagagtgacatcattactgaagaggacaaaagtaagaaaaaggggcaagaggaaaaacaacctaaaaagcagcctaagaaggatgaagagggccagaaggaagaagataagccaagaaaagagccggataaaaaagaggggaagaaagaagttgaatcaaaaaggaaaaatttagctaaaacaggggttacttcaacctccgattctgaagaagaaggagatgatcaagaaggtgaaaagaagagaaaaggtgggaggaactttcagactgctcacagaaggaatatgctgaaaggccaacatgagaaagaagcagcagatcgaaaacgcaagcaagaggaacaaatggaaactgagcagcagaataaagatgaaggaaagaagccagaagttaagaaagtggagaagaagcgagaaacatcaatggattctcgacttcaaaggatacatgctgagattaaaaattcactcaaaattgataatcttgatgtgaacagatgcattgaggccttggatgaacttgcttcacttcaggtcacaatgcaacaagctcagaaacacacagagatgattactacactgaaaaaaatacggcgattcaaagttagtcaggtaatcatggaaaagtctacaatgttgtataacaagtttaagaacatgttcttggttggtgaaggagattccgtgatcacccaagtgctgaataaatctcttgctgaacaaagacagcatgaggaagcgaataaaaccaaagatcaagggaagaaagggccaaacaaaaagctagagaaggaacaaacagggtcaaagactctaaatggaggatctgatgctcaagatggtaatcagccacaacataacggggagagcaatgaagacagcaaagacaaccatgaagccagcacgaagaaaaagccatccagtgaagagagagagactgaaatatctctgaaggattctacactagataactaggttgacatacctggaatatagagaacacttgagaagtttgtaatggttttcatttgaaatagactgctgaaagttttaaatttttataagcataggtttgatgttgaaaacttgttttgagggagaaaatccctttgttttaaagtaaagtaaacattatcgctaagtgtacttgtgcagtattaacagctacattatacagtaaatgtgggataaaatccatttagaaaatgttaaactgcttttccagacatggttgtagcatattttcaattagtgtgtgtatgttaatgtgtaattgatagtagaacaaagttacatttttaaaactgctacttgtataaaccttgcctcttttcccaaatactgtgggttttgtgcatagtttttacaaaccttggatttaccagactgtcttttcactgtttgtgggttttgtagaagttacacatttttatggtagataaaatgttacttctatacaagtactcactccctttttatcaaaagttaattttaatctcacagtctacattgtgctacattatccagcttctttggaacaatgtgtgctctgtatggttttttttggtatgacaactaattaagcaactgacatggaactgagaattctacaaactataaaacattaatttttgaaggtaatttagttttgtggctgggcattcagtgaagtcttaggacttctttgcagacaactgactgggtatatataggaatgaatctggctttagggttaaatcatttaaggtccttttataggcaggcactagtaactaaaactgaaaactaagtaagtttatttttgaggaatgttgttaaaaatgtctttaggaagtcactaaaacttaattggaagaaaaaatcatgatgcttatacaataaatatgaataaatgttatataaggaaactcacctatttgaaatcatggctatattgtttttattttctagattccaaaaatacaaacactagttgttccagcattgtactttgataagtctgtacattgacgtgtatggactaaatccagggtaaaatcaatgttacaaaatttaagggtatgttaactaaaggatagcatttctaagatattttgaatattagggtcatttggcacttctcagcaagtaggatacttctcatgttttgaaattatatgaatatggaaaaaaatggcttaagaccagcgtctctgtatgacattgtgtggttgaccctctgagataactgttttcatctacagaattgcatttttgcttttaaagaggtcttataatggaactaggaatcaccgttttgagagaacctgcatatataccagtcattatctgtttggtccttatacagttttaacttacttagatttattctagttaagccataagttcaacgtgtaaacttgttttcattaaagaatttttctatcaaa

SEQ ID NO: 163986 - DNA, 1664 bp, Homo sapiens
  Payload ID: 12287
  Gene Symbol: PSIP1
  Gene Name: PC4 and SFRS1 interacting protein 1
  Uniprot ID: O75475
  ENST ID: ENST00000397519
  CDS Start-End: 102-1103
cgggcccggtagctgggcccgcgtccgccgcccgcatccccgcgccgccgcatctcctcgccgcctcccgggcttcggacccccggtctcgcccccgaaacatgactcgcgatttcaaacctggagacctcatcttcgccaagatgaaaggttatccccattggccagctcgagtagacgaagttcctgatggagctgtaaagccacccacaaacaaactacccattttcttttttggaactcatgagactgcttttttaggaccaaaggatatatttccttactcagaaaataaggaaaagtatggcaaaccaaataaaagaaaaggttttaatgaaggtttatgggagatagataacaatccaaaagtgaaattttcaagtcaacaggcagcaactaaacaatcaaatgcatcatctgatgttgaagttgaagaaaaggaaactagtgtttcaaaggaagataccgaccatgaagaaaaagccagcaatgaggatgtgactaaagcagttgacataactactccaaaagctgccagaagggggagaaagagaaaggcagaaaaacaagtagaaactgaggaggcaggagtagtgacaacagcaacagcatctgttaatctaaaagtgagtcctaaaagaggacgacctgcagctacagaagtcaagattccaaaaccaagaggcagacccaaaatggtaaaacagccctgtccttcagagagtgacatcattactgaagaggacaaaagtaagaaaaaggggcaagaggaaaaacaacctaaaaagcagcctaagaaggatgaagagggccagaaggaagaagataagccaagaaaagagccggataaaaaagaggggaagaaagaagttgaatcaaaaaggaaaaatttagctaaaacaggggttacttcaacctccgattctgaagaagaaggagatgatcaagaaggtgaaaagaagagaaaaggtgggaggaactttcagactgctcacagaaggaatatgctgaaaggccaacatgagaaagaagcagcagatcgaaaacgcaagcaagaggaacaaatggaaactgagcaccaaacaacatgtaatctacagtaataaaaaatatatctcattttgggctcaaagcattaatccagttactgaaaagagaatacaagtggagcaaacaagagatgaagatcttgatacagactcattggactgaatttcccccttccccccattgatggaagaatgttccagattctaaattgaggacttcattattaatggcattactgtgttatgattaacaaatttcctgtaaggtacacactacatactaaggtcggccatcattcctgttttttttttttttttttttttttaaccaagcttaaaatgaagctttgtgtttgaaagtaataacaagctcagacgaagatggtggttgtacattattcatctagaaaatataaaaattcattttgttttgaagctagttattaaactggaatagcagttatatccctgagaatggggcccttctcttgacattcctttgttgtttaattctttagaatcttaataaatgtttttttaatcctgagagattaaacagtagtagacttgttaagaatgaaactgtaaccaaaattttaaaataaagtttttttt

SEQ ID NO: 163987 - DNA, 306 bp, Homo sapiens
  Payload ID: 12287
  Gene Symbol: PSIP1
  Gene Name: PC4 and SFRS1 interacting protein 1
  ENST ID: ENST00000481862
  CDS Start-End: 1-198
aagagaaaaggtgggaggaactttcagactgctcacagaaggaatatgctgaaaggccaacatgagaaagaagcagcagatcgaaaacgcaagcaagaggaacaaatggaaactgagcacattaatccagttactgaaaagagaatacaagtggagcaaacaagagatgaagatcttgatacagactcattggactgaatttcccccttccccccattgatggaagaatgttccagattctaaattgaggacttcattattaatggcattactgtgttatgattaacaaatttcctgtaaggtaca

SEQ ID NO: 163988 - DNA, 1706 bp, Homo sapiens
  Payload ID: 12288
  Gene Symbol: PCED1A
  Gene Name: PC-esterase domain containing 1A
  Uniprot ID: Q9H1Q7
  ENST ID: ENST00000356872
  CDS Start-End: 347-1558
gatcccgcccccctcggagcgcccctgtggtctgacttcagcagcactttccggcaggagactgggcactcgctgtcacccgcgagctgcctccctcagcgagatctgagcatctttccggaggctaacagacctgggcttcggggtgaccactgtgcttgcctcagtttccttttctggagcaggggaaggcccggctccctgcccaaaggcggctgtgcgctaagtggcagacgctcggggagagccggcgcggggcggaccccagcgccagtagtgacaggggcgaacgccgccgggagactccagccggcgggcgagcaggcctgtcgttgctggtggcggcatggtcttctgtctgtcgagcgaggagccgcgccgcccgctgcgaagcgacatggtccacttccaggcctcggaagtccagcagctgctacacaacaagttcgtggtcatcttgggggactccattcagagggctgtgtacaaggacctggtgctcttgctccagaaagactcactgctcacagctgcccagctgaaagccaagtaccttgaggatgttctggaagagctgacatatggacctgccccggacctggtgatcatcaactcctgcctctgggatctctccagatatggtcgctgctcaatggagagctaccgggagaacctggagcgggtgtttgtgcgcatggaccaagtattgccagactcctgcctgctggtgtggaacatggcgatgcccctcggggaacgtatcactgggggtttcctcctgccagagctccagcccctggcaggctccctgcggcgggatgtggttgaagggaacttctacagtgctacgctggccggggaccactgctttgatgtcctagacctccactttcacttccggcatgcagtacagcaccgtcatcgggatggtgtccactgggaccagcatgcacaccgccacctctcacacctgcttctgacccatgtggctgacgcctggggcgtggagctgcccaagcgtggctatccccctgacccgtggattgaggactgggcagagatgaatcatccattccagggaagccataggcagaccccagacttcggggagcacctggccttgctcccacccccaccttcttctttgcctcctcccatgccttttccctacccgcttcctcagccctcgccacctcccctcttcccacccctgccccaggataccccttttttcccaggccagcccttcccaccccatgaattcttcaactataatccagtggaggacttctcgatgccaccccacttaggatgtggccctggagtgaactttgtgcctggccctctgccacctccaatccctggccctaatccccatggtcagcactggggcccagtggtccaccgggggatgccacgctatgttcctaacagcccctaccatgtgcggagaatgggggggccctgcaggcagcggctcagacactcagagagactgatccacacatacaaactggacagacggcctcctgcccattcggggacatggcctgggtagactggatcttgggctgggactggatgtgccaatggcccttcagggcctgcctggcacctcaggtactgggctagggtgtctgctatgcctggtattgttcttgtccattgctgtcaccaataaaggcatggaagaacagagtgacaaa

SEQ ID NO: 163989 - DNA, 2016 bp, Homo sapiens
  Payload ID: 12288
  Gene Symbol: PCED1A
  Gene Name: PC-esterase domain containing 1A
  Uniprot ID: Q9H1Q7
  ENST ID: ENST00000360652
  CDS Start-End: 504-1868
gtccgggtcacgtggcgaggccgccgccgcggccatcaccactgtgggcagcctcacttggctgccgccccgagaccccagcccgtacctgggcttcgcgcccgccaagtgggcccagccctggctcctgcgccctgtggcggccacctccatcgccttgctttcccttcgggcactgggggtcgctcagggcgggacatgggtgaacggaagtggaagctgtgagcgtcgcagcccgaggcgccgaggcctgaggcgccgtcggggccacagcgacgctcgcatggagagcgctgggcgctgggctgtgcaccgacggctaacctggacccacggtctctgcggggcgggagctttgcagaaccgactggccgactggggcgcgggaacatgaggcttggctaggagcccgctgcgggccaggcgcgcggtgcgcaggcatacccgggtcgcgggtgaacaccgcggagccccgggacttgcctgtcgttgctggtggcggcatggtcttctgtctgtcgagcgaggagccgcgccgcccgctgcgaagcgacatggtccacttccaggcctcggaagtccagcagctgctacacaacaagttcgtggtcatcttgggggactccattcagagggctgtgtacaaggacctggtgctcttgctccagaaagactcactgctcacagctgcccagctgaaagccaagggggagctgagctttgaacaggaccagctggtggctgggggccagctgggcgagctgcacaacgggacacagtatcgtgaggtccgccagttctgctcgggctctggccaccaccttgtgcgcttctacttcctcactcgtgtttactccgagtaccttgaggatgttctggaagagctgacatatggacctgccccggacctggtgatcatcaactcctgcctctgggatctctccagatatggtcgctgctcaatggagagctaccgggagaacctggagcgggtgtttgtgcgcatggaccaagtattgccagactcctgcctgctggtgtggaacatggcgatgcccctcggggaacgtatcactgggggtttcctcctgccagagctccagcccctggcaggctccctgcggcgggatgtggttgaagggaacttctacagtgctacgctggccggggaccactgctttgatgtcctagacctccactttcacttccggcatgcagtacagcaccgtcatcgggatggtgtccactgggaccagcatgcacaccgccacctctcacacctgcttctgacccatgtggctgacgcctggggcgtggagctgcccaagcgtggctatccccctgacccgtggattgaggactgggcagagatgaatcatccattccagggaagccataggcagaccccagacttcggggagcacctggccttgctcccacccccaccttcttctttgcctcctcccatgccttttccctacccgcttcctcagccctcgccacctcccctcttcccacccctgccccaggataccccttttttcccaggccagcccttcccaccccatgaattcttcaactataatccagtggaggacttctcgatgccaccccacttaggatgtggccctggagtgaactttgtgcctggccctctgccacctccaatccctggccctaatccccatggtcagcactggggcccagtggtccaccgggggatgccacgctatgttcctaacagcccctaccatgtgcggagaatgggggggccctgcaggcagcggctcagacactcagagagactgatccacacatacaaactggacagacggcctcctgcccattcggggacatggcctgggtagactggatcttgggctgggactggatgtgccaatggcccttcagggcctgcctggcacctcaggtactgggctagggtgtctgctatgcctggtattgttcttgtccattgctgtcaccaataaaggcatggaagaacagagtgacaaa

SEQ ID NO: 163990 - DNA, 1170 bp, Homo sapiens
  Payload ID: 12288
  Gene Symbol: PCED1A
  Gene Name: PC-esterase domain containing 1A
  ENST ID: ENST00000448755
  CDS Start-End: 483-1170
cgccgccgcggccatcaccactgtgggcagcctcacttggctgccgccccgagaccccagcccgtacctgggcttcgcgcccgccaagtgggcccagccctggctcctgcgccctgtggcggccacctccatcgccttgctttcccttcgggcactgggggtcgctcagggcgggacatgggtgaacggaagtggaagctgtgagcgtcgcagcccgaggcgccgaggcctgaggcgccgtcggggccacagcgacgctcgcatggagagcgctgggcgctgggctgtgcaccgacggctaacctggacccacggtctctgcggggcgggagctttgcagaaccgactggccgactggggcgcgggaacatgaggcttggctaggagcccgctgcgggccaggcgcgcggtgcgcaggcatacccgggtcgcgggtgaacaccgcggagccccgggacttgcctgtcgttgctggtggcggcatggtcttctgtctgtcgagcgaggagccgcgccgcccgctgcgaagcgacatggtccacttccaggcctcggaagtccagcagctgctacacaacaagttcgtggtcatcttgggggactccattcagagggctgtgtacaaggacctggtgctcttgctccagaaagactcactgctcacagctgcccagctgaaagccaagtaccttgaggatgttctggaagagctgacatatggacctgccccggacctggtgatcatcaactcctgcctctgggatctctccagatatggtcgctgctcaatggagagctaccgggagaacctggagcgggtgtttgtgcgcatggaccaagtattgccagactcctgcctgctggtgtggaacatggcgatgcccctcggggaacgtatcactgggggtttcctcctgccagagctccagcccctggcaggctccctgcggcgggatgtggttgaagggaacttctacagtgctacgctggccggggaccactgctttgatgtcctagacctccactttcacttccggcatgcagtacagcaccgtcatcgggatggtgtccactgggaccagcatgcacaccgccacctctcacacctgcttctgacccatgtggctgacgcctggggcgtggagctgcccaagcgtggctatccccctg

SEQ ID NO: 163991 - DNA, 1187 bp, Homo sapiens
  Payload ID: 12288
  Gene Symbol: PCED1A
  Gene Name: PC-esterase domain containing 1A
  ENST ID: ENST00000439542
  CDS Start-End: 347-1187
gatcccgcccccctcggagcgcccctgtggtctgacttcagcagcactttccggcaggagactgggcactcgctgtcacccgcgagctgcctccctcagcgagatctgagcatctttccggaggctaacagacctgggcttcggggtgaccactgtgcttgcctcagtttccttttctggagcaggggaaggcccggctccctgcccaaaggcggctgtgcgctaagtggcagacgctcggggagagccggcgcggggcggaccccagcgccagtagtgacaggggcgaacgccgccgggagactccagccggcgggcgagcaggcctgtcgttgctggtggcggcatggtcttctgtctgtcgagcgaggagccgcgccgcccgctgcgaagcgacatggtccacttccaggcctcggaagtccagcagctgctacacaacaagttcgtggtcatcttgggggactccattcagagggctgtgtacaaggacctggtgctcttgctccagaaagactcactgctcacagctgcccagctgaaagccaagggggagctgagctttgaacaggaccagctggtggctgggggccagctgggcgagctgcacaacgggacacagtatcgtgaggtccgccagttctgctcgggctctggccaccaccttgtgcgcttctacttcctcactcgtgtttactccgagtaccttgaggatgttctggaagagctgacatatggacctgccccggacctggtgatcatcaactcctgcctctgggatctctccagatatggtcgctgctcaatggagagctaccgggagaacctggagcgggtgtttgtgcgcatggaccaagtattgccagactcctgcctgctggtgtggaacatggcgatgcccctcggggaacgtatcactgggggtttcctcctgccagagctccagcccctggcaggctccctgcggcgggatgtggttgaagggaacttctacagtgctacgctggccggggaccactgctttgatgtcctagacctccactttcacttccggcatgcagtacagcaccgtcatcgggatggtgtccactgggaccagcatgcacaccgccacctctcacacctgcttctgacccatgtggctgacgcctggggcgtggagctgcccaagcgtggctatccccctg

SEQ ID NO: 163992 - DNA, 531 bp, Homo sapiens
  Payload ID: 12288
  Gene Symbol: PCED1A
  Gene Name: PC-esterase domain containing 1A
  ENST ID: ENST00000474714
  CDS Start-End: 1-383
ggcatgcagtacagcaccgtcatcgggatggtgtccactgggaccagcatgcacaccgccacctctcacacctgcttctgacccatgtggctgacgcctggggcgtggagctgcccaagcgtggctatccccctggatgtggccctggagtgaactttgtgcctggccctctgccacctccaatccctggccctaatccccatggtcagcactggggcccagtggtccaccgggggatgccacgctatgttcctaacagcccctaccatgtgcggagaatgggggggccctgcaggcagcggctcagacactcagagagactgatccacacatacaaactggacagacggcctcctgcccattcggggacatggcctgggtagactggatcttgggctgggactggatgtgccaatggcccttcagggcctgcctggcacctcaggtactgggctagggtgtctgctatgcctggtattgttcttgtccattgctgtcaccaataaaggcatggaagaacagagtgacaaa

SEQ ID NO: 163993 - DNA, 1862 bp, Homo sapiens
  Payload ID: 12289
  Gene Symbol: PCED1B
  Gene Name: PC-esterase domain containing 1B
  Uniprot ID: Q96HM7
  ENST ID: ENST00000432328
  CDS Start-End: 264-1562
gccggctctcaactttgaggagtttcaagcagccgcggcggcagcagcagccctggacgcagcagccaagctcttcgctggctcccgggggctctcccgggttcctctcattgcaggctgaaggtaatgagaggccctaagatcccagaggatgccataagaggaaaagtcaggggagtgttgaagactctgcctcctacaaatatccatccgcagagccatcctgtgcaaaggaaggagctaggctgtgcgccctgggcgtcatgatccttctgcgggcctccgaagtgcggcagctgcttcacaataagttcgtggtcatcctgggggactctgtgcatagggcagtatacaaggacctggtgcttctgctgcagaaggaccgcctgctcactcccgggcagcttagagcaaggggggagctgaacttcgaacaagatgagctggtggacggaggccagcggggccacatgcacaacggccttaactaccgtgaggtccgcgagttccgctccgaccaccatctggtacgtttttacttcctcacccgcgtgtactccgattacctccagaccatcttgaaagagctgcagtcgggcgagcacgcccccgacctggtcatcatgaattcctgcctctgggacatctccaggtatggtccgaactcctggagaagctacctggagaacctggagaacctgttccagtgcctgggccaggtgctgcccgagtcttgcctcctggtgtggaacacggccatgcctgtgggcgaggaagtcaccgggggttttcttccgcccaagctccggcggcagaaggccaccttcctgaaaaacgaagtggtcaaagccaacttccacagcgccaccgaggcacgtaaacataacttcgatgtactggacttgcatttccacttccgccacgcgagggagaacctgcactgggacggggtgcactggaatggacgtgtgcaccgctgcctctcccagctgctgctggcccacgtggccgacgcctggggtgtggagctgccccaccgccaccccgtgggcgagtggatcaagaagaaaaaacctggcccgagagtcgaagggccgccccaggccaacagaaatcacccggccttacctctgtccccacccttaccttcccccacataccgccccctgcttgggttcccaccccagcgcttgccgctgctcccgctcctgtccccacagcctcctcctcccattctccatcaccagggaatgccccggttcccacagggtcccccagatgcctgtttttcctcagaccatactttccagtcggatcaattctattgccattcagatgtcccctcatcagcccatgcaggtttcttcgtcgaagacaattttatggttggtcctcagctgcctatgcccttcttccccacaccccgttatcagcggcctgccccagtggtacataggggttttggcaggtatcgtccccgtggcccctatacgccctggggacagcggcctcgaccttcaaagagaagggccccagccaatcctgagccaaggcctcaatagacggacctaggccttatttcctctttatgaacatggattggacagatctgacacttcctttccattgcttggcctgaacagactgaccttgttaacttaagcctggagtccatgcctcgtcttccttttgttcattgctgttaccaagaaagccaaggaagagcagcctgactcattcttcttggctgcagcctcttccccacttcctgggagtgacccagcgttattcctgcctcctcactcctattctctttgcctttgtgtaaaaataaaatggaaataaacaagttgcacagaagt

SEQ ID NO: 163994 - DNA, 2328 bp, Homo sapiens
  Payload ID: 12289
  Gene Symbol: PCED1B
  Gene Name: PC-esterase domain containing 1B
  Uniprot ID: Q96HM7
  ENST ID: ENST00000546455
  CDS Start-End: 732-2030
gccggctctcaactttgaggagtttcaagcagccgcggcggcagcagcagccctggacgcagcagccaagctcttcgctggctcccgggggctctcccgggttcctctcattgcaggctgaaggtaatgagaggccctaagatcccagaggatgccataagaggaaaagtcaggggagtgttgaagactctgcctcctacaaatatccgtgaacataccacaccagcaagaacaataagagccaagggtctgaattgtttaatcaaaggaagagtcaaaataagctacacccagattactgagaaaggtgaaatgaaaacaagctcaaaaccaaattccaggaagatgctgtctttgtattgacttaccatttcatgttttcacacatgtcaaagtcttgaagcttcggtcattagtcttccgcttcctaaagcaagaaactaaatgctgacttgtgtcgtttgccccagatgccaccggaaatgtcatcttctccccagacgctggcttgcaagcacagcagcacccagaggctaacctatttcccctatagcccaagctctgagatctcccgtctggtcacaatgatctacaggagaggaagaaagctatctagggacgagatctagaatcaactgagagagatgcttaaaaatcaccagttactttaatgaccatccgcagagccatcctgtgcaaaggaaggagctaggctgtgcgccctgggcgtcatgatccttctgcgggcctccgaagtgcggcagctgcttcacaataagttcgtggtcatcctgggggactctgtgcatagggcagtatacaaggacctggtgcttctgctgcagaaggaccgcctgctcactcccgggcagcttagagcaaggggggagctgaacttcgaacaagatgagctggtggacggaggccagcggggccacatgcacaacggccttaactaccgtgaggtccgcgagttccgctccgaccaccatctggtacgtttttacttcctcacccgcgtgtactccgattacctccagaccatcttgaaagagctgcagtcgggcgagcacgcccccgacctggtcatcatgaattcctgcctctgggacatctccaggtatggtccgaactcctggagaagctacctggagaacctggagaacctgttccagtgcctgggccaggtgctgcccgagtcttgcctcctggtgtggaacacggccatgcctgtgggcgaggaagtcaccgggggttttcttccgcccaagctccggcggcagaaggccaccttcctgaaaaacgaagtggtcaaagccaacttccacagcgccaccgaggcacgtaaacataacttcgatgtactggacttgcatttccacttccgccacgcgagggagaacctgcactgggacggggtgcactggaatggacgtgtgcaccgctgcctctcccagctgctgctggcccacgtggccgacgcctggggtgtggagctgccccaccgccaccccgtgggcgagtggatcaagaagaaaaaacctggcccgagagtcgaagggccgccccaggccaacagaaatcacccggccttacctctgtccccacccttaccttcccccacataccgccccctgcttgggttcccaccccagcgcttgccgctgctcccgctcctgtccccacagcctcctcctcccattctccatcaccagggaatgccccggttcccacagggtcccccagatgcctgtttttcctcagaccatactttccagtcggatcaattctattgccattcagatgtcccctcatcagcccatgcaggtttcttcgtcgaagacaattttatggttggtcctcagctgcctatgcccttcttccccacaccccgttatcagcggcctgccccagtggtacataggggttttggcaggtatcgtccccgtggcccctatacgccctggggacagcggcctcgaccttcaaagagaagggccccagccaatcctgagccaaggcctcaatagacggacctaggccttatttcctctttatgaacatggattggacagatctgacacttcctttccattgcttggcctgaacagactgaccttgttaacttaagcctggagtccatgcctcgtcttccttttgttcattgctgttaccaagaaagccaaggaagagcagcctgactcattcttcttggctgcagcctcttccccacttcctgggagtgacccagcgttattcctgcctcctcactcctattctctttgcctttgtgtaaaaataaaatggaaataaacaagttgcacagaa

SEQ ID NO: 163995 - DNA, 732 bp, Homo sapiens
  Payload ID: 12289
  Gene Symbol: PCED1B
  Gene Name: PC-esterase domain containing 1B
  ENST ID: ENST00000549630
  CDS Start-End: 230-732
caaagatgtttcctttctttttcaaagcaagaaactagaatgtgtttaatgctaaaaagaaggatccaggccaaggagggtaaagaaaatgcagaatgcaaattatcccctcactgggggatatccgggagcgaagtccctgagctgctgaggaagctttacgcctaaggagccatccgcagagccatcctgtgcaaaggaaggagctaggctgtgcgccctgggcgtcatgatccttctgcgggcctccgaagtgcggcagctgcttcacaataagttcgtggtcatcctgggggactctgtgcatagggcagtatacaaggacctggtgcttctgctgcagaaggaccgcctgctcactcccgggcagcttagagcaaggggggagctgaacttcgaacaagatgagctggtggacggaggccagcggggccacatgcacaacggccttaactaccgtgaggtccgcgagttccgctccgaccaccatctggtacgtttttacttcctcacccgcgtgtactccgattacctccagaccatcttgaaagagctgcagtcgggcgagcacgcccccgacctggtcatcatgaattcctgcctctgggacatctccaggtatggtccgaactcctggagaagctacctggagaacctggagaacctgttccagtgcctgggccaggtgctgcccgagtcttgcctcctggtgtggaacacggccatgcctgt

SEQ ID NO: 163996 - DNA, 723 bp, Homo sapiens
  Payload ID: 12289
  Gene Symbol: PCED1B
  Gene Name: PC-esterase domain containing 1B
  ENST ID: ENST00000548348
  CDS Start-End: 155-723
ccgtctggtcacaatgatctacaggagaggaagaaagctatctagggacgagatctagaatcaactgagagagatgcttaaaaatcaccagttactttaatgaaccatcttgaaagagctgcagtcgggcgagcacgcccccgacctggtcatcatgaattcctgcctctgggacatctccaggtatggtccgaactcctggagaagctacctggagaacctggagaacctgttccagtgcctgggccaggtgctgcccgagtcttgcctcctggtgtggaacacggccatgcctgtgggcgaggaagtcaccgggggttttcttccgcccaagctccggcggcagaaggccaccttcctgaaaaacgaagtggtcaaagccaacttccacagcgccaccgaggcacgtaaacataacttcgatgtactggacttgcatttccacttccgccacgcgagggagaacctgcactgggacggggtgcactggaatggacgtgtgcaccgctgcctctcccagctgctgctggcccacgtggccgacgcctggggtgtggagctgccccaccgccaccccgtgggcgagtggatcaagaagaaaaaacctggcccgagagtcgaagggccgccccaggccaacagaaatcacccggccttacctctgtccccacccttaccttcccccacataccgccccctgcttgggttcccaccccagcgctt

SEQ ID NO: 163997 - DNA, 476 bp, Homo sapiens
  Payload ID: 12289
  Gene Symbol: PCED1B
  Gene Name: PC-esterase domain containing 1B
  ENST ID: ENST00000551777
  CDS Start-End: 302-476
tttaatgctaaaaagaaggatccaggccaaggagggtaaagaaaatgcagaatgcaaattatcccctcactgggggatatccgggagcgaagtccctgagctgctgaggaagctttacgcctaaggagaagaggaaactggttcagaactgtgggcagccagcccaagagcacgcagctgtccaggggcagagtccacgtctggcttctttgtctggagttgaaagccagatcaccaccttctgccatccgcagagccatcctgtgcaaaggaaggagctaggctgtgcgccctgggcgtcatgatccttctgcgggcctccgaagtgcggcagctgcttcacaataagttcgtggtcatcctgggggactctgtgcatagggcagtatacaaggacctggtgcttctgctgcagaaggaccgcctgctcactcccgggcagcttagagcaaggggggagctgaacttcgaacaag

SEQ ID NO: 163998 - DNA, 796 bp, Homo sapiens
  Payload ID: 12289
  Gene Symbol: PCED1B
  Gene Name: PC-esterase domain containing 1B
  ENST ID: ENST00000549500
  CDS Start-End: 295-796
caatgatctacaggagaggaagaaagctatctagggacgagatctagaatcaactgagagagatgcttaaaaatcaccagttactttaatgacaagaaactagaatgtgtttaatgctaaaaagaaggatccaggccaaggagggtaaagaaaatgcagaatgcaaattatcccctcactgggggatatccgggagcgaagtccctgagctgctgaggaagctttacgcctaaggagccatccgcagagccatcctgtgcaaaggaaggagctaggctgtgcgccctgggcgtcatgatccttctgcgggcctccgaagtgcggcagctgcttcacaataagttcgtggtcatcctgggggactctgtgcatagggcagtatacaaggacctggtgcttctgctgcagaaggaccgcctgctcactcccgggcagcttagagcaaggggggagctgaacttcgaacaagatgagctggtggacggaggccagcggggccacatgcacaacggccttaactaccgtgaggtccgcgagttccgctccgaccaccatctggtacgtttttacttcctcacccgcgtgtactccgattacctccagaccatcttgaaagagctgcagtcgggcgagcacgcccccgacctggtcatcatgaattcctgcctctgggacatctccaggtatggtccgaactcctggagaagctacctggagaacctggagaacctgttccagtgcctgggccaggtgctgcccgagtcttgcctcctggtgtggaacacggccatgcctg

SEQ ID NO: 163999 - DNA, 7677 bp, Homo sapiens
  Payload ID: 12290
  Gene Symbol: PCF11
  Gene Name: PCF11 cleavage and polyadenylation factor subunit
  Uniprot ID: O94913
  ENST ID: ENST00000298281
  CDS Start-End: 453-5120
ggccggagaagaaggcggtgccagggcgtcctgcggaagggccgggggcggggctcgtgacgttgccgggacagccaatcacgcctggttttatcagtggccccgcccttttaccgcacatttcccctcccctagttcatttcgcacgacgcagcggttgggaacacagacattttcggagctggagccgccactgccgccgccattttgtgtctgtggagaaagaagcttctgtggcggctggaagtggacggagatcacccgcgagacggcggcgtttcatacccgaggttccccctgtgtcgtcccccatcccccctccgcggtcagcatgtggtgaagccggagccgcgagagagccggggagaggaagaggagtcggaagggaggcggggtatccagagcggcttcagcttcagctgcagcggacctcggaggggggccgcggcgcaatgtcagagcagacgccggccgaggccggtgctgcgggggcccgggaggacgcctgtcgggattatcagtcatcgctcgaagacctgaccttcaatagcaagccgcacatcaatatgctgaccattctagccgaggagaacctgcccttcgccaaggagatcgtctctctcatcgaggcccaaaccgccaaggctccttcctcagagaagcttcctgttatgtaccttatggattctattgtgaaaaacgttggaagagagtatctcactgcctttactaaaaatctagttgcaacatttatttgtgtgtttgaaaaggtggatgaaaatactaggaaaagtttatttaagttacgttctacatgggatgaaatattccctttgaagaaactttatgccctggatgtcagagtcaattcattagatcctgcttggcctattaaacctctaccccccaatgtgaatacgtctagcatccatgtgaatcctaaatttttaaataaatcgcccgaggagccttcaacacctggtacagtggtcagttcccctagcatctccactcctccaattgttcctgatatacaaaagaatcttacacaagaacaactaataaggcagcagttactggcaaagcaaaaacagttgttagaacttcagcagaaaaagctggagcttgagctagagcaagctaaggcacagttggcagtttctcttagtgttcagcaggaaacatccaatttaggtcctggatctgcaccatccaaattacatgtttcacagattccccctatggcagttaaagctcctcatcaggttcctgtgcaatctgagaaaagccgtccaggaccatccttacaaattcaggatttaaaaggaactaaccgggatcctcgtctgaacaggataagccaacattctcatggaaaagatcagagtcacaggaaagaatttctaatgaacacattaaaccagtctgatactaagacaagtaaaactataccctctgaaaaactaaattcatccaagcaagaaaaaagtaaatcaggtgaaaaaataaccaagaaagaacttgaccaattagattctaaatcgaaatcgaaatcgaaatcaccctcacctttgaaaaacaaattatctcacacaaaagacttgaaaaatcaagaatcggaaagtatgaggttgtctgatatgaacaagagagatccaagattaaaaaaacatcttcaggataagaccgatggcaaagatgatgatgtgaaagagaagagaaaaactgcagaaaaaaaggataaagatgagcacatgaagtcatccgaacacagactggctggaagtagaaataaaatcataaatggcattgtacaaaaacaggatacaataacagaagagtcagaaaaacaggggacaaaaccagggagatcgagtactagaaagcgatcaagatctcgatcacccaagtctaggtcaccaattatacattccccaaagagaagagataggcggtcacccaaacgaaggcaaagaagtatgtctccaacatcgacacctaaagctggaaagattcgccaatctggagctaagcagtcacatatggaagagtttacaccaccttctagggaagacagaaatgctaagagaagtactaaacaggatattcgggatccaaggcgaatgaaaaagactgaagaggagcgaccacaagaaactacaaatcagcattctacaaagtcaggcactgaaccaaaggagaatgtagaaaactggcaaagttccaagtctgccaaaagatggaaatctggttgggaagaaaataaaagcttacaacaggttgatgaacatagtaaacctcctcatctgaggcatagggagagctggtcaagcactaaaggaattttatcacctcgagccccaaagcagcaacagcatcgattaagtgtagatgccaatcttcagattcctaaagagttaactcttgcaagcaaaagagaattacttcaaaagacgagtgaacgtttagcatctggtgaaattacacaggatgacttccttgttgttgtgcatcaaattcgacagctatttcagtatcaagaaggtgtgcgagaagagcagagatctccattcaatgatcgttttccacttaagcgacctcgatatgaagattcagataaaccatttgtagatagtccagcatcaagattcgccggcctggatacaaatcagcgacttacagctttagctgaagacagaccgttatttgatggacctagtaggccatcagtagcaagagatggcccaacgaagatgatttttgaaggacccaataaattaagccctcgaattgatggacctcccacaccagcttctcttcggtttgatgggtcaccaggacaaatggggggaggaggccctttgagatttgaggggccacaaggtcagctaggaggtgggtgtcctttgagatttgaaggtcctccaggaccagtggggacacctctgcggtttgagggcccaattggtcaagcaggaggaggtggttttcggtttgaaggttcccctggtctgaggtttgagggatctccaggtggtttgagatttgagggaccaggaggccagcctgtgggtggtctgaggtttgagggacatcgtggtcaacctgtgggtggtctaaggtttgagggacctcatggtcagcctgtgggtggacttagatttgataatccccgaggtcagcctgtaggtggacttagatttgaggggggtcatggtccatcaggggctgcgattaggtttgatggacctcatggtcagccaggaggtggaatcagatttgagggccctttgctacagcaaggggttggaatgaggtttgagggcccccatggtcagtcagtagctggtctgagatttgagggacaacataatcaacttggtgggaaccttaggtttgagggtccacatggtcagccaggggttggtatcaggtttgaaggccctttagtccaacaaggaggtggaatgaggtttgagggtccttctgtaccaggaggtggcctgagaattgaagggcctctgggtcaaggtggtccaagatttgaaggttgtcatgctttaaggtttgatgggcagccaggtcagccgtcactcttgccaagatttgatggattacatggtcagccaggtcctagatttgaaaggactcctggtcagccaggccctcagaggtttgatggaccacctggacagcaggttcaacccagatttgacggtgtacctcaaagatttgatggtccacaacatcagcaagcatcaaggtttgatattcctcttggtcttcaaggcacaagatttgacaatcatccttcacaaaggcttgaatcagtatctttcaatcagactggtccatataatgatccacctggcaatgcttttaatgccccatcccaaggactacagttccaaagacatgaacaaatatttgattcacctcaaggaccaaattttaatggaccacatggccctggaaaccagagtttctctaatccacttaacagagcttctggacactattttgatgaaaaaaatcttcagagttctcaatttggaaactttggcaatatacctgctccaatgacagtaggaaatattcaggcatctcaacaggttctgagtggtgttgctcagccagtagcttttggtcaaggacaacagtttttaccagttcatccacaaaatcctggatttgttcagaatccttcaggagccctccctaaggcatatcctgataatcatctcagtcaggtggatgtaaatgaattgttttcaaaattgctaaaaacaggaattctcaaattgtcccaaactgattcagctacaacacaagtaagtgaagtaactgctcagcctccccctgaagaggaggaagatcaaaatgaagatcaagatgttccagatcttactaattttacagttgaagaattgaaacaacgttatgacagtgttataaatcgactgtacactggtattcagtgttactcttgtggaatgaggtttacaacatcacagacagatgtttatgcagatcatttggactggcattatcggcaaaatagaactgaaaaggatgttagccgaaaagtcactcatagacgttggtactacagtttaacagactggatagaatttgaggagatagctgatctggaagaacgggcaaagagccagttttttgaaaaggtgcatgaagaagttgtgctcaaaactcaagaggctgctaaagaaaaagagttccaaagtgtacctgctggaccagctggagcagttgagagttgtgaaatctgtcaagaacaatttgaacaatactgggatgaagaagaggaggaatggcatttgaaaaatgctattagagtagatggaaagatttatcatccatcatgttatgaagattatcaaaatacatcttcatttgattgtacaccatctcccagcaagacaccagttgaaaaccccttgaatattatgttgaacattgtcaaaaacgaattgcaggaaccctgtgacagtcccaaagttaaggaagaacgaattgatacaccaccagcttgtacagaggaaagcatagcaacaccctctgaaattaaaacagaaaatgacacagtcgagtcagtttaaataaaatgagaaaggtatgtttttcttttttaaaaaagctgctgttggatctagaaggtgaagaatttttttatgtatatatagacatatctatataaattgtctggctgaggcagggccttcagctatcatttggttaataaatacattttagtatttgcatttcctactgcctgcagagtttcaggtgcttgttgtgtgaaagttctgtagatgtgtgcaaatttaacgaaatgaaattgtatgtgtaaaaatgtacgatttttcactgtgcaactgtaaattataaataaaaaatatttttgctattcatggagtgtaatatttatgcacaccatcaaatagtttctgtactttttattgggtaaaaatggaattgaacagcaacctcaacataagattttttttctagtagcctcccactgattaaagaagcaagtttgaggtttcatccttcaaaagggggttccgagagagcaccgtagggcttttctcaaatagaaaagccagattttgaaaaaattttaaagataaaataggacatattttgcagatatatatatatatatacacaaacacatctccaggtatagagaaccatccagatgttcacttttgaaaatatctaatgatgcaaagttttattcttgaacttggacactgatgccatcaaacaattaacaaatatatttaagtactaaaggtgattttttttttaaagactttttcaaattgtcaaatgatttaatgcagatgaacatatttctattttaagtaacgggaatctgtaagaatgtttgcttgagatatggttaacttttttcttttgttggttttgacttagatggacaccatgagatgttaatattcatacatgtaataaatagaatgatgaagaaactttgtttgtacttctttatttcttgaaaagctttagaatgtgactttcttgttgtctttcatctgttttttgaaacatgaacatggtacttgctatgagccaggcactctgagacaggttagtcttttctgccatttattggagataggcatataaaacactgagttttattgagcacatagtatgtggcaggcactagcactttctacatgtattttctctggtattcacatctaataactacatggtagatggtgtccccactttacagatgaaattaagccactcactttaaaatttttataagaatttgaacgtggctttgtttcctctaattccatacaatttctgcaattttaaaagatacccccaaattgattgttaggatagaaataagcacaccaaactactggaaggtggctaaggaagattctacaaaagtggtgacatttgagtcttggaggataaccaggagtggagtccatactgatgggaagggtatctttggaaaatgaacagcaaatgtaaaggcttaaaatacttttgtgttttcaaaaattgacttcttatggttaaaactcagtagttttgaatagattatgatgagccattaatttttttagtagaaatggagtctcactacgtagtccaggctggtttcgaattcctgggctcaagtgatcctactgccttggcctcccagagtgctgggattacaggcatgagccacgtgcccagcctttatttttaagtagtgaagagccttcttggtcatgctaaggaatttttattaaactgatgaccagagcagccactagaaattttaaacagggtgacatcctatctgcatttaagcttttttatttttttaagaatcaagtgaatacaattttagagattgctaaatccagagaggtccagtgggaaaactggtagccattggatttgagttgtaaacacgtaacagctgaacttacgtatatgaacactgccataggaactgaggtctgtgaatccaaaaatgtaggcaaaacttcctgttgaacatttttctggggaaaccaccatagcttttatcaaatgcttaaaggtatggaacattctaaaaggaaggtgatattcaaacctaaaagtgtatcaacggtatccacatggagaagagggtcaaggatgggggaacaaagactggtaggtgggaaggtcaaaaagaaaatgggaaaaccagcaatgggaaaatttttttttttctttttttgagacagtcttgctatgttgctcaggctggatcagtgcagtagcacaatctcggctcagtgcagtggcacaatctcggctcactgcaacctctgcctcctgggttcaagtgattctcctgtctcagcctcccaagtagctgggattacaggtgcccgccaccacgcctggctaatttttatattttgagtagaggcggggtttcaccacgttggccaggctggtctcgaactcctgaccttaagtgatctgcccgtcttggcctcccagagtgctgggattacaggtgtgcgcaggaagaaaatttcaatggacgaggtagtcaacaaaatgaagtcaagaaaatatgtaagactcagaaatactctaactgttgacctaagaacagctgagtatgggtgc

SEQ ID NO: 164000 - DNA, 2649 bp, Homo sapiens
  Payload ID: 12290
  Gene Symbol: PCF11
  Gene Name: PCF11 cleavage and polyadenylation factor subunit
  ENST ID: ENST00000530304
  CDS Start-End: 298-2649
ggttgggaacacagacattttcggagctggagccgccactgccgccgccattttgtgtctgtggagaaagaagcttctgtggcggctggaagtggacggagatcacccgcgagacggcggcgtttcatacccgaggttccccctgtgtcgtcccccatcccccctccgcggtcagcatgtggtgaagccggagccgcgagagagccggggagaggaagaggagtcggaagggaggcggggtatccagagcggcttcagcttcagctgcagcggacctcggaggggggccgcggcgcaatgtcagagcagacgccggccgaggccggtgctgcgggggcccgggaggacgcctgtcgggattatcagtcatcgctcgaagacctgaccttcaatagcaagccgcacatcaatatgctgaccattctagccgaggagaacctgcccttcgccaaggagatcgtctctctcatcgaggcccaaaccgccaaggctccttcctcagagaagcttcctgttatgtaccttatggattctattgtgaaaaacgttggaagagagtatctcactgcctttactaaaaatctagttgcaacatttatttgtgtgtttgaaaaggtggatgaaaatactaggaaaagtttatttaagttacgttctacatgggatgaaatattccctttgaagaaactttatgccctggatgtcagagtcaattcattagatcctgcttggcctattaaacctctaccccccaatgtgaatacgtctagcatccatgtgaatcctaaatttttaaataaatcgcccgaggagccttcaacacctggtacagtggtcagttcccctagcatctccactcctccaattgttcctgatatacaaaagaatcttacacaagaacaactaataaggcagcagttactggcaaagcaaaaacagttgttagaacttcagcagaaaaagctggagcttgagctagagcaagctaaggcacagttggcagtttctcttagtgttcagcaggaaacatccaatttaggtcctggatctgcaccatccaaattacatgtttcacagattccccctatggcagttaaagctcctcatcaggttcctgtgcaatctgagaaaagccgtccaggaccatccttacaaattcaggatttaaaaggaactaaccgggatcctcgtctgaacaggataagccaacattctcatggaaaagatcagagtcacaggaaagaatttctaatgaacacattaaaccagtctgatactaagacaagtaaaactataccctctgaaaaactaaattcatccaagcaagaaaaaagtaaatcaggtgaaaaaataaccaagaaagaacttgaccaattagattctaaatcgaaatcgaaatcgaaatcaccctcacctttgaaaaacaaattatctcacacaaaagacttgaaaaatcaagaatcggaaagtatgaggttgtctgatatgaacaagagagatccaagattaaaaaaacatcttcaggataagaccgatggcaaagatgatgatgtgaaagagaagagaaaaactgcagaaaaaaaggataaagatgagcacatgaagtcatccgaacacagactggctggaagtagaaataaaatcataaatggcattgtacaaaaacaggatacaataacagaagagtcagaaaaacaggggacaaaaccagggagatcgagtactagaaagcgatcaagatctcgatcacccaagtctaggtcaccaattatacattccccaaagagaagagataggcggtcacccaaacgaaggcaaagaagtatgtctccaacatcgacacctaaagctggaaagattcgccaatctggagctaagcagtcacatatggaagagtttacaccaccttctagggaagacagaaatgctaagagaagtactaaacaggatattcgggatccaaggcgaatgaaaaagactgaagaggagcgaccacaagaaactacaaatcagcattctacaaagtcaggcactgaaccaaaggagaatgtagaaaactggcaaagttccaagtctgccaaaagatggaaatctggttgggaagaaaataaaagcttacaacaggttgatgaacatagtaaacctcctcatctgaggcatagggagagctggtcaagcactaaaggaattttatcacctcgagccccaaagcagcaacagcatcgattaagtgtagatgccaatcttcagattcctaaagagttaactcttgcaagcaaaagagaattacttcaaaagacgagtgaacgtttagcatctggtgaaattacacaggatgacttccttgttgttgtgcatcaaattcgacagctatttcagtatcaagaaggtgtgcgagaagagcagagatctccattcaatgatcgttttccacttaagcgacctcgatatgaagattcagataaaccatttgtagatagtccagcatcaagattcgccggcctggatacaaatcagcgacttacagctttagctgaagacagaccgttatttgatggacctagtaggccatcagtagcaagagatggcccaacgaagatgatttttgaaggacccaataaattaagccctcgaattgatggacctccc

SEQ ID NO: 164001 - DNA, 3309 bp, Homo sapiens
  Payload ID: 12290
  Gene Symbol: PCF11
  Gene Name: PCF11 cleavage and polyadenylation factor subunit
  ENST ID: ENST00000530660
  CDS Start-End: 314-3309
tttcgcacgacgcagcggttgggaacacagacattttcggagctggagccgccactgccgccgccattttgtgtctgtggagaaagaagcttctgtggcggctggaagtggacggagatcacccgcgagacggcggcgtttcatacccgaggttccccctgtgtcgtcccccatcccccctccgcggtcagcatgtggtgaagccggagccgcgagagagccggggagaggaagaggagtcggaagggaggcggggtatccagagcggcttcagcttcagctgcagcggacctcggaggggggccgcggcgcaatgtcagagcagacgccggccgaggccggtgctgcgggggcccgggaggacgcctgtcgggattatcagtcatcgctcgaagacctgaccttcaatagcaagccgcacatcaatatgctgaccattctagccgaggagaacctgcccttcgccaaggagatcgtctctctcatcgaggcccaaaccgccaaggctccttcctcagagaagcttcctgttatgtaccttatggattctattgtgaaaaacgttggaagagagtatctcactgcctttactaaaaatctagttgcaacatttatttgtgtgtttgaaaaggtggatgaaaatactaggaaaagtttatttaagttacgttctacatgggatgaaatattccctttgaagaaactttatgccctggatgtcagagtcaattcattagatcctgcttggcctattaaacctctaccccccaatgtgaatacgtctagcatccatgtgaatcctaaatttttaaataaatcgcccgaggagccttcaacacctggtacagtggtcagttcccctagcatctccactcctccaattgttcctgatatacaaaagaatcttacacaagaacaactaataaggcagcagttactggcaaagcaaaaacagttgttagaacttcagcagaaaaagctggagcttgagctagagcaagctaaggcacagttggcagtttctcttagtgttcagcaggaaacatccaatttaggtcctggatctgcaccatccaaattacatgtttcacagattccccctatggcagttaaagctcctcatcaggttcctgtgcaatctgagaaaagccgtccaggaccatccttacaaattcaggatttaaaaggaactaaccgggatcctcgtctgaacaggataagccaacattctcatggaaaagatcagagtcacaggaaagaatttctaatgaacacattaaaccagtctgatactaagacaagtaaaactataccctctgaaaaactaaattcatccaagcaagaaaaaagtaaatcaggtgaaaaaataaccaagaaagaacttgaccaattagattctaaatcgaaatcgaaatcgaaatcaccctcacctttgaaaaacaaattatctcacacaaaagacttgaaaaatcaagaatcggaaagtatgaggttgtctgatatgaacaagagagatccaagattaaaaaaacatcttcaggataagaccgatggcaaagatgatgatgtgaaagagaagagaaaaactgcagaaaaaaaggataaagatgagcacatgaagtcatccgaacacagactggctggaagtagaaataaaatcataaatggcattgtacaaaaacaggatacaataacagaagagtcagaaaaacaggggacaaaaccagggagatcgagtactagaaagcgatcaagatctcgatcacccaagtctaggtcaccaattatacattccccaaagagaagagataggcggtcacccaaacgaaggcaaagaagtatgtctccaacatcgacacctaaagctggaaagattcgccaatctggagctaagcagtcacatatggaagagtttacaccaccttctagggaagacagaaatgctaagagaagtactaaacaggatattcgggatccaaggcgaatgaaaaagactgaagaggagcgaccacaagaaactacaaatcagcattctacaaagtcaggcactgaaccaaaggagaatgtagaaaactggcaaagttccaagtctgccaaaagatggaaatctggttgggaagaaaataaaagcttacaacaggttgatgaacatagtaaacctcctcatctgaggcatagggagagctggtcaagcactaaaggaattttatcacctcgagccccaaagcagcaacagcatcgattaagtgtagatgccaatcttcagattcctaaagagttaactcttgcaagcaaaagagaattacttcaaaagacgagtgaacgtttagcatctggtgaaattacacaggatgacttccttgttgttgtgcatcaaattcgacagctatttcagtatcaagaaggtaaacatagatgcaatgtacgggatagtcctacagaagaaaataaaggtggattaaaaaagaaacctctcttatctgatgctgaattaacctactatgaacataaagcaaaactgaaaaggacacaggttcagcattcatttccaagacttgatctcttagatcctgatatttttgactaccctttgactgatgccttgttgtctggaatagaatgtgagccatccaaaagtaaacatgcaagtaggaatagtggagcacagtttgacagaaaagaacaatttagtgaaagagcaagacgtctttctcctatatctgggagtcgtacttatgctgagaatctttcaccccatgagggccggagaagacatgacgagcaagtctctgctaaaggtgtgcgagaagagcagagatctccattcaatgatcgttttccacttaagcgacctcgatatgaagattcagataaaccatttgtagatagtccagcatcaagattcgccggcctggatacaaatcagcgacttacagctttagctgaagacagaccgttatttgatggacctagtaggccatcagtagcaagagatggcccaacgaagatgatttttgaaggacccaataaattaagccctcgaattgatggacctcccacaccagcttctcttcggtttgatgggtcaccaggacaaatggggggaggaggccctttgagatttgaggggccacaaggtcagctaggaggtgggtgtcctttgagatttgaaggtcctccaggaccagtggggacacctctgcggtttgagggcccaattggtcaagcaggaggaggtggttttcggtttgaaggttcccctggtctgaggtttgagggatctccaggtggtttgagatttgagggacc

SEQ ID NO: 164002 - DNA, 580 bp, Homo sapiens
  Payload ID: 12290
  Gene Symbol: PCF11
  Gene Name: PCF11 cleavage and polyadenylation factor subunit
  ENST ID: ENST00000533018
  CDS Start-End: 282-580
attttcggagctggagccgccactgccgccgccattttgtgtctgtggagaaagaagcttctgtggcggctggaagtggacggagatcacccgcgagacggcggcgtttcatacccgaggttccccctgtgtcgtcccccatcccccctccgcggtcagcatgtggtgaagccggagccgcgagagagccggggagaggaagaggagtcggaagggaggcggggtatccagagcggcttcagcttcagctgcagcggacctcggaggggggccgcggcgcaatgtcagagcagacgccggccgaggccggtgctgcgggggcccgggaggacgcctgtcgggattatcagtcatcgctcgaagacctgaccttcaatagcaagccgcacatcaatatgctgaccattctagccgaggagaacctgcccttcgccaaggagatcgtctctctcatcgaggcccaaaccgccaaggtggatgaaaatactaggaaaagtttatttaagttacgttctacatgggatgaaatattccctttgaagaaactttatgccctggatgtcagagtcaattcattaga

SEQ ID NO: 164003 - DNA, 628 bp, Homo sapiens
  Payload ID: 12290
  Gene Symbol: PCF11
  Gene Name: PCF11 cleavage and polyadenylation factor subunit
  ENST ID: ENST00000530906
  CDS Start-End: 33-628
ataaccatgtgcaaagatgatggccaagcaagatgcttacctgcttggttctgagtggtgttgctcagccagtagcttttggtcaaggacaacagtttttaccagttcatccacaaaatcctggatttgttcagaatccttcaggagccctccctaaggcatatcctgataatcatctcagtcaggtggatgtaaatgaattgttttcaaaattgctaaaaacaggaattctcaaattgtcccaaactgattcagctacaacacaagtaagtgaagtaactgctcagcctccccctgaagaggaggaagatcaaaatgaagatcaagatgttccagatcttactaattttacagttgaagaattgaaacaacgttatgacagtgttataaatcgactgtacactggtattcagtgttactcttgtggaatgaggtttacaacatcacagacagatgtttatgcagatcatttggactggcattatcggcaaaatagaactgaaaaggatgttagccgaaaagtcactcatagacgttggtactacagtttaacagactggatagaatttgaggagatagctgatctggaagaacgggcaaagagccagttttttgaaaaggtgcatga

SEQ ID NO: 164004 - DNA, 2647 bp, Homo sapiens
  Payload ID: 12290
  Gene Symbol: PCF11
  Gene Name: PCF11 cleavage and polyadenylation factor subunit
  ENST ID: ENST00000620955
  CDS Start-End: 298-2475
ggttgggaacacagacattttcggagctggagccgccactgccgccgccattttgtgtctgtggagaaagaagcttctgtggcggctggaagtggacggagatcacccgcgagacggcggcgtttcatacccgaggttccccctgtgtcgtcccccatcccccctccgcggtcagcatgtggtgaagccggagccgcgagagagccggggagaggaagaggagtcggaagggaggcggggtatccagagcggcttcagcttcagctgcagcggacctcggaggggggccgcggcgcaatgtcagagcagacgccggccgaggccggtgctgcgggggcccgggaggacgcctgtcgggattatcagtcatcgctcgaagacctgaccttcaatagcaagccgcacatcaatatgctgaccattctagccgaggagaacctgcccttcgccaaggagatcgtctctctcatcgaggcccaaaccgccaaggctccttcctcagagaagcttcctgttatgtaccttatggattctattgtgaaaaacgttggaagagagtatctcactgcctttactaaaaatctagttgcaacatttatttgtgtgtttgaaaaggtggatgaaaatactaggaaaagtttatttaagttacgttctacatgggatgaaatattccctttgaagaaactttatgccctggatgtcagagtcaattcattagatcctgcttggcctattaaacctctaccccccaatgtgaatacgtctagcatccatgtgaatcctaaatttttaaataaatcgcccgaggagccttcaacacctggtacagtggtcagttcccctagcatctccactcctccaattgttcctgatatacaaaagaatcttacacaagaacaactaataaggcagcagttactggcaaagcaaaaacagttgttagaacttcagcagaaaaagctggagcttgagctagagcaagctaaggcacagttggcagtttctcttagtgttcagcaggaaacatccaatttaggtcctggatctgcaccatccaaattacatgtttcacagattccccctatggcagttaaagctcctcatcaggttcctgtgcaatctgagaaaagccgtccaggaccatccttacaaattcaggatttaaaaggaactaaccgggatcctcgtctgaacaggataagccaacattctcatggaaaagatcagagtcacaggaaagaatttctaatgaacacattaaaccagtctgatactaagacaagtaaaactataccctctgaaaaactaaattcatccaagcaagaaaaaagtaaatcaggtgaaaaaataaccaagaaagaacttgaccaattagattctaaatcgaaatcgaaatcgaaatcaccctcacctttgaaaaacaaattatctcacacaaaagacttgaaaaatcaagaatcggaaagtatgaggttgtctgatatgaacaagagagatccaagattaaaaaaacatcttcaggataagaccgatggcaaagatgatgatgtgaaagagaagagaaaaactgcagaaaaaaaggataaagatgagcacatgaagtcatccgaacacagactggctggaagtagaaataaaatcataaatggcattgtacaaaaacaggatacaataacagaagagtcagaaaaacaggggacaaaaccagggagatcgagtactagaaagcgatcaagatctcgatcacccaagtctaggtcaccaattatacattccccaaagagaagagataggcggtcacccaaacgaaggcaaagaagtatgtctccaacatcgacacctaaagctggaaagattcgccaatctggagctaagcagtcacatatggaagagtttacaccaccttctagggaagacagaaatgctaagagaagtactaaacaggatattcgggatccaaggcgaatgaaaaagactgaagaggagcgaccacaagaaactacaaatcagcattctacaaagtcaggcactgaaccaaaggagaatgtagaaaactggcaaagttccaagtctgccaaaagatggaaatctggttgggaagaaaataaaagcttacaacaggttgatgaacatagtaaacctcctcatctgaggcatagggagagctggtcaagcactaaaggaattttatcacctcgagccccaaagcagcaacagcatcgattaagtgtagatgccaatcttcagattcctaaagagttaactcttgcaagcaaaagagaattacttcaaaagacgagtgaacgtttagcatctggtgaaattacacaggatgacttccttgttgttgtgcatcaaattcgacagctatttcagtatcaagaaggtgtgcgagaagagcagagatctccattcaatgatcgtttccacttaagcgacctcgatatgaagattcagataaaccatttgtagatagtccagcatcaagattcgccggcctggatacaaatcagcgacttacagctttagctgaagacagaccgttatttgatggacctagtaggccatcagtagcaagagatggcccaacgaagatgatttttgaaggacccaataaattaagccctcgaattgatggacctcc

SEQ ID NO: 164005 - DNA, 1786 bp, Homo sapiens
  Payload ID: 12291
  Gene Symbol: PCID2
  Gene Name: PCI domain containing 2
  Uniprot ID: Q5JVF3
  ENST ID: ENST00000246505
  CDS Start-End: 36-1397
gtagggggtggcgctctccgttcggcggcgctcccatggcgcacattaccattaaccagtacctgcagcaggtgtacgaagccatcgacagcagagatggagcatcttgtgcagagttggtgtcttttaaacatcctcatgttgcaaacccacgacttcaaatggcctctccagaggagaagtgtcaacaagtcttggaacccccttatgatgaaatgtttgcagctcatttaaggtgcacttatgcagtggggaatcatgacttcatagaggcatacaagtgccagaccgtgatagtccaatatcctttgtcgttcatggcagctgtcccgcatagaacacatgcagtggattacttgggacttgagacccggaaacactgggccagttgctcatttctgcagttagaaaggaatgacagtgttttggaacagaagctcgtttcagctctttcacttggtacatcattcttgcgagcattccaggcccacaaagaagaaaactgggctctgcctgtcatgtatgcagtagcgcttgaccttcgagtgtttgccaataatgcagatcaacagttggtaaagaaaggaaaaagcaaagttggggacatgttggaaaaagcagcagagttactgatgagctgtttccgggtctgtgccagcgacacccgtgctggtatagaggactctaagaagtggggcatgctgtttctggtgaaccagctgtttaaaatctacttcaagatcaacaaactccatttatgtaaacccctaattagagcaattgacagctcaaacctgaaagacgattacagcactgcacagagagtaacatacaaatactacgttggacgcaaggctatgtttgacagcgattttaagcaagctgaggagtacctgtcatttgcctttgagcattgtcaccgttctagtcagaagaacaaaaggatgattctgatctatttgcttccagtaaaaatgctattgggtcacatgcccactgtggagctcctgaaaaagtatcacctgatgcagtttgcggaagtaaccagagctgtgagcgagggcaacctgctgctgctgcacgaggcgctggcgaagcacgaggccttcttcattcgctgcggaatcttcctcatcctggagaagctgaagatcatcacctacaggaacctctttaagaaagtgtatttgttactgaaaacacaccagctgtctctggatgcttttctggttgccttgaagttcatgcaggtggaggacgtggacattgacgaagttcagtgtattctggctaacttgatatacatgggacacgtcaaaggctacatatcgcatcagcatcagaagctggtggtcagcaagcagaacccatttcctcccctgtccacggtgtgttgaaagtacacggagccccgaggacggactcggctggttctggagtctttgtgagacttctttgaaggaggctttgcgtgaaggctgctcggctcacttttcctaagtgtggttcctgaaggctgtctttgtaactttttgtagttctttgtgtaaaaagcgtattctgaatttatacacatggcatgttcttcattatatcttccaggatacatctatttttatatattaaatttgaatgtgttatcaaaatgcttggttaacttaaggcacctttttaaaagcagaatttaatttgatttaaattttccagattttatagcttgcctgtatggatgctcctcaatttatgatagggttacatcccaataaacttattttatttgcctttg

SEQ ID NO: 164006 - DNA, 1898 bp, Homo sapiens
  Payload ID: 12291
  Gene Symbol: PCID2
  Gene Name: PCI domain containing 2
  Uniprot ID: Q5JVF3
  ENST ID: ENST00000337344
  CDS Start-End: 78-1277
ggaccgagggccggaagtgacgccagctggcccgcttgaggcgtagggggtggcgctctccgttcggcggcgctcccatggcgcacattaccattaaccagtacctgcagcaggtgtacgaagccatcgacagcagagatggagcatcttgtgcagagttggtgtcttttaaacatcctcatgttgcaaacccacgacttcaaatggcctctccagaggagaagtgtcaacaagtcttggaacccccttatgatgaaatgtttgcagctcatttaaggtgcacttatgcagtggggaatcatgacttcatagaggcatacaagtgccagaccgtgatagtccaatcattcttgcgagcattccaggcccacaaagaagaaaactgggctctgcctgtcatgtatgcagtagcgcttgaccttcgagtgtttgccaataatgcagatcaacagttggtaaagaaaggaaaaagcaaagttggggacatgttggaaaaagcagcagagttactgatgagctgtttccgggtctgtgccagcgacacccgtgctggtatagaggactctaagaagtggggcatgctgtttctggtgaaccagctgtttaaaatctacttcaagatcaacaaactccatttatgtaaacccctaattagagcaattgacagctcaaacctgaaagacgattacagcactgcacagagagtaacatacaaatactacgttggacgcaaggctatgtttgacagcgattttaagcaagctgaggagtacctgtcatttgcctttgagcattgtcaccgttctagtcagaagaacaaaaggatgattctgatctatttgcttccagtaaaaatgctattgggtcacatgcccactgtggagctcctgaaaaagtatcacctgatgcagtttgcggaagtaaccagagctgtgagcgagggcaacctgctgctgctgcacgaggcgctggcgaagcacgaggccttcttcattcgctgcggaatcttcctcatcctggagaagctgaagatcatcacctacaggaacctctttaagaaagtgtatttgttactgaaaacacaccagctgtctctggatgcttttctggttgccttgaagttcatgcaggtggaggacgtggacattgacgaagttcagtgtattctggctaacttgatatacatgggacacgtcaaaggctacatatcgcatcagcatcagaagctggtggtcagcaagcagaacccatttcctcccctgtccacggtgtgttgaaagtacacggagccccgaggacgggtgagcagttgtttctttccactttggttgtgctgatgagaccggtccggtactgcaacaaggctccctgaagccggaactcttggaggcgcttttcccagggatgctgaggctgagattttcagcacacccgagttaatctccttcatttgtaactaatttcagcctgatgaaaacctggaattcctttttcacagactcggctggttctggagtctttgtgagacttctttgaaggaggctttgcgtgaaggctgctcggctcacttttcctaagtgtggttcctgaaggctgtctttgtaactttttgtagttctttgtgtaaaaagcgtattctgaatttatacacatggcatgttcttcattatatcttccaggatacatctatttttatatattaaatttgaatgtgttatcaaaatgcttggttaacttaaggcacctttttaaaagcagaatttaatttgatttaaattttccagattttatagcttgcctgtatggatgctcctcaatttatgatagggttacatcccaataaacttattttatttgcctttgctttgttggttaaaaaaaaatttcttttaaaaaac

SEQ ID NO: 164007 - DNA, 2372 bp, Homo sapiens
  Payload ID: 12291
  Gene Symbol: PCID2
  Gene Name: PCI domain containing 2
  Uniprot ID: Q5JVF3
  ENST ID: ENST00000375457
  CDS Start-End: 598-1791
gttcggcggcgctcccatggcgcacattaccattaaccagtacctgcagcaggtgggtcctagccggggagcgcgcggcggcgtggttggccctcggcgtgttccgtgtgtcccctcctgccttggaccctcaggccttttcctttcccgcctcgccacccttcttccgttcgggtccccggcgggcagccgcgcgagccgaacagcggcggccgggactcgggaaggcggcccgagttctcccctgcagggccgccgtgggggccgggcggtgtccgtggatcgcggagtcgtcgcggtgtaagtagacgcggcggtcccaggtcgctgccctcacttgctggcacgtgtggccgcgctcccaggcggtccgaagggcctgcgggccacgccgagggcccgctgtgggcggtgctgtgtcggatggacgctgtttcccagcaggatgcgggatgaattcggggactccaggaggcgatggaggagtaagcgcgaggctgtggccgtgctgcaggccgggctcgtgcccctcgtcctcgctgtcgtttaacgcccttcactctccgagcacaatgcacacttcatatcgctcggtacatgcgtctgacagatgttgttcaacagcttgtgtacgaagccatcgacagcagagatggagcatcttgtgcagagttggtgtcttttaaacatcctcatgttgcaaacccacgacttcaaatggcctctccagaggagaagtgtcaacaagtcttggaacccccttatgatgaaatgtttgcagctcatttaaggtgcacttatgcagtggggaatcatgacttcatagaggcatacaagtgccagaccgtgatagtccaatcattcttgcgagcattccaggcccacaaagaagaaaactgggctctgcctgtcatgtatgcagtagcgcttgaccttcgagtgtttgccaataatgcagatcaacagttggtaaagaaaggaaaaagcaaagttggggacatgttggaaaaagcagcagagttactgatgagctgtttccgggtctgtgccagcgacacccgtgctggtatagaggactctaagaagtggggcatgctgtttctggtgaaccagctgtttaaaatctacttcaagatcaacaaactccatttatgtaaacccctaattagagcaattgacagctcaaacctgaaagacgattacagcactgcacagagagtaacatacaaatactacgttggacgcaaggctatgtttgacagcgattttaagcaagctgaggagtacctgtcatttgcctttgagcattgtcaccgttctagtcagaagaacaaaaggatgattctgatctatttgcttccagtaaaaatgctattgggtcacatgcccactgtggagctcctgaaaaagtatcacctgatgcagtttgcggaagtaaccagagctgtgagcgagggcaacctgctgctgctgcacgaggcgctggcgaagcacgaggccttcttcattcgctgcggaatcttcctcatcctggagaagctgaagatcatcacctacaggaacctctttaagaaagtgtatttgttactgaaaacacaccagctgtctctggatgcttttctggttgccttgaagttcatgcaggtggaggacgtggacattgacgaagttcagtgtattctggctaacttgatatacatgggacacgtcaaaggctacatatcgcatcagcatcagaagctggtggtcagcaagcagaacccatttcctcccctgtccacggtgtgttgaaagtacacggagccccgaggacgggtgagcagttgtttctttccactttggttgtgctgatgagaccggtccggtactgcaacaaggctccctgaagccggaactcttggaggcgcttttcccagggatgctgaggctgagattttcagcacacccgagttaatctccttcatttgtaactaatttcagcctgatgaaaacctggaattcctttttcacagactcggctggttctggagtctttgtgagacttctttgaaggaggctttgcgtgaaggctgctcggctcacttttcctaagtgtggttcctgaaggctgtctttgtaactttttgtagttctttgtgtaaaaagcgtattctgaatttatacacatggcatgttcttcattatatcttccaggatacatctatttttatatattaaatttgaatgtgttatcaaaatgcttggttaacttaaggcacctttttaaaagcagaatttaatttgatttaaattttccagattttatagcttgcctgtatggatgctcctcaatttatgatagggttacatcccaataaacttattttatttgc

SEQ ID NO: 164008 - DNA, 1668 bp, Homo sapiens
  Payload ID: 12291
  Gene Symbol: PCID2
  Gene Name: PCI domain containing 2
  Uniprot ID: Q5JVF3
  ENST ID: ENST00000375459
  CDS Start-End: 54-1247
gtttaacgcccttcactctccgagcacaatgcacacttcatatcgctcggtacatgcgtctgacagatgttgttcaacagcttgtgtacgaagccatcgacagcagagatggagcatcttgtgcagagttggtgtcttttaaacatcctcatgttgcaaacccacgacttcaaatggcctctccagaggagaagtgtcaacaagtcttggaacccccttatgatgaaatgtttgcagctcatttaaggtgcacttatgcagtggggaatcatgacttcatagaggcatacaagtgccagaccgtgatagtccaatcattcttgcgagcattccaggcccacaaagaagaaaactgggctctgcctgtcatgtatgcagtagcgcttgaccttcgagtgtttgccaataatgcagatcaacagttggtaaagaaaggaaaaagcaaagttggggacatgttggaaaaagcagcagagttactgatgagctgtttccgggtctgtgccagcgacacccgtgctggtatagaggactctaagaagtggggcatgctgtttctggtgaaccagctgtttaaaatctacttcaagatcaacaaactccatttatgtaaacccctaattagagcaattgacagctcaaacctgaaagacgattacagcactgcacagagagtaacatacaaatactacgttggacgcaaggctatgtttgacagcgattttaagcaagctgaggagtacctgtcatttgcctttgagcattgtcaccgttctagtcagaagaacaaaaggatgattctgatctatttgcttccagtaaaaatgctattgggtcacatgcccactgtggagctcctgaaaaagtatcacctgatgcagtttgcggaagtaaccagagctgtgagcgagggcaacctgctgctgctgcacgaggcgctggcgaagcacgaggccttcttcattcgctgcggaatcttcctcatcctggagaagctgaagatcatcacctacaggaacctctttaagaaagtgtatttgttactgaaaacacaccagctgtctctggatgcttttctggttgccttgaagttcatgcaggtggaggacgtggacattgacgaagttcagtgtattctggctaacttgatatacatgggacacgtcaaaggctacatatcgcatcagcatcagaagctggtggtcagcaagcagaacccatttcctcccctgtccacggtgtgttgaaagtacacggagccccgaggacggcctgatgaaaacctggaattcctttttcacagactcggctggttctggagtctttgtgagacttctttgaaggaggctttgcgtgaaggctgctcggctcacttttcctaagtgtggttcctgaaggctgtctttgtaactttttgtagttctttgtgtaaaaagcgtattctgaatttatacacatggcatgttcttcattatatcttccaggatacatctatttttatatattaaatttgaatgtgttatcaaaatgcttggttaacttaaggcacctttttaaaagcagaatttaatttgatttaaattttccagattttatagcttgcctgtatggatgctcctcaatttatgatagggttacatcccaataaacttattttatttgcctttg

SEQ ID NO: 164009 - DNA, 1654 bp, Homo sapiens
  Payload ID: 12291
  Gene Symbol: PCID2
  Gene Name: PCI domain containing 2
  Uniprot ID: Q5JVF3
  ENST ID: ENST00000375477
  CDS Start-End: 33-1232
gggggtggcgctctccgttcggcggcgctcccatggcgcacattaccattaaccagtacctgcagcaggtgtacgaagccatcgacagcagagatggagcatcttgtgcagagttggtgtcttttaaacatcctcatgttgcaaacccacgacttcaaatggcctctccagaggagaagtgtcaacaagtcttggaacccccttatgatgaaatgtttgcagctcatttaaggtgcacttatgcagtggggaatcatgacttcatagaggcatacaagtgccagaccgtgatagtccaatcattcttgcgagcattccaggcccacaaagaagaaaactgggctctgcctgtcatgtatgcagtagcgcttgaccttcgagtgtttgccaataatgcagatcaacagttggtaaagaaaggaaaaagcaaagttggggacatgttggaaaaagcagcagagttactgatgagctgtttccgggtctgtgccagcgacacccgtgctggtatagaggactctaagaagtggggcatgctgtttctggtgaaccagctgtttaaaatctacttcaagatcaacaaactccatttatgtaaacccctaattagagcaattgacagctcaaacctgaaagacgattacagcactgcacagagagtaacatacaaatactacgttggacgcaaggctatgtttgacagcgattttaagcaagctgaggagtacctgtcatttgcctttgagcattgtcaccgttctagtcagaagaacaaaaggatgattctgatctatttgcttccagtaaaaatgctattgggtcacatgcccactgtggagctcctgaaaaagtatcacctgatgcagtttgcggaagtaaccagagctgtgagcgagggcaacctgctgctgctgcacgaggcgctggcgaagcacgaggccttcttcattcgctgcggaatcttcctcatcctggagaagctgaagatcatcacctacaggaacctctttaagaaagtgtatttgttactgaaaacacaccagctgtctctggatgcttttctggttgccttgaagttcatgcaggtggaggacgtggacattgacgaagttcagtgtattctggctaacttgatatacatgggacacgtcaaaggctacatatcgcatcagcatcagaagctggtggtcagcaagcagaacccatttcctcccctgtccacggtgtgttgaaagtacacggagccccgaggacggcctgatgaaaacctggaattcctttttcacagactcggctggttctggagtctttgtgagacttctttgaaggaggctttgcgtgaaggctgctcggctcacttttcctaagtgtggttcctgaaggctgtctttgtaactttttgtagttctttgtgtaaaaagcgtattctgaatttatacacatggcatgttcttcattatatcttccaggatacatctatttttatatattaaatttgaatgtgttatcaaaatgcttggttaacttaaggcacctttttaaaagcagaatttaatttgatttaaattttccagattttatagcttgcctgtatggatgctcctcaatttatgatagggttacatcccaataaacttattttatttgcctttgc

SEQ ID NO: 164010 - DNA, 1671 bp, Homo sapiens
  Payload ID: 12291
  Gene Symbol: PCID2
  Gene Name: PCI domain containing 2
  Uniprot ID: Q5JVF3
  ENST ID: ENST00000375479
  CDS Start-End: 82-1281
agacggaccgagggccggaagtgacgccagctggcccgcttgaggcgtagggggtggcgctctccgttcggcggcgctcccatggcgcacattaccattaaccagtacctgcagcaggtgtacgaagccatcgacagcagagatggagcatcttgtgcagagttggtgtcttttaaacatcctcatgttgcaaacccacgacttcaaatggcctctccagaggagaagtgtcaacaagtcttggaacccccttatgatgaaatgtttgcagctcatttaaggtgcacttatgcagtggggaatcatgacttcatagaggcatacaagtgccagaccgtgatagtccaatcattcttgcgagcattccaggcccacaaagaagaaaactgggctctgcctgtcatgtatgcagtagcgcttgaccttcgagtgtttgccaataatgcagatcaacagttggtaaagaaaggaaaaagcaaagttggggacatgttggaaaaagcagcagagttactgatgagctgtttccgggtctgtgccagcgacacccgtgctggtatagaggactctaagaagtggggcatgctgtttctggtgaaccagctgtttaaaatctacttcaagatcaacaaactccatttatgtaaacccctaattagagcaattgacagctcaaacctgaaagacgattacagcactgcacagagagtaacatacaaatactacgttggacgcaaggctatgtttgacagcgattttaagcaagctgaggagtacctgtcatttgcctttgagcattgtcaccgttctagtcagaagaacaaaaggatgattctgatctatttgcttccagtaaaaatgctattgggtcacatgcccactgtggagctcctgaaaaagtatcacctgatgcagtttgcggaagtaaccagagctgtgagcgagggcaacctgctgctgctgcacgaggcgctggcgaagcacgaggccttcttcattcgctgcggaatcttcctcatcctggagaagctgaagatcatcacctacaggaacctctttaagaaagtgtatttgttactgaaaacacaccagctgtctctggatgcttttctggttgccttgaagttcatgcaggtggaggacgtggacattgacgaagttcagtgtattctggctaacttgatatacatgggacacgtcaaaggctacatatcgcatcagcatcagaagctggtggtcagcaagcagaacccatttcctcccctgtccacggtgtgttgaaagtacacggagccccgaggacggactcggctggttctggagtctttgtgagacttctttgaaggaggctttgcgtgaaggctgctcggctcacttttcctaagtgtggttcctgaaggctgtctttgtaactttttgtagttctttgtgtaaaaagcgtattctgaatttatacacatggcatgttcttcattatatcttccaggatacatctatttttatatattaaatttgaatgtgttatcaaaatgcttggttaacttaaggcacctttttaaaagcagaatttaatttgatttaaattttccagattttatagcttgcctgtatggatgctcctcaatttatgatagggttacatcccaataaacttattttatttgcctttgc

SEQ ID NO: 164011 - DNA, 1937 bp, Homo sapiens
  Payload ID: 12291
  Gene Symbol: PCID2
  Gene Name: PCI domain containing 2
  Uniprot ID: Q5JVF3
  ENST ID: ENST00000622406
  CDS Start-End: 82-1443
agacggaccgagggccggaagtgacgccagctggcccgcttgaggcgtagggggtggcgctctccgttcggcggcgctcccatggcgcacattaccattaaccagtacctgcagcaggtgtacgaagccatcgacagcagagatggagcatcttgtgcagagttggtgtcttttaaacatcctcatgttgcaaacccacgacttcaaatggcctctccagaggagaagtgtcaacaagtcttggaacccccttatgatgaaatgtttgcagctcatttaaggtgcacttatgcagtggggaatcatgacttcatagaggcatacaagtgccagaccgtgatagtccaatatcctttgtcgttcatggcagctgtcccgcatagaacacatgcagtggattacttgggacttgagacccggaaacactgggccagttgctcatttctgcagttagaaaggaatgacagtgttttggaacagaagctcgtttcagctctttcacttggtacatcattcttgcgagcattccaggcccacaaagaagaaaactgggctctgcctgtcatgtatgcagtagcgcttgaccttcgagtgtttgccaataatgcagatcaacagttggtaaagaaaggaaaaagcaaagttggggacatgttggaaaaagcagcagagttactgatgagctgtttccgggtctgtgccagcgacacccgtgctggtatagaggactctaagaagtggggcatgctgtttctggtgaaccagctgtttaaaatctacttcaagatcaacaaactccatttatgtaaacccctaattagagcaattgacagctcaaacctgaaagacgattacagcactgcacagagagtaacatacaaatactacgttggacgcaaggctatgtttgacagcgattttaagcaagctgaggagtacctgtcatttgcctttgagcattgtcaccgttctagtcagaagaacaaaaggatgattctgatctatttgcttccagtaaaaatgctattgggtcacatgcccactgtggagctcctgaaaaagtatcacctgatgcagtttgcggaagtaaccagagctgtgagcgagggcaacctgctgctgctgcacgaggcgctggcgaagcacgaggccttcttcattcgctgcggaatcttcctcatcctggagaagctgaagatcatcacctacaggaacctctttaagaaagtgtatttgttactgaaaacacaccagctgtctctggatgcttttctggttgccttgaagttcatgcaggtggaggacgtggacattgacgaagttcagtgtattctggctaacttgatatacatgggacacgtcaaaggctacatatcgcatcagcatcagaagctggtggtcagcaagcagaacccatttcctcccctgtccacggtgtgttgaaagtacacggagccccgaggacggcctgatgaaaacctggaattcctttttcacagactcggctggttctggagtctttgtgagacttctttgaaggaggctttgcgtgaaggctgctcggctcacttttcctaagtgtggttcctgaaggctgtctttgtaactttttgtagttctttgtgtaaaaagcgtattctgaatttatacacatggcatgttcttcattatatcttccaggatacatctatttttatatattaaatttgaatgtgttatcaaaatgcttggttaacttaaggcacctttttaaaagcagaatttaatttgatttaaattttccagattttatagcttgcctgtatggatgctcctcaatttatgatagggttacatcccaataaacttattttatttgcctttgctttgttggttaaaaaaaaatttcttttaaaaaaccatcttaaattgaaaatacatttaatacacctgctact

SEQ ID NO: 164012 - DNA, 2546 bp, Homo sapiens
  Payload ID: 12292
  Gene Symbol: PDAP1
  Gene Name: PDGFA associated protein 1
  Uniprot ID: Q13442
  ENST ID: ENST00000350498
  CDS Start-End: 282-827
ctcacttccggtgggtggcaggcagggccacgcgtcttcccgaacggagagactaggggcgttgttgcctggcagcagacgggcaagcctggacttaggcggcgcgcaggacggtccgacttcgtgcggaggcctccctgaggtccgggtccttgcggccactgcggccactgaagcggcggcggcggctggcccaggaggaagaagtcgagcccaagctatttccggttccggtgtcagttcgaggcgccgccgccgccgccgcagccgccggagccgcaatgcctaaaggaggaagaaagggaggccacaaaggccgggcgaggcagtatacaagccctgaggagatcgacgcgcagctgcaggctgagaagcagaaggccagggaagaagaggagcaaaaagaaggtggagatggggctgcaggtgaccccaaaaaggagaagaaatctctagactcagatgagagtgaggatgaagaagatgactaccagcaaaagcgcaaaggcgttgaagggctcatcgacatcgagaaccccaaccgggtggcacagacaaccaaaaaggtcacacaactggatctggacgggccaaaggagctttcgaggagagaacgagaagagattgagaagcagaaggcaaaagagcgttacatgaaaatgcacttggccgggaagacagagcaagccaaggctgacctggcccggctggccatcatccggaaacagcgggaggaggctgcccggaagaaggaagaggaaaggaaagcaaaagacgatgccacattgtcaggaaaacgaatgcagtcactctccctgaataagtaactgcgacccgtgggaggagatgccggggacctgggccgcgctgccaggacctctgctgtgtctcgcccaccctgtgccctggcgccgctgcaacagcccctcatggccaggagccccccatggcctggggcctcctcttcatcttggcacagaaattgtttgggggatggggggggggactgggggaggggtagctgctatctttgagacagaaagatgcaggacagcatttcatatgtaaccatttgaatgtttttgctgtttttagaattcagagcccttgctggggggtgcctgggagatggggtaagaagagctttcatttgtctggtagatagatagcatgtaagggggtggttgtcccaggaggcagctgctgacaggtttgctacacacagccccggactgtgttgcctgggtgctcattcagagaggggctatcatctgggagcctgtgcccctgggtcctcgagggtcatggcttgtccctggtcagtcctgtctgactgacctcagggcctcacctctctgcccttccctgcccggttcctactcacctggctagggccagtgcccattttcagccctacccattgatcatttcaagaaacctctgtttactgtgtggcacccaggcaaaacatgctccacaaattcaacttgtatatttggcagattaaacttgacattatcgtaatctttgttttggcaatccatcctttggcttccgtgctcgagccgtttttacccagctgggtacggtgccacgttcaggcacgtgcacccggcaaggttcagggcacatacctacctggggcatgacatctgtcaggtggcaccgagcaggatgcggggatggaccctagataccacagcctgccccctcccctcctttagccaagtcaggatcttaggcctcagcaggcagggacccttccaggccacagtaggctgaagcagcaccaggatcctggcctggcctggcctgtaggtgtcccctggtggttataattctgtaactctaggggagaaggggaatagcactagcattggatgtcgccaaggcccacattttcctgagagaagccacaaaagatgtgcaaatgcccttcagcacaggacctggtgacatgacataaactccaagacagaacctcagtttacagcacacgaaaaaaatatcttgccaacattgtaatgacaaaataaattcccgtgaagttccacaaccaggccgggcatggtggctcatgcctgtaatcccagcactttgggaggtgaggtgggtggatcatctgaggtcaggagttcaagaccagcctggccaacatggagaaactccgtctctactaaaaatacaaaaattaaccaggcttggtggtgtatgcctgtaatcccagctacttgggaggctgaggcaggagaatcgcttgatcccaggaaggcagaggtggcagtgagctgagaacgcacaactgcactccagcctgggtgacgagcaaaactccatctcaaaacaaaagttccacaaccagcctggagtgtgtagcccctttgtccaggaatttgactagtcaatcagtgacacctggtactggcagttttgggagtggcagcccaggatggacagcagtggggagggaaccatttggcataaggccgttgggcttcaggatcaattttgttggcaagcagtaaaaataagctatctacctatgg

SEQ ID NO: 164013 - DNA, 767 bp, Homo sapiens
  Payload ID: 12292
  Gene Symbol: PDAP1
  Gene Name: PDGFA associated protein 1
  ENST ID: ENST00000426447
  CDS Start-End: 43-162
gttcgaggcgccgccgccgccgccgcagccgccggagccgcaatgcctaaaggaggaagaaagggaggccacaaaggccgggcgaggcagtatacaagccctgaggagatcgacgcgcagctgcaggctgagaagcagaaggccagggttgtccatttctgaaacaggaagaagaggagcaaaaagaaggtggagatggggctgcaggtgaccccaaaaaggagaagaaatctctagactcagatgagagtgaggatgaagaagatgactaccagcaaaagcgcaaaggcgttgaagggctcatcgacatcgagaaccccaaccgggtggcacagacaaccaaaaaggtcacacaactggatctggacgggccaaaggagctttcgaggagagaacgagaagagattgagaagcagaaggcaaaagagcgttacatgaaaatgcacttggccgggaagacagagcaagccaaggctgacctggcccggctggccatcatccggaaacagcgggaggaggctgcccggaagaaggaagaggaaaggaaagcaaaagacgatgccacattgtcaggaaaacgaatgcagtcactctccctgaataagtaactgcgacccgtgggaggagatgccggggacctgggccgcgctgccaggacctctgctgtgtctcgcccaccctgtgccctggcgccgctgcaacagcccctcatggccaggagccccccatggcctggggcctcctcttcatcttggcacagaaattgt

SEQ ID NO: 164014 - DNA, 120 bp, Homo sapiens
  Payload ID: 12292
  Gene Symbol: PDAP1
  Gene Name: PDGFA associated protein 1
  ENST ID: ENST00000626285
  CDS Start-End: 1-120
atgcctaaaggaggaagaaagggaggccacaaaggccgggcgaggcagtatacaagccctgaggagatcgacgcgcagctgcaggctgagaagcagaaggccagggttgtccatttctga

SEQ ID NO: 164015 - DNA, 2566 bp, Homo sapiens
  Payload ID: 12293
  Gene Symbol: PDIK1L
  Gene Name: PDLIM1 interacting kinase 1 like
  Uniprot ID: Q8N165
  ENST ID: ENST00000374269
  CDS Start-End: 85-1110
gcgagctgcccgataatggcggcctgcagagcccatgagagggagaagcggcagcgtctaccctgagaaacctcgaccttgaagatggtgagtagccagccaaagtacgatctaatacgggaggtaggccgaggtagttacggtgttgtgtatgaagcagtcatcagaaagacctctgcacgggtggcagtgaagaaaattcgatgtcacgcacctgaaaatgttgaactagcccttcgtgagttctgggcactaagcagtatcaagagccaacatccaaatgtgattcacttggaggaatgcatcctacaaaaggatgggatggtgcaaaagatgtcccacggctctaattcttccctttatttacagcttgtagaaacttcattaaaaggagaaattgcctttgatcccagaagcgcctattatttgtggtttgtgatggatttttgtgacggaggagatatgaatgagtatctgttgtccaggaaacccaatcgtaaaactaacaccagcttcatgcttcagctgagcagtgccctggctttcttgcataaaaaccagatcatccaccgagatcttaagcctgataacatcctgatttctcaaaccaggttggataccagtgacttggaacctaccctcaaagtggctgattttggtctaagtaaagtttgttcagcctctgggcagaacccagaagaacctgtcagtgtaaacaagtgtttcctttccacagcatgtggaacagatttttacatggctcctgaagtttgggaaggacattacacagcaaaagctgacatctttgctctggggattatcatctgggcaatgctggaaaggatcacattcatagacacagagacaaagaaggaactcttggggagttatgtaaaacaaggaactgagattgtgcctgttggggaggcacttctggaaaatcccaaaatggaacttctcattcctgtgaagaaaaaatctatgaatgggcgaatgaaacaactgattaaggaaatgctggctgcaaaccctcaggatcgtccagatgcttttgaactagaactcagattagtacaaattgcatttaaagatagcagctgggaaacgtgacacatattatttgcaaataccatggatgatatgctgcttctgtttaacagtgatgcaacattatgtggctgaaaaagaatataaaaagctagactctaccctctaagggtttagattttttgtgggattttttttttcctcatttttcttaaatccaagttggccgttttattagtatgtttcaaatgtgtattaccaatgtgggtgtaaatttttaaaaaatgattattgatagaagtttggcaggaaaattctttaagagctaacaagagaagagagtccagttttctggaaatatgtctttaagtattttagacattcctcgtcagtattaggaatttccatgggaaaagaggtttgcatgctggtaatgcaacctttgaaactttgtaaaggaaacatatatgtatatatttatgtatatgtaagtatgtgaatgtgcgcattttgcattccatatgaaaaaaatgccacgtctgtttaaattatttgatgtaggtttgggtttttgagatttgctggtgaagtcagtgacgaaaaataaaccttcccttatcttcctactctgcccctccccctaatgaaatcatattaagttgtttttttttttttttgtaatatacagctttttttttaaggcatcattttcgagggtctaaaattatctggtaaaacaaatgaaattaagtgatccaaagctgctgaagtatgtttgaactctccagtgccctatagctgcaagagttgaattagtcatgcagtcatatggcagcaggttggtgattcagtccgaccttctttaggtaaccgagcatttatttaaccaactataccactgcattgggacgtctgcacttgagcttctacaatctgatataaatctgaatacaggattattctgtttgaaaactttgctatgtgtgaactgtaatacttgatacatttttggtttgaagactttgtctaagcctcattatactgaagttgaagaaaccaaatgagctccaccctcactttgcctgccctgatatgatcacttgttgagtcactggagttcctttcattttggcactgatgctgttttctcttgtctgatttgaaacagtactggtaataatatggttgttgaaaatgtgatcacctttatctaaagtgggagaagatacatacacagtatggcaaatggataaaatattgtggcatcaactacttttaaagtagaaaagctatccattttatacaatcactgatacagtctatgtcaaaaaaccaacagaccattattcctcttgaagttagtttgattttatctttgtatggttgtctacaatttgttttcctgtaaatgcagatagttaaaatctaaaggatagaatgctttcctaaaacagaacattagcctttaaggttaaatagactttacattgtatctaagttaatctttataaagcactag

SEQ ID NO: 164016 - DNA, 4279 bp, Homo sapiens
  Payload ID: 12293
  Gene Symbol: PDIK1L
  Gene Name: PDLIM1 interacting kinase 1 like
  Uniprot ID: Q8N165
  ENST ID: ENST00000374271
  CDS Start-End: 288-1313
ggcagcggaggcgcgagctgcccgataatggcggcctgcagagcccatgagagggagaagcggcagcgtctaccctgaggaaggtgctcttccccatggggactgtaccaggctggagaggacatggcactgcttcagagacacgaaccaccttgagtggatgtgattggcgatccccgtagagcaggaaagctcgtctgctgtgcagccggcgcagaggattctgtggcaggaaattagacactaggaaattcagtagcgatttgaaggaaacctcgaccttgaagatggtgagtagccagccaaagtacgatctaatacgggaggtaggccgaggtagttacggtgttgtgtatgaagcagtcatcagaaagacctctgcacgggtggcagtgaagaaaattcgatgtcacgcacctgaaaatgttgaactagcccttcgtgagttctgggcactaagcagtatcaagagccaacatccaaatgtgattcacttggaggaatgcatcctacaaaaggatgggatggtgcaaaagatgtcccacggctctaattcttccctttatttacagcttgtagaaacttcattaaaaggagaaattgcctttgatcccagaagcgcctattatttgtggtttgtgatggatttttgtgacggaggagatatgaatgagtatctgttgtccaggaaacccaatcgtaaaactaacaccagcttcatgcttcagctgagcagtgccctggctttcttgcataaaaaccagatcatccaccgagatcttaagcctgataacatcctgatttctcaaaccaggttggataccagtgacttggaacctaccctcaaagtggctgattttggtctaagtaaagtttgttcagcctctgggcagaacccagaagaacctgtcagtgtaaacaagtgtttcctttccacagcatgtggaacagatttttacatggctcctgaagtttgggaaggacattacacagcaaaagctgacatctttgctctggggattatcatctgggcaatgctggaaaggatcacattcatagacacagagacaaagaaggaactcttggggagttatgtaaaacaaggaactgagattgtgcctgttggggaggcacttctggaaaatcccaaaatggaacttctcattcctgtgaagaaaaaatctatgaatgggcgaatgaaacaactgattaaggaaatgctggctgcaaaccctcaggatcgtccagatgcttttgaactagaactcagattagtacaaattgcatttaaagatagcagctgggaaacgtgacacatattatttgcaaataccatggatgatatgctgcttctgtttaacagtgatgcaacattatgtggctgaaaaagaatataaaaagctagactctaccctctaagggtttagattttttgtgggattttttttttcctcatttttcttaaatccaagttggccgttttattagtatgtttcaaatgtgtattaccaatgtgggtgtaaatttttaaaaaatgattattgatagaagtttggcaggaaaattctttaagagctaacaagagaagagagtccagttttctggaaatatgtctttaagtattttagacattcctcgtcagtattaggaatttccatgggaaaagaggtttgcatgctggtaatgcaacctttgaaactttgtaaaggaaacatatatgtatatatttatgtatatgtaagtatgtgaatgtgcgcattttgcattccatatgaaaaaaatgccacgtctgtttaaattatttgatgtaggtttgggtttttgagatttgctggtgaagtcagtgacgaaaaataaaccttcccttatcttcctactctgcccctccccctaatgaaatcatattaagttgtttttttttttttttgtaatatacagctttttttttaaggcatcattttcgagggtctaaaattatctggtaaaacaaatgaaattaagtgatccaaagctgctgaagtatgtttgaactctccagtgccctatagctgcaagagttgaattagtcatgcagtcatatggcagcaggttggtgattcagtccgaccttctttaggtaaccgagcatttatttaaccaactataccactgcattgggacgtctgcacttgagcttctacaatctgatataaatctgaatacaggattattctgtttgaaaactttgctatgtgtgaactgtaatacttgatacatttttggtttgaagactttgtctaagcctcattatactgaagttgaagaaaccaaatgagctccaccctcactttgcctgccctgatatgatcacttgttgagtcactggagttcctttcattttggcactgatgctgttttctcttgtctgatttgaaacagtactggtaataatatggttgttgaaaatgtgatcacctttatctaaagtgggagaagatacatacacagtatggcaaatggataaaatattgtggcatcaactacttttaaagtagaaaagctatccattttatacaatcactgatacagtctatgtcaaaaaaccaacagaccattattcctcttgaagttagtttgattttatctttgtatggttgtctacaatttgttttcctgtaaatgcagatagttaaaatctaaaggatagaatgctttcctaaaacagaacattagcctttaaggttaaatagactttacattgtatctaagttaatctttataaagcactagaatttttggtcaaaagtcaaaatagtattagaatattgaaattattgatagctttcataatctcagcttttttgaacttccacaatttttggaatatgtcataatttttttccctgtttcaaatgtgttcagaggaaatagaatgtaaaacatcacaaaaaaaattgcagtacataaaatttctggactatgttagttacttgatctggaagtttaaaatttggactaaaaggttttattgaaataaagcctcttaaaatgaaaaatcatatacttttaacatcacttttaagctaataaatataagaattcttttggaaattagaggtggaaacacactggaacctcatgataattgaccctctggatcaccagattagtttaatttaacagatatgtccaaggaagttgagctatagggagtaagaaaaagcatcatgataacgtctagtcaataacatggcacttcagcagagattcatagatgatggtatgcccatgcatcatttgctcttcaaatatctatgtgcttggagccacagtttcctaagcgcatagtttttggtcctgcctcatgtaaaatagttaatgattatcatttacttggaaagattttacctgtgaagtgaaattctttcattgggggtaagggtatgaggtgatcaggaagtttcttctggaattttatcaagtccttgtattctaaaatagccaagcaaaatgatagtaaattctttgtctttgttctttcagtcagaggtatttattaagtacctactgtgtgctcagcactaaaggtttgttgataaaatgacaattaaaaaatggcatttagccaaaggccttttcagccaggagtaagaaaagatggttagtgatatttggaaatacctggatatttgctagaggaaaaatgaaagcaaaacttcgtacacagtgccttgcccataataggtactcaataagcaattgttcctcatagagtcttttgccatgatttatggtgttttttgaaatttgtcttaattgaaaaaagaccaaatatttcaaatgagcttataggcagctgtggccagtgaaaatatggggttgtacagttagttcctagaatgttattttgcactagttgtcacttagaaagatggggttcctgtagattttttggtgctaagggatactttgtcattatgatgaagtaagtgttaagtgtcagataaatagcacacagaatagttctttctgctggtctgttttttctcttcgttgttgttgtttttaattgtaaattgttatcaatcaaactattgtagcagctacaaagtaattcaccagcatgacaaaatggtcaaaaaataagtcatcagcacttaagaaatgaaagcaacttttgaaattttctgttaaaattgtcaaatatattttatgaagaatttataaaaggggaaaatgattgtaatttattgttcatgacttttttttttaaataaagtgagtttcaacaaaaaaaaaa

SEQ ID NO: 164017 - DNA, 838 bp, Homo sapiens
  Payload ID: 12293
  Gene Symbol: PDIK1L
  Gene Name: PDLIM1 interacting kinase 1 like
  ENST ID: ENST00000444713
  CDS Start-End: 266-838
gcacccagccccgcgccgccgccgccgccgccgtctccgcaactgcaccgcccgcaaacatggctcagtgactcggagaaaagctgcagtctccctcccggcggggcggacgccaggcctccttggtcgggccgcacctccccgcaggcccgccaaagagcaccgcgccccgcaggcacccgagacccgcgcggaagatgcaccgggcgttccaccccagcgagccccgcaccccagcccgcagctcgaaacctcgaccttgaagatggtgagtagccagccaaagtacgatctaatacgggaggtaggccgaggtagttacggtgttgtgtatgaagcagtcatcagaaagacctctgcacgggtggcagtgaagaaaattcgatgtcacgcacctgaaaatgttgaactagcccttcgtgagttctgggcactaagcagtatcaagagccaacatccaaatgtgattcacttggaggaatgcatcctacaaaaggatgggatggtgcaaaagatgtcccacggctctaattcttccctttatttacagcttgtagaaacttcattaaaaggagaaattgcctttgatcccagaagcgcctattatttgtggtttgtgatggatttttgtgacggaggagatatgaatgagtatctgttgtccaggaaacccaatcgtaaaactaacaccagcttcatgcttcagctgagcagtgccctggctttcttgcataaaaaccagatcatccaccgagatcttaagcctgataacatcctgatttctcaaaccaggttggataccagtgacttggaacctaccctcaaagtggctgatttt

SEQ ID NO: 164018 - DNA, 4252 bp, Homo sapiens
  Payload ID: 12293
  Gene Symbol: PDIK1L
  Gene Name: PDLIM1 interacting kinase 1 like
  Uniprot ID: Q8N165
  ENST ID: ENST00000619836
  CDS Start-End: 274-1299
agatgatcgcacccagccccgcgccgccgccgccgccgccgtctccgcaactgcaccgcccgcaaacatggctcagtgactcggagaaaagctgcagtctccctcccggcggggcggacgccaggcctccttggtcgggccgcacctccccgcaggcccgccaaagagcaccgcgccccgcaggcacccgagacccgcgcggaagatgcaccgggcgttccaccccagcgagccccgcaccccagcccgcagctcgaaacctcgaccttgaagatggtgagtagccagccaaagtacgatctaatacgggaggtaggccgaggtagttacggtgttgtgtatgaagcagtcatcagaaagacctctgcacgggtggcagtgaagaaaattcgatgtcacgcacctgaaaatgttgaactagcccttcgtgagttctgggcactaagcagtatcaagagccaacatccaaatgtgattcacttggaggaatgcatcctacaaaaggatgggatggtgcaaaagatgtcccacggctctaattcttccctttatttacagcttgtagaaacttcattaaaaggagaaattgcctttgatcccagaagcgcctattatttgtggtttgtgatggatttttgtgacggaggagatatgaatgagtatctgttgtccaggaaacccaatcgtaaaactaacaccagcttcatgcttcagctgagcagtgccctggctttcttgcataaaaaccagatcatccaccgagatcttaagcctgataacatcctgatttctcaaaccaggttggataccagtgacttggaacctaccctcaaagtggctgattttggtctaagtaaagtttgttcagcctctgggcagaacccagaagaacctgtcagtgtaaacaagtgtttcctttccacagcatgtggaacagatttttacatggctcctgaagtttgggaaggacattacacagcaaaagctgacatctttgctctggggattatcatctgggcaatgctggaaaggatcacattcatagacacagagacaaagaaggaactcttggggagttatgtaaaacaaggaactgagattgtgcctgttggggaggcacttctggaaaatcccaaaatggaacttctcattcctgtgaagaaaaaatctatgaatgggcgaatgaaacaactgattaaggaaatgctggctgcaaaccctcaggatcgtccagatgcttttgaactagaactcagattagtacaaattgcatttaaagatagcagctgggaaacgtgacacatattatttgcaaataccatggatgatatgctgcttctgtttaacagtgatgcaacattatgtggctgaaaaagaatataaaaagctagactctaccctctaagggtttagattttttgtgggattttttttttcctcatttttcttaaatccaagttggccgttttattagtatgtttcaaatgtgtattaccaatgtgggtgtaaatttttaaaaaatgattattgatagaagtttggcaggaaaattctttaagagctaacaagagaagagagtccagttttctggaaatatgtctttaagtattttagacattcctcgtcagtattaggaatttccatgggaaaagaggtttgcatgctggtaatgcaacctttgaaactttgtaaaggaaacatatatgtatatatttatgtatatgtaagtatgtgaatgtgcgcattttgcattccatatgaaaaaaatgccacgtctgtttaaattatttgatgtaggtttgggtttttgagatttgctggtgaagtcagtgacgaaaaataaaccttcccttatcttcctactctgcccctccccctaatgaaatcatattaagttgtttttttttttttttgtaatatacagctttttttttaaggcatcattttcgagggtctaaaattatctggtaaaacaaatgaaattaagtgatccaaagctgctgaagtatgtttgaactctccagtgccctatagctgcaagagttgaattagtcatgcagtcatatggcagcaggttggtgattcagtccgaccttctttaggtaaccgagcatttatttaaccaactataccactgcattgggacgtctgcacttgagcttctacaatctgatataaatctgaatacaggattattctgtttgaaaactttgctatgtgtgaactgtaatacttgatacatttttggtttgaagactttgtctaagcctcattatactgaagttgaagaaaccaaatgagctccaccctcactttgcctgccctgatatgatcacttgttgagtcactggagttcctttcattttggcactgatgctgttttctcttgtctgatttgaaacagtactggtaataatatggttgttgaaaatgtgatcacctttatctaaagtgggagaagatacatacacagtatggcaaatggataaaatattgtggcatcaactacttttaaagtagaaaagctatccattttatacaatcactgatacagtctatgtcaaaaaaccaacagaccattattcctcttgaagttagtttgattttatctttgtatggttgtctacaatttgttttcctgtaaatgcagatagttaaaatctaaaggatagaatgctttcctaaaacagaacattagcctttaaggttaaatagactttacattgtatctaagttaatctttataaagcactagaatttttggtcaaaagtcaaaatagtattagaatattgaaattattgatagctttcataatctcagcttttttgaacttccacaatttttggaatatgtcataatttttttccctgtttcaaatgtgttcagaggaaatagaatgtaaaacatcacaaaaaaaattgcagtacataaaatttctggactatgttagttacttgatctggaagtttaaaatttggactaaaaggttttattgaaataaagcctcttaaaatgaaaaatcatatacttttaacatcacttttaagctaataaatataagaattcttttggaaattagaggtggaaacacactggaacctcatgataattgaccctctggatcaccagattagtttaatttaacagatatgtccaaggaagttgagctatagggagtaagaaaaagcatcatgataacgtctagtcaataacatggcacttcagcagagattcatagatgatggtatgcccatgcatcatttgctcttcaaatatctatgtgcttggagccacagtttcctaagcgcatagtttttggtcctgcctcatgtaaaatagttaatgattatcatttacttggaaagattttacctgtgaagtgaaattctttcattgggggtaagggtatgaggtgatcaggaagtttcttctggaattttatcaagtccttgtattctaaaatagccaagcaaaatgatagtaaattctttgtctttgttctttcagtcagaggtatttattaagtacctactgtgtgctcagcactaaaggtttgttgataaaatgacaattaaaaaatggcatttagccaaaggccttttcagccaggagtaagaaaagatggttagtgatatttggaaatacctggatatttgctagaggaaaaatgaaagcaaaacttcgtacacagtgccttgcccataataggtactcaataagcaattgttcctcatagagtcttttgccatgatttatggtgttttttgaaatttgtcttaattgaaaaaagaccaaatatttcaaatgagcttataggcagctgtggccagtgaaaatatggggttgtacagttagttcctagaatgttattttgcactagttgtcacttagaaagatggggttcctgtagattttttggtgctaagggatactttgtcattatgatgaagtaagtgttaagtgtcagataaatagcacacagaatagttctttctgctggtctgttttttctcttcgttgttgttgtttttaattgtaaattgttatcaatcaaactattgtagcagctacaaagtaattcaccagcatgacaaaatggtcaaaaaataagtcatcagcacttaagaaatgaaagcaacttttgaaattttctgttaaaattgtcaaatatattttatgaagaatttataaaaggggaaaatgattgtaatttattgttcatgacttttttttttaaataaagtgagtttc

SEQ ID NO: 164019 - DNA, 7176 bp, Homo sapiens
  Payload ID: 12294
  Gene Symbol: PDS5A
  Gene Name: PDS5 cohesin associated factor A
  Uniprot ID: Q29RF7
  ENST ID: ENST00000303538
  CDS Start-End: 541-4554
ggccggcggaggaaggggagggagcgaggagcgcgcgctgctctcgcgtgctctcgcgccgctcgcgtgaccggccggtgtgtgcgcgaggccccggctcccggggcacggacggccgggcgcgcgcctctgcgaggggcgtccgggtccgagtcggcggtccgggccggcgcgaggtgcgtgcgggcgggccgcgggggtcccggacggacacaagcgcacacactcccggaggagccttcgaggctgctcttcctcggccagacggagagcggcactgtctccccgcccagcgctcactcgccccgcgtctccccccgcggcggctgctcctcctcggcaccgccagccccagcgccgctcccgggcgggcgggcggcggcggcggcggcggcgggacccgcggagccgctttgtgtgcagcccgactaggggcggcggcgcaaccacctgacagaggcccgggcgctcgatgcaccttccgcccgcatgaggaggagaggccggtagaggactgtgaaccaaaagttgtcccccaggatggacttcaccgcgcagcccaagcctgccactgccctctgtggcgtcgtgagtgccgacgggaagatcgcttaccctccgggggtaaaagagatcaccgacaagatcaccacggacgagatgatcaaacgcctgaagatggtagtgaaaacctttatggatatggatcaggactcagaagatgaaaaacagcagtatctcccactagccttgcatcttgcatctgaattcttcctcaggaaccccaataaagatgtgcgtctccttgtagcatgttgtttggctgatatctttcgtatctatgccccagaagctccatatacttcccatgataaacttaaggacatatttttgtttattaccagacaattaaaaggtttggaggatacaaagagtccacagtttaatagatacttttatttattagagaatttagcttgggttaaatcatataacatctgctttgaattggaagattgcaatgaaatttttattcagctttttagaactctcttctcagtgatcaacaatagccacaataagaaggtacaaatgcacatgctagatttgatgagttctatcatcatggaaggtgatggagttactcaagaattattggactccattcttattaacctcattcctgcacataagaacttaaataaacagtcctttgaccttgcaaaagtgctattgaaaagaacagtccagactattgaggcatgcattgctaattttttcaatcaagtcctggtgctgggaagatcatcagtaagtgatttgtcagaacatgtatttgatctgattcaggaactttttgctatagatcctcatttattattatccgtcatgccacagcttgaattcaaactaaagagcaatgatggagaagagcgattagctgttgttcgacttctagctaaattgtttggctccaaagattctgatttggcaacacagaatcgtcctctttggcaatgttttcttggacgatttaatgatattcatgttcctgtgagattagaaagtgtgaaatttgccagtcattgtttaatgaatcacccagatttagcgaaggatctcacagaatatttaaaggttagatcacatgatccagaagaagctattcgtcatgatgtcattgttactataataacagctgccaagagggacctggccttagtaaatgatcagctgcttggctttgtaagggaaagaacactggataaacggtggcgagtaagaaaagaagctatgatgggtctggctcagctttataagaaatactgtcttcatggtgaagcaggaaaggaagctgcagagaaagtcagctggataaaggacaaacttctgcatatttattatcagaacagcattgacgacaaactgttggtagagaaaatctttgctcagtatcttgtcccccacaacctggaaacagaagagagaatgaaatgcttatattacttatatgctagtttggatccaaatgctgtaaaagctctcaacgaaatgtggaagtgtcagaacatgcttcggagccatgtacgcgaactattggatttgcacaagcagcctacatcagaggctaactgttctgccatgtttggaaaactgatgaccatagcaaagaatttgcctgaccccgggaaagcacaagattttgtgaagaaatttaaccaggttctcggcgatgatgagaaacttcggtctcagttggagttattaattagcccaacctgttcttgcaaacaagcagatatttgtgtgagagaaatagcccggaaacttgcaaatcctaagcaaccaacaaatccttttctagagatggtcaaatttctgttggaaagaatcgcacctgtgcacattgattcagaagccataagtgcactagtgaaattgatgaataagtcaatagaggggacagcagatgatgaagaggagggtgtaagtccagatacagctatccgttcaggacttgaacttcttaaggttctgtcttttacacatcctacctcgttccactctgcagagacatatgagtccttgttacagtgcctaagaatggaggatgacaaggtagcagaagctgctattcaaatttttagaaatacaggtcacaaaatagaaacagaccttccccagatacgatcgaccttaattcccattttacatcaaaaagcaaagaggggtactccacaccaagcaaaacaggctgtgcactgtatacacgccatattcacaaataaagaagtccagcttgcacagatttttgagccactcagtaggagtctgaatgctgatgtgccagaacaacttataactccattagtttcattgggccacatttctatgttagcaccagatcagtttgcttccccaatgaaatctgtagtagcaaattttattgtgaaagatctgctaatgaatgacaggtcaacaggtgaaaagaatggaaaactgtggtctccagatgaagaggtttcccctgaagtactagcaaaggtacaggcaattaaacttctggtaaggtggctgttgggtatgaaaaacaaccagtctaaatctgccaattcaacccttcggttattatcagcgatgttggttagtgagggtgacctgacagagcaaaagaggatcagtaaatctgatatgtctcgcttgcgattagctgctggtagtgccataatgaagcttgctcaggaaccttgttaccatgaaattattaccccagaacagtttcagctctgtgcacttgttattaatgatgagtgttaccaagtaaggcagatatttgctcagaagctgcataaggcacttgtgaagttactgctcccattggagtatatggcgatctttgccttgtgtgccaaagatcctgtgaaggagagaagagcacacgcacgacaatgtttactgaaaaatatcagtatacgcagggaatacattaagcagaatcctatggctactgagaaattattatcactgttgcctgaatatgtagttccatacatgattcacctgctagcccatgatccagattttacaagatcacaagatgttgatcagcttcgtgatatcaaagagtgcctatggttcatgcttgaagttttaatgacaaagaatgaaaacaatagccatgcctttatgaagaagatggcagagaacatcaagttaaccagagatgcccagtctccagatgaatccaagacaaatgaaaaactgtatacagtatgtgatgtggctctctgtgttataaatagtaaaagtgctttgtgcaatgcagattcaccaaaggacccagtcctcccaatgaaattttttacacaacctgaaaaggacttctgtaacgataagagttatatttcagaagagacaagagtacttctgttaacaggaaagccaaagcctgctggagtactaggtgcagtaaataagcctttatcagcaacgggaaggaaaccctatgttagaagcactggcactgagactggaagcaatattaatgtaaattcagagctgaacccttcaaccggaaatcgatcaagggaacagagttcagaggcagcagaaactggagttagtgaaaatgaagagaaccctgtgaggattatttcagtcacacctgtaaagaatattgacccagtaaagaataaggaaattaattctgatcaggctacccagggcaacatcagcagtgaccgaggaaagaaaagaacagtaacagcagctggtgcagagaatatccaacaaaaaacagatgagaaagtagatgaatcgggacctcccgccccttccaaacccaggagaggacgtcgacccaagtctgaatctcagggcaatgctaccaaaaatgatgatctaaataaacctattaacaagggaaggaagagagctgcagtgggtcaggagagccctgggggtttggaagcaggtaatgccaaagcacccaaactgcaagatttagccaaaaaggcagcaccagcagaaagacaaattgacttacaaaggtaaaaatgcatttgcaaagggagaaaatgaaggccaaacagaagcaggctccagcttctgcaaaaacttggattcacaaatgtccctgaacagaaaatgaagctcacttcagaacacacactctctgccttgaaaactaaagagactattacttccttttcacatgaccacaagtcctctgatggaaatgtacagcagaaactcttgagagagaggctaaaagcaactctgttctcccccttcccctagacttttcttacgaaaagtcaataattaagcaaattgcttaacacttggttccagttcctgcctatctggagtttaaatgcgtaatacaccattaatttccacgctgcagtttttattttaaagaaagtaacaagatgtctttacactgacactgaaaattcatccattttagagccaggaattcccatgttacacaggaaaaaatagaagtctactgaattaattttttaaaagaaaagagatcagattaaatatttctttgtttttccttttggaaacttttatgtataattctttctgcctgcctacttttctgcaaaaatgagatgtacagatttcggttccctgctatgaaaagtgatgtggtagcaattttataaatgttgctttctgatttttatcagagtgagaaaattaaaattattgatttgcaagtagtaaacagttcatattttgatttcccctcattttagtttaatataatttgcaataaatgtacatattgttgtttgtttcataaagcatatcactttaaaatggtttttactcctgtgattatgttggaatatttggaattttaaaggagtaaagactgtccagcatttggttttataatgtttgtcaccagatttttattaatgtaaaaaaaatcaatttttaaaaaatagttggactttggcagcttttaaggaaagttggaggtgttttaggattgctatcaattttcagcattgtgctatttggaaataagtgttttgcttttgtctgatggtctgggctcatttttatgtttattttagaaaactgttgcatcaatatattatgtttcttggcattgttcagcataggtaatgtgtgcactttatgtgtacacataatcatatttaagttttttgcataaaataaatgcttctagatgtcatggcagtctttttaatctttttatcatatgctttcttgtgaattttttcatgttaaagagctaaagtcataacatgattacagtcaactctccattatctatataaaatagtgactaagcctcaggtttttaattttgtgataacaaaataacgaaggcatgtaagacctgattctggaggaacatgaaatttgtcttttctcatgtccagagttctatcctgcccccactgtccactgtagggtcatccgcaaagccctagcagaatgtgctcactccatttccttacacgtttctagcatgggtcagaggaaacaacatttgtgttataacttcgtcttgataggctgtagtgtacatgggatgtaaaacaaacaagtgtatcaaaggtggatgattctgttagagtgaagtttgagagtaaatgtcacttacgtttctcatagataatcaagagttggctgtgtattgactgaaagatgggtaattattttaaatatgcatttacacacatttaggtatcagaagatgcttagggaacaatggataccaatgatagaaaatgatacctttacaggggcagaaaaatccccactcttccttattgcctcttcagaaccctttagaaagtataaaatattgcctccaacatgctgaaaaagagtatctatgcataagtatcagagaagtccctcaagcaatcagtaggtgtgttctatttagagagagtttaaagttctcttagcatcagacaacttgattcctaaggtttccagtgtgtcaccaacaaaaagtgcattgatagggacctttgtctcttcctccctttgattaattgcccggcatcacagtttactagattaccaagtgttacatcatattaaataaaatgtagcagaaccatctgcatcaatatattcctgtttagatttttgcaggagagaagttaaaaggatttgctccttgtatgatgtaagtggcccaccccaattttgtaacatgatgcaagtgtctggcactaagggaagcaagagtagggttgtggaaagaccaagctgatggggagggacttgtttacgggaatttttttagttttccttttcaaaggaaaacattaaaatcccttaggaatttggtattcacatctcagagaactacaacacaaaagtgcagacttatatttgagaattaatgttaaccctttgtgtctagtttgaagcttcttgtatttgtctaaaacaacaagccagaattttgtatctcctttgataaaaagtgtgtataatgtaaagtagttttgcatattcttgtgctgcacatgggctgaatttttaaattttttttaaaaacttgaagcagaaccttgtaatttgtgtaaatgacaagtgtaaaatcctaccataaaatgctaaaaatatgcactgtttcaaataaaaccaagaaatgcagcatta

SEQ ID NO: 164020 - DNA, 781 bp, Homo sapiens
  Payload ID: 12294
  Gene Symbol: PDS5A
  Gene Name: PDS5 cohesin associated factor A
  ENST ID: ENST00000507020
  CDS Start-End: 1-381
ttaattcccattttacatcaaaaagcaaagaggggtactccacaccaagcaaaacaggctgtgcactgtatacacgccatattcacaaataaagaagtccagcttgcacagatttttgagccactcagtaggagtctgaatgctgatgtgccagaacaacttataactccattagtttcattgggccacatttctatgttagcaccagatcagtttgcttccccaatgaaatctgtagtagcaaattttattgtgaaagatctgctaatgaatgacaggtcaacaggtgaaaagaatggaaaactgtggtctccagatgaagaggtttcccctgaagtactagcaaagcactttgggaggcagagcaggaggatcgcttgagcccaagagttcaagaccaacctgggcagcatacatgttaatattttataggtacaggcaattaaacttctggtaaggtggctgttgggtatgaaaaacaaccagtctaaatctgccaattcaacccttcggttattatcagcgatgttggttagtgagggtgacctgacagagcaaaagaggatcagtaaatctgatatgtctcgcttgcgattagctgctggtagtgccataatgaagcttgctcaggaaccttgttaccatgaaattattaccccagaacagtttcagctctgtgcacttgttattaatgatgagtgttaccaagtaaggcagatatttgctcagaagctgcataaggcacttgtgaagttactgctcccattggagtatatggcga

SEQ ID NO: 164021 - DNA, 494 bp, Homo sapiens
  Payload ID: 12294
  Gene Symbol: PDS5A
  Gene Name: PDS5 cohesin associated factor A
  ENST ID: ENST00000513798
  CDS Start-End: 1-494
atctcccactagccttgcatcttgcatctgaattcttcctcaggaaccccaataaagatgtgcgtctccttgtagcatgttgtttggctgatatctttcgtatctatgccccagaagctccatatacttcccatgataaacttaagtggcgagtaagaaaagaagctatgatgggtctggctcagctttataagaaatactgtcttcatggtgaagcaggaaaggaagctgcagagaaagtcagctggataaaggacaaacttctgcatatttattatcagaacagcattgacgacaaactgttggtagagaaaatctttgctcagtatcttgtcccccacaacctggaaacagaagagagaatgaaatgcttatattacttatatgctagtttggatccaaatgctgtaaaagctctcaacgaaatgtggaagtgtcagaacatgcttcggagccatgtacgcgaactattggatttgcacaagcagcctaca

SEQ ID NO: 164022 - DNA, 581 bp, Homo sapiens
  Payload ID: 12294
  Gene Symbol: PDS5A
  Gene Name: PDS5 cohesin associated factor A
  ENST ID: ENST00000512643
  CDS Start-End: 1-132
agcaatgatggagaagagcgattagctgttgttcgacttctagctaaattgtttggctccaaagattctgatttggcaacacagaatcgtcctctttggcaatgttttcttggacgaatatttaaaggttagatcacatgatccagaagaagctattcgtcatgatgtcattgttactataataacagctgccaagagggacctggccttagtaaatgatcagctgcttggctttgtaagggaaagaacactggataaacggtggcgagtaagaaaagaagctatgatgggtctggctcagctttataagaaatactgtcttcatggtgaagcaggaaaggaagctgcagagaaagtcagctggataaaggacaaacttctgcatatttattatcagaacagcattgacgacaaactgttggtagagaaaatctttgctcagtatcttgtcccccacaacctggaaacagaagagagaatgaaatgcttatattacttatatgctagtttggatccaaatgctgtaaaagctctcaacgaaatgtggaagtgtcagaacatgcttcggagccatgtacgcg

SEQ ID NO: 164023 - DNA, 2685 bp, Homo sapiens
  Payload ID: 12294
  Gene Symbol: PDS5A
  Gene Name: PDS5 cohesin associated factor A
  Uniprot ID: Q29RF7
  ENST ID: ENST00000503396
  CDS Start-End: 541-2343
ggccggcggaggaaggggagggagcgaggagcgcgcgctgctctcgcgtgctctcgcgccgctcgcgtgaccggccggtgtgtgcgcgaggccccggctcccggggcacggacggccgggcgcgcgcctctgcgaggggcgtccgggtccgagtcggcggtccgggccggcgcgaggtgcgtgcgggcgggccgcgggggtcccggacggacacaagcgcacacactcccggaggagccttcgaggctgctcttcctcggccagacggagagcggcactgtctccccgcccagcgctcactcgccccgcgtctccccccgcggcggctgctcctcctcggcaccgccagccccagcgccgctcccgggcgggcgggcggcggcggcggcggcggcgggacccgcggagccgctttgtgtgcagcccgactaggggcggcggcgcaaccacctgacagaggcccgggcgctcgatgcaccttccgcccgcatgaggaggagaggccggtagaggactgtgaaccaaaagttgtcccccaggatggacttcaccgcgcagcccaagcctgccactgccctctgtggcgtcgtgagtgccgacgggaagatcgcttaccctccgggggtaaaagagatcaccgacaagatcaccacggacgagatgatcaaacgcctgaagatggtagtgaaaacctttatggatatggatcaggactcagaagatgaaaaacagcagtatctcccactagccttgcatcttgcatctgaattcttcctcaggaaccccaataaagatgtgcgtctccttgtagcatgttgtttggctgatatctttcgtatctatgccccagaagctccatatacttcccatgataaacttaaggacatatttttgtttattaccagacaattaaaaggtttggaggatacaaagagtccacagtttaatagatacttttatttattagagaatttagcttgggttaaatcatataacatctgctttgaattggaagattgcaatgaaatttttattcagctttttagaactctcttctcagtgatcaacaatagccacaataagaaggtacaaatgcacatgctagatttgatgagttctatcatcatggaaggtgatggagttactcaagaattattggactccattcttattaacctcattcctgcacataagaacttaaataaacagtcctttgaccttgcaaaagtgctattgaaaagaacagtccagactattgaggcatgcattgctaattttttcaatcaagtcctggtgctgggaagatcatcagtaagtgatttgtcagaacatgtatttgatctgattcaggaactttttgctatagatcctcatttattattatccgtcatgccacagcttgaattcaaactaaagagcaatgatggagaagagcgattagctgttgttcgacttctagctaaattgtttggctccaaagattctgatttggcaacacagaatcgtcctctttggcaatgttttcttggacgatttaatgatattcatgttcctgtgagattagaaagtgtgaaatttgccagtcattgtttaatgaatcacccagatttagcgaaggatctcacagaatatttaaaggttagatcacatgatccagaagaagctattcgtcatgatgtcattgttactataataacagctgccaagagggacctggccttagtaaatgatcagctgcttggctttgtaagggaaagaacactggataaacggtggcgagtaagaaaagaagctatgatgggtctggctcagctttataagaaatactgtcttcatggtgaagcaggaaaggaagctgcagagaaagtcagctggataaaggacaaacttctgcatatttattatcagaacagcattgacgacaaactgttggtagagaaaatctttgctcagtatcttgtcccccacaacctggaaacagaagagagaatgaaatgcttatattacttatatgctagtttggatccaaatgctgtaaaagctctcaacgaaatgtggaagtgtcagaacatgcttcggagccatgtacgcgaactattggatttgcacaagcagcctacatcagaggctaactgttctgccatgtttggaaaactgatgaccatagcaaagaatttgcctgaccccgggaaagcacaagattttgtgaagaaatttaaccaggttctcggcgatgatgagaaacttcggtctcagttggagttattaattagcccaacctgttcttgcaaacaagcagatatttgtgtggttagtaaatcatacttcacactttttctctagctttacttacagaaatatgtattttattaaagcctgttttacatacagtgatttgtgtaaatgtaacaatattgtgagctctgaattactttggagtatatctattgtcaagttaattctctatttaccattcactctcagccacattccaggaaaataactaaagaactaagccagggagattggtcttaggaattttacaagataaagtactttgaacttagtagacattcattgagtaatgataagtattttctgaatgcttgtgtacatgtgcattttcttctttcatgtattagaatggaaataatcgtcaataaattagtagtagtaacattgcca

SEQ ID NO: 164024 - DNA, 7497 bp, Homo sapiens
  Payload ID: 12295
  Gene Symbol: PDS5B
  Gene Name: PDS5 cohesin associated factor B
  Uniprot ID: Q9NTI5
  ENST ID: ENST00000315596
  CDS Start-End: 187-4530
gagcagccgccgaagagcgcttggcgccattttgaagcggagaggaggaggaacggcagggctggctgcggaaggggagggggggggagaaggcgattggatgcggcggcggcggcggatcccggagagccccggagtgagcggagtagcgagtcggcaacccggaggggtagaaatatttctgtcatggctcattcaaagactaggaccaatgatggaaaaattacatatccgcctggggtcaaggaaatatcagataaaatatctaaagaggagatggtgagacgattaaagatggttgtgaaaacttttatggatatggaccaggactctgaagaagaaaaggagctttatttaaacctagctttacatcttgcttcagatttttttctcaagcatcctgataaagatgttcgcttactggtagcctgctgccttgctgatattttcaggatttatgctcctgaagctccttacacatcccctgataaactaaaggatatatttatgtttataacaagacagttgaaggggctagaggatacaaagagcccacaattcaataggtatttttatttacttgagaacattgcttgggtcaagtcatataacatatgctttgagttagaagatagcaatgaaattttcacccagctatacagaaccttattttcagttataaacaatggccacaatcagaaagtccatatgcacatggtagaccttatgagctctattatttgtgaaggtgatacagtgtctcaggagcttttggatacggttttagtaaatctggtacctgctcataagaatttaaacaagcaagcatatgatttggcaaaggctttactgaagaggacagctcaagctattgagccatatattaccaatttttttaatcaggttctgatgcttgggaaaacatctatcagcgatttgtcagagcatgtctttgacttaattttggagctctacaatattgatagtcatttgctgctctctgttttaccccagcttgaatttaaattaaagagcaatgataatgaggagcgcctacaagttgttaaactactggcaaaaatgtttggggcaaaggattcagaattggcttctcaaaacaagccactttggcagtgctacttgggcaggtttaatgatatccatgtaccaatccgcctggaatgtgtgaaatttgctagccattgtctcatgaaccatcctgatttagcaaaagacttaacagagtatcttaaagtgaggtcacatgaccctgaggaagctattagacatgatgttattgtgtcaatagttacagctgctaaaaaggatattcttctggtcaatgatcacttacttaattttgtgagagagagaacattagacaaacgatggagagtacgcaaagaagccatgatgggacttgcccaaatttataagaaatatgctttacagtcagcagctggaaaagatgctgcaaaacagatagcatggatcaaagacaaattgctacatatatattatcaaaatagtattgatgatcgactacttgttgaacggatctttgctcaatacatggttcctcacaatttagaaactacagaacggatgaaatgcttatattacttgtatgccacactggatttaaatgctgtgaaagcattgaatgaaatgtggaaatgtcaaaatctgctccgacatcaagtaaaggatttgcttgacttgattaagcaacccaaaacagatgccagtgtcaaggccatattttcaaaagtgatggttattacaagaaatttacctgatcctggtaaggctcaggatttcatgaagaaattcacacaggtgttagaagatgatgagaaaataagaaagcagttagaagtacttgttagtccaacatgctcctgcaagcaggctgaaggttgtgtgcgtgaaataactaagaagttgggcaaccccaaacagcctacaaatcctttcctggaaatgatcaagtttctcttggagaggatagcacctgtgcacatagataccgaatctatcagtgctcttattaaacaagtgaacaaatcaatagatggaacagcagatgatgaagatgagggtgttccaactgatcaagccatcagagcaggtcttgaactgcttaaggtactctcatttacacatcccatctcatttcattctgctgaaacatttgaatcattactggcttgtctgaaaatggatgatgaaaaagtagcagaagctgcactacaaattttcaaaaacacaggaagcaaaattgaagaggattttccacacatcagatcagccttgcttcctgttttacatcacaaatctaaaaaaggacccccccgtcaagccaaatatgccattcattgtatccatgcgatattttctagtaaagagacccagtttgcacagatatttgagcctctgcataagagcctagatccaagcaacctggaacatctcataacaccattggttactattggtcatattgctctccttgcacctgatcaatttgctgctcctttgaaatctttggtagctactttcattgtgaaagatcttctcatgaatgatcggcttccagggaaaaagacaactaaactttgggttccagatgaagaagtatctcctgagacaatggtcaaaattcaggctattaaaatgatggttcgatggctacttggaatgaaaaataatcacagtaaatcaggaacttctaccttaagattgctaacaacaatattgcatagtgatggagacttgacagaacaggggaaaattagtaaaccagatatgtcacgtctgagacttgctgctgggagtgctattgtgaagctggcacaagaaccctgttaccatgaaatcatcacattagaacaatatcagctatgtgcattagctatcaacgatgaatgctatcaagtaagacaagtgtttgcccagaaacttcacaaaggcctttcccgtttacggcttccacttgagtatatggcaatctgtgccctttgtgcaaaagatcctgtaaaggagagaagagctcatgctaggcaatgtttggtgaaaaatataaatgtaaggcgggagtatctgaagcagcatgcagctgttagtgaaaaattattgtctcttctaccagagtatgttgttccatatacaattcaccttttggcacatgacccagattatgtcaaagtacaggatattgaacaacttaaagatgttaaagaatgtctttggtttgttctggaaatattaatggctaaaaatgaaaataacagtcacgcttttatcagaaagatggtagaaaatattaaacaaacaaaagatgcccaaggaccagatgatgcaaaaatgaatgaaaaactgtacactgtgtgtgatgttgccatgaatatcatcatgtcaaagagtactacatacagtttggaatctcctaaagacccggtactaccagctcgtttcttcactcaacctgacaagaatttcagtaacaccaaaaattatctgcctcctgaaatgaaatcatttttcactcctggaaaacctaaaacaaccaatgttctaggagctgttaacaagccactttcatcagcaggcaagcaatctcagaccaaatcatcacgaatggaaactgtaagcaatgcaagcagcagctcaaatccaagctctcctggaagaataaaggggaggcttgatagttctgaaatggatcacagtgaaaatgaagattacacaatgtcttcacctttgccggggaaaaaaagtgacaagagagacgactctgatcttgtaaggtctgaattggagaagcctagaggcaggaaaaaaacgcccgtcacagaacaggaggagaaattaggtatggatgacttgactaagttggtacaggaacagaaacctaaaggcagtcagcgaagtcggaaaagaggccatacggcttcagaatctgatgaacagcagtggcctgaggaaaagaggctcaaagaagatatattagaaaatgaagatgaacagaatagtccgccaaaaaagggtaaaagaggccgaccaccaaaacctcttggtggaggtacaccaaaagaagagccaacaatgaaaacttctaaaaaaggaagcaaaaaaaaatctggacctccagcaccagaggaggaggaagaagaagaaagacaaagtggaaatacggaacagaagtccaaaagcaaacagcaccgagtgtcaaggagagcacagcagagagcagaatctcctgaatctagtgcaattgaatccacacagtccacaccacagaaaggacgaggaagaccatcaaaaacgccatcaccatcacaaccaaaaaaaaatgtccgtgtaggacgctccaaacaagcagctactaaggaaaatgattcaagtgaagaagtagatgtgtttcagggtagctctcctgtcgatgatattccacaggaagaaacagaggaggaggaagtttctacagtaaatgtacggcggcgaagtgctaaaagggaacggcgatgaacaaatgtaattaataactttctctgtgaaagctttggaaaaatctttttttttttttttggtcaagcttgaggctgaataaagcctttgatgcacaaaatgggactgctgaagagtggacagttggaccttactttggtgaccccatacatttgtggtcacatgctttagccatacacatggtaacattgactatggagtcttgtgaaagtgtaatgtgcgatggctatgtagacataaagaagaaacttgtaaatatcttttttcttttttttaatgtttctgatttctgaagtgcttgtatagcttttatctgcggctttaaactgacagtacccgactgtttattggatctattgatttgaaaagaatttgttaggatagatcttaagcagtaatctgtcagtgtttgtatttgtattctctgcaattttactgtgaaaaaaaatttgttttcaacaattggtgtcattttcttgatgtcactatttgttggagagttaaatggtctcttccctttgtgtatcttacctagtgtttactcctgggcacccttaatcttcagaggtgctaaattgtctgccattacaccagaaggatgcctctgataggaggacaaccatgcaaattgtgaaatagtcctgaagttcttggattactttacacctcagtattgatttgtcccagaattttctggcctttcatggcaatgaaaattttaagaagaaagatttaaagtattttaattttaaagagtgtgttataaaataatgtactgaattctttatcccattttatcatcctttcagtttttattaatctactgtatcaataaaattctgtaatttgaatgagtttttaatagtctagaatgttattgtgtatagatatttcctcttgaacgttatgttcagaaaatgcaaattacactataatataaaacctgatatatacacattagaaatattccagttctccgtaacagtgtaaagttaatcagaaagaaaaaattttattgatgcagtgtgtctttataaagctgttcttgaaagccaagtgttttgtattttatagtgagttgcatgtttttgaaaaaaagtgctgaaaatgggatgtgctgttttctgtaaattcatatttagccatagtatatgatagattgccccataacatagtttttcatcaagagtttattattgtactttattttggagccaaaaaattgattctggggggtgggggcagcgtagaagtggtatatccaagtatatcagctactgtagttgtcacagtcttgtgaactttgaatgaaattccactttgtccagattgggagaagtggaaatttatttggatttagagcaggtctttttttttcttcattgtaatctgcaaaatgtagaaataaattacttaaggcagtatcctttatacagttgtataaactgtattttgaaccaaaacatataggttactacttaatgcttacctaatttcattttagtattttaggtgctgttatgttttttcatggttaacaccagaggggaaaaaatcatattctaacttattaaatttatcacattgaatagtggaacattttcatatgatacaccattatgtttaagatatatttccaagattggttataatagatggggcatataataaagaagctactattttggaaaatgacattttactatttgccaatgtatattgcaattgatgtgattatttttcttttaaagatttgtttgtgtttatgaaacagccatttattttttaaaaagtgttttgaattgtgtcttaatctctccatattcaactattcttcatttacaacaatagtgacaccagtaattatgagaggctgtcatatatcaaagcagctcaggtgggatcaacatacattggttttgaaatgtttccttagctcggttctcccaaacacataatttctgtttcagcagtacaaaggcatgttttaaaatctataacataaagaataaggaatagctttgtatttttgtcattgattaaattgcaccagaaatgtttatggaaatattaagaacattttataaaacatacgaaaaagtgattgtgaaggatttttatttgcatgattatagttaagcaaatttcatttcacatttttgtaatgctgtacagcagttcacaaaaaaatgttcattgtagattttgttatgttcaatgccaatgagtctgtaattttacgacctgtctgttctttttttgggtggattacgatgtaaatttttcttttctttctttctttttttttttttttgtgtagaaaaataggtgcaataatgatcaaagttttgatgtcttgagtctccatcttaggggattatcttacgtttaagcttaacatttcatgtagtaagatttggagagccacatactttacagtaaaattaagtgtgtataaaacattaattgctaacaattgttagcaaactatttcagtgataatgttcattttgaaaatatgtactgtataacattaagaaaatatttaactccctgtaacaagttccattatgaaaatcttattcctcagtgaggttatcttgctgcactctgtagcaaatttgtttaatctacattataataaaatttcttgctgcagtgcaacaggaggctttttcagtgatcttcactgtatatgtaaattacaaatgtggctgtaaaacttattccaggtattaaaggttaaattgctttctatatcttcttataacttgtaagtctgatttttaagatttccttttgtccacttgtaagaatgtcaggaatttaagaatttgtttaaattaggcatatctctgccatcacatagtattatgtcaccataatgaacaattgctatttaaatagataaccaattttcagacacatttttggatttctgtgaagttgaataaacataaaagctaa

SEQ ID NO: 164025 - DNA, 5246 bp, Homo sapiens
  Payload ID: 12295
  Gene Symbol: PDS5B
  Gene Name: PDS5 cohesin associated factor B
  Uniprot ID: Q9NTI5
  ENST ID: ENST00000450460
  CDS Start-End: 66-4241
ccggagagccccggagtgagcggagtagcgagtcggcaacccggaggggtagaaatatttctgtcatggctcattcaaagactaggaccaatgatggaaaaattacatatccgcctggggtcaaggaaatatcagataaaatatctaaagaggagatggtgagacgattaaagatggttgtgaaaacttttatggatatggaccaggactctgaagaagaaaaggagctttatttaaacctagctttacatcttgcttcagatttttttctcaagcatcctgataaagatgttcgcttactggtagcctgctgccttgctgatattttcaggatttatgctcctgaagctccttacacatcccctgataaactaaaggatatatttatgtttataacaagacagttgaaggggctagaggatacaaagagcccacaattcaataggtatttttatttacttgagaacattgcttgggtcaagtcatataacatatgctttgagttagaagatagcaatgaaattttcacccagctatacagaaccttattttcagttataaacaatggccacaatcagaaagtccatatgcacatggtagaccttatgagctctattatttgtgaaggtgatacagtgtctcaggagcttttggatacggttttagtaaatctggtacctgctcataagaatttaaacaagcaagcatatgatttggcaaaggctttactgaagaggacagctcaagctattgagccatatattaccaatttttttaatcaggttctgatgcttgggaaaacatctatcagcgatttgtcagagcatgtctttgacttaattttggagctctacaatattgatagtcatttgctgctctctgttttaccccagcttgaatttaaattaaagagcaatgataatgaggagcgcctacaagttgttaaactactggcaaaaatgtttggggcaaaggattcagaattggcttctcaaaacaagccactttggcagtgctacttgggcaggtttaatgatatccatgtaccaatccgcctggaatgtgtgaaatttgctagccattgtctcatgaaccatcctgatttagcaaaagacttaacagagtatcttaaagtgaggtcacatgaccctgaggaagctattagacatgatgttattgtgtcaatagttacagctgctaaaaaggatattcttctggtcaatgatcacttacttaattttgtgagagagagaacattagacaaacgatggagagtacgcaaagaagccatgatgggacttgcccaaatttataagaaatatgctttacagtcagcagctggaaaagatgctgcaaaacagatagcatggatcaaagacaaattgctacatatatattatcaaaatagtattgatgatcgactacttgttgaacggatctttgctcaatacatggttcctcacaatttagaaactacagaacggatgaaatgcttatattacttgtatgccacactggatttaaatgctgtgaaagcattgaatgaaatgtggaaatgtcaaaatctgctccgacatcaagtaaaggatttgcttgacttgattaagcaacccaaaacagatgccagtgtcaaggccatattttcaaaagtgatggttattacaagaaatttacctgatcctggtaaggctcaggatttcatgaagaaattcacacaggtgttagaagatgatgagaaaataagaaagcagttagaagtacttgttagtccaacatgctcctgcaagcaggctgaaggttgtgtgcgtgaaataactaagaagttgggcaaccccaaacagcctacaaatcctttcctggaaatgatcaagtttctcttggagaggatagcacctgtgcacatagataccgaatctatcagtgctcttattaaacaagtgaacaaatcaatagatggaacagcagatgatgaagatgagggtgttccaactgatcaagccatcagagcaggtcttgaactgcttaaggtactctcatttacacatcccatctcatttcattctgctgaaacatttgaatcattactggcttgtctgaaaatggatgatgaaaaagtagcagaagctgcactacaaattttcaaaaacacaggaagcaaaattgaagaggattttccacacatcagatcagccttgcttcctgttttacatcacaaatctaaaaaaggacccccccgtcaagccaaatatgccattcattgtatccatgcgatattttctagtaaagagacccagtttgcacagatatttgagcctctgcataagagcctagatccaagcaacctggaacatctcataacaccattggttactattggtcatattgctctccttgcacctgatcaatttgctgctcctttgaaatctttggtagctactttcattgtgaaagatcttctcatgaatgatcggcttccagggaaaaagacaactaaactttgggttccagatgaagaagtatctcctgagacaatggtcaaaattcaggctattaaaatgatggttcgatggctacttggaatgaaaaataatcacagtaaatcaggaacttctaccttaagattgctaacaacaatattgcatagtgatggagacttgacagaacaggggaaaattagtaaaccagatatgtcacgtctgagacttgctgctgggagtgctattgtgaagctggcacaagaaccctgttaccatgaaatcatcacattagaacaatatcagctatgtgcattagctatcaacgatgaatgctatcaagtaagacaagtgtttgcccagaaacttcacaaaggcctttcccgtttacggcttccacttgagtatatggcaatctgtgccctttgtgcaaaagatcctgtaaaggagagaagagctcatgctaggcaatgtttggtgaaaaatataaatgtaaggcgggagtatctgaagcagcatgcagctgttagtgaaaaattattgtctcttctaccagagtatgttgttccatatacaattcaccttttggcacatgacccagattatgtcaaagtacaggatattgaacaacttaaagatgttaaagaatgtctttggtttgttctggaaatattaatggctaaaaatgaaaataacagtcacgcttttatcagaaagatggtagaaaatattaaacaaacaaaagatgcccaaggaccagatgatgcaaaaatgaatgaaaaactgtacactgtgtgtgatgttgccatgaatatcatcatgtcaaagagtactacatacagtttggaatctcctaaagacccggtactaccagctcgtttcttcactcaacctgacaagaatttcagtaacaccaaaaattatctgcctcctgaaatgaaatcatttttcactcctggaaaacctaaaacaaccaatgttctaggagctgttaacaagccactttcatcagcaggcaagcaatctcagaccaaatcatcacgaatggaaactgtaagcaatgcaagcagcagctcaaatccaagctctcctggaagaataaaggggaggcttgatagttctgaaatggatcacagtgaaaatgaagattacacaatgtcttcacctttgccggggaaaaaaagtgacaagagagacgactctgatcttgtaaggtctgaattggagaagcctagaggcaggaaaaaaacgcccgtcacagaacaggaggagaaattaggtatggatgacttgactaagttggtacaggaacagaaacctaaaggcagtcagcgaagtcggaaaagaggccatacggcttcagaatctgatgaacagcagtggcctgaggaaaagaggctcaaagaagatatattagaaaatgaagatgaacagaatagtccgccaaaaaagggtaaaagaggccgaccaccaaaacctcttggtggaggtacaccaaaagaagagccaacaatgaaaacttctaaaaaaggaagcaaaaaaaaatctggacctccagcaccagaggaggaggaagaagaagaaagacaaagtggaaatacggaacagaagtccaaaagcaaacagcaccgagtgtcaaggagagcacagcagagagcagaatctcctgaatctagtgcaattgaatccacacagtccacaccacagaaaggacgaggaagaccatcaaaaacgccatcaccatcacaaccaaaaaaaaatgtgtaagttgtaaatattacatttcaaaccaatttcaaattattttgcaaaagttcctaaatttgtaaacatacatattgctgtatttaaattccatatatttagccccattacactaggtacggcggcgaagtgctaaaagggaacggcgatgaacaaatgtaattaataactttctctgtgaaagctttggaaaaatctttttttttttttttggtcaagcttgaggctgaataaagcctttgatgcacaaaatgggactgctgaagagtggacagttggaccttactttggtgaccccatacatttgtggtcacatgctttagccatacacatggtaacattgactatggagtcttgtgaaagtgtaatgtgcgatggctatgtagacataaagaagaaacttgtaaatatcttttttcttttttttaatgtttctgatttctgaagtgcttgtatagcttttatctgcggctttaaactgacagtacccgactgtttattggatctattgatttgaaaagaatttgttaggatagatcttaagcagtaatctgtcagtgtttgtatttgtattctctgcaattttactgtgaaaaaaaatttgttttcaacaattggtgtcattttcttgatgtcactatttgttggagagttaaatggtctcttccctttgtgtatcttacctagtgtttactcctgggcacccttaatcttcagaggtgctaaattgtctgccattacaccagaaggatgcctctgataggaggacaaccatgcaaattgtgaaatagtcctgaagttcttggattactttacacctcagtattgatttgtcccagaattttctggcctttcatggcaatgaaaattttaagaagaaagatttaaagtattttaattttaaagagtgtgttataaaataatgtactgaattctttatcccattttatcatcctttcagtttttattaatctactgtatcaataaaattctgtaatttgaatgagt

SEQ ID NO: 164026 - DNA, 906 bp, Homo sapiens
  Payload ID: 12295
  Gene Symbol: PDS5B
  Gene Name: PDS5 cohesin associated factor B
  ENST ID: ENST00000447833
  CDS Start-End: 1-906
attaaacaaacaaaagatgcccaaggaccagatgatgcaaaaatgaatgaaaaactgtacactgtgtgtgatgttgccatgaatatcatcatgtcaaagagtactacatacagtttggaatctcctaaagacccggtactaccagctcgtttcttcactcaacctgacaagaatttcagtaacaccaaaaattatctgcctcctgaaatgaaatcatttttcactcctggaaaacctaaaacaaccaatgttctaggagctgttaacaagccactttcatcagcaggcaagcaatctcagaccaaatcatcacgaatggaaactgtaagcaatgcaagcagcagctcaaatccaagctctcctggaagaataaaggggaggcttgatagttctgaaatggatcacagtgaaaatgaagattacacaatgtcttcacctttgccggggaaaaaaagtgacaagagagacgactctgatctttctgaattggagaagcctagaggcaggaaaaaaacgcccgtcacagaacaggaggagaaattaggtatggatgacttgactaagttggtacaggaacagaaacctaaaggcagtcagcgaagtcggaaaagaggccatacggcttcagaatctgatgaacagcagtggcctgaggaaaagaggctcaaagaagatatattagaaaatgaagatgaacagaatagtccgccaaaaaagggtaaaagaggccgaccaccaaaacctcttggtggaggtacaccaaaagaagagccaacaatgaaaacttctaaaaaaggaagcaaaaaaaaatctggacctccagcaccagaggaggaggaagaagaagaaagacaaagtggaaatacggaacagaagtccaaaagcaaacagcaccgagtgtcaagg

SEQ ID NO: 164027 - DNA, 2747 bp, Homo sapiens
  Payload ID: 12296
  Gene Symbol: PCIF1
  Gene Name: PDX1 C-terminal inhibiting factor 1
  Uniprot ID: Q9H4Z3
  ENST ID: ENST00000372409
  CDS Start-End: 365-2479
atggcggcgcggccgcggcgaggtccctcagaggcggtaccagcgcatgcgcagcgcggagtcccggcccgggacacaagatggcggcagcggcgctggggagggcgaggcggaggcggcaaaacgggcggtcgagcagaacgtgtagccgcgtcccctccagtccgctccgggcagctgctgatgcaaggaatcccctgggctcccgtccactccactgctgaccagcccattcgcctgtgctgagtcttcctgcaggcctttccttgcctctgtgggaccctgtgggggtccatccggctggagaagaaaagcctctcatgctaacgttgcagaccccagagggtcctgtgtgggtgtggagatggccaatgagaatcacggcagcccccgggaggaagcgtccctgctgagtcactccccaggtacctccaatcagagccagccctgttctccaaagccaatccgcctggttcaggacctcccagaggagctggtgcatgcaggctgggagaagtgctggagccggagggagaatcgtccctactacttcaaccgattcaccaaccagtccctgtgggagatgcccgtgctggggcagcacgatgtgatttcggaccctttggggctgaatgcgaccccactgccccaagactcaagcttggtggaaactcccccggctgagaacaagcccagaaagcggcagctctcggaagagcagccaagcggcaatggtgtgaagaagcccaagattgaaatcccagtgacacccacaggccagtcggtgcccagctcccccagtatcccaggaaccccaacgctgaagatgtggggtacgtcccctgaagataaacagcaggcagctctcctacgacccactgaggtctactgggacctggacatccagaccaatgctgtcatcaagcaccgggggccttcagaggtgctgcccccgcatcccgaagtggaactgctccgctctcagctcatcctgaagcttcggcagcactatcgggagctgtgccagcagcgagagggcattgagcctccacgggagtctttcaaccgctggatgctggagcgcaaggtggtagacaaaggatctgaccccctgttgcccagcaactgtgaaccagtcgtgtcaccttccatgtttcgtgaaatcatgaacgacattcctatcaggttatcccgaatcaagttccgggaggaagccaagcgcctgctctttaaatatgcggaggccgccaggcggctcatcgagtccaggagtgcatcccctgacagtaggaaggtggtcaaatggaatgtggaagacacctttagctggcttcggaaggaccactcagcctccaaggaggactacatggatcgcctggagcatctgcggaggcagtgtggcccccacgtctcggccgcagccaaggactccgtggaaggcatctgcagtaagatctaccacatctccctggagtacgtcaaacggatccgagagaagcaccttgccatcctcaaggaaaacaacatctcagaggaggtggaggcccctgaggtggagccccgcctagtgtactgctacccagtccggctggctgtgtctgcaccgcccatgcccagcgtggagatgcacatggagaacaacgtggtctgcatccggtataagggagagatggtcaaggtcagccgcaactacttcagcaagctgtggctcctttaccgctacagctgcattgatgactctgcctttgagaggttcctgccccgggtctggtgtcttctccgacggtaccagatgatgttcggcgtgggcctctacgaggggactggcctgcagggatcgctgcctgtgcatgtctttgaggccctccaccgactctttggcgtcagcttcgagtgcttcgcctcacccctcaactgctacttccgccagtactgttctgccttccccgacacagacggctactttggctcccgcgggccctgcctagactttgctccactgagtggttcatttgaggccaaccctcccttctgcgaggagctcatggatgccatggtctctcactttgagagactgcttgagagctcaccggagcccctgtccttcatcgtgttcatccctgagtggcgggaacccccaacaccagcgctcacccgcatggagcagagccgcttcaaacgccaccagttgatcctgcctgcctttgagcatgagtaccgcagtggctcccagcacatctgcaagaaggaggaaatgcactacaaggccgtccacaacacggctgtgctcttcctacagaacgaccctggctttgccaagtgggcgccgacgcctgaacggctgcaggagctgagtgctgcctaccggcagtcaggccgcagccacagctctggttcttcctcatcgtcctcctcggaggccaaggaccgggactcgggccgtgagcagggtcctagccgcgagcctcaccccacttaacatatcctgcggggaggaggagccccaggggtgctagtctggactgctgggactcgggcccctggggcctcagagggaccccggctgccactgacatatgaagattatggttctgccagggctcccctccctgcctgtccccaagtcctcacctcaaactccctccaagtcccatgtatataggtcctgatgccttcccaaccccgcccctcaccctgttgccaccttgtttcatttgtaaaaggaaatacagaaacccccccaagaa

SEQ ID NO: 164028 - DNA, 1324 bp, Homo sapiens
  Payload ID: 12296
  Gene Symbol: PCIF1
  Gene Name: PDX1 C-terminal inhibiting factor 1
  ENST ID: ENST00000479348
  CDS Start-End: 1-914
tcctcaaggaaaacaacatctcagaggaggtggaggcccctgaggtggagccccgcctagtgtactgctacccagtccggctggctgtgtctgcaccgcccatgcccagcgtggagatgcacatggagaacaacgtggtctgcatccggtataagggagagatggtcaaggtcagccgcaactacttcagcaagctgtggctcctttaccgctacagctgcattgatgactctgcctttgagaggttcctgccccgggtctggtgtcttctccgacggtaccagatgatgttcggcgtgggcctctacgaggggactggcctgcagggatcgctgcctgtgcatgtctttgaggccctccaccgactctttggcgtcagcttcgagtgcttcgcctcacccctcaactgctacttccgccagtactgttctgccttccccgacacagacggctactttggctcccgcgggccctgcctagactttgctccactgagtggttcatttgaggccaaccctcccttctgcgaggagctcatggatgccatggtctctcactttgagagactgcttgagagctcaccggagcccctgtccttcatcgtgttcatccctgagtggcgggaacccccaacaccagcgctcacccgcatggagcagagccgcttcaaacgccaccagttgatcctgcctgcctttgagcatgagtaccgcagtggctcccagcacatctgcaagaagtgggtgccagggagggcaggggaaggaggctgggctggccaggccaggcccagccccaccctgagccattgcctttgcccgcagggaggaaatgcactacaaggccgtccacaacacggctgtgctcttcctacagaacgaccctggctttgccaagtgggcgccgacgcctgaacggctgcaggagctgagtgctgcctaccggcagtcaggccgcagccacagctctggttcttcctcatcgtcctcctcggaggccaaggaccgggactcgggccgtgagcagggtcctagccgcgagcctcaccccacttaacatatcctgcggggaggaggagccccaggggtgctagtctggactgctgggactcgggcccctggggcctcagagggaccccggctgccactgacatatgaagattatggttctgccagggctcccctccctgcctgtccccaagtcctcacctcaaactccctccaagtcccatgtatataggtcctgatgccttcccaaccccgcccctcaccctgttgccaccttgtttcatttgtaaaaggaaatacagaaacccccccaagaa

SEQ ID NO: 164029 - DNA, 1452 bp, Homo sapiens
  Payload ID: 12297
  Gene Symbol: PDLIM1
  Gene Name: PDZ and LIM domain 1
  Uniprot ID: O00151
  ENST ID: ENST00000329399
  CDS Start-End: 110-1099
gcccgcgccgcgccgctctttctccgacagccgccgggggtgccctgcaagctgttccgcgcgtcctgcccgtctgtccccgcgggtcgtcgcccgccacagccgcgccatgaccacccagcagatagacctccagggcccggggccgtggggcttccgcctcgtgggcggcaaggacttcgagcagcctctcgccatttcccgggtcactcctggaagcaaggcggctctagctaatttatgtattggagatgtaatcacagccattgatggggaaaatactagcaatatgacacacttggaagctcagaacagaatcaaaggctgcacagacaacttgactctcactgtagccagatctgaacataaagtctggtctcctctggtgacggaggaagggaagcgtcatccatacaagatgaatttagcctctgaaccccaggaggtcctgcacataggaagcgcccacaaccgaagtgccatgccctttaccgcctcgcctgcctccagcactactgccagggtcatcacaaaccagtacaacaacccagctggcctctactcttctgaaaatatctccaacttcaacaatgccctggagtcaaagactgctgccagcggggtggaggcgaacagcagacccttagaccatgctcagcctccaagcagccttgtcatcgacaaagaatctgaagtttacaagatgcttcaggagaaacaggagttgaatgagcccccgaaacagtccacgtctttcttggttttgcaggaaatcctggagtctgaagaaaaaggggatcccaacaagccctcaggattcagaagtgttaaagctcctgtcactaaagtggctgcgtcgattggaaatgctcagaagttgcctatgtgtgacaaatgtggcactgggattgttggtgtgtttgtgaagctgcgggaccgtcaccgccaccctgagtgttatgtgtgcactgactgtggcaccaacctgaaacagaagggccatttctttgtggaggatcaaatctactgtgagaagcatgcccgggagcgagtcacaccacctgagggttatgaagtggtcactgtgttccccaagtgagccagcagatctgaccactgttctccagcaggcctctgctgcagctttttctctcagtgttctggccctctcctctcttgaaagttctctgcttactttggttttccctctgcttgtaaaacattgagtcccctccctgccttggttaattgactcacaccagctgtgcgatgcccgcttttacaattaaaggaaaactgttttgttcagtgtcaccttgtcagcaacactgtgtcccttcgccccaccgttcttctctgctgcatttggacatcagccaaatttgaacccaatcaaatataacgtgtctgacactgattttgtttttactcaataaatgtatagactacaaa

SEQ ID NO: 164030 - DNA, 4592 bp, Homo sapiens
  Payload ID: 12298
  Gene Symbol: PDLIM2
  Gene Name: PDZ and LIM domain 2 (mystique)
  Uniprot ID: Q96JY6
  ENST ID: ENST00000265810
  CDS Start-End: 116-1216
ccgggagctgtggtgccctctccttctccctttggctcctctcctgctgccttacagtgcccccagagccggctaggggcatggacttcacctcctggtcctctcttcctcaggtatggcgttgacggtggatgtggccgggccagcgccctggggcttccgtatcacagggggcagggatttccacacgcccatcatggtgactaaggtggccgagcggggcaaagccaaggacgctgacctccggcctggagacataatcgtggccatcaacggggaaagcgcggagggcatgctgcatgccgaggcccagagcaagatccgccagagcccctcgcccctgcggctgcagctggaccggtctcaggctacgtctccagggcagaccaatggggacagctccttggaagtgctggcgactcgcttccagggctccgtgaggacatacactgagagtcagtcctccttaaggtcctcctactccagcccaacctccctcagcccgagggccggcagccccttctcaccaccaccctctagcagctccctcactggagaggcagccatcagccgcagcttccagagtctggcatgttccccgggcctccccgctgctgaccgcctgtcctactcaggccgccctggaagccgacaggccggcctcggccgcgctggcgactcggcggtgctggtgctgccgccttccccgggccctcgttcctccaggcccagcatggactcggaagggggaagcctcctcctggacgaggactcggaagtcttcaagatgctgcaggaaaatcgcgagggacgggcggccccccgacagtccagctcctttcggctcttgcaggaagccctggaggctgaggagagaggtggcacgccagccttcttgcccagctcactgagcccccagtcctccctgcccgcctccagggccctggccacccctcccaagctccacacttgtgagaagtgcagtaccagcatcgcgaaccaggctgtgcgcatccaggagggccggtaccgccaccccggctgctacacctgtgccgactgtgggctgaacctgaagatgcgcgggcacttctgggaggacgcttgtgctatggagggaatgagattgtcactggaagctttggaggggatggtggagggcgccaagcggagggacaggaggaagaccaggagacccatccagccaagctggtgagacaacctctgatcctgaggaccggccgcccaccaagggttgggcccccggggccaggttgatctaccgacaccttccacttctttcctgggagagactgctggcttcattggtgattgatttggaggggggaaaaagggcagggtggctcaggctttaggcccaggtactggggaggcctgaggagccctcctggagctcaggaggccgaggctgccttaagctgtgatcatgccactgcattccagcctgggagagagagaggacctgtctgttgaaaaaaacacaaaaacaaatgaatgcatgtggccagtgccaggtgagctgccctgggggttcactggagttgaggcaggggacagtagtctcccctgccagcctaggattttgggcgtcattcacccactacccctagtgctagtcccagaggatgctgcggagggggcagcctcagctctcttttcagagaagatcaaagctgggcttcccagggtgcctggctggtccctgccggcagctttgtgctctccggctctttgtgaaaggaatcttggcgcagatgtttgtgttgcctcctcaggcacctgtagatataatttacaccatgatatcattgtctcaccttttgcctgggtggctgcctgagaaaggtctttctttttatagaaaagatcaaggctgtctggcgcgggactccatgagccccaggcgctggtcagaaacggggtagtctctttggcgccacctagtgtccagtttggcccatggcggggcccattcacggggcaacactgggcttctgggcacagcgggaatacagaaagatacagcactcctcatgccttcctggaggtagaaggccagtggcagcgactgagctggcatgaatgaataagaggatgtggcactgagcgccaagggctaccttggaacgcaccgaggagcgtcccgtgagttcaaagcagtggccgtgatgcaaaaggagggctgggtcttggagacgtggagaagaggaatgctgagtgatggggtggctgctggggggatgcttagctcagagcagtggctgatggggacactgagataagatcggaggggagctgtcaatgccagaagtggtttgaacttccccttgaggctctagggacattttgttttgagacatggtcttgctctattgcccaggctggagtgcagtggtacaatcttagctcactgcagcctccacctcccaggctcaagagatcctcccacagcctcccaggtagctgggactacaggcgtgcaccaccacacccagctaatttttaagtttttttttttttttaagagatggggtctcactatgttgcccaggctggtctcgaacttcgggccccaagccatcctcccaccttggctttccaaagtgttgggattacaagcgtgagctaaccttgcccagcctctgggaacacttggaaggttttaagcagagaagtgacaggttggaaaagatggtttggattattgatatggacagattcccacctgtatgtagcacgccatgctgggccagcagtgtcataggagtggagggggataagtggggactggggacatgtgaaatgatgggcattccagtgaggcatcgaatgccttctgagggctttgtaggttccagctcaaatccccctctggctcttgttctttggtgtggcagccatctctcctcccaggggtcctgagggtttcagcaccagggttctctgcagccacacaatcagcccggctcgggagcaaactcccctggaagaacggagttatgagttggtcagcagaggaggctggggacaggcagtttttggtcttttacctctgatcttgtccccaacctaagccagctagctgcgtgctcccactccctctgccgcacgccgcccgtctatgttcccggactttgtccagtgcagtgccctcttcccttcctgcactgaggagattaactgaagtgacagattagagttagaagtggcccaaaggagcatctggtacaaccccctttggttagagaagggaaagtgacttttccaaagctgcacagctagacagtcataatggctaagctctgggggtgcttttgatgtgctagggatacttccaatgctttaactcacttaatcctcacaacccgagataggtactgttaccatcctctctgcagacgaggaaaccgaggaccaggaggttcagtaaatggtccaagtactcctagctagtaaggaatggatctacagcctgcctcccaggtttctggcttgtggggggcagagtttgtccctctgtcatcagaggcagccttccaggcacagctctggtcacctctggtcacaactggaggtcaccacagccctccccagcgctctgtaggctctcagctttgtgcttcctcccacgggtactagctccagctgagcttgcaggaaacccacttcctgaagccaggacttccccatgggaagtgcaggggccactgggcagcctgagggctgaccctgctcaggacactgtctgtctcaggaactcatggcagtggtttaccttgtcaggagtgcatggacgggctgcccctcccattccttcaagcatcactcagagagccctggcctggctctaggcttgggactgcggctgccacaggaagggggcatccccctactttgggtgttgggtcagatcctgcccccgtgcccgccagggctcaggttcctctgagctggtcctgggccaggacgcatctgcatggcggtggtggggaggaggggtgcgccatggcctggaggggagtgtgtgttggggtgtgtgtgtggaggttcttttgagtcacacacaaagcattgtgctgagacactgcattcctgctggctgggcttcctgtttccagatgcattcctgtcccagagtcaccacagagactgtttggaatcccgccccacattctccaaattcagggcgcgatctggcaaaggctccctcccccaccctcttactttggagggagtctgggctccctcctacccagggagggctggcagggctctggcacggccggggtgtgattccacacatcttcttggtcttgcataaggcagttcctggagacccagcactctggttctctctctgcctgtgagaagcggaatgggtactgtctaggaggactgggcagggtgggggcaacccagaggacccatggctagcagggaagggcctgggcttgaatgtgactctgttgagacatggccagcaattctggcacttggctgtcattcggctggcctgcgcagagattggctgtgggcctcagtttccccattttataaagttttaaaatctg

SEQ ID NO: 164031 - DNA, 2236 bp, Homo sapiens
  Payload ID: 12298
  Gene Symbol: PDLIM2
  Gene Name: PDZ and LIM domain 2 (mystique)
  Uniprot ID: Q96JY6
  ENST ID: ENST00000308354
  CDS Start-End: 40-1848
agacacacccaggcagcccaccctgcccaggacctggggatgcggggcgggagagcgcggccggcgtgggagagctttatggggctgccccctcgatcgtctgcgaagtggggcgcggggcagtccctggaccggctctgctgtgctccgggcagtcgggggcttgcgggcgctccggggaggatgcgggcaccaccggctggacggtcgcagcctgcagggggccctggggacagcctgcctcatccccccggcgggctcgggccaggtggcagcgcctgggctcgccgcgcggaggcggcggcttctcgggctaggggcggcggcaggggcggccccgggatcacatgggcggaggcaggtccgggagccccgggcgggctctccccagagtcgggtagacggcagcgggagcggtggcgtctccccgccttccctccctcccgggcctgggcgcccagccggacaggtgagcggcagccaggtgagcgcgcccacctgcgcctctccgcgcggcccgccctccccggcgccgggctcctctccgcgcccctgtcggcgcggaaccctggcctcgtccgcggcccagctccctggagcctcgcatcagcgggggcgcccccgcgagctgcgctctccccggccggagcgctcctcctccagcccccagcccgcagggtactttgccctcggagcgaaggaggctccagaactggtagagccgggccatcgggctgggcacctccccgcggcgcccgcagcgcggagtccactgaccggctcaaaggtatggcgttgacggtggatgtggccgggccagcgccctggggcttccgtatcacagggggcagggatttccacacgcccatcatggtgactaaggtggccgagcggggcaaagccaaggacgctgacctccggcctggagacataatcgtggccatcaacggggaaagcgcggagggcatgctgcatgccgaggcccagagcaagatccgccagagcccctcgcccctgcggctgcagctggaccggtctcaggctacgtctccagggcagaccaatggggacagctccttggaagtgctggcgactcgcttccagggctccgtgaggacatacactgagagtcagtcctccttaaggtcctcctactccagcccaacctccctcagcccgagggccggcagccccttctcaccaccaccctctagcagctccctcactggagaggcagccatcagccgcagcttccagagtctggcatgttccccgggcctccccgctgctgaccgcctgtcctactcaggccgccctggaagccgacaggccggcctcggccgcgctggcgactcggcggtgctggtgctgccgccttccccgggccctcgttcctccaggcccagcatggactcggaagggggaagcctcctcctggacgaggactcggaagtcttcaagatgctgcaggaaaatcgcgagggacgggcggccccccgacagtccagctcctttcggctcttgcaggaagccctggaggctgaggagagaggtggcacgccagccttcttgcccagctcactgagcccccagtcctccctgcccgcctccagggccctggccacccctcccaagctccacacttgtgagaagtgcagtaccagcatcgcgaaccaggctgtgcgcatccaggagggccggtaccgccaccccggctgctacacctgtgccgactgtgggctgaacctgaagatgcgcgggcacttctgggtgggtgacgagctgtactgtgagaagcatgcccgccagcgctactccgcacctgccaccctcagctctcgggcctgagcccgccatgccctcagcctgcctcactgctgggccagggtcatgcctatataagttggcatggcagggacaatggtgggcagttgctcttacatgagctaagtttggagacctgaggcccctttgtcctcgctgggtgggccaaggtctgggacctgtcttggactgtgggagactcaccctcaccttgccaggcctctcccctgcaggactggcattgcactagtctgaggtggccactgcctttgatcaacctttgtgtgcgagggtctaagtagggtcgaacacagaagtgggaaggagaggggtgggccaggggctaatggtgtcactgtgtaaagtttttgacatactagctctataaatatatgaatatggacaaaataaa

SEQ ID NO: 164032 - DNA, 2226 bp, Homo sapiens
  Payload ID: 12298
  Gene Symbol: PDLIM2
  Gene Name: PDZ and LIM domain 2 (mystique)
  Uniprot ID: Q96JY6
  ENST ID: ENST00000339162
  CDS Start-End: 40-1848
agacacacccaggcagcccaccctgcccaggacctggggatgcggggcgggagagcgcggccggcgtgggagagctttatggggctgccccctcgatcgtctgcgaagtggggcgcggggcagtccctggaccggctctgctgtgctccgggcagtcgggggcttgcgggcgctccggggaggatgcgggcaccaccggctggacggtcgcagcctgcagggggccctggggacagcctgcctcatccccccggcgggctcgggccaggtggcagcgcctgggctcgccgcgcggaggcggcggcttctcgggctaggggcggcggcaggggcggccccgggatcacatgggcggaggcaggtccgggagccccgggcgggctctccccagagtcgggtagacggcagcgggagcggtggcgtctccccgccttccctccctcccgggcctgggcgcccagccggacaggtgagcggcagccaggtgagcgcgcccacctgcgcctctccgcgcggcccgccctccccggcgccgggctcctctccgcgcccctgtcggcgcggaaccctggcctcgtccgcggcccagctccctggagcctcgcatcagcgggggcgcccccgcgagctgcgctctccccggccggagcgctcctcctccagcccccagcccgcagggtactttgccctcggagcgaaggaggctccagaactggtagagccgggccatcgggctgggcacctccccgcggcgcccgcagcgcggagtccactgaccggctcaaaggtatggcgttgacggtggatgtggccgggccagcgccctggggcttccgtatcacagggggcagggatttccacacgcccatcatggtgactaaggtggccgagcggggcaaagccaaggacgctgacctccggcctggagacataatcgtggccatcaacggggaaagcgcggagggcatgctgcatgccgaggcccagagcaagatccgccagagcccctcgcccctgcggctgcagctggaccggtctcaggctacgtctccagggcagaccaatggggacagctccttggaagtgctggcgactcgcttccagggctccgtgaggacatacactgagagtcagtcctccttaaggtcctcctactccagcccaacctccctcagcccgagggccggcagccccttctcaccaccaccctctagcagctccctcactggagaggcagccatcagccgcagcttccagagtctggcatgttccccgggcctccccgctgctgaccgcctgtcctactcaggccgccctggaagccgacaggccggcctcggccgcgctggcgactcggcggtgctggtgctgccgccttccccgggccctcgttcctccaggcccagcatggactcggaagggggaagcctcctcctggacgaggactcggaagtcttcaagatgctgcaggaaaatcgcgagggacgggcggccccccgacagtccagctcctttcggctcttgcaggaagccctggaggctgaggagagaggtggcacgccagccttcttgcccagctcactgagcccccagtcctccctgcccgcctccagggccctggccacccctcccaagctccacacttgtgagaagtgcagtaccagcatcgcgaaccaggctgtgcgcatccaggagggccggtaccgccaccccggctgctacacctgtgccgactgtgggctgaacctgaagatgcgcgggcacttctgggtgggtgacgagctgtactgtgagaagcatgcccgccagcgctactccgcacctgccaccctcagctctcgggcctgagcccgccatgccctcagcctgcctcactgctgggccagggtcatgcctatataagttggcatggcagggacaatggtgggcagttgctcttacatgagctaagtttggagacctgaggcccctttgtcctcgctgggtgggccaaggtctgggacctgtcttggactgtgggagactcaccctcaccttgccaggcctctcccctgcaggactggcattgcactagtctgaggtggccactgcctttgatcaacctttgtgtgcgagggtctaagtagggtcgaacacagaagtgggaaggagaggggtgggccaggggctaatggtgtcactgtgtaaagtttttgacatactagctctataaatatatgaatatgg

SEQ ID NO: 164033 - DNA, 1847 bp, Homo sapiens
  Payload ID: 12298
  Gene Symbol: PDLIM2
  Gene Name: PDZ and LIM domain 2 (mystique)
  Uniprot ID: Q96JY6
  ENST ID: ENST00000397760
  CDS Start-End: 401-1459
agagtcgggtagacggcagcgggagcggtggcgtctccccgccttccctccctcccgggcctgggcgcccagccggacaggtgagcggcagccaggtgagcgcgcccacctgcgcctctccgcgcggcccgccctccccggcgccgggctcctctccgcgcccctgtcggcgcggaaccctggcctcgtccgcggcccagctccctggagcctcgcatcagcgggggcgcccccgcgagctgcgctctccccggccggagcgctcctcctccagcccccagcccgcagggtactttgccctcggagcgaaggaggctccagaactggtagagccgggccatcgggctgggcacctccccgcggcgcccgcagcgcggagtccactgaccggctcaaaggtatggcgttgacggtggatgtggccgggccagcgccctggggcttccgtatcacagggggcagggatttccacacgcccatcatggtgactaaggtggccgagcggggcaaagccaaggacgctgacctccggcctggagacataatcgtggccatcaacggggaaagcgcggagggcatgctgcatgccgaggcccagagcaagatccgccagagcccctcgcccctgcggctgcagctggaccggtctcaggctacgtctccagggcagaccaatggggacagctccttggaagtgctggcgactcgcttccagggctccgtgaggacatacactgagagtcagtcctccttaaggtcctcctactccagcccaacctccctcagcccgagggccggcagccccttctcaccaccaccctctagcagctccctcactggagaggcagccatcagccgcagcttccagagtctggcatgttccccgggcctccccgctgctgaccgcctgtcctactcaggccgccctggaagccgacaggccggcctcggccgcgctggcgactcggcggtgctggtgctgccgccttccccgggccctcgttcctccaggcccagcatggactcggaagggggaagcctcctcctggacgaggactcggaagtcttcaagatgctgcaggaaaatcgcgagggacgggcggccccccgacagtccagctcctttcggctcttgcaggaagccctggaggctgaggagagaggtggcacgccagccttcttgcccagctcactgagcccccagtcctccctgcccgcctccagggccctggccacccctcccaagctccacacttgtgagaagtgcagtaccagcatcgcgaaccaggctgtgcgcatccaggagggccggtaccgccaccccggctgctacacctgtgccgactgtgggctgaacctgaagatgcgcgggcacttctgggtgggtgacgagctgtactgtgagaagcatgcccgccagcgctactccgcacctgccaccctcagctctcgggcctgagcccgccatgccctcagcctgcctcactgctgggccagggtcatgcctatataagttggcatggcagggacaatggtgggcagttgctcttacatgagctaagtttggagacctgaggcccctttgtcctcgctgggtgggccaaggtctgggacctgtcttggactgtgggagactcaccctcaccttgccaggcctctcccctgcaggactggcattgcactagtctgaggtggccactgcctttgatcaacctttgtgtgcgagggtctaagtagggtcgaacacagaagtgggaaggagaggggtgggccaggggctaatggtgtcactgtgtaaagtttttgacatactagctctataaatatatgaatatggacaaaataaa

SEQ ID NO: 164034 - DNA, 1491 bp, Homo sapiens
  Payload ID: 12298
  Gene Symbol: PDLIM2
  Gene Name: PDZ and LIM domain 2 (mystique)
  Uniprot ID: Q96JY6
  ENST ID: ENST00000397761
  CDS Start-End: 78-1136
gggagcggtggcgtctccccgccttccctccctcccgggcctgggcgcccagccggacaggtgagcggcagccaggtatggcgttgacggtggatgtggccgggccagcgccctggggcttccgtatcacagggggcagggatttccacacgcccatcatggtgactaaggtggccgagcggggcaaagccaaggacgctgacctccggcctggagacataatcgtggccatcaacggggaaagcgcggagggcatgctgcatgccgaggcccagagcaagatccgccagagcccctcgcccctgcggctgcagctggaccggtctcaggctacgtctccagggcagaccaatggggacagctccttggaagtgctggcgactcgcttccagggctccgtgaggacatacactgagagtcagtcctccttaaggtcctcctactccagcccaacctccctcagcccgagggccggcagccccttctcaccaccaccctctagcagctccctcactggagaggcagccatcagccgcagcttccagagtctggcatgttccccgggcctccccgctgctgaccgcctgtcctactcaggccgccctggaagccgacaggccggcctcggccgcgctggcgactcggcggtgctggtgctgccgccttccccgggccctcgttcctccaggcccagcatggactcggaagggggaagcctcctcctggacgaggactcggaagtcttcaagatgctgcaggaaaatcgcgagggacgggcggccccccgacagtccagctcctttcggctcttgcaggaagccctggaggctgaggagagaggtggcacgccagccttcttgcccagctcactgagcccccagtcctccctgcccgcctccagggccctggccacccctcccaagctccacacttgtgagaagtgcagtaccagcatcgcgaaccaggctgtgcgcatccaggagggccggtaccgccaccccggctgctacacctgtgccgactgtgggctgaacctgaagatgcgcgggcacttctgggtgggtgacgagctgtactgtgagaagcatgcccgccagcgctactccgcacctgccaccctcagctctcgggcctgagcccgccatgccctcagcctgcctcactgctgggccagggtcatgcctatataagttggcatggcagggacaatggtgggcagttgctcttacatgagctaagtttggagacctgaggcccctttgtcctcgctgggtgggccaaggtctgggacctgtcttggactgtgggagactcaccctcaccttgccaggcctctcccctgcaggactggcattgcactagtctgaggtggccactgcctttgatcaacctttgtgtgcgagggtctaagtagggtcgaacacagaagtgggaaggagaggggtgggccaggggctaatggtgtcactgtgtaaagtttttgacatacta

SEQ ID NO: 164035 - DNA, 1463 bp, Homo sapiens
  Payload ID: 12298
  Gene Symbol: PDLIM2
  Gene Name: PDZ and LIM domain 2 (mystique)
  Uniprot ID: Q96JY6
  ENST ID: ENST00000409141
  CDS Start-End: 135-971
aagcccctgagtagctgctccgggagctgtggtgccctctccttctccctttggctcctctcctgctgccttacagtgcccccagagccggctaggggcatggacttcacctcctggtcctctcttcctcaggtatggcgttgacggtggatgtggccgggccagcgccctggggcttccgtatcacagggggcagggatttccacacgcccatcatggtgactaaggtggccgagcggggcaaagccaaggacgctgacctccggcctggagacataatcgtggccatcaacggggaaagcgcggagggcatgctgcatgccgaggcccagagcaagatccgccagagcccctcgcccctgcggctgcagctggaccggtctcaggctacgtctccagggcagaccaatggggacagctccttggaagtgctggcgactcgcttccagggctccgtgaggacatacactgagagtcagtcctccttaaggtcctcctactccagcccaacctccctcagcccgagggccggcagccccttctcaccaccaccctctagcagctccctcactggagaggcagccatcagccgcagcttccagagtctggcatgttccccgggcctccccgctgctgaccgcctgtcctactcaggccgccctggaagccgacaggccggcctcggccgcgctggcgactcggcggtgctggtgctgccgccttccccgggccctcgttcctccaggcccagcatggactcggaagggggaagcctcctcctggacgaggactcggaagtcttcaagatgctgcaggaaaatcgcgagggacgggcggccccccgacagtccagctcctttcggctcttgcaggaagccctggaggctgaggagagaggaaccaggctgtgcgcatccaggagggccggtaccgccaccccggctgctacacctgtgccgactgtgggctgaacctgaagatgcgcgggcacttctgggtgggtgacgagctgtactgtgagaagcatgcccgccagcgctactccgcacctgccaccctcagctctcgggcctgagcccgccatgccctcagcctgcctcactgctgggccagggtcatgcctatataagttggcatggcagggacaatggtgggcagttgctcttacatgagctaagtttggagacctgaggcccctttgtcctcgctgggtgggccaaggtctgggacctgtcttggactgtgggagactcaccctcaccttgccaggcctctcccctgcaggactggcattgcactagtctgaggtggccactgcctttgatcaacctttgtgtgcgagggtctaagtagggtcgaacacagaagtgggaaggagaggggtgggccaggggctaatggtgtcactgtgtaaagtttttgacatactagctctataaatatatgaatatggacaaaataaa

SEQ ID NO: 164036 - DNA, 1487 bp, Homo sapiens
  Payload ID: 12298
  Gene Symbol: PDLIM2
  Gene Name: PDZ and LIM domain 2 (mystique)
  Uniprot ID: Q96JY6
  ENST ID: ENST00000409417
  CDS Start-End: 77-1135
tctcctgctgccttacagtgcccccagagccggctaggggcatggacttcacctcctggtcctctcttcctcaggtatggcgttgacggtggatgtggccgggccagcgccctggggcttccgtatcacagggggcagggatttccacacgcccatcatggtgactaaggtggccgagcggggcaaagccaaggacgctgacctccggcctggagacataatcgtggccatcaacggggaaagcgcggagggcatgctgcatgccgaggcccagagcaagatccgccagagcccctcgcccctgcggctgcagctggaccggtctcaggctacgtctccagggcagaccaatggggacagctccttggaagtgctggcgactcgcttccagggctccgtgaggacatacactgagagtcagtcctccttaaggtcctcctactccagcccaacctccctcagcccgagggccggcagccccttctcaccaccaccctctagcagctccctcactggagaggcagccatcagccgcagcttccagagtctggcatgttccccgggcctccccgctgctgaccgcctgtcctactcaggccgccctggaagccgacaggccggcctcggccgcgctggcgactcggcggtgctggtgctgccgccttccccgggccctcgttcctccaggcccagcatggactcggaagggggaagcctcctcctggacgaggactcggaagtcttcaagatgctgcaggaaaatcgcgagggacgggcggccccccgacagtccagctcctttcggctcttgcaggaagccctggaggctgaggagagaggtggcacgccagccttcttgcccagctcactgagcccccagtcctccctgcccgcctccagggccctggccacccctcccaagctccacacttgtgagaagtgcagtaccagcatcgcgaaccaggctgtgcgcatccaggagggccggtaccgccaccccggctgctacacctgtgccgactgtgggctgaacctgaagatgcgcgggcacttctgggtgggtgacgagctgtactgtgagaagcatgcccgccagcgctactccgcacctgccaccctcagctctcgggcctgagcccgccatgccctcagcctgcctcactgctgggccagggtcatgcctatataagttggcatggcagggacaatggtgggcagttgctcttacatgagctaagtttggagacctgaggcccctttgtcctcgctgggtgggccaaggtctgggacctgtcttggactgtgggagactcaccctcaccttgccaggcctctcccctgcaggactggcattgcactagtctgaggtggccactgcctttgatcaacctttgtgtgcgagggtctaagtagggtcgaacacagaagtgggaaggagaggggtgggccaggggctaatggtgtcactgtgtaaagtttttgacata

SEQ ID NO: 164037 - DNA, 578 bp, Homo sapiens
  Payload ID: 12298
  Gene Symbol: PDLIM2
  Gene Name: PDZ and LIM domain 2 (mystique)
  ENST ID: ENST00000426493
  CDS Start-End: 58-578
gaagcaagcgctagtgggactgagccctgatggtggaggaggggagactgagggggtatggcgttgacggtggatgtggccgggccagcgccctggggcttccgtatcacagggggcagggatttccacacgcccatcatggtgactaaggtggccgagcggggcaaagccaaggacgctgacctccggcctggagacataatcgtggccatcaacggggaaagcgcggagggcatgctgcatgccgaggcccagagcaagatccgccagagcccctcgcccctgcggctgcagctggaccggtctcaggctacgtctccagggcagaccaatggggacagctccttggaagtgctggcgactcgcttccagggctccgtgaggacatacactgagagtcagtcctccttaaggtcctcctactccagcccaacctccctcagcccgagggccggcagccccttctcaccaccaccctctagcagctccctcactggagaggcagccatcagccgcagcttccagagtctggcatgttccccgggcctccccgctgctgaccgcctgtcctactcagg

SEQ ID NO: 164038 - DNA, 845 bp, Homo sapiens
  Payload ID: 12298
  Gene Symbol: PDLIM2
  Gene Name: PDZ and LIM domain 2 (mystique)
  ENST ID: ENST00000452226
  CDS Start-End: 83-845
agagtcgggtagacggcagcgggagcggtggcgtctccccgccttccctccctcccgggcctgggcgcccagccggacaggtatggcgttgacggtggatgtggccgggccagcgccctggggcttccgtatcacagggggcagggatttccacacgcccatcatggtgactaaggtggccgagcggggcaaagccaaggacgctgacctccggcctggagacataatcgtggccatcaacggggaaagcgcggagggcatgctgcatgccgaggcccagagcaagatccgccagagcccctcgcccctgcggctgcagctggaccggtctcaggctacgtctccagggcagaccaatggggacagctccttggaagtgctggcgactcgcttccagggctccgtgaggacatacactgagagtcagtcctccttaaggtcctcctactccagcccaacctccctcagcccgagggccggcagccccttctcaccaccaccctctagcagctccctcactggagaggcagccatcagccgcagcttccagagtctggcatgttccccgggcctccccgctgctgaccgcctgtcctactcaggccgccctggaagccgacaggccggcctcggccgcgctggcgactcggcggtgctggtgctgccgccttccccgggccctcgttcctccaggcccagcatggactcggaagggggaagcctcctcctggacgaggactcggaagtcttcaagatgctgcaggaaaatcgcgagggacgggcggccccccgacagtccagctcctttcggctcttgcaggaagccctggaggctgaggagagag

SEQ ID NO: 164039 - DNA, 507 bp, Homo sapiens
  Payload ID: 12298
  Gene Symbol: PDLIM2
  Gene Name: PDZ and LIM domain 2 (mystique)
  ENST ID: ENST00000436754
  CDS Start-End: 47-507
actcaccagccctcccccagagtggagaggaagtaccgtgtgctgtatggcgttgacggtggatgtggccgggccagcgccctggggcttccgtatcacagggggcagggatttccacacgcccatcatggtgactaaggtggccgagcggggcaaagccaaggacgctgacctccggcctggagacataatcgtggccatcaacggggaaagcgcggagggcatgctgcatgccgaggcccagagcaagatccgccagagcccctcgcccctgcggctgcagctggaccggtctcaggctacgtctccagggcagaccaatggggacagctccttggaagtgctggcgactcgcttccagggctccgtgaggacatacactgagagtcagtcctccttaaggtcctcctactccagcccaacctccctcagcccgagggccggcagccccttctcaccaccaccctctagcagctccctcactggagaggcagccatcagccgcag

SEQ ID NO: 164040 - DNA, 757 bp, Homo sapiens
  Payload ID: 12298
  Gene Symbol: PDLIM2
  Gene Name: PDZ and LIM domain 2 (mystique)
  ENST ID: ENST00000456545
  CDS Start-End: 52-757
acgagaggcggctctatggccttgaggtccccggagagagggttgccaggtatggcgttgacggtggatgtggccgggccagcgccctggggcttccgtatcacagggggcagggatttccacacgcccatcatggtgactaaggtggccgagcggggcaaagccaaggacgctgacctccggcctggagacataatcgtggccatcaacggggaaagcgcggagggcatgctgcatgccgaggcccagagcaagatccgccagagcccctcgcccctgcggctgcagctggaccggtctcaggctacgtctccagggcagaccaatggggacagctccttggaagtgctggcgactcgcttccagggctccgtgaggacatacactgagagtcagtcctccttaaggtcctcctactccagcccaacctccctcagcccgagggccggcagccccttctcaccaccaccctctagcagctccctcactggagaggcagccatcagccgcagcttccagagtctggcatgttccccgggcctccccgctgctgaccgcctgtcctactcaggccgccctggaagccgacaggccggcctcggccgcgctggcgactcggcggtgctggtgctgccgccttccccgggccctcgttcctccaggcccagcatggactcggaagggggaagcctcctcctggacgaggactcggaagtcttcaagatgctgcaggaaaatcgcgagggacgggcggccc

SEQ ID NO: 164041 - DNA, 728 bp, Homo sapiens
  Payload ID: 12298
  Gene Symbol: PDLIM2
  Gene Name: PDZ and LIM domain 2 (mystique)
  ENST ID: ENST00000429812
  CDS Start-End: 189-728
tgggactgagccctgatggtggaggaggggagactgagggggtgctggcatcccctccacttgccagcccctgccccccatgctccagcaagccccctgcctggcagcctgggcagccccctcctgggagtcgctccctgggctgaagactaaggaagggagaacccagaagcatggcttcccagggtatggcgttgacggtggatgtggccgggccagcgccctggggcttccgtatcacagggggcagggatttccacacgcccatcatggtgactaaggtggccgagcggggcaaagccaaggacgctgacctccggcctggagacataatcgtggccatcaacggggaaagcgcggagggcatgctgcatgccgaggcccagagcaagatccgccagagcccctcgcccctgcggctgcagctggaccggtctcaggctacgtctccagggcagaccaatggggacagctccttggaagtgctggcgactcgcttccagggctccgtgaggacatacactgagagtcagtcctccttaaggtcctcctactccagcccaacctccctcagcccgagggccggcagccccttctcaccaccaccctctagcagctccctcactggagaggcagccatcagccgcagcttccagagtctggcatgttccccgggcctccccgctgctgaccgcctgtcctactcaggccgccctggaagccgacag

SEQ ID NO: 164042 - DNA, 880 bp, Homo sapiens
  Payload ID: 12298
  Gene Symbol: PDLIM2
  Gene Name: PDZ and LIM domain 2 (mystique)
  ENST ID: ENST00000416159
  CDS Start-End: 6-122
caggtatggcgttgacggtggatgtggccgggccagcgccctggggcttccgtatcacagggggcagggatttccacacgcccatcatggtgactaaggcagccatttggggtgattactagaacaagagccccggagttcttggcagtctcctcttgacctgggcccaggctgggaacattcacaggagggctgtgcaggcagccacctgcaaggtggccgagcggggcaaagccaaggacgctgacctccggcctggagacataatcgtggccatcaacggggaaagcgcggagggcatgctgcatgccgaggcccagagcaagatccgccagagcccctcgcccctgcggctgcagctggaccggtctcaggctacgtctccagggcagaccaatggggacagctccttggaagtgctggcgactcgcttccagggctccgtgaggacatacactgagagtcagtcctccttaaggtcctcctactccagcccaacctccctcagcccgagggccggcagccccttctcaccaccaccctctagcagctccctcactggagaggcagccatcagccgcagcttccagagtctggcatgttccccgggcctccccgctgctgaccgcctgtcctactcaggccgccctggaagccgacaggccggcctcggccgcgctggcgactcggcggtgctggtgctgccgccttccccgggccctcgttcctccaggcccagcatggactcggaagggggaagcctcctcctggacgaggactcggaagtcttcaagatgctgcaggaaaatcgcgagggacgggcggccccccgacagtccagctcctttcggctcttgcaggaagccctggaggctgagga

SEQ ID NO: 164043 - DNA, 599 bp, Homo sapiens
  Payload ID: 12298
  Gene Symbol: PDLIM2
  Gene Name: PDZ and LIM domain 2 (mystique)
  ENST ID: ENST00000614502
  CDS Start-End: 95-535
tgcctcctcccaacaggccggcctcggccgcgctggcgactcggcggtgctggtgctgccgccttccccgggccctcgttcctccaggcccagcatggactcggaagggggaagcctcctcctggacgaggactcggaagtcttcaagatgctgcaggaaaatcgcgagggacgggcggccccccgacagtccagctcctttcggctcttgcaggaagccctggaggctgaggagagaggtggcacgccagccttcttgcccagctcactgagcccccagtcctccctgcccgcctccagggccctggccacccctcccaagctccacacttgtgagaagtgcagtaccagcatcgcgaaccaggctgtgcgcatccaggagggccggtaccgccaccccggctgctacacctgtgccgactgtgggctgaacctgaagatgcgcgggcacttctgggtgggtgacgagctgtactgtgagaagcatgcccgccagcgctactccgcacctgccaccctcagctctcgggcctgagcccgccatgccctcagcctgcctcactgctgggccagggtcatgcctatataagttggcatgg

SEQ ID NO: 164044 - DNA, 209 bp, Homo sapiens
  Payload ID: 12298
  Gene Symbol: PDLIM2
  Gene Name: PDZ and LIM domain 2 (mystique)
  ENST ID: ENST00000616289
  CDS Start-End: 156-209
cgctggtgctcttgatagattctcgcagcacttgcgtccccagggcagccccaggatgggtgctgggcagggtggtgcccagcctggcaccgcggcttcctgcctggattggctcctggctccagagctagaggctcaggaaatcccacaggggtatggcgttgacggtggatgtggccgggccagcgccctggggcttccgtatcaca

SEQ ID NO: 164045 - DNA, 701 bp, Homo sapiens
  Payload ID: 12298
  Gene Symbol: PDLIM2
  Gene Name: PDZ and LIM domain 2 (mystique)
  ENST ID: ENST00000443561
  CDS Start-End: 94-312
gcctcctcccaacaggccggcctcggccgcgctggcgactcggcggtgctggtgctgccgccttccccgggccctcgttcctccaggcccagcatggactcggaagggggaagcctcctcctggacgaggactcggaagtcttcaagatgctgcaggaaaatcgcgagggacgggcggccccccgacagtccagctcctttcggctcttgcaggaagccctggaggctgaggagagaggaaccaggctgtgcgcatccaggagggccggtaccgccaccccggctgctacacctgtgccgactgtgggctgaacctgaagatgcgcgggcacttctgggtgggtgacgagctgtactgtgagaagcatgcccgccagcgctactccgcacctgccaccctcagctctcgggcctgagcccgccatgccctcagcctgcctcactgctgggccagggtcatgcctatataagttggcatggcagggacaatggtgggcagttgctcttacatgagctaagtttggagacctgaggcccctttgtcctcgctgggtgggccaaggtctgggacctgtcttggactgtgggagactcaccctcaccttgccaggcctctcccctgcaggactggcattgcactagtctgaggtggccactgcctttgatcaacctttgtgtgcgagggtctaagtagggtcgaa

SEQ ID NO: 164046 - DNA, 1490 bp, Homo sapiens
  Payload ID: 12298
  Gene Symbol: PDLIM2
  Gene Name: PDZ and LIM domain 2 (mystique)
  ENST ID: ENST00000622702
  CDS Start-End: 135-1112
aagcccctgagtagctgctccgggagctgtggtgccctctccttctccctttggctcctctcctgctgccttacagtgcccccagagccggctaggggcatggacttcacctcctggtcctctcttcctcaggtatggcgttgacggtggatgtggccgggccagcgccctggggcttccgtatcacagggggcagggatttccacacgcccatcatggtgactaaggtggccgagcggggcaaagccaaggacgctgacctccggcctggagacataatcgtggccatcaacggggaaagcgcggagggcatgctgcatgccgaggcccagagcaagatccgccagagcccctcgcccctgcggctgcagctggaccggtctcaggctacgtctccagggcagaccaatggggacagctccttggaagtgctggcgactcgcttccagggctccgtgaggacatacactgagagtcagtcctccttaaggtcctcctactccagcccaacctccctcagccgagggccggcagccccttctcaccaccaccctctagcagctccctcactggagaggcagccatcagccgcagccggcctcggccgcgctggcgactcggcggtgctggtgctgccgccttccccgggccctcgttcctccaggcccagcatggactcggaagggggaagcctcctcctggacgaggactcggaagtcttcaagatgctgcaggaaaatcgcgagggacgggcggccccccgacagtccagctcctttcggctcttgcaggaagccctggaggctgaggagagaggtggcacgccagccttcttgcccagctcactgagcccccagtcctccctgcccgcctccagggccctggccacccctcccaagctccacacttgtgagaagtgcagtaccagcatcgcgaaccaggctgtgcgcatccaggagggccggtaccgccaccccggctgctacacctgtgccgactgtgggctgaacctgaagatgcgcgggcacttctgggtgggtgacgagctgtactgtgagaagcatgcccgccagcgctactccgcacctgccaccctcagctctcgggcctgagcccgccatgccctcagcctgcctcactgctgggccagggtcatgcctatataagttggcatggcagggacaatggtgggcagttgctcttacatgagctaagtttggagacctgaggcccctttgtcctcgctgggtgggccaaggtctgggacctgtcttggactgtgggagactcaccctcaccttgccaggcctctcccctgcaggactggcattgcactagtctgaggtggccactgcctttgatcaacctttgtgtgcgagggtctaagtagggtcgaacacagaagtgggaaggagaggggtgggccaggggctaatggtgtcactgtgtaaagtttttgacatactagctctataaatatatgaatatgg

SEQ ID NO: 164047 - DNA, 894 bp, Homo sapiens
  Payload ID: 12298
  Gene Symbol: PDLIM2
  Gene Name: PDZ and LIM domain 2 (mystique)
  ENST ID: ENST00000448520
  CDS Start-End: 1-414
gggcagaccaatggggacagctccttggaagtgctggcgactcgcttccagggctccgtgaggacatacactgagagtcagtcctccttaaggtcctcctactccagcccaacctccctcagcccgagggccggcagccccttctcaccaccaccctctagcagctccctcactggagaggcagccatcagccgcagcttccagagtctggcatgttccccgggcctccccgctgctgaccgcctgtcctactcaggccgccctggaagccgacagcatggactcggaagggggaagcctcctcctggacgaggactcggaagtcttcaagatgctgcaggaaaatcgcgagggacgggcggccccccgacagtccagctcctttcggctcttgcaggaagccctggaggctgaggagagaggtggcacgccagccttcttgcccagctcactgagcccccagtcctccctgcccgcctccagggccctggccacccctcccaagctccacacttgtgagaagtgcagtaccagcatcgcgaaccaggctgtgcgcatccaggagggccggtaccgccaccccggctgctacacctgtgccgactgtgggctgaacctgaagatgcgcgggcacttctgggtgggtgacgagctgtactgtgagaagcatgcccgccagcgctactccgcacctgccaccctcagctctcgggcctgagcccgccatgccctcagcctgcctcactgctgggccagggtcatgcctatataagttggcatggcagggacaatggtgggcagttgctcttacatgagctaagtttggagacctgaggcccctttgtcctcgctgggtgggccaaggtctgggacctgtcttggactgtgggagac

SEQ ID NO: 164048 - DNA, 1995 bp, Homo sapiens
  Payload ID: 12298
  Gene Symbol: PDLIM2
  Gene Name: PDZ and LIM domain 2 (mystique)
  ENST ID: ENST00000464275
  CDS Start-End: 1175-1615
atagaacgttttactggagaaccctgagagcagagggatgcgaggccaactgctggtagcagcctggtggggtgagggtctagggttgttttcttaagatccagaagtttttgctttagcttaaggatgtgtgcaattttccatgtggcttcataattcatccatgactttgaattttaaaatggagagaagttggcttcccaggaaatggtgcccctggccctgggcatcggcccacctggctgtctccaaggctctccttcccagtggctggtgcgggctccgggagctcagctgagtcccattggggtggcaacggaaagggagcaggggagtggggagtacggagatgcaggctggaaactggcctccaggaacaactgtgaggttgaaggcgagatttccatgttgggagcaaatttaagagccccagatggacacggcacacctggagacaggcactgctgcctgagtgtggcccagggagggctcggctccccaaagctccacggggcaggcccagacctcccagcagagtagggacaggctggttagcccagactcccgcctctgaggagaggaaccagctctccttgggaagagggcctctgccctggccggccctgactcccaggggacttcgaccccttgcttcatccctttatgtttctatctcctcagtgcaaaagggcagcgtgcttcctctctgctggttccgtgggatcggagccaggccccagtgtgcaatgtctttgcacacagataatagcgtgcgtgacagaggactctgtgcttagctgtcacctgctgccttcctgctgcccggtccccggcagaacccgcatgcctccctccctctctggaccctggcagtctctgcgccctggctccgagggaaggggcagggggcccgctggtcggcgagggctgggagcccccgacaccttggctccaagggaaggggcaggggtccgctggtcggcgagggccgggggccccctggtgtcgggcctgggaacagccgggctaggccctcctgggtgtgttggcccaaggctctggccctgactcctccccggctgcctcctcccaacaggccggcctcggccgcgctggcgactcggcggtgctggtgctgccgccttccccgggccctcgttcctccaggcccagcatggactcggaagggggaagcctcctcctggacgaggactcggaagtcttcaagatgctgcaggaaaatcgcgagggacgggcggccccccgacagtccagctcctttcggctcttgcaggaagccctggaggctgaggagagaggtggcacgccagccttcttgcccagctcactgagcccccagtcctccctgcccgcctccagggccctggccacccctcccaagctccacacttgtgagaagtgcagtaccagcatcgcgaaccaggctgtgcgcatccaggagggccggtaccgccaccccggctgctacacctgtgccgactgtgggctgaacctgaagatgcgcgggcacttctgggtgggtgacgagctgtactgtgagaagcatgcccgccagcgctactccgcacctgccaccctcagctctcgggcctgagcccgccatgccctcagcctgcctcactgctgggccagggtcatgcctatataagttggcatggcagggacaatggtgggcagttgctcttacatgagctaagtttggagacctgaggcccctttgtcctcgctgggtgggccaaggtctgggacctgtcttggactgtgggagactcaccctcaccttgccaggcctctcccctgcaggactggcattgcactagtctgaggtggccactgcctttgatcaacctttgtgtgcgagggtctaagtagggtcgaacacagaagtgggaaggagaggggtgggccaggggctaatggtgtcactgtgtaaagtttttgacatactagctctataaatatatgaatatggac

SEQ ID NO: 164049 - DNA, 2589 bp, Homo sapiens
  Payload ID: 12299
  Gene Symbol: PDLIM3
  Gene Name: PDZ and LIM domain 3
  ENST ID: ENST00000284767
  CDS Start-End: 125-955
cggtgacgtcacccccagcggggataaagcgcccccgcccgggtcggggccaggacgccgcccggcgcggagtggctgccctgcgcggggacacttagagcccggtgggcgggaggaaggcggcatgccccagacggtgatcctcccgggccctgcgccctggggcttcaggctctcagggggcatagacttcaaccagcctttggtcatcaccaggattacaccaggaagcaaggcggcagctgccaacctgtgtcctggagatgtcatcctggctattgacggctttgggacagagtccatgactcatgctgatgcgcaggacaggattaaagcagcagctcaccagctgtgtctcaaaattgacaggggagaaactcacttatggtctccacaagtatctgaagatgggaaagcccatcctttcaaaatcaacttagaatcagaaccacaggacgggaactactttgaacacaagcataatattcggcccaaacctttcgtgatcccgggccgaagcagcgagcccacagcctcggtgccccccgagtcggacgtgtaccggatgctccacgacaatcggaatgagcccacacagcctcgccagtcgggctccttcagagtgctccagggaatggtggacgatggctctgatgaccgtccggctggaacgcggagtgtgagagctccggtgacgaaagtccatggcggttcaggcggggcacagaggatgccgctctgtgacaaatgtgggagtggcatagtcggtgctgtggtgaaggcgcgggataagtaccggcaccctgagtgcttcgtgtgtgccgactgcaacctcaacctcaagcaaaagggctacttcttcatagaaggggagctgtactgcgaaacccacgcaagagcccgcacaaagcccccagagggctatgacacggtcactctgtatcccaaagcttaagtctctgcaggcgtggcacgcacgcacgcacccacccacgcgcacttacacgagaagacattcatggctttgggcagaaggattgtgcagattgtcaactccaaatctaaagtcaaggctttagacctttatcctattgtttattgaggaaaaggaatgggaggcaaatgcctgctatgtgaaaaaaacatacacttagctatgttttgcaactctttttggggctagcaataatgatatttaaagcaataattttttgtatgtcatactccacaatttacatgtatattacagccatcaaacacataaacatcaagatatttgaaggactctaattgtctttccttgacaagttgattttgcaattgtggtaaatagcaaataacaatcttgtattctaacataatctgcagttgtctgtatgtgttttaactattacagtgcatgttagggagaaattccctgaatttctttagttttgtattcaaacaattatgccactcgatgcaacaaacataataaatacataaaagatttaaaaaatacctaatgaagtggcattcattgaattcaaataaaatcaacatttcaatgagagaacccaatcatattttaacatgtacactaacaaatattttaagataaatgtggcttcttcaggttttataactcattactctttcttatgagcacaaaatttctgatgatagaagcgttgaaatttgctagttaaaggtagttcagtctctttcaaattaaaagtttcacttgcttcaacagagactctttcaatttaaatatctctttcagatcaatattcagtcaaattgaaggttcaaagtccatcactgctgtttcttaggctcaatggttcaccacctcctcctcttcccaagatggcatctccaggaagaaacaatttagacgacttcctaaggaaggcaggggctgctggtctcctggggtcctgcttgtatccactgttgaaatccttggtttcacttgtgatctgtggtctgttttcttgacatagttgaggccaggcaataataacacctccactaccacctccaaaactctcagctcagctttcctggagtcatggatcctctgtctgagacatgcactctgcctggccctggcgcaggcagcctaccttgcaggctctgcatggcgttaccttgcctctcacccagggtgcccatggcaatgctcctgacttgcatctctcacctactttccatgtcccccactggggacgtacaggaacttctgaaactgtcccctcaggttcaaaccatggggaaccagcagggtggggaccctcagaccctctgtctcaccaccttgtgtcacatggtcatctctaccacccctcaacccccacagctgctaacttctggcctgaaacaagtgttctcctcccataaggtcccaaatgggacacaagttttattgctctgggattcttccaaacttaactgactctgaccctgacctgttcaggattttgagaggagccaaaacacgtgcctggcccctgtaggcatttgacattgcaactcctgtgccaacacatgcattcactaacaaagctattaaaaaaataaaacagacttttgagatcaaagaaa

SEQ ID NO: 164050 - DNA, 1766 bp, Homo sapiens
  Payload ID: 12299
  Gene Symbol: PDLIM3
  Gene Name: PDZ and LIM domain 3
  Uniprot ID: Q53GG5
  ENST ID: ENST00000284770
  CDS Start-End: 75-1169
caggacgccgcccggcgcggagtggctgccctgcgcggggacacttagagcccggtgggcgggaggaaggcggcatgccccagacggtgatcctcccgggccctgcgccctggggcttcaggctctcagggggcatagacttcaaccagcctttggtcatcaccaggattacaccaggaagcaaggcggcagctgccaacctgtgtcctggagatgtcatcctggctattgacggctttgggacagagtccatgactcatgctgatgcgcaggacaggattaaagcagcagctcaccagctgtgtctcaaaattgacaggggagaaactcacttatggtctccacaagtatctgaagatgggaaagcccatcctttcaaaatcaacttagaatcagaaccacaggacgggaactactttgaacacaagcataatattcggcccaaacctttcgtgatcccgggccgaagcagtggatgcagcactccctccgggattgactgtggcagtggacgcagcaccccttcttctgtcagtactgttagtaccatttgcccaggtgacttgaaagttgcggctaagctggcccctaacattcctttggaaatggaacttcctggtgtgaagattgtacatgctcagtttaatacacctatgcagttgtactcagatgacaatattatggaaacactccagggtcaggtttcaacagccctaggggaaacacctttgatgagcgagcccacagcctcggtgccccccgagtcggacgtgtaccggatgctccacgacaatcggaatgagcccacacagcctcgccagtcgggctccttcagagtgctccagggaatggtggacgatggctctgatgaccgtccggctggaacgcggagtgtgagagctccggtgacgaaagtccatggcggttcaggcggggcacagaggatgccgctctgtgacaaatgtgggagtggcatagtcggtgctgtggtgaaggcgcgggataagtaccggcaccctgagtgcttcgtgtgtgccgactgcaacctcaacctcaagcaaaagggctacttcttcatagaaggggagctgtactgcgaaacccacgcaagagcccgcacaaagcccccagagggctatgacacggtcactctgtatcccaaagcttaagtctctgcaggcgtggcacgcacgcacgcacccacccacgcgcacttacacgagaagacattcatggctttgggcagaaggattgtgcagattgtcaactccaaatctaaagtcaaggctttagacctttatcctattgtttattgaggaaaaggaatgggaggcaaatgcctgctatgtgaaaaaaacatacacttagctatgttttgcaactctttttggggctagcaataatgatatttaaagcaataattttttgtatgtcatactccacaatttacatgtatattacagccatcaaacacataaacatcaagatatttgaaggactctaattgtctttccttgacaagttgattttgcaattgtggtaaatagcaaataacaatcttgtattctaacataatctgcagttgtctgtatgtgttttaactattacagtgcatgttagggagaaattccctgaatttctttagttttgtattcaaacaattatgccactcgatgcaacaaacataataaatacataaaagatttaaaaaatacctaatgaagtggcattcattgaattcaaataaaatcaacatttcaatgaga

SEQ ID NO: 164051 - DNA, 1672 bp, Homo sapiens
  Payload ID: 12299
  Gene Symbol: PDLIM3
  Gene Name: PDZ and LIM domain 3
  Uniprot ID: Q53GG5
  ENST ID: ENST00000284771
  CDS Start-End: 179-1129
cgcttccaaagttggagctctccggggtgggagggggcggggaggacggcggggcggtgacgtcacccccagcggggataaagcgcccccgcccgggtcggggccaggacgccgcccggcgcggagtggctgccctgcgcggggacacttagagcccggtgggcgggaggaaggcggcatgccccagacggtgatcctcccgggccctgcgccctggggcttcaggctctcagggggcatagacttcaaccagcctttggtcatcaccaggattacaccaggaagcaaggcggcagctgccaacctgtgtcctggagatgtcatcctggctattgacggctttgggacagagtccatgactcatgctgatgcgcaggacaggattaaagcagcagctcaccagctgtgtctcaaaattgacaggggagaaactcacttatggtctccacaagtatctgaagatgggaaagcccatcctttcaaaatcaacttagaatcagaaccacaggaattcaaacccattggtaccgcgcacaacagaagggcccagccttttgttgcagctgcaaacattgatgacaaaagacaggtagtgagcgcttcctataactcgccaattgggctctattcaactagcaatatacaagatgcgcttcacggacagctgcggggtctcattcctagctcacctcaaaacgagcccacagcctcggtgccccccgagtcggacgtgtaccggatgctccacgacaatcggaatgagcccacacagcctcgccagtcgggctccttcagagtgctccagggaatggtggacgatggctctgatgaccgtccggctggaacgcggagtgtgagagctccggtgacgaaagtccatggcggttcaggcggggcacagaggatgccgctctgtgacaaatgtgggagtggcatagtcggtgctgtggtgaaggcgcgggataagtaccggcaccctgagtgcttcgtgtgtgccgactgcaacctcaacctcaagcaaaagggctacttcttcatagaaggggagctgtactgcgaaacccacgcaagagcccgcacaaagcccccagagggctatgacacggtcactctgtatcccaaagcttaagtctctgcaggcgtggcacgcacgcacgcacccacccacgcgcacttacacgagaagacattcatggctttgggcagaaggattgtgcagattgtcaactccaaatctaaagtcaaggctttagacctttatcctattgtttattgaggaaaaggaatgggaggcaaatgcctgctatgtgaaaaaaacatacacttagctatgttttgcaactctttttggggctagcaataatgatatttaaagcaataattttttgtatgtcatactccacaatttacatgtatattacagccatcaaacacataaacatcaagatatttgaaggactctaattgtctttccttgacaagttgattttgcaattgtggtaaatagcaaataacaatcttgtattctaacataatctgcagttgtctgtatgtgttttaactattacagtgcatgttagggagaaattccctgaatttctttagttttgtattcaaacaattatgccactcgatgcaacaaacataataaatacataaaagatttaaaaaa

SEQ ID NO: 164052 - DNA, 581 bp, Homo sapiens
  Payload ID: 12299
  Gene Symbol: PDLIM3
  Gene Name: PDZ and LIM domain 3
  ENST ID: ENST00000512293
  CDS Start-End: 74-202
aggacgccgcccggcgcggagtggctgccctgcgcggggacacttagagcccggtgggcgggaggaaggcggcatgccccagacggtgatcctcccgggccctgcgccctggggcttcaggctctcagggggcatagacttcaaccagcctttggtcatcaccagggggagaaactcacttatggtctccacaagtatctgaagatgggaaagcccatcctttcaaaatcaacttagaatcagaaccacaggacgggaactactttgaacacaagcataatattcggcccaaacctttcgtgatcccgggccgaagcagtggatgcagcactccctccgggattgactgtggcagtggacgcagcaccccttcttctgtcagtactgttagtaccatttgcccaggtgacttgaaagttgcggctaagctggcccctaacattcctttggaaatggaacttcctggtgtgaagattgtacatgctcagtttaatacacctatgcagttgtactcagatgacaatattatggaaacactccagggtcaggtttcaacagccctaggggaaacacctttgatg

SEQ ID NO: 164053 - DNA, 571 bp, Homo sapiens
  Payload ID: 12299
  Gene Symbol: PDLIM3
  Gene Name: PDZ and LIM domain 3
  ENST ID: ENST00000505886
  CDS Start-End: 33-161
acttagagcccggtgggcgggaggaaggcggcatgccccagacggtgatcctcccgggccctgcgccctggggcttcaggctctcagggggcatagacttcaaccagcctttggtcatcaccagggggagaaactcacttatggtctccacaagtatctgaagatgggaaagcccatcctttcaaaatcaacttagaatcagaaccacaggaattcaaacccattggtaccgcgcacaacagaagggcccagccttttgttgcagctgcaaacattgatgacaaaagacaggtagtgagcgcttcctataactcgccaattgggctctattcaactagcaatatacaagatgcgcttcacggacagctgcggggtctcattcctagctcacctcaaaacgagcccacagcctcggtgccccccgagtcggacgtgtaccggatgctccacgacaatcggaatgagcccacacagcctcgccagtcgggctccttcagagtgctccagggaatggtggacgatggctctgatgaccgtccggctggaacgcggagtgtgagagctccggtga

SEQ ID NO: 164054 - DNA, 2352 bp, Homo sapiens
  Payload ID: 12299
  Gene Symbol: PDLIM3
  Gene Name: PDZ and LIM domain 3
  ENST ID: ENST00000620787
  CDS Start-End: 125-718
cggtgacgtcacccccagcggggataaagcgcccccgcccgggtcggggccaggacgccgcccggcgcggagtggctgccctgcgcggggacacttagagcccggtgggcgggaggaaggcggcatgccccagacggtgatcctcccgggccctgcgccctggggcttcaggctctcagggggcatagacttcaaccagcctttggtcatcaccagggacgggaactactttgaacacaagcataatattcggcccaaacctttcgtgatcccgggccgaagcagcgagcccacagcctcggtgccccccgagtcggacgtgtaccggatgctccacgacaatcggaatgagcccacacagcctcgccagtcgggctccttcagagtgctccagggaatggtggacgatggctctgatgaccgtccggctggaacgcggagtgtgagagctccggtgacgaaagtccatggcggttcaggcggggcacagaggatgccgctctgtgacaaatgtgggagtggcatagtcggtgctgtggtgaaggcgcgggataagtaccggcaccctgagtgcttcgtgtgtgccgactgcaacctcaacctcaagcaaaagggctacttcttcatagaaggggagctgtactgcgaaacccacgcaagagcccgcacaaagcccccagagggctatgacacggtcactctgtatcccaaagcttaagtctctgcaggcgtggcacgcacgcacgcacccacccacgcgcacttacacgagaagacattcatggctttgggcagaaggattgtgcagattgtcaactccaaatctaaagtcaaggctttagacctttatcctattgtttattgaggaaaaggaatgggaggcaaatgcctgctatgtgaaaaaaacatacacttagctatgttttgcaactctttttggggctagcaataatgatatttaaagcaataattttttgtatgtcatactccacaatttacatgtatattacagccatcaaacacataaacatcaagatatttgaaggactctaattgtctttccttgacaagttgattttgcaattgtggtaaatagcaaataacaatcttgtattctaacataatctgcagttgtctgtatgtgttttaactattacagtgcatgttagggagaaattccctgaatttctttagttttgtattcaaacaattatgccactcgatgcaacaaacataataaatacataaaagatttaaaaaatacctaatgaagtggcattcattgaattcaaataaaatcaacatttcaatgagagaacccaatcatattttaacatgtacactaacaaatattttaagataaatgtggcttcttcaggttttataactcattactctttcttatgagcacaaaatttctgatgatagaagcgttgaaatttgctagttaaaggtagttcagtctctttcaaattaaaagtttcacttgcttcaacagagactctttcaatttaaatatctctttcagatcaatattcagtcaaattgaaggttcaaagtccatcactgctgtttcttaggctcaatggttcaccacctcctcctcttcccaagatggcatctccaggaagaaacaatttagacgacttcctaaggaaggcaggggctgctggtctcctggggtcctgcttgtatccactgttgaaatccttggtttcacttgtgatctgtggtctgttttcttgacatagttgaggccaggcaataataacacctccactaccacctccaaaactctcagctcagctttcctggagtcatggatcctctgtctgagacatgcactctgcctggccctggcgcaggcagcctaccttgcaggctctgcatggcgttaccttgcctctcacccagggtgcccatggcaatgctcctgacttgcatctctcacctactttccatgtcccccactggggacgtacaggaacttctgaaactgtcccctcaggttcaaaccatggggaaccagcagggtggggaccctcagaccctctgtctcaccaccttgtgtcacatggtcatctctaccacccctcaacccccacagctgctaacttctggcctgaaacaagtgttctcctcccataaggtcccaaatgggacacaagttttattgctctgggattcttccaaacttaactgactctgaccctgacctgttcaggattttgagaggagccaaaacacgtgcctggcccctgtaggcatttgacattgcaactcctgtgccaacacatgcattcactaacaaagctattaaaaaaataaaacagacttttgagatcaaagaaa

SEQ ID NO: 164055 - DNA, 1016 bp, Homo sapiens
  Payload ID: 12299
  Gene Symbol: PDLIM3
  Gene Name: PDZ and LIM domain 3
  ENST ID: ENST00000629667
  CDS Start-End: 74-202
aggacgccgcccggcgcggagtggctgccctgcgcggggacacttagagcccggtgggcgggaggaaggcggcatgccccagacggtgatcctcccgggccctgcgccctggggcttcaggctctcagggggcatagacttcaaccagcctttggtcatcaccagggggagaaactcacttatggtctccacaagtatctgaagatgggaaagcccatcctttcaaaatcaacttagaatcagaaccacaggacgggaactactttgaacacaagcataatattcggcccaaacctttcgtgatcccgggccgaagcagtggatgcagcactccctccgggattgactgtggcagtggacgcagcaccccttcttctgtcagtactgttagtaccatttgcccaggtgacttgaaagttgcggctaagctggcccctaacattcctttggaaatggaacttcctggtgtgaagattgtacatgctcagtttaatacacctatgcagttgtactcagatgacaatattatggaaacactccagggtcaggtttcaacagccctaggggaaacacctttgatgagcgagcccacagcctcggtgccccccgagtcggacgtgtaccggatgctccacgacaatcggaatgagcccacacagcctcgccagtcgggctccttcagagtgctccagggaatggtggacgatggctctgatgaccgtccggctggaacgcggagtgtgagagctccggtgacgaaagtccatggcggttcaggcggggcacagaggatgccgctctgtgacaaatgtgggagtggcatagtcggtgctgtggtgaaggcgcgggataagtaccggcaccctgagtgcttcgtgtgtgccgactgcaacctcaacctcaagcaaaagggctacttcttcatagaaggggagctgtactgcgaaacccacgcaagagcccgcacaaagcccccagagggctatgacacggtcactctgtatcccaaagcttaa

SEQ ID NO: 164056 - DNA, 2282 bp, Homo sapiens
  Payload ID: 12300
  Gene Symbol: PDLIM4
  Gene Name: PDZ and LIM domain 4
  Uniprot ID: P50479
  ENST ID: ENST00000253754
  CDS Start-End: 65-1057
gctgcggcggcggcggctcctcctcagagtccggctcaggctccggctgcggctccagcccgcgatgccccattccgtgaccctgcgcgggccttcgccctggggcttccgcctggtgggcggccgggacttcagcgcgcccctcaccatctcacgggtccatgctggcagcaaggctgcattggctgccctgtgcccaggagacctgatccaggccatcaatggtgagagcacagagctcatgacacacctggaggcacagaaccgcatcaagggctgccacgatcacctcacactgtctgtgagcaggcctgagggtaggagctggcccagtgcccctgatgacagcaaggctcaggcacacaggatccacatcgatcctgagatccaggacggcagcccaacaaccagcaggcggccctcaggcaccgggactgggccagaagatggcagaccaagcctgggatctccatatggacaaccccctcgctttccagtccctcacaatggcagcagcgaggccaccctgccagcccagatgagcaccctgcatgtgtctccaccccccagcgctgacccagccagaggcctcccgcggagccgggactgcagagtcgacctgggctccgaggtgtacaggatgctgcgggagccagccgagcccgtggccgcggagcccaagcagtcaggctccttccgctacttgcagggcatgctagaggccggcgagggcggggattggcccgggcctggcggcccccggaacctcaagcccacggccagcaagctgggcgctccgctgagcggcctgcaggggctgcccgagtgcacgcgctgcggccacggcatcgtgggcaccatcgtcaaggcacgggacaagctctaccatcccgagtgcttcatgtgcagtgactgcggcctgaacctcaagcagcgtggttacttctttctggacgagcggctctactgtgagagccacgccaaggcgcgcgtgaagccgcccgagggctacgacgtggtggcggtgtaccccaatgccaaggtggaactcgtctgagctgggaccctgctcccacgcctgcttcttaaggtccctgctcggccggtgtaaatatgtttcaccctgtccctctaataaagctcctctgctccaccttgaacctgtcacctggcctgccaccctcctgcgcaggccatgcatggctcccgagtacagtagtatctgcttaggtgccaggcatgtcctaggctctgggtgcagtagtgagcaggacgggtaccatgctgccctgaagggggccacagcctgggtggaaggcagacctgaatcacaacgggccagctctagtaatacgaaggtgaggtctgggatgctgcgtgcggcgcgacgacaggaggtatgacctgggtggggtcagggaaagtcttagctgagaactaagagatgagggaggcacaaactctgcacgggggaactgtgtgtgcaaaggtgagctgggggcgagaaaggcctctgtggccgtcatcggcactagcgggttgggggtggtggtggggtgctggcagcctcaggagcgatcgctcccctggagagggtgattgagtgtggagatcaccggggccgccgcgggccgtctgcacttctgttccaggtttttctggcattttctgttccaggtttcttccacccacgagcactttattctcctccgagacccccttttcttccccttcctctctcccccaccagggggcgcgcttaaatttccagacagagaccagaaggaaggtttagaaagaaaagaacacttgcccagggcagctttgccctccaagaggctccctcctgtctctaagtcaattccacccctcctcgaagtcccggcttccacccctctcctcagagtcccggcgtttacctcgtggtgtgtttgccttgggcctttcatgccccggctgcacacatcgtctgtgaattgtggctgttcactcccgaggatgtgtcctagactccgggtcgcgtggatctaccctctagtttacttgctcgggagaagaaactgactcgttttatttagtgcctatttagcgagcccagagtaacgtacatttgtgctgttttcaattttgtgctatcgcaaatcacaaaaaaactgttatcaattcacattcatcatcagcacgagacccatttccttgtgctcctgccagctcaggatattatgtttcttttttcatttttgccagtctgttaagtaaaatgtcatatgcgtttgttttaa

SEQ ID NO: 164057 - DNA, 1006 bp, Homo sapiens
  Payload ID: 12300
  Gene Symbol: PDLIM4
  Gene Name: PDZ and LIM domain 4
  Uniprot ID: P50479
  ENST ID: ENST00000379018
  CDS Start-End: 29-769
caggctccggctgcggctccagcccgcgatgccccattccgtgaccctgcgcgggccttcgccctggggcttccgcctggtgggcggccgggacttcagcgcgcccctcaccatctcacgggtccatgctggcagcaaggctgcattggctgccctgtgcccaggagacctgatccaggccatcaatggtgagagcacagagctcatgacacacctggaggcacagaaccgcatcaagggctgccacgatcacctcacactgtctgtgagcaggcctgagggtaggagctggcccagtgcccctgatgacagcaaggctcaggcacacaggatccacatcgatcctgagatccaggacggcagcccaacaaccagcaggcggccctcaggcaccgggactgggccagaagatggcagaccaagcctgggatctccatatggacaaccccctcgctttccagtccctcacaatggcagcagcgaggccaccctgccagcccagatgagcaccctgcatgtgtctccaccccccagcgctgacccagccagaggcctcccgcggagccgggactgcagagtcgacctgggctccgaggtgtacaggatgctgcgggagccagccgagcccgtggccgcggagcccaagcagtcaggctccttccgctacttgcagggcatgctagaggccggcgagggcggggcaccatcgtcaaggcacgggacaagctctaccatcccgagtgcttcatgtgcagtgactgcggcctgaacctcaagcagcgtggttacttctttctggacgagcggctctactgtgagagccacgccaaggcgcgcgtgaagccgcccgagggctacgacgtggtggcggtgtaccccaatgccaaggtggaactcgtctgagctgggaccctgctcccacgcctgcttcttaaggtccctgctcggccggtgtaaatatgtttcaccctgtccctctaataaagctcctctgctccaccttgaa

SEQ ID NO: 164058 - DNA, 538 bp, Homo sapiens
  Payload ID: 12300
  Gene Symbol: PDLIM4
  Gene Name: PDZ and LIM domain 4
  ENST ID: ENST00000418373
  CDS Start-End: 176-538
tccaggagttcccaccagtaggagctcccacccaaaagaatggggtcactggcagcttttgaaccagctgggcactggctggagaggctgggtccatgctggcagcaaggctgcattggctgccctgtgcccaggagacctgatccaggccatcaatggtgagagcacagagctcatgacacacctggaggcacagaaccgcatcaagggctgccacgatcacctcacactgtctgtgagcaggcctgagggtaggagctggcccagtgcccctgatgacagcaaggctcaggcacacaggatccacatcgatcctgagatccaggacggcagcccaacaaccagcaggcggccctcaggcaccgggactgggccagaagatggcagaccaagcctgggatctccatatggacaaccccctcgctttccagtccctcacaatggcagcagcgaggccaccctgccagcccagatgagcaccctgcatgtgtctccaccccccagcgctgacccagccagaggcctcccgcggagccgg

SEQ ID NO: 164059 - DNA, 6083 bp, Homo sapiens
  Payload ID: 12301
  Gene Symbol: PDLIM5
  Gene Name: PDZ and LIM domain 5
  Uniprot ID: Q96HC4
  ENST ID: ENST00000317968
  CDS Start-End: 137-1927
gttcccgcgggcggtggggacggcgccctcaccgcgagtcacttgtcagcccttgtctgaggcggaggcagccccgcgccgcgccggacccgagcatatttcattttctgtcattggactttgagccattagaaccatgagcaactacagtgtgtcactggttggcccagctccttggggtttccggctgcagggcggtaaggatttcaacatgcctctgacaatctctagtctaaaagatggcggcaaggcagcccaggcaaatgtaagaataggcgatgtggttctcagcattgatggaataaatgcacaaggaatgactcatcttgaagcccagaataagattaagggttgtacaggctctttgaatatgactctgcaaagagcatctgctgcacccaagcctgagccggttcctgttcaaaagggagaacctaaagaagtagttaaacctgtgcccattacatctcctgctgtgtccaaagtcacttccacaaacaacatggcctacaataaggcaccacggccttttggttctgtgtcttcaccaaaagtcacatccatcccatcaccatcgtctgccttcaccccagcccatgcgaccacctcatcacatgcttccccttcacccgtggctgccgtcactcctcccctgttcgctgcatctggactgcatgctaatgccaatcttagtgctgaccagtctccatctgcactgagcgctggtaaaactgcagttaatgtcccacggcagcccacagtcaccagcgtgtgttccgagacttctcaggagctagcagagggacagagaagaggatcccagggtgacagtaaacagcaaaatggcccaccaagaaaacacattgtggagcgctatacagagttttatcatgtacccactcacagtgatgccagcaagaagagactgattgaggatactgaagactggcgtccaaggactggaacaactcagtctcgctctttccgaatccttgcccagatcactgggactgaacatttgaaagaatctgaagccgataatacaaagaaggcaaataactctcaggagccttctccgcagttggcttcctcggtagcttccacacggagcatgcccgagagcctggacagcccaacctctggcagaccaggggttaccagcctcacagctgcagctgccttcaagcctgtaggatccactggcgtcatcaagtcaccaagctggcaacggccaaaccaaggagtaccttccactggaagaatctcaaacagcgctacttactcaggatcagtggcaccagccaactcagctttgggacaaacccagccaagtgaccaggacactttagtgcaaagagctgagcacattccagcagggaaacgaactccgatgtgcgcccattgtaaccaggtcatcagaggaccattcttagtggcactggggaaatcttggcacccagaagaattcaactgcgctcactgcaaaaatacaatggcctacattggatttgtagaggagaaaggagccctgtattgtgagctgtgctatgagaaattctttgcccctgaatgtggtcgatgccaaaggaagatccttggagaagtcatcagtgcgttgaaacaaacttggcatgtttcctgttttgtgtgtgtagcctgtggaaagcccattcggaacaatgtttttcacttggaggatggtgaaccctactgtgagactgattattatgccctctttggtactatatgccatggatgtgaatttcccatagaagctggtgacatgttcctggaagctctgggctacacctggcatgacacttgctttgtatgctcagtgtgttgtgaaagtttggaaggtcagacctttttctccaagaaggacaagcccctgtgtaagaaacatgctcattctgtgaatttttgaaagtcaacagttcaggagaagagaaggaatttgaagagaaaaaggaaaattaaaattactaattaatttttagattcaatatttatatggagttttgaaaaataatagtggccctgaaggaataaattccagctttaaaaaccaagtctgaggaaatatttggcttcataaagtaaagagacggtttggcatttattattactttttcctgtattttatgcccataaaataagctttataaaaaccaatttcctgatggactattaaattcatcttagaataaattagtgaagaatttaattttagaataaataatccaatctgaaataattataccttctttccttgttaggtagttatgagtaaatctgcaaaaggcaatgaaaatgccttaaattttatcaataacagaattattgtatttaaaaaaaaactaatacttatctttaaaatagtaaataggattttaaacagagaattttatcagtaataggtgtcagtttttaaaaaattgcttgtaggctgagcgcggtggctcacgcctgtaatcccagcactttgggaggccaaggtgggtggaccacatgaggtcaggagtttgagatcagcctggccaacatggtgaaaccccatctctactaaaaatacaaaaattagccggacgcagtggcacgcgcctgtaatcccagctactcaagaggctgaggcacgagaatcacttgaacccgggagggagaggttgcagtgagccaagatcgtaccactgcactccagcctgggtgacagagtgagactctgtctccaaaaaaaaactttgcttgtatattatttttgccttacagtggatcattctagtaggaaaggacaataagattttttatcaaaatgtgtcatgccagtaagagatgttatattcttttctcatttcttccccacccaaaaataagctaccatatagcttataagtctcaaatttttgccttttactaaaatgtgattgtttctattcattgtgtatgcttcatcacctatattaggcaaattccatttttttcccttgtgctaaggtaaagatttaattaaataattttggcctctcatagttttctctctctttaaagagaataaatagagggccaggtgtggtggctcacgcctgtgatcccagcactttgggaggccaagacgggcggatcatgaggtcaagagatcaagatcatcctggccaacatggtgaaaccctgtctctactaaaaatacaaaaatgagctgggcatggtggggcgtgcctgtagtcccatgtacttgggaggctgaggcaggaaaattcttgaacccaggagacggaagttgcagtgagctgagatcacaccactgcactccagcctggtgacagagcaagactccggctcttaaaaaaaaaaaaaaaaaaaaaaaaagagagagagagaataaatagaaaagaatgtggctgggaattgtgaatcagaagattataccccccaattgtttttcaatccccttttctcaaataataaattagttaaatcagtttctgagttatgccactggctgatgaagagttgagaggtctctttgcagaatgatctttttgtttcgttttgtttcttcttctgcatttaaaaattaaaagattggtttgaggatgtgatgaaattgagactttttgtggttttctctcaataataagtgaaccaatttcaaatgtgatcacaaagtttggaaagcttttattcacagaggttgggtagtgttgggaggggagtttaattactcagattggcctgttatttgatttcctcctttgggaaaagaattatgtagataccacatggagacagggaaacaattgtggtaaaactgtggatcctgttgctatttgcccagtgagaaaacagattctggtatttgatttggtttttctctttgtttccagaatggatgaaagtccatgaacctcctaagttataatttaaatttgtttggggcaaggtgattttatagtcgagacagagccctaggtccttcctgccccatcactcacttacgacatcacttccattgtgtgcatgtttgttatagaggaggttttaggctacaatatttgtttaacctccctaagaactttcaaggcatctgtcctgaaagctgttaatttatggtctagcagatttatattatatgcagataataattaactggggataaaagaatggcaaggggtgacacaaagtagcaaactgaatacttctccaatagcaaccccaagctacctcctcaccctgcatcttggagggaggcaggaaatttcttttgaaataaagtgctggagctgaattctgcattatttatcgttgctgctgaaaccacctataaaagacttgctggctaatgtgcattgtcatataatgtacactgtcacatctttacagtcttgtatgttatagaatacaaaataagttgatggttttgtttggtgtgagctttttgtttgtttgtttagttttgccttcataggttatatgccaagatagtatttgataagtcaatgacatttggatgttttcttcaaagaattttatttgacccagatttcttataaagttatcttacattaaggatgtcattttcatcagaccttctttctacatattattcatgaagcataatgttgcatttctccaaattttatgcctgaaagggtagtgttgcttcctaaggtatcatgttgtctttgtgctttgtccatctcttccgtggcgaagctttatatctgttcctaaaacagttaatcctgtgaaataaatattgaacataatccagaagaatctctctgtttcccttggggaatgccatatttaattcaccagcagtaatcctttaataactggcagagcactttattcttctggtgagctccctgaatatttatttttctgattataaattttctatattagtagcattttttaattattacttcttcactatagagcatttacttttagtctctagatgtatattttggaatgctgtacttggcataacatagattaaaatcataatgcatgactaaaaactccttggatttatttcccattttaaaatttttagcggtaagttcagatttataatctttctctagacttccatggtctgaatgttgcctgctgaagtagcaacctaaaaagtatcccctgcttatgcttgtccagttggccctccatgtccataggcttcgcatctgtgattcagcccactgtgggtcaaaaatatttggggaaaaaaatggatggttgcgcctttgctgaacatgtacaaacttttttttgtcattaaacaatatagtataacaactatttacaaagcatttacattgtattagctattataggtaatctagagatgatttaaagtgtatggtaggatgtgcataggttatatgcaaatactacaccattttctataagggacttgaacatcatggactttagtatcctagggggttcttggaacccatcacccataggggcaccataggacaactatagtaccgtgtttatttcctattaattcaggttccgtttagagtctaaaactaaaacctaatcatttagtcacagtgtaaaaacaaatggaaataacagctcaaatcttcaaaatattactatagcattatgtttaaaataatctacaacaaaaatgtaccattttcaagcagtactacattaggagcccttttatagaaaataatttcttctttacccccgttccagtgtgaatctagtattctgttaacatttgtgtggcatttggagtttgtcatccccattgaagggagagccttctcagacatgaagcaagggaaacatactgaatagttttacacaaatttgatctggcttccatttgtccccctcatttcccaaatgtttaaatgtattggatttggattctcaatgtataagttgccttatctgttaatgtctatcttctgtctctttaattttgtatatctgctgttttgcttttggatacattttctaattagaagtcacatgataaatataatcagtatagtaataataccataatgtgcacatactcaataaataaatgactgcattgttgtaaa

SEQ ID NO: 164060 - DNA, 1960 bp, Homo sapiens
  Payload ID: 12301
  Gene Symbol: PDLIM5
  Gene Name: PDZ and LIM domain 5
  Uniprot ID: Q96HC4
  ENST ID: ENST00000318007
  CDS Start-End: 182-826
gtgtcctgggtcgggggtggggcgagggagagccaggaggcggaagttcccgcgggcggtggggacggcgccctcaccgcgagtcacttgtcagcccttgtctgaggcggaggcagccccgcgccgcgccggacccgagcatatttcattttctgtcattggactttgagccattagaaccatgagcaactacagtgtgtcactggttggcccagctccttggggtttccggctgcagggcggtaaggatttcaacatgcctctgacaatctctagtctaaaagatggcggcaaggcagcccaggcaaatgtaagaataggcgatgtggttctcagcattgatggaataaatgcacaaggaatgactcatcttgaagcccagaataagattaagggttgtacaggctctttgaatatgactctgcaaagagcatctgctgcacccaagcctgagccggttcctgttcaaaagaaaacacaagtgacaaataaccctggcactgtgaaaatcccacctaaacgcccaccaagaaaacacattgtggagcgctatacagagttttatcatgtacccactcacagtgatgccagcaagaagagactgattgaggatactgaagactggcgtccaaggactggaacaactcagtctcgctctttccgaatccttgcccagatcactgggactgaacatttgaaagaatctgaagccgataatacaaagaaggcaaaggaaaagataccccttcacgtctttagtcccaaatacacaaaattacgtgactggcaccatgaagtttcagcacgtgctcttaacgtacagtgatttatgagccttgccccccaagcagccagcacataccttttcatttactttttttttttcaacttcatagcaaaatctgtattaaatttgccttatgaaaaaatagaactttttctatacttttctaacaatttcctattgttgtgagaaaaggaagatgaacatgttttgtgctagttggtagctcacaaatgtaaaaccaaaaaaaaaaaaaaatagaaaattaagggactagatctatttgtggatttgtatctgtttttgttgtgattagggtagtaatcttggaaaacgaattattttcataagttgaatttggttagttggttggttgaagcagaggataatgagcaaataaagtccttgtctaatttggaaaatactttctttatattattaacatctcccaagattactttttaagttcattattatgttacattcaaagttgattgtaaattattctaaataagtaaatataaggaggcaagaataaacaaagactttattaaagaagagtgcgtgcattgtagatttaggtatcttttaaagtaggtactattcaggatggctctatgaagaggaggaggtccagatttggctcctgaaaaaggaaagaagagaattttacccctatttgcaatggagaaatacagtattctttggtttggttggatttgcaaatcctatttcctatcaaaggaaatatctctagtggatatttttagaatatagacaatttctaggtattaactaataagatatggaaaagatagctttgctttttttaatcagaagaacataaaataaattacaatatgaatgattgtgagacatcagagaaatattttacttagtgacgtaaactactgtgcactgctgctattcctaggaagctgtgttttgggcaatacatggaagctaaatatatgaccagaaatgctttctgccttgtaatatagtgtattatatattagagctaaatttagtaataaatgcattttgaagtttggaaaagtattgtaataaagttgcctttaacttagctttgtacttgttctgtttccttgaggctagacacagtgccatccaggacttattacagtataactgggtaaaataaacaattctctg

SEQ ID NO: 164061 - DNA, 1189 bp, Homo sapiens
  Payload ID: 12301
  Gene Symbol: PDLIM5
  Gene Name: PDZ and LIM domain 5
  Uniprot ID: Q96HC4
  ENST ID: ENST00000359265
  CDS Start-End: 153-563
gagccaggaggcggaagttcccgcgggcggtggggacggcgccctcaccgcgagtcacttgtcagcccttgtctgaggcggaggcagccccgcgccgcgccggacccgagcatatttcattttctgtcattggactttgagccattagaaccatgagcaactacagtgtgtcactggttggcccagctccttggggtttccggctgcagggcggtaaggatttcaacatgcctctgacaatctctagtgctggagtgcagtggcgcaatctcggctcaccacaacctccatctcccgagttcaagcgattctcctgcctcagcctcccgagtagctgggattacaggcatgtgccaccacgcctggctaattttgtatttttagtagagaccaagtttccctatgttggtcaggctggtcttgaactcccgacctcaggtgatctgcccacctcggcctcccaaagtgctaagattacaggcgtgagccaccgtgcctggcccacactgttttatactttgcttttttttgcaacaatttaccctgagatcattctctattaatatataaggaggtatgtgtgtttttttaaaacaattgtataattttattttataaggaaagtgacatttaaccaatcccctactgaagagtatttgtggcatttccatattactgttacagtggtacagtgaataccaaatataagtacatacatatatatgtgaatatatgtatctacgtcattttgaaaggttgtgccaatttacacttttgtgcaacgcatgaaaatactatttttgtgccagtcttaccaacaaacttggatatttatcaagtgctgtgaatgcatcatctcatttaattatcataccaacatgcaaaatagtgatattattcccattgtatataactgtgctgtgcgctcacatgactgtatggaagagctggctttccaacagttatgctgtgctgcctctttaataattcactttaccttaaatttagttagttgtttctttaatcagatatttagaagattgtcattttggttaataatatatgtgtatgtataaatatatatacacacacatactctgcatcttgtatgtgtatccaacttcattttgaaagattaaaaataagtttgtaacgcctaaatatccttattaaaatactgcaaatccca

SEQ ID NO: 164062 - DNA, 2020 bp, Homo sapiens
  Payload ID: 12301
  Gene Symbol: PDLIM5
  Gene Name: PDZ and LIM domain 5
  Uniprot ID: Q96HC4
  ENST ID: ENST00000380180
  CDS Start-End: 182-886
gtgtcctgggtcgggggtggggcgagggagagccaggaggcggaagttcccgcgggcggtggggacggcgccctcaccgcgagtcacttgtcagcccttgtctgaggcggaggcagccccgcgccgcgccggacccgagcatatttcattttctgtcattggactttgagccattagaaccatgagcaactacagtgtgtcactggttggcccagctccttggggtttccggctgcagggcggtaaggatttcaacatgcctctgacaatctctagtctaaaagatggcggcaaggcagcccaggcaaatgtaagaataggcgatgtggttctcagcattgatggaataaatgcacaaggaatgactcatcttgaagcccagaataagattaagggttgtacaggctctttgaatatgactctgcaaagagcatctgctgcacccaagcctgagccggttcctgttcaaaagcccacagtcaccagcgtgtgttccgagacttctcaggagctagcagagggacagagaagaggatcccagggtgacagtaaacagcaaaatgggaaaatcccacctaaacgcccaccaagaaaacacattgtggagcgctatacagagttttatcatgtacccactcacagtgatgccagcaagaagagactgattgaggatactgaagactggcgtccaaggactggaacaactcagtctcgctctttccgaatccttgcccagatcactgggactgaacatttgaaagaatctgaagccgataatacaaagaaggcaaaggaaaagataccccttcacgtctttagtcccaaatacacaaaattacgtgactggcaccatgaagtttcagcacgtgctcttaacgtacagtgatttatgagccttgccccccaagcagccagcacataccttttcatttactttttttttttcaacttcatagcaaaatctgtattaaatttgccttatgaaaaaatagaactttttctatacttttctaacaatttcctattgttgtgagaaaaggaagatgaacatgttttgtgctagttggtagctcacaaatgtaaaaccaaaaaaaaaaaaaaatagaaaattaagggactagatctatttgtggatttgtatctgtttttgttgtgattagggtagtaatcttggaaaacgaattattttcataagttgaatttggttagttggttggttgaagcagaggataatgagcaaataaagtccttgtctaatttggaaaatactttctttatattattaacatctcccaagattactttttaagttcattattatgttacattcaaagttgattgtaaattattctaaataagtaaatataaggaggcaagaataaacaaagactttattaaagaagagtgcgtgcattgtagatttaggtatcttttaaagtaggtactattcaggatggctctatgaagaggaggaggtccagatttggctcctgaaaaaggaaagaagagaattttacccctatttgcaatggagaaatacagtattctttggtttggttggatttgcaaatcctatttcctatcaaaggaaatatctctagtggatatttttagaatatagacaatttctaggtattaactaataagatatggaaaagatagctttgctttttttaatcagaagaacataaaataaattacaatatgaatgattgtgagacatcagagaaatattttacttagtgacgtaaactactgtgcactgctgctattcctaggaagctgtgttttgggcaatacatggaagctaaatatatgaccagaaatgctttctgccttgtaatatagtgtattatatattagagctaaatttagtaataaatgcattttgaagtttggaaaagtattgtaataaagttgcctttaacttagctttgtacttgttctgtttccttgaggctagacacagtgccatccaggacttattacagtataactgggtaaaataaacaattctctg

SEQ ID NO: 164063 - DNA, 5713 bp, Homo sapiens
  Payload ID: 12301
  Gene Symbol: PDLIM5
  Gene Name: PDZ and LIM domain 5
  ENST ID: ENST00000437932
  CDS Start-End: 738-1553
gtgtcctgggtcgggggtggggcgagggagagccaggaggcggaagttcccgcgggcggtggggacggcgccctcaccgcgagtcacttgtcagcccttgtctgaggcggaggcagccccgcgccgcgccggacccgagcatatttcattttctgtcattggactttgagccattagaaccatgagcaactacagtgtgtcactggttggcccagctccttggggtttccggctgcagggcggtaaggatttcaacatgcctctgacaatctctagtctaaaagatggcggcaaggcagcccaggcaaatgtaagaataggcgatgtggttctcagcattgatggaataaatgcacaaggaatgactcatcttgaagcccagaataagattaagggttgtacaggctctttgaatatgactctgcaaagagcatctgctgcacccaagcctgagccggttcctgttcaaaagcccaccaagaaaacacattgtggagcgctatacagagttttatcatgtacccactcacagtgatgccagcaagaagagactgattgaggatactgaagactggcgtccaaggactggaacaactcagtctcgctctttccgaatccttgcccagatcactgggactgaacatttgaaagaatctgaagccgataatacaaagaaggcaaataactctcaggagccttctccgcagttggcttcctcggtagcttccacacggagcatgcccgagagcctggacagcccaacctctggcagaccaggggttaccagcctcacagctgcagctgccttcaagcctgtaggatccactggcgtcatcaagtcaccaagctggcaacggccaaaccaaggagtaccttccactggaagaatctcaaacagcgctacttactcaggatcagtggcaccagccaactcagctttgggacaaacccagccaagtgaccaggacactttagtgcaaagagctgagcacattccagcagggaaacgaactccgatgtgcgcccattgtaaccaggtcatcagaggaccattcttagtggcactggggaaatcttggcacccagaagaattcaactgcgctcactgcaaaaatacaatggcctacattggatttgtagaggagaaaggagccctgtattgtgagctgtgctatgagaaattctttgcccctgaatgtggtcgatgccaaaggaagatccttggagaagtcatcagtgcgttgaaacaaacttggcatgtttcctgttttgtgtgtgtagcctgtggaaagcccattcggaacaatgtttttcacttggaggatggtgaaccctactgtgagactgattattatgccctctttggtactatatgccatggatgtgaatttcccatagaagctggtgacatgttcctggaagctctgggctacacctggcatgacacttgctttgtatgctcagtgtgttgtgaaagtttggaaggtcagacctttttctccaagaaggacaagcccctgtgtaagaaacatgctcattctgtgaatttttgaaagtcaacagttcaggagaagagaaggaatttgaagagaaaaaggaaaattaaaattactaattaatttttagattcaatatttatatggagttttgaaaaataatagtggccctgaaggaataaattccagctttaaaaaccaagtctgaggaaatatttggcttcataaagtaaagagacggtttggcatttattattactttttcctgtattttatgcccataaaataagctttataaaaaccaatttcctgatggactattaaattcatcttagaataaattagtgaagaatttaattttagaataaataatccaatctgaaataattataccttctttccttgttaggtagttatgagtaaatctgcaaaaggcaatgaaaatgccttaaattttatcaataacagaattattgtatttaaaaaaaaactaatacttatctttaaaatagtaaataggattttaaacagagaattttatcagtaataggtgtcagtttttaaaaaattgcttgtaggctgagcgcggtggctcacgcctgtaatcccagcactttgggaggccaaggtgggtggaccacatgaggtcaggagtttgagatcagcctggccaacatggtgaaaccccatctctactaaaaatacaaaaattagccggacgcagtggcacgcgcctgtaatcccagctactcaagaggctgaggcacgagaatcacttgaacccgggagggagaggttgcagtgagccaagatcgtaccactgcactccagcctgggtgacagagtgagactctgtctccaaaaaaaaactttgcttgtatattatttttgccttacagtggatcattctagtaggaaaggacaataagattttttatcaaaatgtgtcatgccagtaagagatgttatattcttttctcatttcttccccacccaaaaataagctaccatatagcttataagtctcaaatttttgccttttactaaaatgtgattgtttctattcattgtgtatgcttcatcacctatattaggcaaattccatttttttcccttgtgctaaggtaaagatttaattaaataattttggcctctcatagttttctctctctttaaagagaataaatagagggccaggtgtggtggctcacgcctgtgatcccagcactttgggaggccaagacgggcggatcatgaggtcaagagatcaagatcatcctggccaacatggtgaaaccctgtctctactaaaaatacaaaaatgagctgggcatggtggggcgtgcctgtagtcccatgtacttgggaggctgaggcaggaaaattcttgaacccaggagacggaagttgcagtgagctgagatcacaccactgcactccagcctggtgacagagcaagactccggctcttaaaaaaaaaaaaaaaaaaaaaaaaagagagagagagaataaatagaaaagaatgtggctgggaattgtgaatcagaagattataccccccaattgtttttcaatccccttttctcaaataataaattagttaaatcagtttctgagttatgccactggctgatgaagagttgagaggtctctttgcagaatgatctttttgtttcgttttgtttcttcttctgcatttaaaaattaaaagattggtttgaggatgtgatgaaattgagactttttgtggttttctctcaataataagtgaaccaatttcaaatgtgatcacaaagtttggaaagcttttattcacagaggttgggtagtgttgggaggggagtttaattactcagattggcctgttatttgatttcctcctttgggaaaagaattatgtagataccacatggagacagggaaacaattgtggtaaaactgtggatcctgttgctatttgcccagtgagaaaacagattctggtatttgatttggtttttctctttgtttccagaatggatgaaagtccatgaacctcctaagttataatttaaatttgtttggggcaaggtgattttatagtcgagacagagccctaggtccttcctgccccatcactcacttacgacatcacttccattgtgtgcatgtttgttatagaggaggttttaggctacaatatttgtttaacctccctaagaactttcaaggcatctgtcctgaaagctgttaatttatggtctagcagatttatattatatgcagataataattaactggggataaaagaatggcaaggggtgacacaaagtagcaaactgaatacttctccaatagcaaccccaagctacctcctcaccctgcatcttggagggaggcaggaaatttcttttgaaataaagtgctggagctgaattctgcattatttatcgttgctgctgaaaccacctataaaagacttgctggctaatgtgcattgtcatataatgtacactgtcacatctttacagtcttgtatgttatagaatacaaaataagttgatggttttgtttggtgtgagctttttgtttgtttgtttagttttgccttcataggttatatgccaagatagtatttgataagtcaatgacatttggatgttttcttcaaagaattttatttgacccagatttcttataaagttatcttacattaaggatgtcattttcatcagaccttctttctacatattattcatgaagcataatgttgcatttctccaaattttatgcctgaaagggtagtgttgcttcctaaggtatcatgttgtctttgtgctttgtccatctcttccgtggcgaagctttatatctgttcctaaaacagttaatcctgtgaaataaatattgaacataatccagaagaatctctctgtttcccttggggaatgccatatttaattcaccagcagtaatcctttaataactggcagagcactttattcttctggtgagctccctgaatatttatttttctgattataaattttctatattagtagcattttttaattattacttcttcactatagagcatttacttttagtctctagatgtatattttggaatgctgtacttggcataacatagattaaaatcataatgcatgactaaaaactccttggatttatttcccattttaaaatttttagcggtaagttcagatttataatctttctctagacttccatggtctgaatgttgcctgctgaagtagcaacctaaaaagtatcccctgcttatgcttgtccagttggccctccatgtccataggcttcgcatctgtgattcagcccactgtgggtcaaaaatatttggggaaaaaaatggatggttgcgcctttgctgaacatgtacaaacttttttttgtcattaaacaatatagtataacaactatttacaaagcatttacattgtattagctattataggtaatctagagatgatttaaagtgtatggtaggatgtgcataggttatatgcaaatactacaccattttctataagggacttgaacatcatggactttagtatcctagggggttcttggaacccatcacccataggggcaccataggacaactatagtaccgtgtttatttcctattaattcaggttccgtttagagtctaaaactaaaacctaatcatttagtcacagtgtaaaaacaaatggaaataacagctcaaatcttcaaaatattactatagcattatgtttaaaataatctacaacaaaaatgtaccattttcaagcagtactacattaggagcccttttatagaaaataatttcttctttacccccgttccagtgtgaatctagtattctgttaacatttgtgtggcatttggagtttgtcatccccattgaagggagagccttctcagacatgaagcaagggaaacatactgaatagttttacacaaatttgatctggcttccatttgtccccctcatttcccaaatgtttaaatgtattggatttggattctcaatgtataagttgccttatctgttaatgtctatcttctgtctctttaattttgtatatctgctgttttgcttttggatacattttctaattagaagtcacatgataaatataatcagtatagtaataataccataatgtgcacatactcaataaataaatgactgcattgttgtaaatgag

SEQ ID NO: 164064 - DNA, 907 bp, Homo sapiens
  Payload ID: 12301
  Gene Symbol: PDLIM5
  Gene Name: PDZ and LIM domain 5
  ENST ID: ENST00000506632
  CDS Start-End: 1-695
atgccagcaagaagagactgattgaggatactgaagactggcgtccaaggactggaacaactcagtctcgctctttccgaatccttgcccagatcactgggactgaacatttgaaagaatctgaagccgataatacaaagaaggcaaataactctcaggagccttctccgcagttggcttcctcggtagcttccacacggagcatgcccgagagcctggacagcccaacctctggcagaccaggggttaccagcctcacagctgcagctgccttcaagcctgtaggatccactggcgtcatcaagtcaccaagctggcaacggccaaaccaaggagtaccttccactggaagaatctcaaacagcgctacttactcaggatcagtggcaccagccaactcagctttgggacaaacccagccaagtgaccaggacactttagtgcaaagagctgagcacattccagcagggaaacgaactccgatgtgcgcccattgtaaccaggtcatcagaggaccattcttagtggcactggggaaatcttggcacccagaagaattcaactgcgctcactgcaaaaatacaatggcctacattggatttgtagaggagaaaggagccctgtattgtgagctgtgctatgagaaattctttgcccctgaatgtggtcgatgccaaaggaagatccttggatagagacggggtttcaccgtgttagccaggatggtctcgatctcctgaactcgtgatccgcccgcctcggcctcccaaagtgctgggattacaggaagtcatcagtgcgttgaaacaaacttggcatgtttcctgttttgtgtgtgtagcctgtggaaagcccattcggaacaatgtttttcacttggaggatggtgaaccctactgtgagactg

SEQ ID NO: 164065 - DNA, 554 bp, Homo sapiens
  Payload ID: 12301
  Gene Symbol: PDLIM5
  Gene Name: PDZ and LIM domain 5
  ENST ID: ENST00000509357
  CDS Start-End: 1-258
ctaaaagatggcggcaaggcagcccaggcaaatgtaagaataggcgatgtggttctcagcattgatggaataaatgcacaaggaatgactcatcttgaagcccagaataagattaagggttgtacaggctctttgaatatgactctgcaaagagcatctgctgcacccaagcctgagccggttcctgttcaaaagcccaccaagaaaacacattgtggagcgctatacagagttttatcatgtacccactcacagtgatgccagcaagaagagactgattgaggatactgaagactggcgtccaaggactggaacaactcagtctcgctctttccgaatccttgcccagatcactgggactgaacatttgaaagaatctgaagccgataatacaaagaaggcaaataactctcaggagccttctccgcagttggcttcctcggtagcttccacacggagcatgcccgagagcctggacagcccaacctctggcagaccaggggttaccagcctcacagctgcagctgccttcaagcctgtaggatccactggcg

SEQ ID NO: 164066 - DNA, 538 bp, Homo sapiens
  Payload ID: 12301
  Gene Symbol: PDLIM5
  Gene Name: PDZ and LIM domain 5
  ENST ID: ENST00000504489
  CDS Start-End: 97-213
acttgtcagcccttgtctgaggcggaggcagccccgcgccgcgccggacccgagcatatttcattttctgtcattggactttgagccattagaaccatgagcaactacagtgtgtcactggttggcccagctccttggggtttccggctgcagggcggtaaggatttcaacatgcctctgacaatctctagtctcactttctggtggaggtgatagccaacagtaagatggccaaaagctacttacccttgaagaggaaatgaagggcttggagctccaactagatagcctatgaataattgagatttggctttttacctcattatggatttagtttgaatgtattctgtgtatatattttaaggatatgttttcatgatgatgatgatagcactgatgagaggagtaattaaagcttctatttattgagacttgactatatgtcaggtactgtttcactttcatcaccagtaggtaattattactattatataagtttctaaaaggtttgtttttgcatattcaaataaatatgaat

SEQ ID NO: 164067 - DNA, 2081 bp, Homo sapiens
  Payload ID: 12301
  Gene Symbol: PDLIM5
  Gene Name: PDZ and LIM domain 5
  Uniprot ID: Q96HC4
  ENST ID: ENST00000503974
  CDS Start-End: 104-1555
gcgagtcacttgtcagcccttgtctgaggcggaggcagccccgcgccgcgccggacccgagcatatttcattttctgtcattggactttgagccattagaaccatgagcaactacagtgtgtcactggttggcccagctccttggggtttccggctgcagggcggtaaggatttcaacatgcctctgacaatctctagtctaaaagatggcggcaaggcagcccaggcaaatgtaagaataggcgatgtggttctcagcattgatggaataaatgcacaaggaatgactcatcttgaagcccagaataagattaagggttgtacaggctctttgaatatgactctgcaaagagcatctgctgcacccaagcctgagccggttcctgttcaaaagcccacagtcaccagcgtgtgttccgagacttctcaggagctagcagagggacagagaagaggatcccagggtgacagtaaacagcaaaatgggaaaatcccacctaaacgcccaccaagaaaacacattgtggagcgctatacagagttttatcatgtacccactcacagtgatgccagcaagaagagactgattgaggatactgaagactggcgtccaaggactggaacaactcagtctcgctctttccgaatccttgcccagatcactgggactgaacatttgaaagaatctgaagccgataatacaaagaaggcaaataactctcaggagccttctccgcagttggcttcctcggtagcttccacacggagcatgcccgagagcctggacagcccaacctctggcagaccaggggttaccagcctcacagctgcagctgccttcaagcctgtaggatccactggcgtcatcaagtcaccaagctggcaacggccaaaccaaggagtaccttccactggaagaatctcaaacagcgctacttactcaggatcagtggcaccagccaactcagctttgggacaaacccagccaagtgaccaggacactttagtgcaaagagctgagcacattccagcagggaaacgaactccgatgtgcgcccattgtaaccaggtcatcagaggaccattcttagtggcactggggaaatcttggcacccagaagaattcaactgcgctcactgcaaaaatacaatggcctacattggatttgtagaggagaaaggagccctgtattgtgagctgtgctatgagaaattctttgcccctgaatgtggtcgatgccaaaggaagatccttggagaagtcatcagtgcgttgaaacaaacttggcatgtttcctgttttgtgtgtgtagcctgtggaaagcccattcggaacaatgtttttcacttggaggatggtgaaccctactgtgagactgattattatgccctctttggtactatatgccatggatgtgaatttcccatagaagctggtgacatgttcctggaagctctgggctacacctggcatgacacttgctttgtatgctcagtgtgttgtgaaagtttggaaggtcagacctttttctccaagaaggacaagcccctgtaatggatgaaagtccatgaacctcctaagttataatttaaatttgtttggggcaaggtgattttatagtcgagacagagccctaggtccttcctgccccatcactcacttacgacatcacttccattgtgtgcatgtttgttatagaggaggttttaggctacaatatttgtttaacctccctaagaactttcaaggcatctgtcctgaaagctgttaatttatggtctagcagatttatattatatgcagataataattaactggggataaaagaatggcaaggggtgacacaaagtagcaaactgaatacttctccaatagcaaccccaagctacctcctcaccctgcatcttggagggaggcaggaaatttcttttgaaataaagtgctggagctgaattctgcattatttatcgttgctgctgaaaccacctataaaagacttgctggctaatgtgcattgtcatataatgtacactgtcacatctttacagtcttgtatgttatagaatacaaaataagttga

SEQ ID NO: 164068 - DNA, 3356 bp, Homo sapiens
  Payload ID: 12301
  Gene Symbol: PDLIM5
  Gene Name: PDZ and LIM domain 5
  Uniprot ID: Q96HC4
  ENST ID: ENST00000514743
  CDS Start-End: 45-1922
agcatatttcattttctgtcattggactttgagccattagaaccatgagcaactacagtgtgtcactggttggcccagctccttggggtttccggctgcagggcggtaaggatttcaacatgcctctgacaatctctagtctaaaagatggcggcaaggcagcccaggcaaatgtaagaataggcgatgtggttctcagcattgatggaataaatgcacaaggaatgactcatcttgaagcccagaataagattaagggttgtacaggctctttgaatatgactctgcaaagagcatctgctgcacccaagcctgagccggttcctgttcaaaagcccacagtcaccagcgtgtgttccgagacttctcaggagctagcagagggacagagaagaggatcccagggtgacagtaaacagcaaaatgggaaaatcccacctaaacgcccaccaagaaaacacattgtggagcgctatacagagttttatcatgtacccactcacagtgatgccagcaagaagagactgattgaggatactgaagactggcgtccaaggactggaacaactcagtctcgctctttccgaatccttgcccagatcactgggactgaacatttgaaagaatctgaagccgataatacaaagaaggcaaagtttgacagtgctctggaagacctacctaagagtggacctcaccctcctgcaactcctcaggtgttaactattggtagccaagtggccacactttctaaagtagcaactacttattctagtttaagcagctccacaggaaatgtggaagattctttcgaaggttttcgaaacttttctaccttctcttctcctgctagatatagtgctgcagttctgagcagcgcagctgctactgtgtctgctgttattgctacaaaaaccaggctctacactcctgaaagatatcactcactcctggatgcactttgcatcagccctgtctccaagcctttagctttttcctatctgcagtcctcaaggaaatcaactggctctatccatgttaagaaaacaagtaactctcaggagccttctccgcagttggcttcctcggtagcttccacacggagcatgcccgagagcctggacagcccaacctctggcagaccaggggttaccagcctcacagctgcagctgccttcaagcctgtaggatccactggcgtcatcaagtcaccaagctggcaacggccaaaccaaggagtaccttccactggaagaatctcaaacagcgctacttactcaggatcagtggcaccagccaactcagctttgggacaaacccagccaagtgaccaggacactttagtgcaaagagctgagcacattccagcagggaaacgaactccgatgtgcgcccattgtaaccaggtcatcagaggaccattcttagtggcactggggaaatcttggcacccagaagaattcaactgcgctcactgcaaaaatacaatggcctacattggatttgtagaggagaaaggagccctgtattgtgagctgtgctatgagaaattctttgcccctgaatgtggtcgatgccaaaggaagatccttggagaagtcatcagtgcgttgaaacaaacttggcatgtttcctgttttgtgtgtgtagcctgtggaaagcccattcggaacaatgtttttcacttggaggatggtgaaccctactgtgagactgattattatgccctctttggtactatatgccatggatgtgaatttcccatagaagctggtgacatgttcctggaagctctgggctacacctggcatgacacttgctttgtatgctcagtgtgttgtgaaagtttggaaggtcagacctttttctccaagaaggacaagcccctgtgtaagaaacatgctcattctgtgaatttttgaaagtcaacagttcaggagaagagaaggaatttgaagagaaaaaggaaaattaaaattactaattaatttttagattcaatatttatatggagttttgaaaaataatagtggccctgaaggaataaattccagctttaaaaaccaagtctgaggaaatatttggcttcataaagtaaagagacggtttggcatttattattactttttcctgtattttatgcccataaaataagctttataaaaaccaatttcctgatggactattaaattcatcttagaataaattagtgaagaatttaattttagaataaataatccaatctgaaataattataccttctttccttgttaggtagttatgagtaaatctgcaaaaggcaatgaaaatgccttaaattttatcaataacagaattattgtatttaaaaaaaaactaatacttatctttaaaatagtaaataggattttaaacagagaattttatcagtaataggtgtcagtttttaaaaaattgcttgtaggctgagcgcggtggctcacgcctgtaatcccagcactttgggaggccaaggtgggtggaccacatgaggtcaggagtttgagatcagcctggccaacatggtgaaaccccatctctactaaaaatacaaaaattagccggacgcagtggcacgcgcctgtaatcccagctactcaagaggctgaggcacgagaatcacttgaacccgggagggagaggttgcagtgagccaagatcgtaccactgcactccagcctgggtgacagagtgagactctgtctccaaaaaaaaactttgcttgtatattatttttgccttacagtggatcattctagtaggaaaggacaataagattttttatcaaaatgtgtcatgccagtaagagatgttatattcttttctcatttcttccccacccaaaaataagctaccatatagcttataagtctcaaatttttgccttttactaaaatgtgattgtttctattcattgtgtatgcttcatcacctatattaggcaaattccatttttttcccttgtgctaaggtaaagatttaattaaataattttggcctctcatagttttctctctctttaaagagaataaatagagggccaggtgtggtggctcacgcctgtgatcccagcactttgggaggccaagacgggcggatcatgaggtcaagagatcaagatcatcctggccaacatggtgaaaccctgtctctactaaaaatacaaaaatgagctgggcatggtggggcgtgcctgtagtcccatgtacttgggaggctgaggcaggaaaattcttgaacccaggagacggaagttgcagtgagctgagatcacaccactgcactccagcctggtgacagagcaagactccggctcttaaaaaaaaaaaaaaaaaaaa

SEQ ID NO: 164069 - DNA, 372 bp, Homo sapiens
  Payload ID: 12301
  Gene Symbol: PDLIM5
  Gene Name: PDZ and LIM domain 5
  ENST ID: ENST00000512274
  CDS Start-End: 119-262
gacggcgccctcaccgcgagtcacttgtcagcccttgtctgaggcggaggcagccccgcgccgcgccggacccgagcatatttcattttctgtcattggactttgagccattagaaccatgagcaactacagtgtgtcactggttggcccagctccttggggtttccggctgcagggcggtaaggatttcaacatgcctctgacaatctctagtgtaagtaaactttacaaattttattatagatgttcattcagtgcttagtcctcgggctgagttgtttaattctctgttgacctgtactctacttattatcattgctcctgggatttgatcttggcaaatttgattatctataataaaggatgagggga

SEQ ID NO: 164070 - DNA, 1794 bp, Homo sapiens
  Payload ID: 12301
  Gene Symbol: PDLIM5
  Gene Name: PDZ and LIM domain 5
  Uniprot ID: Q96HC4
  ENST ID: ENST00000508216
  CDS Start-End: 45-749
agcatatttcattttctgtcattggactttgagccattagaaccatgagcaactacagtgtgtcactggttggcccagctccttggggtttccggctgcagggcggtaaggatttcaacatgcctctgacaatctctagtctaaaagatggcggcaaggcagcccaggcaaatgtaagaataggcgatgtggttctcagcattgatggaataaatgcacaaggaatgactcatcttgaagcccagaataagattaagggttgtacaggctctttgaatatgactctgcaaagagcatctgctgcacccaagcctgagccggttcctgttcaaaagcccacagtcaccagcgtgtgttccgagacttctcaggagctagcagagggacagagaagaggatcccagggtgacagtaaacagcaaaatgggaaaatcccacctaaacgcccaccaagaaaacacattgtggagcgctatacagagttttatcatgtacccactcacagtgatgccagcaagaagagactgattgaggatactgaagactggcgtccaaggactggaacaactcagtctcgctctttccgaatccttgcccagatcactgggactgaacatttgaaagaatctgaagccgataatacaaagaaggcaaaggaaaagataccccttcacgtctttagtcccaaatacacaaaattacgtgactggcaccatgaagtttcagcacgtgctcttaacgtacagtgatttatgagccttgccccccaagcagccagcacataccttttcatttactttttttttttcaacttcatagcaaaatctgtattaaatttgccttatgaaaaaatagaactttttctatacttttctaacaatttcctattgttgtgagaaaaggaagatgaacatgttttgtgctagttggtagctcacaaatgtaaaaccaaaaaaaaaaaaaaatagaaaattaagggactagatctatttgtggatttgtatctgtttttgttgtgattagggtagtaatcttggaaaacgaattattttcataagttgaatttggttagttggttggttgaagcagaggataatgagcaaataaagtccttgtctaatttggaaaatactttctttatattattaacatctcccaagattactttttaagttcattattatgttacattcaaagttgattgtaaattattctaaataagtaaatataaggaggcaagaataaacaaagactttattaaagaagagtgcgtgcattgtagatttaggtatcttttaaagtaggtactattcaggatggctctatgaagaggaggaggtccagatttggctcctgaaaaaggaaagaagagaattttacccctatttgcaatggagaaatacagtattctttggtttggttggatttgcaaatcctatttcctatcaaaggaaatatctctagtggatatttttagaatatagacaatttctaggtattaactaataagatatggaaaagatagctttgctttttttaatcagaagaacataaaataaattacaatatgaatgattgtgagacatcagagaaatattttacttagtgacgtaaactactgtgcactgctgctattcctaggaagctgtgttttgggcaatacatggaagctaaatatatgaccagaaatgctttctgccttgtaatatagtgtattatatattagagctaaatttagtaataaatgcattttgaagtttggaaaagtattgtaataaagttgcctttaactta

SEQ ID NO: 164071 - DNA, 794 bp, Homo sapiens
  Payload ID: 12301
  Gene Symbol: PDLIM5
  Gene Name: PDZ and LIM domain 5
  ENST ID: ENST00000513341
  CDS Start-End: 1-590
taaaagatggcggcaaggcagcccaggcaaatgtaagaataggcgatgtggttctcagcattgatggaataaatgcacaaggaatgactcatcttgaagcccagaataagattaagggttgtacaggctctttgaatatgactctgcaaagagcatctgctgcacccaagcctgagccggttcctgttcaaaagcccacagtcaccagcgtgtgttccgagacttctcaggagctagcagagggacagagaagaggatcccagggtgacagtaaacagcaaaatggcccaccaagaaaacacattgtggagcgctatacagagttttatcatgtacccactcacagtgatgccagcaagaagagactgattgaggatactgaagactggcgtccaaggactggaacaactcagtctcgctctttccgaatccttgcccagatcactgggactgaacatttgaaagaatctgaagccgataatacaaagaaggcaaaggaaaagataccccttcacgtctttagtcccaaatacacaaaattacgtgactggcaccatgaagtttcagcacgtgctcttaacgtacagtgatttatgagccttgccccccaagcagccagcacataccttttcatttactttttttttttcaacttcatagcaaaatctgtattaaatttgccttatgaaaaaatagaactttttctatacttttctaacaatttcctattgttgtgagaaaaggaagatgaacatgttttgtgctagttggtagctcacaaatgtaaaaccaaa

SEQ ID NO: 164072 - DNA, 2979 bp, Homo sapiens
  Payload ID: 12301
  Gene Symbol: PDLIM5
  Gene Name: PDZ and LIM domain 5
  Uniprot ID: Q96HC4
  ENST ID: ENST00000542407
  CDS Start-End: 83-1546
gtctgaggcggaggcagccccgcgccgcgccggacccgagcatatttcattttctgtcattggactttgagccattagaaccatgagcaactacagtgtgtcactggttggcccagctccttggggtttccggctgcagggcggtaaggatttcaacatgcctctgacaatctctagtctaaaagatggcggcaaggcagcccaggcaaatgtaagaataggcgatgtggttctcagcattgatggaataaatgcacaaggaatgactcatcttgaagcccagaataagattaagggttgtacaggctctttgaatatgactctgcaaagagcatctgctgcacccaagcctgagccggttcctgttcaaaagcccacagtcaccagcgtgtgttccgagacttctcaggagctagcagagggacagagaagaggatcccagggtgacagtaaacagcaaaatggcccaccaagaaaacacattgtggagcgctatacagagttttatcatgtacccactcacagtgatgccagcaagaagagactgattgaggatactgaagactggcgtccaaggactggaacaactcagtctcgctctttccgaatccttgcccagatcactgggactgaacatttgaaagaatctgaagccgataatacaaagaaggcaaataactctcaggagccttctccgcagttggcttcctcggtagcttccacacggagcatgcccgagagcctggacagcccaacctctggcagaccaggggttaccagcctcacagctgcagctgccttcaagcctgtaggatccactggcgtcatcaagtcaccaagctggcaacggccaaaccaaggagtaccttccactggaagaatctcaaacagcgctacttactcaggatcagtggcaccagccaactcagctttgggacaaacccagccaagtgaccaggacactttagtgcaaagagctgagcacattccagcagggaaacgaactccgatgtgcgcccattgtaaccaggtcatcagaggaccattcttagtggcactggggaaatcttggcacccagaagaattcaactgcgctcactgcaaaaatacaatggcctacattggatttgtagaggagaaaggagccctgtattgtgagctgtgctatgagaaattctttgcccctgaatgtggtcgatgccaaaggaagatccttggagaagtcatcagtgcgttgaaacaaacttggcatgtttcctgttttgtgtgtgtagcctgtggaaagcccattcggaacaatgtttttcacttggaggatggtgaaccctactgtgagactgattattatgccctctttggtactatatgccatggatgtgaatttcccatagaagctggtgacatgttcctggaagctctgggctacacctggcatgacacttgctttgtatgctcagtgtgttgtgaaagtttggaaggtcagacctttttctccaagaaggacaagcccctgtgtaagaaacatgctcattctgtgaatttttgaaagtcaacagttcaggagaagagaaggaatttgaagagaaaaaggaaaattaaaattactaattaatttttagattcaatatttatatggagttttgaaaaataatagtggccctgaaggaataaattccagctttaaaaaccaagtctgaggaaatatttggcttcataaagtaaagagacggtttggcatttattattactttttcctgtattttatgcccataaaataagctttataaaaaccaatttcctgatggactattaaattcatcttagaataaattagtgaagaatttaattttagaataaataatccaatctgaaataattataccttctttccttgttaggtagttatgagtaaatctgcaaaaggcaatgaaaatgccttaaattttatcaataacagaattattgtatttaaaaaaaaactaatacttatctttaaaatagtaaataggattttaaacagagaattttatcagtaataggtgtcagtttttaaaaaattgcttgtaggctgagcgcggtggctcacgcctgtaatcccagcactttgggaggccaaggtgggtggaccacatgaggtcaggagtttgagatcagcctggccaacatggtgaaaccccatctctactaaaaatacaaaaattagccggacgcagtggcacgcgcctgtaatcccagctactcaagaggctgaggcacgagaatcacttgaacccgggagggagaggttgcagtgagccaagatcgtaccactgcactccagcctgggtgacagagtgagactctgtctccaaaaaaaaactttgcttgtatattatttttgccttacagtggatcattctagtaggaaaggacaataagattttttatcaaaatgtgtcatgccagtaagagatgttatattcttttctcatttcttccccacccaaaaataagctaccatatagcttataagtctcaaatttttgccttttactaaaatgtgattgtttctattcattgtgtatgcttcatcacctatattaggcaaattccatttttttcccttgtgctaaggtaaagatttaattaaataattttggcctctcatagttttctctctctttaaagagaataaatagagggccaggtgtggtggctcacgcctgtgatcccagcactttgggaggccaagacgggcggatcatgaggtcaagagatcaagatcatcctggccaacatggtgaaaccctgtctctactaaaaatacaaaaatgagctgggcatggtggggcgtgcctgtagtcccatgtacttgggaggctgaggcaggaaaattcttgaacccaggagacggaagttgcagtgagctgagatcacaccactgcactccagcctggtgacagagcaagactccggctcttaaaaaaaaaaaaaaaaaaa

SEQ ID NO: 164073 - DNA, 6219 bp, Homo sapiens
  Payload ID: 12301
  Gene Symbol: PDLIM5
  Gene Name: PDZ and LIM domain 5
  Uniprot ID: Q96HC4
  ENST ID: ENST00000615540
  CDS Start-End: 182-2059
gtgtcctgggtcgggggtggggcgagggagagccaggaggcggaagttcccgcgggcggtggggacggcgccctcaccgcgagtcacttgtcagcccttgtctgaggcggaggcagccccgcgccgcgccggacccgagcatatttcattttctgtcattggactttgagccattagaaccatgagcaactacagtgtgtcactggttggcccagctccttggggtttccggctgcagggcggtaaggatttcaacatgcctctgacaatctctagtctaaaagatggcggcaaggcagcccaggcaaatgtaagaataggcgatgtggttctcagcattgatggaataaatgcacaaggaatgactcatcttgaagcccagaataagattaagggttgtacaggctctttgaatatgactctgcaaagagcatctgctgcacccaagcctgagccggttcctgttcaaaagcccacagtcaccagcgtgtgttccgagacttctcaggagctagcagagggacagagaagaggatcccagggtgacagtaaacagcaaaatgggaaaatcccacctaaacgcccaccaagaaaacacattgtggagcgctatacagagttttatcatgtacccactcacagtgatgccagcaagaagagactgattgaggatactgaagactggcgtccaaggactggaacaactcagtctcgctctttccgaatccttgcccagatcactgggactgaacatttgaaagaatctgaagccgataatacaaagaaggcaaagtttgacagtgctctggaagacctacctaagagtggacctcaccctcctgcaactcctcaggtgttaactattggtagccaagtggccacactttctaaagtagcaactacttattctagtttaagcagctccacaggaaatgtggaagattctttcgaaggttttcgaaacttttctaccttctcttctcctgctagatatagtgctgcagttctgagcagcgcagctgctactgtgtctgctgttattgctacaaaaaccaggctctacactcctgaaagatatcactcactcctggatgcactttgcatcagccctgtctccaagcctttagctttttcctatctgcagtcctcaaggaaatcaactggctctatccatgttaagaaaacaagtaactctcaggagccttctccgcagttggcttcctcggtagcttccacacggagcatgcccgagagcctggacagcccaacctctggcagaccaggggttaccagcctcacagctgcagctgccttcaagcctgtaggatccactggcgtcatcaagtcaccaagctggcaacggccaaaccaaggagtaccttccactggaagaatctcaaacagcgctacttactcaggatcagtggcaccagccaactcagctttgggacaaacccagccaagtgaccaggacactttagtgcaaagagctgagcacattccagcagggaaacgaactccgatgtgcgcccattgtaaccaggtcatcagaggaccattcttagtggcactggggaaatcttggcacccagaagaattcaactgcgctcactgcaaaaatacaatggcctacattggatttgtagaggagaaaggagccctgtattgtgagctgtgctatgagaaattctttgcccctgaatgtggtcgatgccaaaggaagatccttggagaagtcatcagtgcgttgaaacaaacttggcatgtttcctgttttgtgtgtgtagcctgtggaaagcccattcggaacaatgtttttcacttggaggatggtgaaccctactgtgagactgattattatgccctctttggtactatatgccatggatgtgaatttcccatagaagctggtgacatgttcctggaagctctgggctacacctggcatgacacttgctttgtatgctcagtgtgttgtgaaagtttggaaggtcagacctttttctccaagaaggacaagcccctgtgtaagaaacatgctcattctgtgaatttttgaaagtcaacagttcaggagaagagaaggaatttgaagagaaaaaggaaaattaaaattactaattaatttttagattcaatatttatatggagttttgaaaaataatagtggccctgaaggaataaattccagctttaaaaaccaagtctgaggaaatatttggcttcataaagtaaagagacggtttggcatttattattactttttcctgtattttatgcccataaaataagctttataaaaaccaatttcctgatggactattaaattcatcttagaataaattagtgaagaatttaattttagaataaataatccaatctgaaataattataccttctttccttgttaggtagttatgagtaaatctgcaaaaggcaatgaaaatgccttaaattttatcaataacagaattattgtatttaaaaaaaaactaatacttatctttaaaatagtaaataggattttaaacagagaattttatcagtaataggtgtcagtttttaaaaaattgcttgtaggctgagcgcggtggctcacgcctgtaatcccagcactttgggaggccaaggtgggtggaccacatgaggtcaggagtttgagatcagcctggccaacatggtgaaaccccatctctactaaaaatacaaaaattagccggacgcagtggcacgcgcctgtaatcccagctactcaagaggctgaggcacgagaatcacttgaacccgggagggagaggttgcagtgagccaagatcgtaccactgcactccagcctgggtgacagagtgagactctgtctccaaaaaaaaactttgcttgtatattatttttgccttacagtggatcattctagtaggaaaggacaataagattttttatcaaaatgtgtcatgccagtaagagatgttatattcttttctcatttcttccccacccaaaaataagctaccatatagcttataagtctcaaatttttgccttttactaaaatgtgattgtttctattcattgtgtatgcttcatcacctatattaggcaaattccatttttttcccttgtgctaaggtaaagatttaattaaataattttggcctctcatagttttctctctctttaaagagaataaatagagggccaggtgtggtggctcacgcctgtgatcccagcactttgggaggccaagacgggcggatcatgaggtcaagagatcaagatcatcctggccaacatggtgaaaccctgtctctactaaaaatacaaaaatgagctgggcatggtggggcgtgcctgtagtcccatgtacttgggaggctgaggcaggaaaattcttgaacccaggagacggaagttgcagtgagctgagatcacaccactgcactccagcctggtgacagagcaagactccggctcttaaaaaaaaaaaaaaaaaaaaaaaaagagagagagagaataaatagaaaagaatgtggctgggaattgtgaatcagaagattataccccccaattgtttttcaatccccttttctcaaataataaattagttaaatcagtttctgagttatgccactggctgatgaagagttgagaggtctctttgcagaatgatctttttgtttcgttttgtttcttcttctgcatttaaaaattaaaagattggtttgaggatgtgatgaaattgagactttttgtggttttctctcaataataagtgaaccaatttcaaatgtgatcacaaagtttggaaagcttttattcacagaggttgggtagtgttgggaggggagtttaattactcagattggcctgttatttgatttcctcctttgggaaaagaattatgtagataccacatggagacagggaaacaattgtggtaaaactgtggatcctgttgctatttgcccagtgagaaaacagattctggtatttgatttggtttttctctttgtttccagaatggatgaaagtccatgaacctcctaagttataatttaaatttgtttggggcaaggtgattttatagtcgagacagagccctaggtccttcctgccccatcactcacttacgacatcacttccattgtgtgcatgtttgttatagaggaggttttaggctacaatatttgtttaacctccctaagaactttcaaggcatctgtcctgaaagctgttaatttatggtctagcagatttatattatatgcagataataattaactggggataaaagaatggcaaggggtgacacaaagtagcaaactgaatacttctccaatagcaaccccaagctacctcctcaccctgcatcttggagggaggcaggaaatttcttttgaaataaagtgctggagctgaattctgcattatttatcgttgctgctgaaaccacctataaaagacttgctggctaatgtgcattgtcatataatgtacactgtcacatctttacagtcttgtatgttatagaatacaaaataagttgatggttttgtttggtgtgagctttttgtttgtttgtttagttttgccttcataggttatatgccaagatagtatttgataagtcaatgacatttggatgttttcttcaaagaattttatttgacccagatttcttataaagttatcttacattaaggatgtcattttcatcagaccttctttctacatattattcatgaagcataatgttgcatttctccaaattttatgcctgaaagggtagtgttgcttcctaaggtatcatgttgtctttgtgctttgtccatctcttccgtggcgaagctttatatctgttcctaaaacagttaatcctgtgaaataaatattgaacataatccagaagaatctctctgtttcccttggggaatgccatatttaattcaccagcagtaatcctttaataactggcagagcactttattcttctggtgagctccctgaatatttatttttctgattataaattttctatattagtagcattttttaattattacttcttcactatagagcatttacttttagtctctagatgtatattttggaatgctgtacttggcataacatagattaaaatcataatgcatgactaaaaactccttggatttatttcccattttaaaatttttagcggtaagttcagatttataatctttctctagacttccatggtctgaatgttgcctgctgaagtagcaacctaaaaagtatcccctgcttatgcttgtccagttggccctccatgtccataggcttcgcatctgtgattcagcccactgtgggtcaaaaatatttggggaaaaaaatggatggttgcgcctttgctgaacatgtacaaacttttttttgtcattaaacaatatagtataacaactatttacaaagcatttacattgtattagctattataggtaatctagagatgatttaaagtgtatggtaggatgtgcataggttatatgcaaatactacaccattttctataagggacttgaacatcatggactttagtatcctagggggttcttggaacccatcacccataggggcaccataggacaactatagtaccgtgtttatttcctattaattcaggttccgtttagagtctaaaactaaaacctaatcatttagtcacagtgtaaaaacaaatggaaataacagctcaaatcttcaaaatattactatagcattatgtttaaaataatctacaacaaaaatgtaccattttcaagcagtactacattaggagcccttttatagaaaataatttcttctttacccccgttccagtgtgaatctagtattctgttaacatttgtgtggcatttggagtttgtcatccccattgaagggagagccttctcagacatgaagcaagggaaacatactgaatagttttacacaaatttgatctggcttccatttgtccccctcatttcccaaatgtttaaatgtattggatttggattctcaatgtataagttgccttatctgttaatgtctatcttctgtctctttaattttgtatatctgctgttttgcttttggatacattttctaattagaagtcacatgataaatataatcagtatagtaataataccataatgtgcacatactcaataaataaatgactgcattgttgtaaatgag

SEQ ID NO: 164074 - DNA, 554 bp, Homo sapiens
  Payload ID: 12301
  Gene Symbol: PDLIM5
  Gene Name: PDZ and LIM domain 5
  ENST ID: ENST00000510099
  CDS Start-End: 25-554
attccagaagatgctccttttggaatggtcataaagctaaaagatggcggcaaggcagcccaggcaaatgtaagaataggcgatgtggttctcagcattgatggaataaatgcacaaggaatgactcatcttgaagcccagaataagattaagggttgtacaggctctttgaatatgactctgcaaagagcatctgctgcacccaagcctgagccggttcctgttcaaaagggagaacctaaagaagtagttaaacctgtgcccattacatctcctgctgtgtccaaagtcacttccacaaacaacatggcctacaataaggcaccacggccttttggttctgtgtcttcaccaaaagtcacatccatcccatcaccatcgtctgccttcaccccagcccatgcgaccacctcatcacatgcttccccttcacccgtggctgccgtcactcctcccctgttcgctgcatctggactgcatgctaatgccaatcttagtgctgaccagtctccatctgcactgagcgctggtaaaactgcagttaatgtcccacg

SEQ ID NO: 164075 - DNA, 1853 bp, Homo sapiens
  Payload ID: 12301
  Gene Symbol: PDLIM5
  Gene Name: PDZ and LIM domain 5
  ENST ID: ENST00000627587
  CDS Start-End: 96-215
cttgtcagcccttgtctgaggcggaggcagccccgcgccgcgccggacccgagcatatttcattttctgtcattggactttgagccattagaaccatgagcaactacagtgtgtcactggttggcccagctccttggggtttccggctgcagggcggtaaggatttcaacatgcctctgacaatctctagtagcatctgctgcacccaagcctgagccggttcctgttcaaaagggagaacctaaagaagtagttaaacctgtgcccattacatctcctgctgtgtccaaagtcacttccacaaacaacatggcctacaataaggcaccacggccttttggttctgtgtcttcaccaaaagtcacatccatcccatcaccatcgtctgccttcaccccagcccatgcgaccacctcatcacatgcttccccttcacccgtggctgccgtcactcctcccctgttcgctgcatctggactgcatgctaatgccaatcttagtgctgaccagtctccatctgcactgagcgctggtaaaactgcagttaatgtcccacggcagcccacagtcaccagcgtgtgttccgagacttctcaggagctagcagagggacagagaagaggatcccagggtgacagtaaacagcaaaatggcccaccaagaaaacacattgtggagcgctatacagagttttatcatgtacccactcacagtgatgccagcaagaagagactgattgaggatactgaagactggcgtccaaggactggaacaactcagtctcgctctttccgaatccttgcccagatcactgggactgaacatttgaaagaatctgaagccgataatacaaagaaggcaaataactctcaggagccttctccgcagttggcttcctcggtagcttccacacggagcatgcccgagagcctggacagcccaacctctggcagaccaggggttaccagcctcacagctgcagctgccttcaagcctgtaggatccactggcgtcatcaagtcaccaagctggcaacggccaaaccaaggagtaccttccactggaagaatctcaaacagcgctacttactcaggatcagtggcaccagccaactcagctttgggacaaacccagccaagtgaccaggacactttagtgcaaagagctgagcacattccagcagggaaacgaactccgatgtgcgcccattgtaaccaggtcatcagaggaccattcttagtggcactggggaaatcttggcacccagaagaattcaactgcgctcactgcaaaaatacaatggcctacattggatttgtagaggagaaaggagccctgtattgtgagctgtgctatgagaaattctttgcccctgaatgtggtcgatgccaaaggaagatccttggagaagtcatcagtgcgttgaaacaaacttggcatgtttcctgttttgtgtgtgtagcctgtggaaagcccattcggaacaatgtttttcacttggaggatggtgaaccctactgtgagactgattattatgccctctttggtactatatgccatggatgtgaatttcccatagaagctggtgacatgttcctggaagctctgggctacacctggcatgacacttgctttgtatgctcagtgtgttgtgaaagtttggaaggtcagacctttttctccaagaaggacaagcccctgtgtaagaaacatgctcattctgtgaatttttgaaagtcaacagttcaggagaagagaaggaatttgaagagaaaaaggaaaattaaaattactaattaatttttagattcaatatttatatggagttttgaaaaataatagtggccctgaag

SEQ ID NO: 164076 - DNA, 977 bp, Homo sapiens
  Payload ID: 12302
  Gene Symbol: PDLIM7
  Gene Name: PDZ and LIM domain 7 (enigma)
  Uniprot ID: Q9NR12
  ENST ID: ENST00000355572
  CDS Start-End: 58-726
ctccctggagcccgacgcagagcagcgccctggccgggccaagcaggagccggcatcatggattccttcaaagtagtgctggaggggccagcaccttggggcttccggctgcaagggggcaaggacttcaatgtgcccctctccatttcccggctcactcctgggggcaaagcggcgcaggccggagtggccgtgggtgactgggtgctgagcatcgatggcgagaatgcgggtagcctcacacacatcgaagctcagaacaagatccgggcctgcggggagcgcctcagcctgggcctcagcagggcccagccggttcagagcaaaccgcagaaggcctccgcccccgccgcggaccctccgcggtacacctttgcacccagcgtctccctcaacaagacggcccggccctttggggcgcccccgcccgctgacagcgccccgcagcagaatggacagccgctccgaccgctggtcccagatgccagcaagcagcggctgatggagaacacagaggactggcggccgcggccggggacaggccagtcgcgttccttccgcatccttgcccacctcacaggcaccgagttcatgcaagacccggatgaggagcacctgaagaaatcaagggaaaagtatgtcctggagctgcagagcccacgctacacccgcctccgggactggcaccaccagcgctctgcccacgtgctcaacgtgcagtcgtagcccggccctctccagccggctgccctctctgcctccctctttctgttcctcctgcccagggcacccccttagtgcctccagcttctgcctacctcaccccccctttcgtgcccctggcctgagcctcctgctggcctggccctggccgcccacctgggttcatctgacactgccttccctctttgccctgtggtactgctgtctgccaggtctgtgctgccttgggcatggaataaacattctcagccctg

SEQ ID NO: 164077 - DNA, 1689 bp, Homo sapiens
  Payload ID: 12302
  Gene Symbol: PDLIM7
  Gene Name: PDZ and LIM domain 7 (enigma)
  Uniprot ID: Q9NR12
  ENST ID: ENST00000355841
  CDS Start-End: 68-1441
cccaacgaggctccctggagcccgacgcagagcagcgccctggccgggccaagcaggagccggcatcatggattccttcaaagtagtgctggaggggccagcaccttggggcttccggctgcaagggggcaaggacttcaatgtgcccctctccatttcccggctcactcctgggggcaaagcggcgcaggccggagtggccgtgggtgactgggtgctgagcatcgatggcgagaatgcgggtagcctcacacacatcgaagctcagaacaagatccgggcctgcggggagcgcctcagcctgggcctcagcagggcccagccggttcagagcaaaccgcagaaggcctccgcccccgccgcggaccctccgcggtacacctttgcacccagcgtctccctcaacaagacggcccggccctttggggcgcccccgcccgctgacagcgccccgcagcagaatggacagccgctccgaccgctggtcccagatgccagcaagcagcggctgatggagaacacagaggactggcggccgcggccggggacaggccagtcgcgttccttccgcatccttgcccacctcacaggcaccgagttcatgcaagacccggatgaggagcacctgaagaaatcaagccaggtgcccaggacagaagccccagccccagcctcatctacaccccaggagccctggcctggccctaccgcccccagccctaccagccgcccgccctgggctgtggaccctgcgtttgccgagcgctatgccccggacaaaacgagcacagtgctgacccggcacagccagccggccacgcccacgccgctgcagagccgcacctccattgtgcaggcagctgccggaggggtgccaggagggggcagcaacaacggcaagactcccgtgtgtcaccagtgccacaaggtcatccggggccgctacctggtggcgctgggccacgcgtaccacccggaggagtttgtgtgtagccagtgtgggaaggtcctggaagagggtggcttctttgaggagaagggcgccatcttctgcccaccatgctatgacgtgcgctatgcacccagctgtgccaagtgcaagaagaagattacaggcgagatcatgcacgccctgaagatgacctggcacgtgcactgctttacctgtgctgcctgcaagacgcccatccggaacagggccttctacatggaggagggcgtgccctattgcgagcgagactatgagaagatgtttggcacgaaatgccatggctgtgacttcaagatcgacgctggggaccgcttcctggaggccctgggcttcagctggcatgacacctgcttcgtctgtgcgatatgtcagatcaacctggaaggaaagaccttctactccaagaaggacaggcctctctgcaagagccatgccttctctcatgtgtgagccccttctgcccacagctgccgcggtggcccctagcctgaggggcctggagtcgtggccctgcatttctgggtagggctggcaatggttgccttaaccctggctcctggcccgagcctggggctccctgggccctgccccacccaccttatcctcccaccccactccctccaccaccacagcacaccggtgctggccacaccagccccctttcacctccagtgccacaataaacctgtacccagctg

SEQ ID NO: 164078 - DNA, 1567 bp, Homo sapiens
  Payload ID: 12302
  Gene Symbol: PDLIM7
  Gene Name: PDZ and LIM domain 7 (enigma)
  Uniprot ID: Q9NR12
  ENST ID: ENST00000359895
  CDS Start-End: 46-1317
cgacgcagagcagcgccctggccgggccaagcaggagccggcatcatggattccttcaaagtagtgctggaggggccagcaccttggggcttccggctgcaagggggcaaggacttcaatgtgcccctctccatttcccggctcactcctgggggcaaagcggcgcaggccggagtggccgtgggtgactgggtgctgagcatcgatggcgagaatgcgggtagcctcacacacatcgaagctcagaacaagatccgggcctgcggggagcgcctcagcctgggcctcagcagggcccagccggttcagagcaaaccgcagaaggtgcagacccctgacaaacagccgctccgaccgctggtcccagatgccagcaagcagcggctgatggagaacacagaggactggcggccgcggccggggacaggccagtcgcgttccttccgcatccttgcccacctcacaggcaccgagttcatgcaagacccggatgaggagcacctgaagaaatcaagccaggtgcccaggacagaagccccagccccagcctcatctacaccccaggagccctggcctggccctaccgcccccagccctaccagccgcccgccctgggctgtggaccctgcgtttgccgagcgctatgccccggacaaaacgagcacagtgctgacccggcacagccagccggccacgcccacgccgctgcagagccgcacctccattgtgcaggcagctgccggaggggtgccaggagggggcagcaacaacggcaagactcccgtgtgtcaccagtgccacaaggtcatccggggccgctacctggtggcgctgggccacgcgtaccacccggaggagtttgtgtgtagccagtgtgggaaggtcctggaagagggtggcttctttgaggagaagggcgccatcttctgcccaccatgctatgacgtgcgctatgcacccagctgtgccaagtgcaagaagaagattacaggcgagatcatgcacgccctgaagatgacctggcacgtgcactgctttacctgtgctgcctgcaagacgcccatccggaacagggccttctacatggaggagggcgtgccctattgcgagcgagactatgagaagatgtttggcacgaaatgccatggctgtgacttcaagatcgacgctggggaccgcttcctggaggccctgggcttcagctggcatgacacctgcttcgtctgtgcgatatgtcagatcaacctggaaggaaagaccttctactccaagaaggacaggcctctctgcaagagccatgccttctctcatgtgtgagccccttctgcccacagctgccgcggtggcccctagcctgaggggcctggagtcgtggccctgcatttctgggtagggctggcaatggttgccttaaccctggctcctggcccgagcctggggctccctgggccctgccccacccaccttatcctcccaccccactccctccaccaccacagcacaccggtgctggccacaccagccccctttcacctccagtgccacaataaacctgtacccagctgtg

SEQ ID NO: 164079 - DNA, 671 bp, Homo sapiens
  Payload ID: 12302
  Gene Symbol: PDLIM7
  Gene Name: PDZ and LIM domain 7 (enigma)
  ENST ID: ENST00000393546
  CDS Start-End: 86-671
agaacactggcggccgatcccaacgaggctccctggagcccgacgcagagcagcgccctggccgggccaagcaggagccggcatcatggattccttcaaagtagtgctggaggggccagcaccttggggcttccggctgcaagggggcaaggacttcaatgtgcccctctccatttcccggctcactcctgggggcaaagcggcgcaggccggagtggccgtgggtgactgggtgctgagcatcgatggcgagaatgcgggtagcctcacacacatcgaagctcagaacaagatccgggcctgcggggagcgcctcagcctgggcctcagcagggcccagccggttcagagcaaaccgcagaaggcccccaccttaccctgcccgcccgccctgcccggctgtgtctctgcccaggcctccgcccccgccgcggaccctccgcggtacacctttgcacccagcgtctccctcaacaagacggcccggccctttggggcgcccccgcccgctgacagcgccccgcagcagaatggacagccgctccgaccgctggtcccagatgccagcaagcagcggctgatggagaacacagaggactggcggccgcggccggggacaggccagtcgcgttccttccgcatccttgcccacctcacaggcaccgagttca

SEQ ID NO: 164080 - DNA, 1226 bp, Homo sapiens
  Payload ID: 12302
  Gene Symbol: PDLIM7
  Gene Name: PDZ and LIM domain 7 (enigma)
  Uniprot ID: Q9NR12
  ENST ID: ENST00000393551
  CDS Start-End: 68-931
cccaacgaggctccctggagcccgacgcagagcagcgccctggccgggccaagcaggagccggcatcatggattccttcaaagtagtgctggaggggccagcaccttggggcttccggctgcaagggggcaaggacttcaatgtgcccctctccatttcccggctcactcctgggggcaaagcggcgcaggccggagtggccgtgggtgactgggtgctgagcatcgatggcgagaatgcgggtagcctcacacacatcgaagctcagaacaagatccgggcctgcggggagcgcctcagcctgggcctcagcagggcccagccggttcagagcaaaccgcagaaggcctccgcccccgccgcggaccctccgcggtacacctttgcacccagcgtctccctcaacaagacggcccggccctttggggcgcccccgcccgctgacagcgccccgcagcagaatggacagccgctccgaccgctggtcccagatgccagcaagcagcggctgatggagaacacagaggactggcggccgcggccggggacaggccagtcgcgttccttccgcatccttgcccacctcacaggcaccgagttcatgcaagacccggatgaggagcacctgaagaaatcaaggccctaccgcccccagccctaccagccgcccgccctgggctgtggaccctgcgtttgccgagcgctatgccccggacaaaacgagcacagtgctgacccggcacagccagccggccacgcccacgccgctgcagagccgcacctccattgtgcaggcagctgccggaggggtgccaggagggggcagcaacaacggcaagactcccgtgtgtcaccagtgccacaaggtcatccggggccgctacctggtggcgctgggccacgcgtaccacccggaggagtttgtgtgtagccagtgtgggaaggtcctggaagagggtggcttctttgaggagaagggcgccatcttctgcccaccatgctatgacgtgcgctatgcacccagctgtgccaagtgcaagaagaagattacaggcgtgagtagggctggctggcggggaggtggtcccaagcctgtcagtgggaacgagggctgctgggaaacccacagtccaggtctctccccgagtgagccctccgggtccttaccagcgtaataaatgggctgctgtactggcctcaccctgcattagtcaggatgctcttaa

SEQ ID NO: 164081 - DNA, 636 bp, Homo sapiens
  Payload ID: 12302
  Gene Symbol: PDLIM7
  Gene Name: PDZ and LIM domain 7 (enigma)
  ENST ID: ENST00000506537
  CDS Start-End: 366-636
ccggcccctgactcacccggccgcccgaggctccaggctggcttggggggaggccgcgccagtttagtccctcggcccacccctggttgcaaagaacctcaagcctggattcaggcacccctcaccgttccagtcccaaggggaggggggctgctcctgtctttccaaagtgaggtccgccagccagcagcccaggccagcctgacaaaatacctgcctcctatggcttgggcgtgctcaggggctgcccgtgcctgcctggcccctgtccaaggctggtatcctgagctggcccggcctgcctgcctgcccgcccaccatgctggccactcaccttctcttctctcctctcaggagccggcatcatggattccttcaaagtagtgctggaggggccagcaccttggggcttccggctgcaagggggcaaggacttcaatgtgcccctctccatttcccggctcactcctgggggcaaagcggcgcaggccggagtggccgtgggtgactgggtgctgagcatcgatggcgagaatgcgggtagcctcacacacatcgaagctcagaacaagatccgggcctgcggggagcgcctcagcctgggcctcagcagggcccagccggttcagagcaaac

SEQ ID NO: 164082 - DNA, 451 bp, Homo sapiens
  Payload ID: 12302
  Gene Symbol: PDLIM7
  Gene Name: PDZ and LIM domain 7 (enigma)
  ENST ID: ENST00000503827
  CDS Start-End: 1-362
ccatttcccggctcactcctgggggcaaagcggcgcaggccggagtggccgtgggtgactgggtgctgagcatcgatggcgagaatgcgggtagcctcacacacatcgaagctcagaacaagatccgggcctgcggggagcgcctcagcctgggcctcagcagggcccagccggttcagagcaaaccgcagaaggcgccccacttccacccaggcccccaccttaccctgcccgcccgccctgcccggctgtgtctctgcccaggcctccgcccccgccgcggaccctccgcggtacacctttgcacccagcgtctccctcaacaagacggcccggccctttggggcgcccccgcccgctgacagcgccccgcagcagaatgggtgcagacccctgacaaacagccgctccgaccgctggtcccagatgccagcaagcagcggctgatgga

SEQ ID NO: 164083 - DNA, 759 bp, Homo sapiens
  Payload ID: 12302
  Gene Symbol: PDLIM7
  Gene Name: PDZ and LIM domain 7 (enigma)
  ENST ID: ENST00000506161
  CDS Start-End: 240-759
ggggaggccgcgccagtttagtccctcggcccacccctggttgcaaagaacctcaagcctggattcaggcacccctcaccgttccagtcccaaggggaggggggctgctcctgtctttccaaagtgaggtccgccagccagcagcccaggccagcctgacaaaatacctgcctcctatggcttgggcgtgctcaggggctgcccgtgcctgcctggcccctgtccaaggagccggcatcatggattccttcaaagtagtgctggaggggccagcaccttggggcttccggctgcaagggggcaaggacttcaatgtgcccctctccatttcccggctcactcctgggggcaaagcggcgcaggccggagtggccgtgggtgactgggtgctgagcatcgatggcgagaatgcgggtagcctcacacacatcgaagctcagaacaagatccgggcctgcggggagcgcctcagcctgggcctcagcagggcccagccggttcagagcaaaccgcagaaggcctccgcccccgccgcggaccctccgcggtacacctttgcacccagcgtctccctcaacaagacggcccggccctttggggcgcccccgcccgctgacagcgccccgcagcagaatggacagccgctccgaccgctggtcccagatgccagcaagcagcggctgatggagaacacagaggactggcggccgcggccggggacaggccagtcgcgttccttccgcatccttgcccacctca

SEQ ID NO: 164084 - DNA, 931 bp, Homo sapiens
  Payload ID: 12302
  Gene Symbol: PDLIM7
  Gene Name: PDZ and LIM domain 7 (enigma)
  ENST ID: ENST00000505074
  CDS Start-End: 71-931
gatcccaacgaggctccctggagcccgacgcagagcagcgccctggccgggccaagcaggagccggcatcatggattccttcaaagtagtgctggaggggccagcaccttggggcttccggctgcaagggggcaaggacttcaatgtgcccctctccatttcccggctcactcctgggggcaaagcggcgcaggccggagtggccgtgggtgactgggtgctgagcatcgatggcgagaatgcgggtagcctcacacacatcgaagctcagaacaagatccgggcctgcggggagcgcctcagcctgggcctcagcagggcccagccggttcagagcaaaccgcagaaggcctccgcccccgccgcggaccctccgcggtacacctttgcacccagcgtctccctcaacaagacggcccggccctttggggcgcccccgcccgctgacagcgccccgcagcagaatggacagccgctccgaccgctggtcccagatgccagcaagcagcggctgatggagaacacagaggactggcggccgcggccggggacaggccagtcgcgttccttccgcatccttgcccacctcacaggcaccgagttcatgcaagacccggatgaggagcacctgaagaaatcaagatggcttcctggcatgaggggaaccccaggagctgcctcagaagcgggagccctgcctcgtctcccagctagagaccgcacaccagctaactggacattgctaggagaagctgcccttcccatccctaccccagtgggacctggaatccaactcggcagtttccacgcccccagtcatctcccgtggggccagcaggacccaggttggggggtggggccatgtcaggaagctcagccatgcagggccttgaatggcagatcttgcagccaggtgcccaggacagaagcc

SEQ ID NO: 164085 - DNA, 1686 bp, Homo sapiens
  Payload ID: 12302
  Gene Symbol: PDLIM7
  Gene Name: PDZ and LIM domain 7 (enigma)
  Uniprot ID: Q9NR12
  ENST ID: ENST00000493815
  CDS Start-End: 46-507
cgacgcagagcagcgccctggccgggccaagcaggagccggcatcatggattccttcaaagtagtgctggaggggccagcaccttggggcttccggctgcaagggggcaaggacttcaatgtgcccctctccatttcccggctcactcctgggggcaaagcggcgcaggccggagtggccgtgggtgactgggtgctgagcatcgatggcgagaatgcgggtagcctcacacacatcgaagctcagaacaagatccgggcctgcggggagcgcctcagcctgggcctcagcagggcccagccggttcagagcaaaccgcagaaggcctccgcccccgccgcggaccctccgcggtacacctttgcacccagcgtctccctcaacaagacggcccggccctttggggcgcccccgcccgctgacagcgccccgcagcagaatgggtgcagacccctgacaaacagccgctccgaccgctggtcccagatgccagcaagcagcggctgatggagaacacagaggactggcggccgcggccggggacaggccagtcgcgttccttccgcatccttgcccacctcacaggcaccgagttcatgcaagacccggatgaggagcacctgaagaaatcaagccaggtgcccaggacagaagccccagccccagcctcatctacaccccaggagccctggcctggccctaccgcccccagccctaccagccgcccgccctgggctgtggaccctgcgtttgccgagcgctatgccccggacaaaacgagcacagtgctgacccggcacagccagccggccacgcccacgccgctgcagagccgcacctccattgtgcaggcagctgccggaggggtgccaggagggggcagcaacaacggcaagactcccgtgtgtcaccagtgccacaaggtcatccggggccgctacctggtggcgctgggccacgcgtaccacccggaggagtttgtgtgtagccagtgtgggaaggtcctggaagagggtggcttctttgaggagaagggcgccatcttctgcccaccatgctatgacgtgcgctatgcacccagctgtgccaagtgcaagaagaagattacaggcgagatcatgcacgccctgaagatgacctggcacgtgcactgctttacctgtgctgcctgcaagacgcccatccggaacagggccttctacatggaggagggcgtgccctattgcgagcgagactatgagaagatgtttggcacgaaatgccatggctgtgacttcaagatcgacgctggggaccgcttcctggaggccctgggcttcagctggcatgacacctgcttcgtctgtgcgatatgtcagatcaacctggaaggaaagaccttctactccaagaaggacaggcctctctgcaagagccatgccttctctcatgtgtgagccccttctgcccacagctgccgcggtggcccctagcctgaggggcctggagtcgtggccctgcatttctgggtagggctggcaatggttgccttaaccctggctcctggcccgagcctggggctccctgggccctgccccacccaccttatcctcccaccccactccctccaccaccacagcacaccggtgctggccacaccagccccctttcacctccagtgccacaataaacctgtacccagctgtg

SEQ ID NO: 164086 - DNA, 1904 bp, Homo sapiens
  Payload ID: 12302
  Gene Symbol: PDLIM7
  Gene Name: PDZ and LIM domain 7 (enigma)
  Uniprot ID: Q9NR12
  ENST ID: ENST00000486828
  CDS Start-End: 86-661
agaacactggcggccgatcccaacgaggctccctggagcccgacgcagagcagcgccctggccgggccaagcaggagccggcatcatggattccttcaaagtagtgctggaggggccagcaccttggggcttccggctgcaagggggcaaggacttcaatgtgcccctctccatttcccggctcactcctgggggcaaagcggcgcaggccggagtggccgtgggtgactgggtgctgagcatcgatggcgagaatgcgggtagcctcacacacatcgaagctcagaacaagatccgggcctgcggggagcgcctcagcctgggcctcagcagggcccagccggttcagagcaaaccgcagaaggcctccgcccccgccgcggaccctccgcggtacacctttgcacccagcgtctccctcaacaagacggcccggccctttggggcgcccccgcccgctgacagcgccccgcagcagaatggacagccgctccgaccgctggtcccagatgccagcaagcagcggctgatggagaacacagaggactggcggccgcggccggggacaggccagtcgcgttccttccgcatccttgcccacctcacaggcaccgagttcatgcaagacccggatgaggagcacctgaagaaatcaagctagagaccgcacaccagctaactggacattgctaggagaagctgcccttcccatccctaccccagtgggacctggaatccaactcggcagtttccacgcccccagtcatctcccgtggggccagcaggacccaggttggggggtggggccatgtcaggaagctcagccatgcagggccttgaatggcagatcttgcagccaggtgcccaggacagaagccccagccccagcctcatctacaccccaggagccctggcctggccctaccgcccccagccctaccagccgcccgccctgggctgtggaccctgcgtttgccgagcgctatgccccggacaaaacgagcacagtgctgacccggcacagccagccggccacgcccacgccgctgcagagccgcacctccattgtgcaggcagctgccggaggggtgccaggagggggcagcaacaacggcaagactcccgtgtgtcaccagtgccacaaggtcatccggggccgctacctggtggcgctgggccacgcgtaccacccggaggagtttgtgtgtagccagtgtgggaaggtcctggaagagggtggcttctttgaggagaagggcgccatcttctgcccaccatgctatgacgtgcgctatgcacccagctgtgccaagtgcaagaagaagattacaggcgagatcatgcacgccctgaagatgacctggcacgtgcactgctttacctgtgctgcctgcaagacgcccatccggaacagggccttctacatggaggagggcgtgccctattgcgagcgagactatgagaagatgtttggcacgaaatgccatggctgtgacttcaagatcgacgctggggaccgcttcctggaggccctgggcttcagctggcatgacacctgcttcgtctgtgcgatatgtcagatcaacctggaaggaaagaccttctactccaagaaggacaggcctctctgcaagagccatgccttctctcatgtgtgagccccttctgcccacagctgccgcggtggcccctagcctgaggggcctggagtcgtggccctgcatttctgggtagggctggcaatggttgccttaaccctggctcctggcccgagcctggggctccctgggccctgccccacccaccttatcctcccaccccactccctccaccaccacagcacaccggtgctggccacaccagccccctttcacctccagtgccacaataaacctgtacccagc

SEQ ID NO: 164087 - DNA, 2118 bp, Homo sapiens
  Payload ID: 12303
  Gene Symbol: PBK
  Gene Name: PDZ binding kinase
  Uniprot ID: Q96KB5
  ENST ID: ENST00000301905
  CDS Start-End: 465-1433
ataatcacgacacattcaacacagatgtgagcgtttggagagagcttcagccttcagcacaggcaactgtgttctattcaccgggctgtgctcctcggaagggctggtggttcctgtaaaagtttgtgctccccgcgcctttccttccttccctcgtctttggcgcctgcgggcaccgggagtcctgggagagggaggaggaacggcgaatcggcggggcgtgtccttcacgccgccccgtagctcggggccgaagctggcgcagcgcgcgactttttgaaagccaggagggttcgaattgcaacggcagctgccgggcgtatgtgttggtgctagaggcagctgcagggtctcgctgggggccgctcgggaccaattttgaagaggtacttggccacgacttattttcacctccgacctttccttccaggcggtgagactctggactgagagtggctttcacaatggaagggatcagtaatttcaagacaccaagcaaattatcagaaaaaaagaaatctgtattatgttcaactccaactataaatatcccggcctctccgtttatgcagaagcttggctttggtactggggtaaatgtgtacctaatgaaaagatctccaagaggtttgtctcattctccttgggctgtaaaaaagattaatcctatatgtaatgatcattatcgaagtgtgtatcaaaagagactaatggatgaagctaagattttgaaaagccttcatcatccaaacattgttggttatcgtgcttttactgaagccaatgatggcagtctgtgtcttgctatggaatatggaggtgaaaagtctctaaatgacttaatagaagaacgatataaagccagccaagatccttttccagcagccataattttaaaagttgctttgaatatggcaagagggttaaagtatctgcaccaagaaaagaaactgcttcatggagacataaagtcttcaaatgttgtaattaaaggcgattttgaaacaattaaaatctgtgatgtaggagtctctctaccactggatgaaaatatgactgtgactgaccctgaggcttgttacattggcacagagccatggaaacccaaagaagctgtggaggagaatggtgttattactgacaaggcagacatatttgcctttggccttactttgtgggaaatgatgactttatcgattccacacattaatctttcaaatgatgatgatgatgaagataaaacttttgatgaaagtgattttgatgatgaagcatactatgcagcgttgggaactaggccacctattaatatggaagaactggatgaatcataccagaaagtaattgaactcttctctgtatgcactaatgaagaccctaaagatcgtccttctgctgcacacattgttgaagctctggaaacagatgtctagtgatcatctcagctgaagtgtggcttgcgtaaataactgtttattccaaaatatttacatagttactatcagtagttattagactctaaaattggcatatttgaggaccatagtttcttgttaacatatggataactatttctaatatgaaatatgcttatattggctataagcacttggaattgtactgggttttctgtaaagttttagaaactagctacataagtactttgatactgctcatgctgacttaaaacactagcagtaaaacgctgtaaactgtaacattaaattgaatgaccattacttttattaatgatctttcttaaatattctatattttaatggatctactgacattagcactttgtacagtacaaaataaagtctacatttgtttaaaacactgaaccttttgctgatgtgtttatcaaatgataactggaagctgaggagaatatgcctcaaaaagagtagctccttggatacttcagactctggttacagattgtcttgatctcttggatctcctcagatctttggtttttgctttaatttattaaatgtattttccatactgagtttaaaatttattaatttgtaccttaagcatttcccagctgtgtaaaaacaataaaactcaaataggatgataaagaataaaggacactttgggtaccagaag

SEQ ID NO: 164088 - DNA, 748 bp, Homo sapiens
  Payload ID: 12303
  Gene Symbol: PBK
  Gene Name: PDZ binding kinase
  ENST ID: ENST00000521226
  CDS Start-End: 295-748
ggagggttcgaattgcaacggcagctgccgggcgtatgtgttggtgctagaggcagctgcagggtctcgctgggggccgctcgggaccaattttgaagaggtacttggccacgacttattttcacctccgacctttccttccaggcggtgagactctggactgagagtggctttcacaatggaagggatcagtaatttcaagacaccaagcaaattatcagaaaaaaagaaatctggtaagatagcagattattatgttcaactccaactataaatatcccggcctctccgtttatgcagaagcttggctttggtactggggtaaatgtgtacctaatgaaaagatctccaagaggtttgtctcattctccttgggctgtaaaaaagattaatcctatatgtaatgatcattatcgaagtgtgtatcaaaagagactaatggatgaagctaagattttgaaaagccttcatcatccaaacattgttggttatcgtgcttttactgaagccaatgatggcagtctgtgtcttgctatggaatatggaggtgaaaagtctctaaatgacttaatagaagaacgatataaagccagccaagatccttttccagcagccataattttaaaagttgctttgaatatggcaagagggttaaagtatctgcaccaagaaaagaaactgcttcatggagacataaagtcttcaaatgttgtaattaaaggcgattttgaaacaattaaaatctgtg

SEQ ID NO: 164089 - DNA, 819 bp, Homo sapiens
  Payload ID: 12303
  Gene Symbol: PBK
  Gene Name: PDZ binding kinase
  ENST ID: ENST00000524266
  CDS Start-End: 153-344
gccgggcgtatgtgttggtgctagaggcagctgcagggtctcgctgggggccgctcgggaccaattttgaagaggtacttggccacgacttattttcacctccgacctttccttccaggcggtgagactctggactgagagtggctttcacaatggaagggatcagtaatttcaagacaccaagcaaattatcagaaaaaaagaaatctgtattatgttcaactccaactataaatatcccggcctctccgtttatgcagaagcttggctttggtactggggtaaatgtgtacctaatgaaaagtatctgcaccaagaaaagaaactgcttcatggagacataaagtcttcaaatgttgtaattaaaggcgattttgaaacaattaaaatctgtgatgtaggagtctctctaccactggatgaaaatatgactgtgactgaccctgaggcttgttacattggcacagagccatggaaacccaaagaagctgtggaggagaatggtgttattactgacaaggcagacatatttgcctttggccttactttgtgggaaatgatgactttatcgattccacacattaatctttcaaatgatgatgatgatgaagataaaacttttgatgaaagtgattttgatgatgaagcatactatgcagcgttgggaactaggccacctattaatatggaagaactggatgaatcataccagaaagtaattgaactcttctctgtatgcactaatgaagaccctaaagatcgtccttctgctgcacacattgttgaagctctggaaacagatgtctagtgatcatctca

SEQ ID NO: 164090 - DNA, 1499 bp, Homo sapiens
  Payload ID: 12303
  Gene Symbol: PBK
  Gene Name: PDZ binding kinase
  Uniprot ID: Q96KB5
  ENST ID: ENST00000522944
  CDS Start-End: 394-1395
attcaacacagatgtgagcgtttggagagagcttcagccttcagcacaggcaactgtgttctattcaccgggctgtgctcctcggaagggctggtggttcctgtaaaagtttgtgctccccgcgcctttccttccttccctcgtctttggcgcctgcgggcaccgggagtcctgggagagggaggaggaacggcgaatcggcggggcgtgtccttcacgccgccccgtagctcggggccgaagctggcgcagcgcgcgactttttgaaagccaggagggttcgaattgcaacggcagctgccgggcgtatgtgttggtgctagaggcagctgcagggtctcgctgggggccgctcgggaccaattttgaagaggactgagagtggctttcacaatggaagggatcagtaatttcaagacaccaagcaaattatcagaaaaaaagaaatctgtattatgttcaactccaactataaatatcccggcctctccgtttatgcagaagcttggctttggtactggggtaaatgtgtacctaatgaaaagatctccaagaggtttgtctcattctccttgggctgtaaaaaagattaatcctatatgtaatgatcattatcgaagtgtgtatcaaaagagactaatggatgaagctaagattttgaaaagccttcatcatccaaacattgttggttatcgtgcttttactgaagccaatgatggcagtctgtgtcttgctatggaatatggaggtgaaaagtctctaaatgacttaatagaagaacgatataaagccagccaagatccttttccagcagccataattttaaaagttgctttgaatatggcaagagggttaaagtatctgcaccaagaaaagaaactgcttcatggagacataaagtcttcaaatgttgtaattaaaggcgattttgaaacaattaaaatctgtgatgtaggagtctctctaccactggatgaaaatatgactgctcctgccttcataaccatcttgcttgtttcagtgactgaccctgaggcttgttacattggcacagagccatggaaacccaaagaagctgtggaggagaatggtgttattactgacaaggcagacatatttgcctttggccttactttgtgggaaatgatgactttatcgattccacacattaatctttcaaatgatgatgatgatgaagataaaacttttgatgaaagtgattttgatgatgaagcatactatgcagcgttgggaactaggccacctattaatatggaagaactggatgaatcataccagaaagtaattgaactcttctctgtatgcactaatgaagaccctaaagatcgtccttctgctgcacacattgttgaagctctggaaacagatgtctagtgatcatctcagctgaagtgtggcttgcgtaaataactgtttattccaaaatatttacatagttactatcagtagttattagactctaaaattggcatatttga

SEQ ID NO: 164091 - DNA, 2084 bp, Homo sapiens
  Payload ID: 12304
  Gene Symbol: PDZK1
  Gene Name: PDZ domain containing 1
  Uniprot ID: Q5T2W1
  ENST ID: ENST00000344770
  CDS Start-End: 74-1633
ggtctcattctgttgcccaggctggagtgcagtggtgcgatctcggctcacagcaacctctctgcctccagaaatgacctccaccttcaacccccgagaatgtaaactgtccaagcaagaagggcaaaactatggcttcttcctgcgaattgagaaggacaccgagggccacctggtccgggtggttgagaagtgtagcccagcagagaaggctggccttcaagatggagacagagttcttaggatcaatggtgtctttgtggacaaagaagaacatatgcaggttgtggatctggtcagaaagagtgggaattcagtgactttactagttctggatggggattcctatgagaaagcagtgaaaacacgggtggacttgaaagagttgggtcaaagtcagaaggagcaaggtttgagtgataatatactttcccctgtgatgaatggaggtgtgcaaacttggacccagccccggctctgctatctcgtgaaggaaggaggcagctatggcttctctctgaaaactgtccaaggtaaaaagggggtgtacatgactgatattacacctcaaggtgtggctatgagagctggagttctggctgatgatcacttgattgaagtgaatggagagaatgtagaggatgccagccatgaggaagtggttgaaaaggtgaagaagtcaggaagccgtgtcatgttcctgctggtggacaaagaaactgacaagcgtcatgttgagcagaagatacaattcaaaagagaaacagccagtttgaaactgttaccccaccagccccgaattgtggagatgaagaaaggaagcaatggctatggtttctatctgagggcaggctcagaacagaaaggtcaaatcatcaaggacatagattctggaagtccagcagaggaggctggcttgaagaacaatgatctggtagttgctgtcaacggcgagtctgtggaaaccctggatcatgacagtgtggtagaaatgattagaaagggtggagatcagacttcactgttggtggtagacaaagagacggacaacatgtacagactggctcatttttctccatttctctactatcaaagtcaagaactgcccaatggctctgtcaaggaggctccagctcctactcccacttctctggaagtctcaagtccaccagatactacagaggaagtagatcataagcctaaactctgcaggctggctaaaggtgaaaatggctatggctttcacttaaatgcgattcggggtctgccaggctcattcatcaaagaggtacagaagggcggtcctgctgacttggctgggctagaggatgaggatgtcatcattgaagtgaatggggtgaatgtgctagatgaaccctatgagaaggtggtggatagaatccagagcagtgggaagaatgtcacacttctagtctgtggaaagaaggcctatgattatttccaagctaagaaaatccctattgtttcctccctggctgatccacttgacacccctccagattctaaagaaggaatagtggtggagtcaaaccatgactcgcacatggcaaaagaacgggcccacagtacagcctcacattcttcttccaattctgaagatacagagatgtgatgaaaacaagtaatagctttggctgtttatttgatagctgtttctgggtatttaataggaatcctttctcaaggaatgagttgtgacctgtttactgtctctttagaagaaaaactccactggaaaccattcaccatgtgtgattgtcttctgttatcatttgtcttacaggcggctattgcagacggctaatttatgcttaacttaggaagagataaggcaagagctagatttttttcatgtgatcttttccaagcttcaacttaacttaactacatttctctgtatgatgatgtctcttacttctacaggttccttgagcaccaaagatgattcataactctgtataggtgacagctgcttataaaagcatcttagcagataagcctattaaaattgtgcttttgtaacaatgttgtggttgctagaataaataccattaacaaatgcc

SEQ ID NO: 164092 - DNA, 2230 bp, Homo sapiens
  Payload ID: 12304
  Gene Symbol: PDZK1
  Gene Name: PDZ domain containing 1
  Uniprot ID: Q5T2W1
  ENST ID: ENST00000417171
  CDS Start-End: 87-1646
tccagtgagttgcaagcttaatgctcacctgcagagacagaattcctgagtgaacgaacagagcagctcctcttccatctccagaaatgacctccaccttcaacccccgagaatgtaaactgtccaagcaagaagggcaaaactatggcttcttcctgcgaattgagaaggacaccgagggccacctggtccgggtggttgagaagtgtagcccagcagagaaggctggccttcaagatggagacagagttcttaggatcaatggtgtctttgtggacaaagaagaacatatgcaggttgtggatctggtcagaaagagtgggaattcagtgactttactagttctggatggggattcctatgagaaagcagtgaaaacacgggtggacttgaaagagttgggtcaaagtcagaaggagcaaggtttgagtgataatatactttcccctgtgatgaatggaggtgtgcaaacttggacccagccccggctctgctatctcgtgaaggaaggaggcagctatggcttctctctgaaaactgtccaaggtaaaaagggggtgtacatgactgatattacacctcaaggtgtggctatgagagctggagttctggctgatgatcacttgattgaagtgaatggagagaatgtagaggatgccagccatgaggaagtggttgaaaaggtgaagaagtcaggaagccgtgtcatgttcctgctggtggacaaagaaactgacaagcgtcatgttgagcagaagatacaattcaaaagagaaacagccagtttgaaactgttaccccaccagccccgaattgtggagatgaagaaaggaagcaatggctatggtttctatctgagggcaggctcagaacagaaaggtcaaatcatcaaggacatagattctggaagtccagcagaggaggctggcttgaagaacaatgatctggtagttgctgtcaacggcgagtctgtggaaaccctggatcatgacagtgtggtagaaatgattagaaagggtggagatcagacttcactgttggtggtagacaaagagacggacaacatgtacagactggctcatttttctccatttctctactatcaaagtcaagaactgcccaatggctctgtcaaggaggctccagctcctactcccacttctctggaagtctcaagtccaccagatactacagaggaagtagatcataagcctaaactctgcaggctggctaaaggtgaaaatggctatggctttcacttaaatgcgattcggggtctgccaggctcattcatcaaagaggtacagaagggcggtcctgctgacttggctgggctagaggatgaggatgtcatcattgaagtgaatggggtgaatgtgctagatgaaccctatgagaaggtggtggatagaatccagagcagtgggaagaatgtcacacttctagtctgtggaaagaaggcctatgattatttccaagctaagaaaatccctattgtttcctccctggctgatccacttgacacccctccagattctaaagaaggaatagtggtggagtcaaaccatgactcgcacatggcaaaagaacgggcccacagtacagcctcacattcttcttccaattctgaagatacagagatgtgatgaaaacaagtaatagctttggctgtttatttgatagctgtttctgggtatttaataggaatcctttctcaaggaatgagttgtgacctgtttactgtctctttagaagaaaaactccactggaaaccattcaccatgtgtgattgtcttctgttatcatttgtcttacaggcggctattgcagacggctaatttatgcttaacttaggaagagataaggcaagagctagatttttttcatgtgatcttttccaagcttcaacttaacttaactacatttctctgtatgatgatgtctcttacttctacaggttccttgagcaccaaagatgattcataactctgtataggtgacagctgcttataaaagcatcttagcagataagcctattaaaattgtgcttttgtaacaatgttgtggttgctagaataaataccattaacaaatgccttttgagtatgcttgatagtgcttttgttttggattcactttttatgctttaaccttcatttgcctctagaaacccaaaacacaataaagtacagaataagaccttagtaataaaattcagaattttcttaaa

SEQ ID NO: 164093 - DNA, 1897 bp, Homo sapiens
  Payload ID: 12304
  Gene Symbol: PDZK1
  Gene Name: PDZ domain containing 1
  Uniprot ID: Q5T2W1
  ENST ID: ENST00000451928
  CDS Start-End: 87-1313
tccagtgagttgcaagcttaatgctcacctgcagagacagaattcctgagtgaacgaacagagcagctcctcttccatctccagaaatgacctccaccttcaacccccgagaatgtaaactgtccaagcaagaagggcaaaactatggcttcttcctgcgaattgagaaggacaccgagggccacctggtccgggtggttgagaagtgtagcccagcagagaaggctggccttcaagatggagacagagttcttaggatcaatggtgtctttgtggacaaagaagaacatatgcaggttgtggatctggtcagaaagagtgggaattcagtgactttactagttctggatggggattcctatgagaaagcagtgaaaacacgggtggacttgaaagagttgggtcaaagtcagaaggagcaaggtttgagtgataatatactttcccctgtgatgaatggaggtgtgcaaacttggacccagccccggctctgctatctcgtgaaggaaggaggcagctatggcttctctctgaaaactgtccaaggtcaaatcatcaaggacatagattctggaagtccagcagaggaggctggcttgaagaacaatgatctggtagttgctgtcaacggcgagtctgtggaaaccctggatcatgacagtgtggtagaaatgattagaaagggtggagatcagacttcactgttggtggtagacaaagagacggacaacatgtacagactggctcatttttctccatttctctactatcaaagtcaagaactgcccaatggctctgtcaaggaggctccagctcctactcccacttctctggaagtctcaagtccaccagatactacagaggaagtagatcataagcctaaactctgcaggctggctaaaggtgaaaatggctatggctttcacttaaatgcgattcggggtctgccaggctcattcatcaaagaggtacagaagggcggtcctgctgacttggctgggctagaggatgaggatgtcatcattgaagtgaatggggtgaatgtgctagatgaaccctatgagaaggtggtggatagaatccagagcagtgggaagaatgtcacacttctagtctgtggaaagaaggcctatgattatttccaagctaagaaaatccctattgtttcctccctggctgatccacttgacacccctccagattctaaagaaggaatagtggtggagtcaaaccatgactcgcacatggcaaaagaacgggcccacagtacagcctcacattcttcttccaattctgaagatacagagatgtgatgaaaacaagtaatagctttggctgtttatttgatagctgtttctgggtatttaataggaatcctttctcaaggaatgagttgtgacctgtttactgtctctttagaagaaaaactccactggaaaccattcaccatgtgtgattgtcttctgttatcatttgtcttacaggcggctattgcagacggctaatttatgcttaacttaggaagagataaggcaagagctagatttttttcatgtgatcttttccaagcttcaacttaacttaactacatttctctgtatgatgatgtctcttacttctacaggttccttgagcaccaaagatgattcataactctgtataggtgacagctgcttataaaagcatcttagcagataagcctattaaaattgtgcttttgtaacaatgttgtggttgctagaataaataccattaacaaatgccttttgagtatgcttgatagtgcttttgttttggattcactttttatgctttaaccttcatttgcctctagaaacccaaaacacaataaagtacagaataagaccttagtaataaaattcagaattttcttaaa

SEQ ID NO: 164094 - DNA, 1010 bp, Homo sapiens
  Payload ID: 12304
  Gene Symbol: PDZK1
  Gene Name: PDZ domain containing 1
  ENST ID: ENST00000443667
  CDS Start-End: 218-1010
gcaaggcagcaggatggaggggtttgtaaaaatgccttccacctaccctgctgggcttgcccgagaggctctgagtgtgtgaaggggaagacaattatcgctaggctggagaatagaaagagcaccatcagtccagtgagttgcaagcttaatgctcacctgcagagacagaattcctgagtgaacgaacagagcagctcctcttccatctccagaaatgacctccaccttcaacccccgagaatgtaaactgtccaagcaagaagggcaaaactatggcttcttcctgcgaattgagaaggacaccgagggccacctggtccgggtggttgagaagtgtagcccagcagagaaggctggccttcaagatggagacagagttcttaggatcaatggtgtctttgtggacaaagaagaacatatgcaggttgtggatctggtcagaaagagtgggaattcagtgactttactagttctggatggggattcctatgagaaagcagtgaaaacacgggtggacttgaaagagttgggtcaaagtcagaaggagcaaggtttgagtgataatatactttcccctgtgatgaatggaggtgtgcaaacttggacccagccccggctctgctatctcgtgaaggaaggaggcagctatggcttctctctgaaaactgtccaaggtaaaaagggggtgtacatgactgatattacacctcaaggtgtggctatgagagctggagttctggctgatgatcacttgattgaagtgaatggagagaatgtagaggatgccagccatgaggaagtggttgaaaaggtgaagaagtcaggaagccgtgtcatgttcctgctggtggacaaagaaactgacaagcgtcatgttgagcagaagatacaattcaaaagagaaacagccagtttgaaactgttaccccaccagccccgaattgtggagatgaagaaaggaagcaatggctatggtttctatctgagggcaggctcagaacagaaag

SEQ ID NO: 164095 - DNA, 1043 bp, Homo sapiens
  Payload ID: 12305
  Gene Symbol: PDZD11
  Gene Name: PDZ domain containing 11
  Uniprot ID: Q5EBL8
  ENST ID: ENST00000239666
  CDS Start-End: 134-556
ggagggtcagctcgttgcaccctggcccggcctcttttcgaccctgcggagcatccgcttccggttcccagactgaattgtcagtgagcggagtctgaggtcgctgtggactgcccactgggccttgcccgagatggacagccggattccttatgatgactacccggtggttttcttgcctgcctatgagaatcctccagcatggattcctcctcatgagagggtacaccacccggactacaacaatgagttgacccagtttctgccccgaaccatcacactgaagaagcctcctggagctcagttgggatttaacatccgaggaggaaaggcctcccagctaggcatcttcatctccaaggtgattcctgactctgatgcacatagagcaggactgcaggaaggggaccaagttctagctgtgaatgatgtggatttccaagatattgagcacagcaaggctgttgagatcctgaagacagctcgtgaaatcagcatgcgtgtgcgcttctttccctacaattatcatcgccaaaaagagaggactgtgcactagaaagttgcagcccacagcccttcatgtggactctgtcatgacatgctaactagacttcaggggagccacttctgttttcagcccctccctggaatagtgagttgggaggatggggagacagctaaccaactgcattacccaaaccatattgcacttttagttccctagttttctaggtgagcttcattccctgaaaggaggatgatgatatctaggcataacctagcctgtgaggaacctagttaggaaagacaactgacatttattgaatatcatgcactagtcccttacatatgtcatattttaattatagaaatcagtagcaaaaagaatcttggggattttccatctgacttccctggccatcttatcccatccttgcactaccagaagattcatacacttttgagactccagtgagacgctgttttcaccccttcctcctcctagcctctctcccaaaaagtaaaacacaatgctgaagaaa

SEQ ID NO: 164096 - DNA, 784 bp, Homo sapiens
  Payload ID: 12305
  Gene Symbol: PDZD11
  Gene Name: PDZ domain containing 11
  Uniprot ID: Q5EBL8
  ENST ID: ENST00000374454
  CDS Start-End: 172-594
ttttcgaccctgcggagcatccgcttccggttcccagactgaattgtcagtgagcggagtctgaggtcgctgtggactgcccactggattgtgaaaaatgaggtcctctttctagagtacctgacaggttgcttggcatccagaagatgtttagctaaggccttgcccgagatggacagccggattccttatgatgactacccggtggttttcttgcctgcctatgagaatcctccagcatggattcctcctcatgagagggtacaccacccggactacaacaatgagttgacccagtttctgccccgaaccatcacactgaagaagcctcctggagctcagttgggatttaacatccgaggaggaaaggcctcccagctaggcatcttcatctccaaggtgattcctgactctgatgcacatagagcaggactgcaggaaggggaccaagttctagctgtgaatgatgtggatttccaagatattgagcacagcaaggctgttgagatcctgaagacagctcgtgaaatcagcatgcgtgtgcgcttctttccctacaattatcatcgccaaaaagagaggactgtgcactagaaagttgcagcccacagcccttcatgtggactctgtcatgacatgctaactagacttcaggggagccacttctgttttcagcccctccctggaatagtgagttgggaggatggggagacagctaaccaactgcattacccaaaccatattgcacttttagttccctagttttctaggtgagcttcattcc

SEQ ID NO: 164097 - DNA, 11704 bp, Homo sapiens
  Payload ID: 12306
  Gene Symbol: PDZD2
  Gene Name: PDZ domain containing 2
  Uniprot ID: O15018
  ENST ID: ENST00000438447
  CDS Start-End: 389-8908
gcgggagcctcggccaagccgcgagcaggtgtgaatgagcccagggaaggacacacggccactgctggagggatcctccattcctgtgtcatttgcatgggtcctgctgtgaaatgaacctggcagggacttgttagacacttccttccttccctcattgagcactccagtgccattgttccacagttgttctaattgggtcctagcttcctcctgccaaggcaaacagcatagtctcgagtaggtgtccctaggctcatctgccagcctgaacatgaacacaggcaaagctgatgatggccagggaccccaggggacgtggggccctgtggggtctggcccccaggagcaagacctctgatgatgctggtgtctgggagtgagcaccatgcccatcacccaggacaatgccgtgctgcacctgcccctcctctaccagtggctgcagaacagcctgcaggaaggtggggatgggccggagcagcggctctgccaggcggccatccagaagctgcaggagtacatccagctgaactttgctgtggatgagagtacggtcccacctgatcacagcccccccgaaatggagatctgtactgtgtacctcaccaaggagctgggggacacagagactgtgggcctgagttttgggaacatccctgttttcggggactatggtgaaaagcgcagggggggcaagaagaggaaaacccaccagggtcctgtgctggatgtgggctgcatctgggtgacagagctgaggaagaacagcccagcagggaagagtgggaaggtccgactgcgggatgagatcctctcactgaatgggcagctgatggttggagttgatgtcagtggggccagttacctggctgagcagtgctggaatggcggctttatctacctgatcatgctgcgtcgctttaagcacaaagcccactccacttataatggcaacagtagcaacagctctgaaccaggagaaacacctaccttggagctgggtgaccgaactgcgaaaaaggggaaacgaaccagaaagtttggggtcatctccaggcctcctgccaacaaggcccctgaagaatccaagggcagcgctggctgtgaggtgtccagtgaccccagcactgagctggagaacggccctgaccctgaacttggaaacggccatgtctttcagctagaaaatggcccagattctctcaaggaggtggctggaccccatctagagaggtcagaagtggacagagggacagagcatagaattccaaagacagatgctcctctgaccacaagcaatgacaaacgccgcttctcaaaaggtgggaagacggacttccaatcgagtgactgcctggcacgggaggaagttggccgaatatggaagatggagctgctcaaagaatcggatgggctgggaattcaggttagtggaggccgaggatcaaagcgctcacctcacgctatcgttgtcactcaagtgaaggaaggaggtgccgctcacagggatggcaggctgtccttaggagatgagctgctggtaatcaatggtcatttactggtcgggctctcccacgaggaagcagtggccattcttcgctccgccacgggaatggtgcagcttgtggtggccagcaaggaaaactccgcagaggacctcctcaggttaacatctaagagcttgccagatctgaccagctcggtagaagatgtgtcctcctggactgataacgaagaccaggaggcagacggggaagaggacgaaggaaccagctcttctgtccagagagcaatgcctgggacagatgaaccccaagatgtgtgcggtgctgaggaatccaaggggaacttggaaagtcccaaacagggcagcaataaaatcaagctcaagagtcgcctttcagggggtgtacaccgccttgagtcagttgaagaatataacgagctgatggtgcggaatggggacccccggatccggatgttggaggtctcccgagatggccggaaacactccctcccgcagctgctggactcttccagtgcctcacaggaataccacattgtgaagaagtctacccgctccttaagcacgactcaggtggaatctccttggaggctcattcggccatccgtcatctcgatcattgggttgtacaaagaaaaaggcaagggccttggctttagtattgctggaggtcgagactgcattcgtggacagatggggatttttgtcaagaccatcttcccaaatggatcagctgcagaggacggaagacttaaagaaggggatgaaatcctagatgtaaatggaataccaataaagggcttgacatttcaagaagccattcatacctttaagcaaatccggagtggattatttgttttaacggtacgcacaaagttggtgagccccagcctcacaccctgctcgacacccacacacatgagcagatccgcctccccgaacttcaataccagtgggggagcctcagcgggaggttccgatgaaggcagttcttcatccctgggtcggaagacccctgggcccaaggacaggatcgtcatggaagtaacactcaacaaagagccaagagttggattaggcattggtgcctgctgcttggctctggaaaacagtcctcctggcatctacattcacagccttgctccaggatcagtggccaagatggagagcaacctgagccgcggggatcaaatcctggaagtgaactccgtcaacgtccgccatgctgctttaagcaaagtccacgccatcttgagtaaatgccctccaggacccgttcgccttgtcatcggccggcaccctaatccaaaggtttccgagcaggaaatggatgaagtcatagcacgcagcacttatcaggagagcaaagaggccaattcctctcctggcttaggtacccccttgaagagtccctctcttgcaaaaaaggactcccttatttctgaatctgaactctcccagtactttgcccacgatgtccctggccccttgtcagacttcatggtggccggttctgaggacgaggatcacccgggaagtggctgcagcacgtcggaggagggcagcctgcctcccagcacctccactcacaaggagcctggaaaacccagagccaacagcctcgtgactcttgggagccatcgggcttctgggctcttccacaagcaggtgacagttgccagacaagccagtctccccggaagcccacaggccctccgaaaccctctcctccgccagaggaaggtaggctgctacgatgccaacgatgccagtgatgaggaagagtttgacagagaaggggactgcatttcactcccaggggccctcccgggtcccatcaggcctctgtcagaggatgacccgaggcgtgtctcaatttcctcttccaagggcatggacgtccacaaccaagaggaacgaccccggaaaacactggtgagcaaggccatctcggcacctcttcttggtagctcagtggacttagaggagagtatcccagagggcatggtggatgctgcgtcctatgcagccaacctcacggactctgcagaggcccccaaggggagccctggaagctggtggaagaaggaactgtcaggatcaagtagcgcacccaaattggaatacacagtccgtacagacacccagagtccgacgaacactgggagccccagttccccccagcagaaaagtgaaggcctgggctccaggcacagaccagtggccagggtaagcccccactgcaagagatccgaggctgaggccaagcccagtggctcacagacagtgaacctgactggcagagccaatgatccatgcgatctggactcgagagtccaggccacttctgtcaaagtgactgtcgctggctttcagccaggtggagctgtggagaaggaatctctgggaaagctgaccactggagatgcttgtgtctctaccagctgtgaactagccagtgctctgtcccatctggatgccagccacctcacagagaacctgcccaaagctgcatcagagctggggcaacaacccatgactgaactggacagctcctcagacctcatctcttccccagggaagaagggggccgctcatcctgaccccagcaagacctctgtagacacagggcaagtcagtcggccagagaatcccagccagcctgcatcgcccagggtcaccaagtgcaaggccaggtctccagtcaggctcccccatgagggcagcccctccccgggggagaaagcagcggctccccctgactacagcaagactcgatcagcatcggaaaccagcacaccccacaataccaggagggtggctgccctcaggggagcgggacctggagcagagggaatgacaccagctggtgctgtcctgccaggagaccccctcacatcccaggagcagagacagggagctccaggtaaccacagtaaggctctggaaatgacaggaatccatgcacctgaaagctcccaggagccttccctgctggagggagcagattctgtgtcctcaagggcaccgcaggccagcctctccatgctgccatccactgacaacaccaaagaagcatgtggccatgtctcggggcactgctgcccaggggggagtagagagagccctgtgacggacattgacagcttcatcaaggagctggatgcttctgcagcaaggtctccgtcttcccagacgggggacagtggctctcaggagggcagtgctcagggccacccaccagccggggctggaggtgggagctcctgccgtgccgaaccagtcccggggggccagacctcctccccgaggagggcctgggctgctggtgcccccgcctacccacaatgggcctcccagccttcggttttagattcaattaatcccgacaaacattttactgtgaacaaaaactttctgagcaactactctagaaattttagcagttttcatgaagacagcacctccctatcaggcctgggtgacagcacggagccgtctctgtcatccatgtatggcgatgctgaggattcttcttctgaccctgagtcactcactgaagccccacgagcttctgccagggacggctggtcccctcctcgttcccgtgtgtctttgcacaaggaagatccttcggagtcagaagaggaacagattgagatttgttccacacgtggctgccccaatccaccctcgagtcctgctcatcttcccacccaggctgccatctgtcctgcctcagccaaagttctgtcattaaaatacagcactccgagagagtcggtggccagtccccgtgagaaggccgcctgcttgccaggctcatacacttcaggcccagactcttcccagccatcatcactcttggagatgagctctcaggagcatgaaactcatgcggacataagcacttcacagaaccacaggccctcgtgtgcagaagaaaccacagaagtcaccagcgctagctcagccatggaaaacagtccgctgtctaaagtagccaggcattttcacagtccgcccatcattctcagctcccccaacatggtaaatggcttggaacatgacctgctagatgacgaaaccctgaatcaatacgaaacaagcattaatgcagctgccagtctgtcctccttcagtgtggatgtccctaagaatggagaatctgttttggaaaacctccacatctctgaaagtcaagacctggatgacttgctacagaaaccaaaaatgatcgctaggaggcccatcatggcctggtttaaagaaataaataaacataaccaaggcacacatttgaggagcaaaaccgagaaggaacaacctctaatgcctgccagaagtcccgactccaagattcagatggtgagttcaagccaaaaaaagggcgttactgtgcctcatagccctcctcagccgaaaacaaacctggaaaataaggacctgtctaagaagagtccggcagaaatgcttctgactaatggtcagaaggcaaagtgtggtccgaagctgaagaggctcagcctcaagggcaaggccaaagtcaactctgaggcccctgctgcgaatgctgtgaaggctggggggacggaccacaggaaacccttgatctcaccccagacctcccacaaaacactttctaaggcagtgtcacagcggctccatgtagccgaccacgaggaccctgacagaaacaccacagctgcccccaggtccccccagtgtgtgctggaaagcaagccacctcttgccacctctgggccactgaaaccctcagtgtctgacacgagcatcaggacatttgtctcgcccctgacctctcccaagcctgttcctgagcaaggcatgtggagcaggttccacatggctgtcctctctgaacccgacagaggttgcccaaccacccctaaatctcctaagtgtagagcagagggcagggcgccccgtgctgactccgggccggtgagtccggcagcgtctaggaacggcatgtccgtggcagggaacagacagagtgagccgcgcctggccagccatgtggcagcagacacagcccaacccaggccgactggcgaaaaaggaggcaacataatggccagcgatcgcctcgaaagaacaaaccagctgaaaatcgtggagatttctgctgaagcagtgtcagagactgtatgtggtaacaagccagctgaaagcgacagacggggagggtgcttggcccagggcaactgtcaggagaagagtgaaatcaggctctatcgccaggtcgcagaatcatccacaagtcatccatcctcactcccatctcatgcctcccaggcagagcaggaaatgtcacgatcattcagcatggcaaaactggcgtcctcctcctcctcccttcaaacagccattagaaaggcagaatactcccagggaaaatcaagcctgatgtcagactcccgaggggtgcccagaaacagcattccagggggcccctcgggggaggaccatctctacttcaccccaaggccagcgaccaggacctactccatgccagcccagttctcaagccattttggacgggagggtcaccccccacacagcctgggtcgctctcgggacagccaggtccctgtgacaagcagtgttgtccccgaggcaaaggcatccagaggtggtcttcccagcctggctaatggacagggcatatatagtgtaaagccgctgctggacacatcgaggaatcttccagccacagatgaaggggatatcatttcagtccaggagacgagctgcctagtcacagacaaaatcaaagtcaccagacgacactactgctatgagcagaactggccccatgaatctacctcatttttctctgtgaagcagcggatcaagtcttttgagaacctggccaatgctgaccggcctgtagccaagtccggggcttccccatttttgtcggtgagctccaagcctcccattgggaggcggtcttccggcagcattgtttccgggagcctgggccacccaggtgacgcagcagcaaggttgttgagacgcagcttgagttcctgcagcgaaaaccaaagcgaagccggcaccctcctgccccagatggccaagtctccctcaatcatgacactgaccatctctcggcagaacccaccagagaccagtagcaagggctctgattcggaactaaagaaatcacttggtcctttgggaattcccaccccaacgatgaccctggcttctcctgttaagaggaacaagtcctcggtacgccacacgcagccctcgcccgtgtcccgctccaagctccaggagctgagagccttgagcatgcctgaccttgacaagctctgcagcgaggattactcagcagggccgagcgccgtgctcttcaaaactgagctggagatcacccccaggaggtcacctggccctcctgctggaggcgtttcgtgtcccgagaagggcgggaacagggcctgtccaggaggaagtggccctaaaaccagtgctgctgagacacccagttcagccagtgatacgggtgaagctgcccaggatctgccttttagaagaagctggtcagttaatttggatcaacttctagtctcagcgggggaccagcaaagattacagtctgttttatcgtcagtgggatcgaaatctaccatcctaactctcattcaggaagcgaaagcacaatcagagaatgaagaagatgtttgcttcatagtcttgaatagaaaagaaggctcaggtctgggattcagtgtggcaggagggacagatgtggagccaaaatcaatcacggtccacagggtgttttctcagggggcggcttctcaggaagggactatgaaccgaggggatttccttctgtcagtcaacggcgcctcactggctggcttagcccacgggaatgtcctgaaggttctgcaccaggcacagctgcacaaagatgccctcgtggtcatcaagaaagggatggatcagcccaggccctctgcccggcaggagcctcccacagccaatgggaagggtttgctgtccagaaagaccatccccctggagcctggcattgggagaagtgtggctgtacacgatgctctgtgtgttgaagtgctgaagacctcggctgggctgggactgagtctggatgggggaaaatcatcggtgacgggagatgggcccttggtcattaaaagagtgtacaaaggtggtgcggctgaacaagctggaataatagaagctggagatgaaattcttgctattaatgggaaacctctggttgggctcatgcactttgatgcctggaatattatgaagtctgtcccagaaggacctgtgcagttattaattagaaagcataggaattcttcatgaattttaacaagaatcattttctcagttctcttctttctttagcaaatcagagtgacttctttaaaccacaggttgttgaaatggccaacactggtacagacacggactataaaaatctccaagcttgtgcttacacatgaagcctgacttaactgtatgtgcaacagcaatgaaattaactccagaagccttccacctgcgtcacccaggccgggagggttccttcgttccagtgcctgtcccctacctttatgttatgtttactgatggggatacaagatgtgacacacccttctttatttgaaacaaacaaacatttagctagacctttgcttccttcttgccagctctcccaacatacccaatcctggtgatcagggaactaaaagtctgagggggacacaaatgtcacacctaagaggacaatcaatcattttgtatgattttgtaagtaaatgacagaatgcttttaggcacattcaatggaaggaggagatgtaggtctgtatatgttaccctgaaaagagaataagacttacttaaaaaaatgaattatgacctgttaggctgagctcaggaattgtccaaaaaggaaaaagcaaaataattaattgagagtattttttagtgagtgtaatgtataatgtacgtatgcaaagttcaactcaataggttattgatcaccatgaagtattgatcattttctatctcaaaagtgtaagccataaggctgttttacagaatagcacttctgataagctgtattaaatagccatgagcttcactgcttagagggagcagaaaggtcaacatctaaaagcaccttacaactagtttttgaacctgtcttgataagtgcttgaattcaagactggtcagtccaagagcagacaaaaatatcacaagtcagtcagtcactgggtttccatttctgaattttatgcactccaaccatgaatttaaactaaatttttagaaatcaagtatctttctaagtgtccttggatttatagacaatgtatgtacaatccaaatagaggagcttaatggaatccttttaggagactggttggtttttttccctctttcccaacatgtttaagaaatgtaacattctaagtattggatctcttttcttgacctagtataatgacaactgcagtgacttaagtttttgctgttttcgttttcccgctttgcaatttcctccttttgccaaaaatgttttcctacagaagactgtcgtgactcacgctacttgggaaactcactctggccactcctcctctggtggcatgagctgcttcccagtagctattccgattggatattccgttcgtcgtcacatagctggcttttctctcctcatgatgtaccttattttcttaggtaaataattccaaactctcatcgggtcataaagaggaggagaaacagggtgagtcaaggtaaaggagcagaaatgtagttacaagccaggtcgtcttcagtggcacaaaccaacccgttgagccctgacaacatgagtggagagtgcatttgccatacctgtgtgcatgacactaagattttatgttggagatacttctttaaataacctacagcttgggtctatggctgtgacccccagattcatggaggggctttagccatcagctttgtacatcatcatttttctgaatgaccaatcccactaaacatctttgaagtcggcctagagaggtccttcagatgagagagaaatagctggcttgtctgagtccagatttctcatcaactggcaatacaaaggaaaatatggtacaggagttagttagaaaggtcttattgattttacttctacttttcactacagttacaggtagaatactgtaggaagtcagtgcaaggtgcatgcttgattgatagatattgattgattgtttttcagtctctggggtcagttttgtggtttctgctttcttgcctaaatcaaagactatttcaagtcaacaacactgaaaactgcttttcgcctccactcttacagctgtgcctaataataattaattaataaacgcacagccctatgtgaacagacaggaatttcttgtgcaatgtggagcaaatggaatggtctccttccgcaagtctttttaatcctcatatctggagtacaagggtagacctctggcttaccacatacactatgctaaagtcatcagccactgctactacatcttgccagaaggtttccctcgccaacaaacagttgaaatttaagggaagaagcaaaagctaaactgtctttgaccctaagatagatagaaagctatttatttgtcttcagtgttcaaggcatgactagtatttctaattagcctaataaattcccacactttctgaagtgaacactaatggtattgtcctactaaaactgtcattgtttctttttttttaactggtcagtcattcacaataagctatgagggtaaataaatatgtgttataacaagtaaaccgtagttgcaagaatataccatgaagattaaagtaggctgggtttcatttccatcttcccacacatctcattgaatttgatggttgacttaattggcaccataactttgtatgatattatacattaacctttatttatgtaaagtaaaatgccttatatattaaagagtaagtgcaataatatgaaatagcctgtacattttaaaaatgttgtcaccaagttatataaatccacatctctgtaaacaaccttttttaagtaattttaaaaaaaataaacactctgcttactacttg

SEQ ID NO: 164098 - DNA, 536 bp, Homo sapiens
  Payload ID: 12306
  Gene Symbol: PDZD2
  Gene Name: PDZ domain containing 2
  ENST ID: ENST00000513910
  CDS Start-End: 496-536
agaagtgtggcgtcttggtccaggatgcaggtccctgattcgggttggacgtggtcatcaaacccagaaattgaaggatcttgggcctgccttgatgttcatttctctcatctataaaattgaaggctggaggaggtgtgaatgagcccagggaaggacacacggccactgctggagggatcctccattcctgtgtcatttgcatgggtcctgctgtgaaatgaacctggcagggacttgttagacacttccttccttccctcattgagcactccagtgccattgttccacagttgttctaattgggtcctagcttcctcctgccaaggcaaacagcatagtctcgagtaggtgtccctaggctcatctgccagcctgaacatgaacacaggcaaagctgatgatggccagggaccccaggggacgtggggccctgtggggtctggcccccaggagcaagacctctgatgatgctggtgtctgggagtgagcaccatgcccatcacccaggacaatgccgtgctgcacctgcccct

SEQ ID NO: 164099 - DNA, 2204 bp, Homo sapiens
  Payload ID: 12307
  Gene Symbol: PDZD3
  Gene Name: PDZ domain containing 3
  Uniprot ID: Q86UT5
  ENST ID: ENST00000322712
  CDS Start-End: 10-1485
gatccagctatggagaaagccgcagatctgcaggacacagcctcgttaactctgaagtttaagtttaacccaaagctgggcattgataatcctgtcctctccctggccgaagaccacgacccctatgatccctggagcctggagcggcctcgcttctgtttactgagcaaagaggagggcaagagttttggcttccacctgcagcaggagctgggcagggctgggcatgtggtgtgcagggtggacccaggcacctctgcccagcgccagggtcttcaggaaggagacaggatcctggcggtgaacaatgatgttgtggaacacgaagactatgcggtggtggtacgccgcatccgggccagcagccctcgggtgttgctgacagtattggcacggcatgcacatgacgtggcccgagctcagctgggagaagatgcccacctctgtcccaccctaggcccaggggtccggccccggctgtgccacatagtgaaagatgagggtggttttggcttcagtgtcacccatggcaatcagggtcctttctggttggtgctaagtactggaggagcagctgagcgggcaggggtgccccccggggcccggctgctggaagtgaatgggctttggcagagtggacagcaggtgaccttgctggtggcagggccagaggtggaagaacagtgtcgccagctgggattgcccctggctgcacccctggcagagggctgggcactgcccaccaagccccgctgcctgcacctggagaaagggccccagggttttgggttcctgctccgggaggaaaagggccttgacggtcgccctggacagttcctgtgggaggtggacccgggactgccagccaagaaggctgggatgcaggctggggaccggctggtggctgtggctggggagagcgtggaggggctgggccatgaggagacagtgtccaggatccaggggcagggctcctgtgtctccctcactgtcgtcgaccctgaggcggaccgcttcttcagcatggttcgcctgtccccactcctcttcttggagaacacagaggctcccgcctcgccccggggcagcagctcagcctcactggttgagacagaggacccttcacttgaagacacaagcgtgccttctgtccctcttggctcccgacagtgcttcctgtaccctgggcctggtggcagctatggcttccgactcagttgtgtggccagtgggcctcgtctcttcatctcccaggtgactccaggaggctcagctgcccgggctgggctgcaagtgggagacgtgattctggaagtgaacgggtatcctgttgggggacagaatgacctggagaggcttcagcagctgcctgaggctgagccacccctctgcctgaagctggcagccaggtctctgcggggcttggaagcctggattccccctggggctgcagaggactgggctctggcctcggatctactgtagagcacccctgcttggtacagacatactcaggggctaccgtgtcttcactctccagcctgaggtggtgaaggcaggatgctctctctaagccagaccagagggactcagacaccaccgatcacaggctggcccaggtgctccctcccttcctgcaggcccacctgccagcagagggtgtggttggaggcctcagacaggtccctgaaggagtctgaggctccagaggatgtcatatgggagttttagagagctgtgtcccaaggatgaaggtgtggctgtgggtctggctaggattgaagccatctggaccttttctagatatgactccaggacccttgagtgtaatgcaaaaatttggagaccagctatgcctgccctctgtgggtgccttagcattgcgggagggtggtgcttggtcaccgttgcatttgttatagaaatggccattcgccataaatctgactgcctgtgtttgtgttggtgggggtaaggggcagtggtgtgaagggaccaaaagggcctcaggctcaaggggtgggatgcggctcctgcaggagagaggttgagacctggtcaaatttatttcctatcaatcactgaatctcagggataatgggtcaacccagaactgagatgtctgtatgacagccactcctaaaaataaacaacaacaaaaacaaaaaaagaagaaaactaaataaaaataaaaataaaaataa

SEQ ID NO: 164100 - DNA, 2252 bp, Homo sapiens
  Payload ID: 12307
  Gene Symbol: PDZD3
  Gene Name: PDZ domain containing 3
  Uniprot ID: Q86UT5
  ENST ID: ENST00000355547
  CDS Start-End: 16-1533
gttgctgatccagctatggagaaagccgcagatctgcaggacacagcctcgttaactctgaagtttaagtttaacccaaagctgggcattgataatcctgtcctctccctggccgaagaccacgacccctatgatccctggagcctggagcggcctcgcttctgtttactgagcaaagaggagggcaagagttttggcttccacctgcagcaggagctgggcagggctgggcatgtggtgtgcagggtggacccaggcacctctgcccagcgccagggtcttcaggaaggagacaggatcctggcggtgaacaatgatgttgtggaacacgaagactatgcggtggtggtacgccgcatccgggccagcagccctcgggtgttgctgacagtattggcacggcatgcacatgacgtggcccgagctcagctgggagaagatgcccacctctgtcccaccctaggcccaggggtccggccccggctgtgccacatagtgaaagatgagggtggttttggcttcagtgtcacccatggcaatcagggtcctttctggttggtgctaagtactggaggagcagctgagcgggcaggggtgccccccggggcccggctgctggaagtgaatggggtcagtgtggagaagttcactcacaaccaactcaccaggaagctttggcagagtggacagcaggtgaccttgctggtggcagggccagaggtggaagaacagtgtcgccagctgggattgcccctggctgcacccctggcagagggctgggcactgcccaccaagccccgctgcctgcacctggagaaagggccccagggttttgggttcctgctccgggaggaaaagggccttgacggtcgccctggacagttcctgtgggaggtggacccgggactgccagccaagaaggctgggatgcaggctggggaccggctggtggctgtggctggggagagcgtggaggggctgggccatgaggagacagtgtccaggatccaggggcagggctcctgtgtctccctcactgtcgtcgaccctgaggcggaccgcttcttcagcatggttcgcctgtccccactcctcttcttggagaacacagaggctcccgcctcgccccggggcagcagctcagcctcactggttgagacagaggacccttcacttgaagacacaagcgtgccttctgtccctcttggctcccgacagtgcttcctgtaccctgggcctggtggcagctatggcttccgactcagttgtgtggccagtgggcctcgtctcttcatctcccaggtgactccaggaggctcagctgcccgggctgggctgcaagtgggagacgtgattctggaagtgaacgggtatcctgttgggggacagaatgacctggagaggcttcagcagctgcctgaggctgagccacccctctgcctgaagctggcagccaggtctctgcggggcttggaagcctggattccccctggggctgcagaggactgggctctggcctcggatctactgtagagcacccctgcttggtacagacatactcaggggctaccgtgtcttcactctccagcctgaggtggtgaaggcaggatgctctctctaagccagaccagagggactcagacaccaccgatcacaggctggcccaggtgctccctcccttcctgcaggcccacctgccagcagagggtgtggttggaggcctcagacaggtccctgaaggagtctgaggctccagaggatgtcatatgggagttttagagagctgtgtcccaaggatgaaggtgtggctgtgggtctggctaggattgaagccatctggaccttttctagatatgactccaggacccttgagtgtaatgcaaaaatttggagaccagctatgcctgccctctgtgggtgccttagcattgcgggagggtggtgcttggtcaccgttgcatttgttatagaaatggccattcgccataaatctgactgcctgtgtttgtgttggtgggggtaaggggcagtggtgtgaagggaccaaaagggcctcaggctcaaggggtgggatgcggctcctgcaggagagaggttgagacctggtcaaatttatttcctatcaatcactgaatctcagggataatgggtcaacccagaactgagatgtctgtatgacagccactcctaaaaataaacaacaacaaaaacaaaaaaagaagaaaactaaataaaaataaaaataaaaataa

SEQ ID NO: 164101 - DNA, 2996 bp, Homo sapiens
  Payload ID: 12307
  Gene Symbol: PDZD3
  Gene Name: PDZ domain containing 3
  Uniprot ID: Q86UT5
  ENST ID: ENST00000531114
  CDS Start-End: 550-2265
actgggttgctgatccagctatggagaaagccgcaggtaggaggccaggagaaatcctctgcaggggactttgggacaggcagggggccgacttggaggctgaagctttgggaccagggcacacttgattttggggcttggagccctgaggcaggtaaacaagtcaggagaaaagtaatgagttgatatgtctgtcttcctggtccacaccctgtactgatatgctcagatttatgtgccaaggacttggggggagagaaagggaggggaccgcacaatagtcctgtgtgtatggcagtgagaagagaagacccctttggagcagaaaggagggggcatgccctgagtttgggggtttccctgagtccttttagtttatgccaatggaagaggcacatctggggagaagaatgtgactctcctcctctcacccacttctttgcccagtagatctgcaggacacagcctcgttaactctgaagtttaagtttaacccaaagctgggcattgataatcctgtcctctccctggccgaagaccacgacccctatggtaactccctcaccccctggcaaccattccctatccctggaggcaccacggctccacacggcctccgatctccttggtaaccactcactcggtctccctctgataacagccttggttgggagtagagataggaggggccgggtgttttctcctgtcccagtccctctgcccacgaaccccaccacccaacacccaaccaggcagaaactgcccagcaccctatcaggacacagggtctgccaggcacacggcgaacctgtacttgggctgtgccctctcctcccccttttctgctgcccacctcaccctccagatccctggagcctggagcggcctcgcttctgtttactgagcaaagaggagggcaagagttttggcttccacctgcagcaggagctgggcagggctgggcatgtggtgtgcagggtggacccaggcacctctgcccagcgccagggtcttcaggaaggagacaggatcctggcggtgaacaatgatgttgtggaacacgaagactatgcggtggtggtacgccgcatccgggccagcagccctcgggtgttgctgacagtattggcacggcatgcacatgacgtggcccgagctcagctgggagaagatgcccacctctgtcccaccctaggcccaggggtccggccccggctgtgccacatagtgaaagatgagggtggttttggcttcagtgtcacccatggcaatcagggtcctttctggttggtgctaagtactggaggagcagctgagcgggcaggggtgccccccggggcccggctgctggaagtgaatggggtcagtgtggagaagttcactcacaaccaactcaccaggaagctttggcagagtggacagcaggtgaccttgctggtggcagggccagaggtggaagaacagtgtcgccagctgggattgcccctggctgcacccctggcagagggctgggcactgcccaccaagccccgctgcctgcacctggagaaagggccccagggttttgggttcctgctccgggaggaaaagggccttgacggtcgccctggacagttcctgtgggaggtggacccgggactgccagccaagaaggctgggatgcaggctggggaccggctggtggctgtggctggggagagcgtggaggggctgggccatgaggagacagtgtccaggatccaggggcagggctcctgtgtctccctcactgtcgtcgaccctgaggcggaccgcttcttcagcatggttcgcctgtccccactcctcttcttggagaacacagaggctcccgcctcgccccggggcagcagctcagcctcactggttgagacagaggacccttcacttgaagacacaagcgtgccttctgtccctcttggctcccgacagtgcttcctgtaccctgggcctggtggcagctatggcttccgactcagttgtgtggccagtgggcctcgtctcttcatctcccaggtgactccaggaggctcagctgcccgggctgggctgcaagtgggagacgtgattctggaagtgaacgggtatcctgttgggggacagaatgacctggagaggcttcagcagctgcctgaggctgagccacccctctgcctgaagctggcagccaggtctctgcggggcttggaagcctggattccccctggggctgcagaggactgggctctggcctcggatctactgtagagcacccctgcttggtacagacatactcaggggctaccgtgtcttcactctccagcctgaggtggtgaaggcaggatgctctctctaagccagaccagagggactcagacaccaccgatcacaggctggcccaggtgctccctcccttcctgcaggcccacctgccagcagagggtgtggttggaggcctcagacaggtccctgaaggagtctgaggctccagaggatgtcatatgggagttttagagagctgtgtcccaaggatgaaggtgtggctgtgggtctggctaggattgaagccatctggaccttttctagatatgactccaggacccttgagtgtaatgcaaaaatttggagaccagctatgcctgccctctgtgggtgccttagcattgcgggagggtggtgcttggtcaccgttgcatttgttatagaaatggccattcgccataaatctgactgcctgtgtttgtgttggtgggggtaaggggcagtggtgtgaagggaccaaaagggcctcaggctcaaggggtgggatgcggctcctgcaggagagaggttgagacctggtcaaatttatttcctatcaatcactgaatctcagggataatgggtcaacccagaactgagatgtctgtatgacagccactcctaaaaataaacaacaacaaaaacaaaaaaagaagaaaactaaataaaaataaaaataaaaataagatccacttctc

SEQ ID NO: 164102 - DNA, 573 bp, Homo sapiens
  Payload ID: 12307
  Gene Symbol: PDZD3
  Gene Name: PDZ domain containing 3
  ENST ID: ENST00000533688
  CDS Start-End: 16-375
gttgctgatccagctatggagaaagccgcagatctgcaggacacagcctcgttaactctgaagtttaagtttaacccaaagctgggcattgataatcctgtcctctccctggccgaagaccacgacccctatgatccctggagcctggagcggcctcgcttctgtttactgagcaaagaggagggcaagagttttggcttccacctgcagcaggagctgggcagggctgggcatgtggtgtgcagggtggacccaggcacctctgcccagcgccagggtcttcaggaaggagacaggatcctggcggtgaacaatgatgttgtggaacacgaagactatgcggtggcaatcagggtcctttctggttggtgctaagtactggaggagcagctgagcgggcaggggtgccccccggggcccggctgctggaagtgaatggggtcagtgtggagaagttcactcacaaccaactcaccaggaagctttggcagagtggacagcaggtgaccttgctggtggcagggccagaggtggaagaacagtgtcgccagctgggattgcccctggctgcac

SEQ ID NO: 164103 - DNA, 1882 bp, Homo sapiens
  Payload ID: 12307
  Gene Symbol: PDZD3
  Gene Name: PDZ domain containing 3
  ENST ID: ENST00000525131
  CDS Start-End: 136-1614
actgggttgctgatccagctatggagaaagccgcagatctgcaggacacagcctcgttaactctgaagtttaagtttaacccaaagctgggcattgataatcctgtcctctccctggccgaagaccacgacccctatggtaactccctcaccccctggcaaccattccctatccctggaggcaccacggctccacacggcctccgatctccttgatccctggagcctggagcggcctcgcttctgtttactgagcaaagaggagggcaagagttttggcttccacctgcagcaggagctgggcagggctgggcatgtggtgtgcagggtggacccaggcacctctgcccagcgccagggtcttcaggaaggagacaggatcctggcggtgaacaatgatgttgtggaacacgaagactatgcggtggtggtacgccgcatccgggccagcagccctcgggtgttgctgacagtattggcacggcatgcacatgacgtggcccgagctcagctgggagaagatgcccacctctgtcccaccctaggcccaggggtccggccccggctgtgccacatagtgaaagatgagggtggttttggcttcagtgtcacccatggcaatcagggtcctttctggttggtgctaagtactggaggagcagctgagcgggcaggggtgccccccggggcccggctgctggaagtgaatggggtcagtgtggagaagttcactcacaaccaactcaccaggaagctttggcagagtggacagcaggtgaccttgctggtggcagggccagaggtggaagaacagtgtcgccagctgggattgcccctggctgcacccctggcagagggctgggcactgcccaccaagccccgctgcctgcacctggagaaagggccccagggttttgggttcctgctccgggaggaaaagggccttgacggtcgccctggacagttcctgtgggaggtggacccgggactgccagccaagaaggctgggatgcaggctggggaccggctggtggctgtggctggggagagcgtggaggggctgggccatgaggagacagtgtccaggatccaggggcagggctcctgtgtctccctcactgtcgtcgaccctgaggcggaccgcttcttcagcatggttcgcctgtccccactcctcttcttggagaacacagaggctcccgcctcgccccggggcagcagctcagcctcactggttgagacagaggacccttcacttgaagacacaagcgtgccttctgtccctcttggctcccgacagtgcttcctgtaccctgggcctggtggcagctatggcttccgactcagttgtgtggccagtgggcctcgtctcttcatctcccaggtgactccaggaggctcagctgcccgggctgggctgcaagtgggagacgtgattctggaagtgaacgggtatcctgttgggggacagaatgacctggagaggcttcagcagctgcctgaggctgagccacccctctgcctgaagctggcagccaggtctctgcggggcttggaagcctggattccccctggggctgcagaggactgggctctggcctcggatctactgtagagcacccctgcttggtacagacatactcaggggctaccgtgtcttcactctccagcctgaggtggtgaaggcaggatgctctctctaagccagaccagagggactcagacaccaccgatcacaggctggcccaggtgctccctcccttcctgcaggcccacctgccagcagagggtgtggttggaggcctcagacaggtccctgaaggagtctgaggctccagaggatgtcatatgggagttttagagagctgtgtcccaaggatgaa

SEQ ID NO: 164104 - DNA, 3689 bp, Homo sapiens
  Payload ID: 12308
  Gene Symbol: PDZD4
  Gene Name: PDZ domain containing 4
  Uniprot ID: Q76G19
  ENST ID: ENST00000164640
  CDS Start-End: 193-2502
agcgaagagttaacctgaggggcgagccgctgcccccacctcgggggcgtgcccccctcccccgctaggcggcccgccccccgcgccagggtatggcccctggccccggcccgggacccgaggtcccgcgcccgggtcagtgaaaggcgtcttcccgttcccgccctccgcctcctctcgccggccagcaacatgggatgtaatatgtgcgtggtccagaaaccggaggagcagtacaaagtgatgctgcaggtgaacgggaaggagctctccaagctgtctcaggagcaaactctgcaggccctgcgctcctccaaggagcccctggtgatccaggtgctgagacgcagcccccgcctccggggggacagctcctgtcacgacctgcagctggtggacagtggcactcagaccgacatcaccttcgagcatatcatggcgctgggcaagctgcgtccgcccaccccgcccatggtcatcctggagccccccccaatcagccatgagtattatgacccggcggagtttatggagggcggcccgcaggaggcagaccgcttggatgagctggagtatgaggaggtggagctgtataaaagcagccaccgggacaagctgggcctgatggtttgctaccgcacggacgacgaggaggacctgggcatttatgtcggagaggtaaatcccaacagcattgcagccaaagacggccggatccgtgagggagaccgcatcatccagattaacggtgtagacgtccagaaccgggaagaggcggtggccatcctgagccaggaagagaacaccaacatctccctgctggtggcccgacctgagagtcagctggcgaaaaggtggaaggacagcgaccgggatgacttcctggatgactttggctctgagaatgagggggagctgcgtgctcgtaaactgaaatcaccccctgcccagcagcccggaaacgaagaggagaagggggctcccgatgccggcccaggcctgagcaacagccaggagctggacagcggggtgggccggactgacgagagcacccggaacgaagagagctctgagcacgacctgctgggggacgaacccccgagctccaccaacaccccgggaagcctgcgcaagtttggcctgcaaggggacgccctgcagagccgggacttccatttcagcatggactctctgctggccgagggggcggggctgggagggggcgacgtcccgggcctcacggatgaggagtatgagcgctaccgtgagctcctggagatcaagtgccacctggagaacggcaaccagctgggcctcctctttccccgggcctccggaggcaacagcgccctggacgtcaaccgcaacgagagcctgggccacgagatggccatgctggaggaggagctaaggcacctggaattcaagtgccgcaacatactgcgggcgcagaagatgcagcagctgcgtgagcgctgcatgaaggcctggctgctggaggaggagagcctctacgacctggcggccagcgagcccaagaagcacgagctgtccgacatctccgagctgcccgagaagtcggacaaggacagcaccagcgcctacaacactggggagagctgccgcagcaccccgctgcttgtggagcccctgcccgagagccccctgcggcgggccatggccggcaactccaacttgaaccggacccctcccggccccgctgttgccacccccgccaaggcagctcctccaccggggagccccgccaagttccggtccctctcccgggatcctgaggccggccggaggcagcacgcggaggagcgcggccgccgcaaccccaagacggggttgaccctggagcgtgtgggccctgaaagcagcccttacctctcgcggcgccaccgcggccagggccaggagggcgagcactaccacagctgcgtgcagctggccccgacgcgaggcctggaggagctgggccacggccccctgagcttggccggtggccctcgggtgggcggggtggcggccgcggccactgaagcaccgcgcatggagtggaaagtgaaggtgcgcagcgacggaacccgctacgtggccaagcggcccgtgcgagatcggctgctgaaagcccgtgccctgaagatccgggaggagcgcagcggtatgacgaccgacgacgacgcggtgagcgagatgaagatgggccgctactggagcaaggaggagcggaagcagcacctgatccgggcccgtgagcagcggaagcggcgcgagttcatgatgcagagccggctggagtgcctgcgggagcagcagaatggcgacagcaagcccgagctcaacatcattgccctgagccaccgcaaaaccatgaagaagcggaacaagaagatcctggacaactggatcaccatccaggagatgctggcccacggcgcgcgctccgccgatggcaagcgggtctacaaccctcttctctcagtcaccaccgtgtgagctgcccgggcgggtacacggcccaggcccagggaaccccctggggccccggccctcactctcctatagagattgtgtgtgtgtgtgtgtgcgcgcgcgcgtgctcgctgtgcgcacgcacacatctcctcgtctgggtgtgcgcacagggctttgttagcagagagaagcccctgaggagaagggacgcttttcttccttctgcccaagtaaagtgaccatgccagtggccagcactgggggcacacctgtgatgggcaccccttcagctgtgcgtgtgcattccccatcccccatgctcttgcgtgtgcttgcacgtgcacgcacacacacacccagtgctctctccacccgacccgtgtacttgcagacagggaagctgagctgaaaggagcacaagagagtgtccggcttcgctgctgagcgcggcctctccccgccgctgcgcactgcagttatttgtagacaaaggcacccctgatttttgtggtttttctccctttctgtgcttgccaatagttgttttgttttgtggacctgccctgggggctggcagctccttcaggcagcctggcagaagtggaactcccctctccactgatggctgggaagggagttggggaggaagagtgggagggagggctggggatggatgggagggaaggggagggaaaggtgggaggaatgggaagcagctgttctggtggcttccactctgaggtgtgggaacggggagcctctggggggcacctgtttccccagtgactcagagagagcaagactgcaggaacggaggggtcctgcagggtgtccaccaagaagtcacagagcccgttctgcgccccacaccatctggagcaggggcttctcttctgagtgaactgaggaaggtgcttagatggtgagggctctagaaaccaagccccatgagcagcagtggaagacctcgggccatgcggcctggggaggacttggtggcgatccgcaacctggaccccagtgagaggcggtgggctgactgggaaggagaggcccccaacctcctcaggatttgcacgtgtgaactaggctgcctgtggggtgccccttaggcttggagagccccagattggaggcagacagactgcaccaccccttccccccctgcatctcaagaataaagcaagctgcctttgtacttggttgaa

SEQ ID NO: 164105 - DNA, 3763 bp, Homo sapiens
  Payload ID: 12308
  Gene Symbol: PDZD4
  Gene Name: PDZ domain containing 4
  ENST ID: ENST00000393758
  CDS Start-End: 251-2578
cgctgccctttttctcctggccgggtgcgagggagcatgcccgcgcctggcctcggccagcgaagagttaacctgaggggcgagccgctgcccccacctcgggggcgtgcccccctcccccgctaggcggcccgccccccgcgccagggtatggcccctggccccggcccgggacccgaggtcccgcgcccgggtcagtgaaaggcgtcttcccgttcccgccctccgcctcctctcgccggccagcaacatgggatgtaatatgtgcgtggtccagaaaccggaggagcagtacaaagtgatgctgcaggtgaacgggaaggagctctccaagctgtctcaggagcaaactctgcaggccctgcgctcctccaaggagcccctggtgatccaggtgctgagacgcagcccccgcctccggggggacagctcctgtcacgacctgcagctggtggacagtggcactcagaccgacatcaccttcgagcatatcatggcgctgggcaagctgcgtccgcccaccccgcccatggtcatcctggagccgtacgtcctctctgagctccccccaatcagccatgagtattatgacccggcggagtttatggagggcggcccgcaggaggcagaccgcttggatgagctggagtatgaggaggtggagctgtataaaagcagccaccgggacaagctgggcctgatggtttgctaccgcacggacgacgaggaggacctgggcatttatgtcggagaggtaaatcccaacagcattgcagccaaagacggccggatccgtgagggagaccgcatcatccagattaacggtgtagacgtccagaaccgggaagaggcggtggccatcctgagccaggaagagaacaccaacatctccctgctggtggcccgacctgagagtcagctggcgaaaaggtggaaggacagcgaccgggatgacttcctggatgactttggctctgagaatgagggggagctgcgtgctcgtaaactgaaatcaccccctgcccagcagcccggaaacgaagaggagaagggggctcccgatgccggcccaggcctgagcaacagccaggagctggacagcggggtgggccggactgacgagagcacccggaacgaagagagctctgagcacgacctgctgggggacgaacccccgagctccaccaacaccccgggaagcctgcgcaagtttggcctgcaaggggacgccctgcagagccgggacttccatttcagcatggactctctgctggccgagggggcggggctgggagggggcgacgtcccgggcctcacggatgaggagtatgagcgctaccgtgagctcctggagatcaagtgccacctggagaacggcaaccagctgggcctcctctttccccgggcctccggaggcaacagcgccctggacgtcaaccgcaacgagagcctgggccacgagatggccatgctggaggaggagctaaggcacctggaattcaagtgccgcaacatactgcgggcgcagaagatgcagcagctgcgtgagcgctgcatgaaggcctggctgctggaggaggagagcctctacgacctggcggccagcgagcccaagaagcacgagctgtccgacatctccgagctgcccgagaagtcggacaaggacagcaccagcgcctacaacactggggagagctgccgcagcaccccgctgcttgtggagcccctgcccgagagccccctgcggcgggccatggccggcaactccaacttgaaccggacccctcccggccccgctgttgccacccccgccaaggcagctcctccaccggggagccccgccaagttccggtccctctcccgggatcctgaggccggccggaggcagcacgcggaggagcgcggccgccgcaaccccaagacggggttgaccctggagcgtgtgggccctgaaagcagcccttacctctcgcggcgccaccgcggccagggccaggagggcgagcactaccacagctgcgtgcagctggccccgacgcgaggcctggaggagctgggccacggccccctgagcttggccggtggccctcgggtgggcggggtggcggccgcggccactgaagcaccgcgcatggagtggaaagtgaaggtgcgcagcgacggaacccgctacgtggccaagcggcccgtgcgagatcggctgctgaaagcccgtgccctgaagatccgggaggagcgcagcggtatgacgaccgacgacgacgcggtgagcgagatgaagatgggccgctactggagcaaggaggagcggaagcagcacctgatccgggcccgtgagcagcggaagcggcgcgagttcatgatgcagagccggctggagtgcctgcgggagcagcagaatggcgacagcaagcccgagctcaacatcattgccctgagccaccgcaaaaccatgaagaagcggaacaagaagatcctggacaactggatcaccatccaggagatgctggcccacggcgcgcgctccgccgatggcaagcgggtctacaaccctcttctctcagtcaccaccgtgtgagctgcccgggcgggtacacggcccaggcccagggaaccccctggggccccggccctcactctcctatagagattgtgtgtgtgtgtgtgtgcgcgcgcgcgtgctcgctgtgcgcacgcacacatctcctcgtctgggtgtgcgcacagggctttgttagcagagagaagcccctgaggagaagggacgcttttcttccttctgcccaagtaaagtgaccatgccagtggccagcactgggggcacacctgtgatgggcaccccttcagctgtgcgtgtgcattccccatcccccatgctcttgcgtgtgcttgcacgtgcacgcacacacacacccagtgctctctccacccgacccgtgtacttgcagacagggaagctgagctgaaaggagcacaagagagtgtccggcttcgctgctgagcgcggcctctccccgccgctgcgcactgcagttatttgtagacaaaggcacccctgatttttgtggtttttctccctttctgtgcttgccaatagttgttttgttttgtggacctgccctgggggctggcagctccttcaggcagcctggcagaagtggaactcccctctccactgatggctgggaagggagttggggaggaagagtgggagggagggctggggatggatgggagggaaggggagggaaaggtgggaggaatgggaagcagctgttctggtggcttccactctgaggtgtgggaacggggagcctctggggggcacctgtttccccagtgactcagagagagcaagactgcaggaacggaggggtcctgcagggtgtccaccaagaagtcacagagcccgttctgcgccccacaccatctggagcaggggcttctcttctgagtgaactgaggaaggtgcttagatggtgagggctctagaaaccaagccccatgagcagcagtggaagacctcgggccatgcggcctggggaggacttggtggcgatccgcaacctggaccccagtgagaggcggtgggctgactgggaaggagaggcccccaacctcctcaggatttgcacgtgtgaactaggctgcctgtggggtgccccttaggcttggagagccccagattggaggcagacagactgcaccaccccttccccccctgcatctcaagaataaagcaagctgcctttgtacttggttg

SEQ ID NO: 164106 - DNA, 3418 bp, Homo sapiens
  Payload ID: 12308
  Gene Symbol: PDZD4
  Gene Name: PDZ domain containing 4
  Uniprot ID: Q76G19
  ENST ID: ENST00000544474
  CDS Start-End: 251-2233
cgctgccctttttctcctggccgggtgcgagggagcatgcccgcgcctggcctcggccagcgaagagttaacctgaggggcgagccgctgcccccacctcgggggcgtgcccccctcccccgctaggcggcccgccccccgcgccagggtatggcccctggccccggcccgggacccgaggtcccgcgcccgggtcagtgaaaggcgtcttcccgttcccgccctccgcctcctctcgccggccagcaacatgggatgtaatatgtgcgtggtccagaaaccggaggagcagtacaaagtgatgctgcaggaggtggagctgtataaaagcagccaccgggacaagctgggcctgatggtttgctaccgcacggacgacgaggaggacctgggcatttatgtcggagaggtaaatcccaacagcattgcagccaaagacggccggatccgtgagggagaccgcatcatccagattaacggtgtagacgtccagaaccgggaagaggcggtggccatcctgagccaggaagagaacaccaacatctccctgctggtggcccgacctgagagtcagctggcgaaaaggtggaaggacagcgaccgggatgacttcctggatgactttggctctgagaatgagggggagctgcgtgctcgtaaactgaaatcaccccctgcccagcagcccggaaacgaagaggagaagggggctcccgatgccggcccaggcctgagcaacagccaggagctggacagcggggtgggccggactgacgagagcacccggaacgaagagagctctgagcacgacctgctgggggacgaacccccgagctccaccaacaccccgggaagcctgcgcaagtttggcctgcaaggggacgccctgcagagccgggacttccatttcagcatggactctctgctggccgagggggcggggctgggagggggcgacgtcccgggcctcacggatgaggagtatgagcgctaccgtgagctcctggagatcaagtgccacctggagaacggcaaccagctgggcctcctctttccccgggcctccggaggcaacagcgccctggacgtcaaccgcaacgagagcctgggccacgagatggccatgctggaggaggagctaaggcacctggaattcaagtgccgcaacatactgcgggcgcagaagatgcagcagctgcgtgagcgctgcatgaaggcctggctgctggaggaggagagcctctacgacctggcggccagcgagcccaagaagcacgagctgtccgacatctccgagctgcccgagaagtcggacaaggacagcaccagcgcctacaacactggggagagctgccgcagcaccccgctgcttgtggagcccctgcccgagagccccctgcggcgggccatggccggcaactccaacttgaaccggacccctcccggccccgctgttgccacccccgccaaggcagctcctccaccggggagccccgccaagttccggtccctctcccgggatcctgaggccggccggaggcagcacgcggaggagcgcggccgccgcaaccccaagacggggttgaccctggagcgtgtgggccctgaaagcagcccttacctctcgcggcgccaccgcggccagggccaggagggcgagcactaccacagctgcgtgcagctggccccgacgcgaggcctggaggagctgggccacggccccctgagcttggccggtggccctcgggtgggcggggtggcggccgcggccactgaagcaccgcgcatggagtggaaagtgaaggtgcgcagcgacggaacccgctacgtggccaagcggcccgtgcgagatcggctgctgaaagcccgtgccctgaagatccgggaggagcgcagcggtatgacgaccgacgacgacgcggtgagcgagatgaagatgggccgctactggagcaaggaggagcggaagcagcacctgatccgggcccgtgagcagcggaagcggcgcgagttcatgatgcagagccggctggagtgcctgcgggagcagcagaatggcgacagcaagcccgagctcaacatcattgccctgagccaccgcaaaaccatgaagaagcggaacaagaagatcctggacaactggatcaccatccaggagatgctggcccacggcgcgcgctccgccgatggcaagcgggtctacaaccctcttctctcagtcaccaccgtgtgagctgcccgggcgggtacacggcccaggcccagggaaccccctggggccccggccctcactctcctatagagattgtgtgtgtgtgtgtgtgcgcgcgcgcgtgctcgctgtgcgcacgcacacatctcctcgtctgggtgtgcgcacagggctttgttagcagagagaagcccctgaggagaagggacgcttttcttccttctgcccaagtaaagtgaccatgccagtggccagcactgggggcacacctgtgatgggcaccccttcagctgtgcgtgtgcattccccatcccccatgctcttgcgtgtgcttgcacgtgcacgcacacacacacccagtgctctctccacccgacccgtgtacttgcagacagggaagctgagctgaaaggagcacaagagagtgtccggcttcgctgctgagcgcggcctctccccgccgctgcgcactgcagttatttgtagacaaaggcacccctgatttttgtggtttttctccctttctgtgcttgccaatagttgttttgttttgtggacctgccctgggggctggcagctccttcaggcagcctggcagaagtggaactcccctctccactgatggctgggaagggagttggggaggaagagtgggagggagggctggggatggatgggagggaaggggagggaaaggtgggaggaatgggaagcagctgttctggtggcttccactctgaggtgtgggaacggggagcctctggggggcacctgtttccccagtgactcagagagagcaagactgcaggaacggaggggtcctgcagggtgtccaccaagaagtcacagagcccgttctgcgccccacaccatctggagcaggggcttctcttctgagtgaactgaggaaggtgcttagatggtgagggctctagaaaccaagccccatgagcagcagtggaagacctcgggccatgcggcctggggaggacttggtggcgatccgcaacctggaccccagtgagaggcggtgggctgactgggaaggagaggcccccaacctcctcaggatttgcacgtgtgaactaggctgcctgtggggtgccccttaggcttggagagccccagattggaggcagacagactgcaccaccccttccccccctgcatctcaagaataaagcaagctgcctttgtacttggttg

SEQ ID NO: 164107 - DNA, 876 bp, Homo sapiens
  Payload ID: 12308
  Gene Symbol: PDZD4
  Gene Name: PDZ domain containing 4
  ENST ID: ENST00000480650
  CDS Start-End: 67-435
cgcgcccgggtcagtgaaaggcgtcttcccgttcccgccctccgcctcctctcgccggccagcaacatgggatgtaatatgtgcgtggtccagaaaccggaggagcagtacaaagtgatgctgcaggtgaacgggaaggagctctccaagctgtctcaggagcaaactctgcaggccctgcgctcctccaaggagcccctggtgatccaggtgctgagacgcagcccccgcctccggggggacagctcctgtcacgacctgcagctggtggacagtggcactcagaccgacatcaccttcgagcatatcatggcgctgggcaagctgcgtccgcccaccccgcccatggtcatcctggagccgtacgtcctctctgagctggccgagggaggaccctcctgtccgggacgtcgctgccggaagtgccagggttgagggcctcagctcctcctcctccatcctctctcctctgccgcctcacaagcatcactccttgaatcttcttgcatcccttgtctgtctcattcctctacctgctctgaatttcctccatctcttcagcttctttctttggcccgaccggaagaagggcctttcatccaggcctggtggctcatgaccgcccccccaatcagccatgagtattatgacccggcggagtttatggagggcggcccgcaggaggcagaccgcttggatgagctggagtatgaggaggtggagctgtataaaagcagccaccgggacaagctgggcctgatggtttgctaccgcacggacgacgaggaggacctgggcatttatgtcggagaggtaaatcccaacagcattgcagccaaagacggccggatccgtgagggagaccgcatcatccag

SEQ ID NO: 164108 - DNA, 2032 bp, Homo sapiens
  Payload ID: 12309
  Gene Symbol: PDZD7
  Gene Name: PDZ domain containing 7
  Uniprot ID: Q9H5P4
  ENST ID: ENST00000370215
  CDS Start-End: 227-1780
cggcagtagctctcgcctgcgggtggtttgacaaggctggcggcgccacaccagcgaccaggcctggagctcacacttctgagaggcatcgcaagcgagggccttcacgttactgagaccccagccccgcacagaggctcatggagctcgaagcacgcagggctggcctctccagagctagcagattccttctggacctgtagggtgccgccctagcccagccgccatggcgcagggtttcgcagtgggcttcgacccactgggcctaggagacctgagctccggctctctgagctccctctcctcccgaggccacctaggcagcgactcaggctccaccgcaacgcgatacctgctaaggaagcaacaacggctgctgaacgggcccccccgcggaatccgagcctcatcgcccatgggacgcgtcatcctcatcaactcccccatcgaagccaacagtgatgaaagtgacatcatccattcagtccgggtggagaagagtccagcagggaggctgggcttcagcgtgcgcgggggctcagagcatggcctgggcatcttcgtcagcaaagtggaggaaggcagcagtgcagagcgggctggcctgtgcgtgggggacaagatcacggaggtgaatgggctgagcctggagagcaccaccatgggtagcgccgtaaaggtgctgaccagcagcagccgcctgcacatgatggttcggcgcatgggccgtgtgccgggcatcaagttctccaaggagaagaccacgtgggtggatgtggtgaatcggcgcctggtagtggagaagtgcggttcaacaccctccgacaccagctcagaagatggtgtccggcgcatcgtccacctatacacaacctccgacgacttctgcctgggcttcaacatccgtgggggcaaggagtttggcctgggcatctatgtgtccaaagtggaccatggtgggctggccgaggagaatggcatcaaggtgggggaccaggtcctggcagccaacggtgtcaggtttgacgacatcagccacagccaggccgtggaggtgctgaagggccaaacgcacatcatgctgaccatcaaggagaccggccggtatcctgcctacaaggagatggtttctgagtactgctggctggaccgactgagcaacggggtgctgcagcagctgtccccggcctctgagagcagctccagcgtctcttcgtgcgcctccagcgccccctacagctcgggctccctgccgtcggaccgcatggacatctgcctcgggcaggaggagcccggcagccgcggcccaggctgggggcgggcggacacagccatgcagacggagcccgatgcgggaggccgggtggagacctggtgcagcgtgcggcccacagtcatcctcagggacaccgccatccgctcggacggcccccatcccggccgccgccttgactctgcgctctctgagtctcccaagacggctttgctgctggccctcagccgaccccggccccccatcacgcgctcccagagctatctgaccttgtgggaggagaagcagcagcggaagaaggagaagtcggggtcccctggggagaagggtgccctgcagcgctccaagacgctgatgaacctcttcttcaagggagggcggcaggggaggctagcgcgggacgggcgcagagaggcctggacactggacagcgggagcctggccaaaacttaccctcgcctggacatagagaaagagatgggggtttcaccctgttgcccaggctagtctcaaattcctggactgaagctatctacccgccttagtctcccaaagtgctaggattacagcgtgatctaccacacctggccaatcccaactactctggaagctgaagcagcaagatcacttgagcccaggagtttaagaccagcctgggcaacatagcaagaccctgtctctaaagaaaaaaaaaaagtaaaagaaaaataaagcacgtcttggctcagctgctgatttaagctgggtctaaacatctga

SEQ ID NO: 164109 - DNA, 624 bp, Homo sapiens
  Payload ID: 12309
  Gene Symbol: PDZD7
  Gene Name: PDZ domain containing 7
  ENST ID: ENST00000433616
  CDS Start-End: 1-624
gaccccggccccccatcacgcgctcccagagctatctgaccttgtgggaggagaagcagcagcggaagaaggagaagtcggggtcccctggggagaagggtgccctgcagcgctccaagacgctgatgaacctcttcttcaagggagggcggcaggggaggctagcgcgggacgggcgcagagaggcctggacactggacagcgggagcctggccaaaacttaccctcgcctggacatagagaaagcagggggcgtgggcccggtacagaagtttgtcacctggagactgagacgtgaccaggagaggggccgggccctgctgtctgccaggtctgggagtccctccagccagctgcctaatgtggatgagcaggttcaggcctgggagagccggcggcccctcattcaggacctggcccagaggctgctgactgatgacgaggtgctggctgtcacccgccactgctcccggtatgtgcacgagggaggcatagaggacctggtgaggcccctgctggccatcctcgacaggccggagaagctgctactgctgcaggacatcaggagtgtggtggcccccacagacctgggccgcttcgacagcatggtgatgcttgtggagc

SEQ ID NO: 164110 - DNA, 4433 bp, Homo sapiens
  Payload ID: 12309
  Gene Symbol: PDZD7
  Gene Name: PDZ domain containing 7
  ENST ID: ENST00000474125
  CDS Start-End: 199-600
tgacaaggctggcggcgccacaccagcgaccaggcctggagctcacacttctgagaggcatcgcaagcgagggccttcacgttactgagaccccagccccgcacagaggctcatggagctcgaagcacgcagggctggcctctccagagctagcagattccttctggacctgtagggtgccgccctagcccagccgccatggcgcagggtttcgcagtgggcttcgacccactgggcctaggagacctgagctccggctctctgagctccctctcctcccgaggccacctaggcagcgactcaggctccaccgcaacgcgatacctgctaaggaagcaacaacggctgctgaacgggcccccccgcggaatccgagcctcatcgcccatgggacgcgtcatcctcatcaactcccccatcgaagccaacagtgatgaaagtgacatcatccattcagtccgggtggagaagagtccagcagggaggctgggcttcagcgtgcgcgggggctcagagcatggcctgggcatcttcgtcagcaaagtggaggaaggcagcagtgcaggtaagcagaacccccaggctgaagtccacgcttaggatgtgactccaatctcagtgaatggcaggggatgctgctgtcagggacagacggaagagtccccagctctggagggcctgattgatggggagacagggccaaccctcaagtcagaatggtttaagggacagatccctaggcactgggaacactcagcccctgctctgacaatcctcactctgattgagaagctcagtttgaccccagggagctccatctgatgggggaggctcagccccaccctggggacccatgccagccactcccatcctgtggtgcagagcgggctggcctgtgcgtgggggacaagatcacggaggtgaatgggctgagcctggagagcaccaccatgggtagcgccgtaaaggtgctgaccagcagcagccgcctgcacatgatggttcggcgcatgggccgtgtgccgggcatcaagttctccaaggagaagaccacgtgggtggatgtggtgaatcggcgcctggtagtggagaagtgcggttcaacaccctccgacaccagctcagaagatggtgtccggcgcatcgtccacctatacacaacctccgacgacttctgcctgggcttcaacatccgtgggggcaaggagtttggcctgggcatctatgtgtccaagtgagggctgaggcaggaagtgtcttcgggtagaactgagaatggggtctggagtggggcctaggctgggatgtggggatggtcagcaagtgaggcctggccaaccacctgtctcagtgagggcctgggagggggcgggaggccccagtaggagggtcaaggaccttgactggtgcagtcttgtgtccaagagaagggggtctggagtggggtaacggagggcaggccaggggcctatcagactgacgcctgtctggcctcagagtggaccatggtgggctggccgaggagaatggcatcaaggtgggggaccaggtcctggcagccaacggtgtcaggtttgacgacatcagccacagccaggccgtggaggtgctgaagggccaaacgcacatcatgctgaccatcaaggagaccggccggtatcctgcctacaaggagatggtttctgagtactgctggctggaccgactgagcaacggggtgctgcagcagctgtccccggcctctgagagcagctccagcgtctcttcgtgcgcctccagcgccccctacagctcgggctccctgccgtcggaccgcatggacatctgcctcgggcaggaggagcccggcagccgcggcccaggctgggggcgggcggacacagccatgcagacggagcccgatgcgggaggccgggtggagacctggtgcagcgtgcggcccacagtcatcctcagggacaccgccatccgctcggacggcccccatcccggccgccgccttgactctgcgctctctgagtctcccaagacggctttgctgctggccctcagccgaccccggccccccatcacgcgctcccagagctatctgaccttgtgggaggagaagcagcagcggaagaaggagaagtcggggtcccctggggagaagggtgccctgcagcgctccaagacgctgatgaacctcttcttcaagggagggcggcaggggaggctagcgcgggacgggcgcagagaggcctggacactggacagcgggagcctggccaaaacttaccctcgcctggacatagagaaagtatgtgcacgagggaggcatagaggacctggtgaggcccctgctggccatcctcgacaggccggagaagctgctactgctgcaggacatcaggagtgtggtggcccccacagacctgggccgcttcgacagcatggtgatgcttgtggagctggaggcttttgaggccctcaagagcagggcagtccggcctcctgctttgagaccagcccggcaggacacgccacccaagcgtcaccttatcacccccgtgcctgccgcggaggcttctacctgctgccggtgaacggcttcccggaagaggaagataatggggagctgagggagcggctgggggccctcaaggtctccccaagtgcctctgcccctcgccacccccataaagggatcccccctctacaagacgtgccagtagatgccttcacccccctccgaattgcctgcacaccccctccccagctaccccccgtggctccccggcccctgcggcctaactggctgctgacagaacccctgagccgagagcaccctccgcagagccagatccggggccgggctcagagccgtagccgcagccgtagccgcagccgcagccgcagcagccggggtcaaggcaagtctccaggtagacgctccccatccccggtgcctacccctgcccccagcatgaccaatgggcgctaccacaagcctcggaaggccagaccccctctgccacgacctctggatggggaggcagccaaggtgggggccaagcaagggccctcggagagtggaactgaggggacggccaaggaggcagccatgaagaaccccagtggcgagctgaagacagtgacactgtccaagatgaagcagtccttaggtatcagcatttctgggggcattgagtccaaggtgcagcccatggtgaagatagagaagatcttccctgggggggccgctttcctcagtggggccctgcaggctggcttcgagcttgtggcagtggacggagagaatctagagcaggtgacccaccagcgtgcagtagacaccatccgtcgggcttatcgaaacaaggcccgggagcccatggagcttgtggtcagggtccccgggcccagcccacggccctcaccctctgactcatcagcccttactgatgggggccttcctgctgaccacttgcctgcccaccaaccccttgatgctgctccagttcctgcccactggctcccagaacctcccaccaatccccagactcctcccactgatgccaggctcctccagccaactcccagcccagccccctccccagccctccagactcctgattctaagcccgcaccctccccacgcatcccatgaccctccccctaacctcagattcacccactgactccagcatcccgttatccccaggacctctcctaccaacttcttcaggactctccagctcctgcccaccctgcctcctcccagtgccacactggtggctcacatctttccactttcttccctcctcagctgtcattaaggctctgccttagtgtccaaggacaaggtgctagtgggcagcctgtgtcacctgcactcactgctccccaacctcccaagccaggatagggggtgagaaagccaaggtctggagcttgggattggtgggcactttctcacatgctgtcccttatgagtcgcccaagcctccagggacacagactctcagacagggccctgaaggggtcaatgcatccattcctcaaccccaagcagcattctgtgcaaggaaacggatgaaaggcttttctagtccctgaaatcctgagagatcatttcacgttggggtccactaagacctcagacattctactggatttgtccttcctccatcaccttttctccccaagagagctctatgagggggaggagaatagccagcaaatggtgggggggggggggtcaaacaagttcctgtactctttatccagcacattcacattatttttaaacaaaaaaattttttttaattttttctttgggtttgtacaagaaatttacagtgtgaaaaatatacaagtgaaaacgaggccataaacctgggtgaagggagaggctgcttggtcacaaacacaaataaacaagacatttctga

SEQ ID NO: 164111 - DNA, 1057 bp, Homo sapiens
  Payload ID: 12309
  Gene Symbol: PDZD7
  Gene Name: PDZ domain containing 7
  ENST ID: ENST00000470414
  CDS Start-End: 208-753
cgggtggtttgacaaggctggcggcgccacaccagcgaccaggcctggagctcacacttctgagaggcatcgcaagcgagggccttcacgttactgagaccccagccccgcacagaggctcatggagctcgaagcacgcagggctggcctctccagagctagcagattccttctggacctgtagggtgccgccctagcccagccgccatggcgcagggtttcgcagtgggcttcgacccactgggcctaggagacctgagctccggctctctgagctccctctcctcccgaggccacctaggcagcgactcaggctccaccgcaacgcgatacctgctaaggaagcaacaacggctgctgaacgggcccccccgcggaatccgagcctcatcgcccatgggacgcgtcatcctcatcaactcccccatcgaagccaacagtgatgaaagtgacatcatccattcagtccgggtggagaagagtccagcagggaggctgggcttcagcgtgcgcgggggctcagagcatggcctgggcatcttcgtcagcaaagtggaggaaggcagcagtgcagagcgggctggcctgtgcgtgggggacaagatcacggaggtgaatgggctgagcctggagagcaccaccatgggtagcgccgtaaaggtgctgaccagcagcagccgcctgcacatgatggttcggcgcatgggccgtgtgccgggcatcaagttctccaaggagaagaccacgtggtgagcagcaactccctcatcctagccctggccttgccccagcccaccccaaccctaccaacacccaaaacccactggcaggagaggcttctgttcctcctgctcgctggctcaggaaacgcaggggatccaaaggcctgacctcaaaataaggagaggctgcatctttcccctgccctcctccaatagctctgctctcccagatcccagtggttctgctgccacattgccgctgctcctgctgtgaaacccagaggcaaaacaccacctctctacaggggtgctgtaaggattagaaatggggccta

SEQ ID NO: 164112 - DNA, 4135 bp, Homo sapiens
  Payload ID: 12309
  Gene Symbol: PDZD7
  Gene Name: PDZ domain containing 7
  Uniprot ID: Q9H5P4
  ENST ID: ENST00000619208
  CDS Start-End: 251-3352
agcgtgggtggggtttgccggctgcggcagtagctctcgcctgcgggtggtttgacaaggctggcggcgccacaccagcgaccaggcctggagctcacacttctgagaggcatcgcaagcgagggccttcacgttactgagaccccagccccgcacagaggctcatggagctcgaagcacgcagggctggcctctccagagctagcagattccttctggacctgtagggtgccgccctagcccagccgccatggcgcagggtttcgcagtgggcttcgacccactgggcctaggagacctgagctccggctctctgagctccctctcctcccgaggccacctaggcagcgactcaggctccaccgcaacgcgatacctgctaaggaagcaacaacggctgctgaacgggcccccccgcggaatccgagcctcatcgcccatgggacgcgtcatcctcatcaactcccccatcgaagccaacagtgatgaaagtgacatcatccattcagtccgggtggagaagagtccagcagggaggctgggcttcagcgtgcgcgggggctcagagcatggcctgggcatcttcgtcagcaaagtggaggaaggcagcagtgcagagcgggctggcctgtgcgtgggggacaagatcacggaggtgaatgggctgagcctggagagcaccaccatgggtagcgccgtaaaggtgctgaccagcagcagccgcctgcacatgatggttcggcgcatgggccgtgtgccgggcatcaagttctccaaggagaagaccacgtgggtggatgtggtgaatcggcgcctggtagtggagaagtgcggttcaacaccctccgacaccagctcagaagatggtgtccggcgcatcgtccacctatacacaacctccgacgacttctgcctgggcttcaacatccgtgggggcaaggagtttggcctgggcatctatgtgtccaaagtggaccatggtgggctggccgaggagaatggcatcaaggtgggggaccaggtcctggcagccaacggtgtcaggtttgacgacatcagccacagccaggccgtggaggtgctgaagggccaaacgcacatcatgctgaccatcaaggagaccggccggtatcctgcctacaaggagatggtttctgagtactgctggctggaccgactgagcaacggggtgctgcagcagctgtccccggcctctgagagcagctccagcgtctcttcgtgcgcctccagcgccccctacagctcgggctccctgccgtcggaccgcatggacatctgcctcgggcaggaggagcccggcagccgcggcccaggctgggggcgggcggacacagccatgcagacggagcccgatgcgggaggccgggtggagacctggtgcagcgtgcggcccacagtcatcctcagggacaccgccatccgctcggacggcccccatcccggccgccgccttgactctgcgctctctgagtctcccaagacggctttgctgctggccctcagccgaccccggccccccatcacgcgctcccagagctatctgaccttgtgggaggagaagcagcagcggaagaaggagaagtcggggtcccctggggagaagggtgccctgcagcgctccaagacgctgatgaacctcttcttcaagggagggcggcaggggaggctagcgcgggacgggcgcagagaggcctggacactggacagcgggagcctggccaaaacttaccctcgcctggacatagagaaagcagggggcgtgggcccggtacagaagtttgtcacctggagactgagacgtgaccaggagaggggccgggccctgctgtctgccaggtctgggagtccctccagccagctgcctaatgtggatgagcaggttcaggcctgggagagccggcggcccctcattcaggacctggcccagaggctgctgactgatgacgaggtgctggctgtcacccgccactgctcccggtatgtgcacgagggaggcatagaggacctggtgaggcccctgctggccatcctcgacaggccggagaagctgctactgctgcaggacatcaggagtgtggtggcccccacagacctgggccgcttcgacagcatggtgatgcttgtggagctggaggcttttgaggccctcaagagcagggcagtccggcctcctgctttgagaccagcccggcaggacacgccacccaagcgtcaccttatcacccccgtgcctgacagccgcggaggcttctacctgctgccggtgaacggcttcccggaagaggaagataatggggagctgagggagcggctgggggccctcaaggtctccccaagtgcctctgcccctcgccacccccataaagggatcccccctctacaagacgtgccagtagatgccttcacccccctccgaattgcctgcacaccccctccccagctaccccccgtggctccccggcccctgcggcctaactggctgctgacagaacccctgagccgagagcaccctccgcagagccagatccggggccgggctcagagccgtagccgcagccgtagccgcagccgcagccgcagcagccggggtcaaggcaagtctccaggtagacgctccccatccccggtgcctacccctgcccccagcatgaccaatgggcgctaccacaagcctcggaaggccagaccccctctgccacgacctctggatggggaggcagccaaggtgggggccaagcaagggccctcggagagtggaactgaggggacggccaaggaggcagccatgaagaaccccagtggcgagctgaagacagtgacactgtccaagatgaagcagtccttaggtatcagcatttctgggggcattgagtccaaggtgcagcccatggtgaagatagagaagatcttccctgggggggccgctttcctcagtggggccctgcaggctggcttcgagcttgtggcagtggacggagagaatctagagcaggtgacccaccagcgtgcagtagacaccatccgtcgggcttatcgaaacaaggcccgggagcccatggagcttgtggtcagggtccccgggcccagcccacggccctcaccctctgactcatcagcccttactgatgggggccttcctgctgaccacttgcctgcccaccaaccccttgatgctgctccagttcctgcccactggctcccagaacctcccaccaatccccagactcctcccactgatgccaggctcctccagccaactcccagcccagccccctccccagccctccagactcctgattctaagcccgcaccctccccacgcatcccatgaccctccccctaacctcagattcacccactgactccagcatcccgttatccccaggacctctcctaccaacttcttcaggactctccagctcctgcccaccctgcctcctcccagtgccacactggtggctcacatctttccactttcttccctcctcagctgtcattaaggctctgccttagtgtccaaggacaaggtgctagtgggcagcctgtgtcacctgcactcactgctccccaacctcccaagccaggatagggggtgagaaagccaaggtctggagcttgggattggtgggcactttctcacatgctgtcccttatgagtcgcccaagcctccagggacacagactctcagacagggccctgaaggggtcaatgcatccattcctcaaccccaagcagcattctgtgcaaggaaacggatgaaaggcttttctagtccctgaaatcctgagagatcatttcacgttggggtccactaagacctcagacattctactggatttgtccttcctccatcaccttttctccccaagagagctctatgagggggaggagaatagccagcaaatggtgggggggggggggtcaaacaagttcctgtactctttatccagcacattcacattatttttaaacaaaaaaattttttttaattttttctttgggtttgtacaagaaatttacagtgtgaaaaatatacaagtgaaaacgaggccataaacctgggtgaagggagaggctgcttggtcacaaacacaaataaacaagacatttctg

SEQ ID NO: 164113 - DNA, 9699 bp, Homo sapiens
  Payload ID: 12310
  Gene Symbol: PDZD8
  Gene Name: PDZ domain containing 8
  Uniprot ID: Q8NEN9
  ENST ID: ENST00000334464
  CDS Start-End: 241-3705
ggtcccggccccgctgccgccgccgccacaccggcccttcgggagcgtctgaggaggcgcgggccgctgcgggctcgggcgccgcagcgcgccggcccgagcccctggacgaggcccacggagccgctcgccccgacccagccgcccgatgtcctcaaaatggaggcagcgggggcggcggcgtgaagaaagcggcgctgtgggcgcgggagtaggggcccgggcggaggcggtggcgggatggggctgctgctcatgatcctggcgtcggccgtgctgggttccttcctcacgctcctcgcccagttcttcctgctgtaccgcagacagcccgagccgccggcggacgaggccgcccgcgcgggcgagggcttccgctacatcaagccagtgccgggcctgctcctaagggagtacctttatggcggcggccgggatgaggagccctccggagcggcccctgagggcggcgcgacccccaccgcggcccccgagacccccgccccgccgacgcgggagacttgctacttcctcaacgccaccatcctattcctgttccgggagttgcgggacaccgcgctgacccgccgctgggtcaccaagaagatcaaggtggagttcgaggagctgctgcagaccaagacggccgggcgcctgctggaggggctgagcctgcgggacgtgttcctgggcgagacggtgcccttcatcaagaccatccggctcgtgcggccagtcgtgccctcggccaccggggagcccgatggccctgaaggggaggcgctgcccgccgcctgccccgaggagctggccttcgaggcggaggtggagtacaacgggggcttccacctggccatcgacgtggacctggtcttcggcaagtccgcctacttgtttgtcaagctgtcccgcgtggtgggaaggctgcgcttggtctttacgcgcgtgcccttcacccactggttcttctccttcgtggaagacccgctgatcgacttcgaggtgcgctcccagtttgaagggcggcccatgccccagctcacctccatcatcgtcaaccagctcaagaagatcatcaagcgcaagcacaccctaccgaattacaagatcaggtttaagccgttttttccataccagaccttgcaaggatttgaagaagatgaagagcatatccatatacaacaatgggcacttactgaaggccgtcttaaagttacgttgttagaatgtagcaggttactcatttttggatcctatgacagagaggcaaatgttcattgcacacttgagttaagcagtagtgtttgggaagaaaaacagaggagttctattaagacggttgaattaataaaaggaaatttacaaagtgttggacttacacttcgtcttgtccagtcaactgatgggtatgctgggcacgtcatcattgaaactgtggctccaaactcgcctgctgcaattgcagatcttcagcggggagatcgacttatcgccattggaggtgtgaaaatcacatcaacactgcaagtgttgaagcttatcaagcaggctggtgaccgagtcctggtgtactatgaaaggcctgttggccagagtaatcaaggtgcagtgctgcaagataactttggccagttggaagaaaactttttgtcaagctcatgccaatcgggttatgaagaggaagctgccgggttgacagtagatactgaaagtagagagctggattctgaatttgaagacttggcaagtgatgtcagagcacaaaatgagttcaaagatgaggcacaatcattaagtcatagtcccaaacgtgttccaacaacactttctattaaaccccttggagctatatcaccagttttaaaccgtaaattagctgtaggaagtcacccactaccaccgaaaattcagtccaaagatggaaataaacctccacccctaaaaacttctgagataacagacccagcacaagtgtcaaaaccaacccaaggatctgctttcaaaccacctgtgccaccacgaccacaagcgaaagttcctttgccttccgccgatgctccaaatcaggcagaaccagatgttctcgttgaaaagccagagaaggtggtgccacctcctcttgtagataaatctgctgaaaagcaagcaaaaaatgtggatgccatagacgatgcagctgcacctaagcaatttttagcaaagcaagaagtggccaaagatgtcacttcagaaacttcctgccctactaaggacagttcggacgaccgtcaaacatgggaatcatcagaaattctttatcgtaataagctaggaaaatggacaagaaccagagcatcctgtttgtttgacatagaagcctgtcacaggtacttaaacattgcattgtggtgcagggatcctttcaagttgggaggtctcatctgtttggggcatgttagtttaaaacttgaagatgtggctttaggatgcctagctacatcaaacacggaatacctttccaaattgagactggaagccccctcacctaaggctatagtcactagaaccgcactacgcaatctgagtatgcaaaagggattcaatgacaaattttgctatggtgacattactattcacttcaaatatttgaaagaaggagaatcagaccaccatgtagttactaacgtagaaaaagaaaaagaaccccatttggttgaagaagtttctgttctccctaaagaggagcaatttgttggacagatgggtttaacagaaaacaaacacagttttcaggatactcagttccagaacccaacatggtgtgactactgtaagaaaaaagtttggactaaagcagcttcccagtgtatgttttgtgcttatgtttgccataaaaaatgtcaagaaaagtgtctagctgagacttctgtttgtggagcaactgataggcgaatagacaggacactgaaaaaccttaggctggaaggacaggaaaccctcttaggcctgcctcctcgtgttgatgctgaagctagcaagtcagtcaataaaacaacaggtttgacaaggcatattatcaatactagttctcgtttattaaatttgcgtcaagtctctaaaactcgcctttctgaaccaggaaccgatctcgtagaaccttcaccaaaacacacacccaacacgtcagacaacgaaggcagtgacacggaggtctgtggtccaaacagtccttctaaacggggaaacagcacaggaataaagttagtgagaaaagagggtggtctggatgacagtgttttcattgcagttaaagaaattggtcgtgatctgtacaggggcttgcctacagaggaaaggatccagaaactagagttcatgttggataagctacagaatgaaattgatcaggagttggaacacaataattcccttgttagagaagaaaaagagacaactgatacaaggaaaaaatcacttctttctgctgccttagctaaatcaggtgaaaggctacaagctctaacacttcttatgattcactacagagcaggcattgaagatatagaaactttagaaagtctgtctttagaccagcactccaaaaaaataagcaagtacacagatgatacagaagaagaccttgataatgaaataagccaactaatagactctcagccattcagcagcatatcagatgacttatttggcccatccgagtctgtgtagcagacaggtctatttaagctttcaaatgaacagggtaaagttgcatctaaagtaccacagatacaaccatgtttaaatcctcgtatgcactctggcctgcttctccagttacttgcttgtgtaagaacaaaaatgagaaaggttgttttccagtaaaaacatgaccagcttactaattggttgttttggattgcatttatagctatgcttttttgggtttatactgggaatttatttttactaaattatttaacttttctaattatgtaattatgtaagctagcttttcatgtttatgtatgtatggtgtccccttgtgttatttttcttcctcttggtttttgaattagtgttaaatagaatactgtctagattcttaaaatattttcatttccatcatggttataacaaatttgctgcatgcccaaactgacaacagcaatcactgagggaacaggttttgaatctttcttttgtgttatgaagtttatcgtctctacttgcttgagatttttgttattttgggggtttgggggtgctttttgttttgtttttgccaaatgtaacatgaaagcagatgctgcagctttagtctgttatgctgatttagtaaaaaaaaattttttacatatattgcttgctttcgatgcttctgtgaaatttttttctaaagcttttgtgcagctgtatggtaaaaatatggtgattaatttgaagagcttacattgaaagacaatgtaataggaaataaatgtagattgcagttggtcaagaattttgtagagaggataacaagacttaattactgaaaaacagtaacatagcattttgaaatataatcttttaaaatattgatgctttccttttaaatggaaatttaaattttataattaaaagtttaaacatttatgataattttcctcatcagttctcccataggaaataaagcatgtgaaagggtatttaaagttttggaggactctttttaaaatgactgtgttgataactagtttgggctggttttgttttagaaaaaacattttcatgtaggagtattctgtgaaggaaaggaatcatgcaaaatatactttttgctttggcgtcttacagttgtaaaggaatggtgatcattctgaatacttctgtagtgagtattcattaagaaaagaatgacaaaaatagtattcatacataggaattgggaccagttctctgaaaatgaagatatactcacactgggtccattttacgggtcccagtaacatttgactgagggaaaacaagtaagctcgactgttgttggggtaccttaatggtttcggtctgttatatacctataaaatagacaagtatatgtttgtccctttgtaggtaactgctatgatgattgctatatagtgaaactgacatgagtttaaaactagatggagcagcttttattgctggcaggaaaaagcatggtgtaatattaaggactggggcccaggtctagactccaggactccataaaagagtttaagttcaagcccttccattaatgaactgtgtaagcataggcagttacaaaaggacccatctctaaaatgggaataataatactttacctccctcacagtattgttgtgagggaaacaatagcataactgcaaaagtgctttgaacagtaaaaagatatacaagtaaaaggcattatttatatgagtaagaaagacatttttgaggggagaaaagttattccactttaaaaatcaatagccaagtctcatgccttttgttactttagtaagcgaaaatttcaggtactaaatacctttcttagccaagtttataacaaaaacatctcagtatacttcattacttatttaagcgtgatgtcttttttttttttttttttttttttttttttttttttttttgagacagagtctcgctgtctcccaggctggagtgcagtggcatgatctcggctcactgcaagctccgcctcccaggttcacgccattctcctgcctcagcctccggagtagctgggagtacaggcgcggctaattttttgtatttttagtagagacggggtttcaccatgttagccaggatggtctcgatctcctgacctcgtgatccacctgcctcggcctcccaaagtgctgggattacaggcgtgagccaccacgcccggccacgtgatcttattttaaaagaacactgctatagaagaatttacacaccaaattccctgaaagctaaagtattgttccataacttacacttgaggcaatctgctcagtgtgtaaccactttataaaaaataacttaccattgataacctggaaggtggactacttgtaagtagctggtgtttattgattaaaccatggaagttttcatgatacccaagcatgttgctgaaactgatgcatttgaaagagctgttgaaataatgcaaaactttggttttataagaatctactcatgttttaaaagtatttaactctgtagaccacaattatagaaagctcagtaatgctgctaatgacatttgtaaactatatctgtaatgtagtgcaatatttttatatttcactgggagaggcagtagagacatcatagttgtactttagtgcaagtgggggaacactccaaatagcctagagtatagtaaggtacaaagcttcaatgaaaaaagctgtattatattacattactgatgtaatcttgctgccatgctatgtatcaatagctaaaaaataataataaagactaccacagaaaacaagaatatcttcatttaatgaaatctttaaaaaaggtgattgctgcatctctatggaattatcttctggtataatttggccatgcagaaaagcataacaaagtccacttttcctaaacaaaattgctgttttgcagactgccccaaaacatttttttactattgtttccttatggattatcaagtttatgggtttcctttggctatgtattagtaattagactttaaaatatattttctacattagtattagctgagtgaatggcttagacaaactgagcaacattttagcattattagcaatcataataggctatacttcttcatatcaagccttatattcaatatcagaagtacttgaaataagtggctattttgtgatgctgggaggagaaaacacaacctaaaaattttgaggggtactatcaagttctaaatgtatagctgaattttttttaaagcaatttggaaatatttggctcttaaaaataagataaataataaaatgttaagtcccctaaaagtgaataaattttaaatacctacttttaaaaatactgtcttctaaattgacataattgcttttcttaccaaaagaaggagaggttcccctaattccttttgggccatagatccgcttttaggatctgattaaagatgtggactttcaccgcaggaagatacccatgggcacaccattcaaaatgtatcagatttcaacggttttacaaactcccccgggattaagtcaaatgggtggatattacagctgttttcatcagatatggttatttgttgacaaccatcaggacaacaatgtttatagatggaaggataacttcctggtttttttccacattgaatgtggctagttacatatctcaatttaaaataaattgtggaaagccaaaaaagtatggtcaagctaacctggggtggcttttacctgatgcctacaagcacagaaaaatagtttttaattaaatatccacagtcaaaatgataccttatgtattttattccaacaacatttggtttataaaggaatacaaacaggcacaaaacatggttcagaagatttattaagtaaacttgctaaaatatggacagatacacttagcagtcaaacagttgaatattcattgctacctcattaaagtttttgtatctgtattaccaggtccaaacataaaaaccacctctgttcaaaaaataaatgttcagagagctgtatgttctttgttctggtatgtacattttaaaaaaacacctctttccagtcttgctaaccaagaatattagtcatataaaagaacttagaatttttttccccaagtacaagctatcttttgctccaaaacagttctgaaggttttatttatattttatcttatcccgagggaccaacagcaggcatacctttgccaggccttcttgcagaaagacacagagccgtaaaggcaaaaataaaattgcaataaagtatatggtattgggggcagggagaaccagaaaccctcaaagagaaccaatttgtagcacgttcttttttaaggctctacccctgtagaagtaagaaactagcctgcctttttagccatatgagagtttcctccagagccatcttccaaagtggcagacttggccaagttgcccaatgccaaataagtgagttggaagttcgtttgcttcaaacacactgcacttagaaaccagacttgaaataatcgaagccccacagaaaagcttcatgaaacgaagtgttactttcctagagaataagaaagtcacaagattgaggagtctgttctaaagttctttgctccttgatgtcgaagttaacacaaacacaatcttagcttaacgaaactaagtaatttttgtttatgattatagaactgcaggattcacaagtagtattagagacattccacactgcacactccagtcatatctcttaacaaaatgacataaattgacaatgttcactaacagtatttgctgttacactgaaaaggcacatcaatgttgtcatgcttagaaaaatacacaacactgcacactggatgatatagttagcacatacatttttagatgttccatttttcttttctgcctgatcactattatttttacttcttaatatatgattcaagacataatttcattcttcattttcatttaaaatttgtcttcacattgatgtgaacaactttcaggagtctaaaaaatagtagtttcagacaacctaaaataaatatattcctagaaaacacttggatgacctgcaaacagatcaaagatatagtcagatattaaagtcagagcagctgttttcagcttcttgtttccttttctaaaacttgaagtagatggcgattaaccttatcatgtttaaacaaccttgacagtataaggtacatgtaccctcaattttcttcatccagtaagacaagtatgcatcttaaagggaaagcttttagttcataacaatatgtttggttgcttttctctgctttcggaacatttactgtttttcctttattggctttagtgtttgctgccaaccagataacatgttaacatataatttacaactctctctaggtaggtgattacatagaaaactaatgccagctaagatttatggattcaaaagataactgacacaagttcttgtcctctacacttgagagaactagctgtttaacgcataaatatattgatagtaactacaagttaaataacattcagtgtcactatataacatgctgtcttacttgattctgtttttcagacttcattctagtttctctttgttggaagagtctcagagataatgtgtgctttaattttaaacactcattaccaatatgatttttgcccaaatgtttgttaatgtaagttaaaaaattatatttggtttggattcaaatatttatagatttacacaatacctatttcatcaaaatatattgtatgatatttaataaaattaaatacataaaataaagtttcaacactatttatacaaacccctagaaaagcttctttttctttataaggctgttggcaatcgaccataaccatggaaaggaaataataacctttggttttactctttcaccagggatggatggtatgactaagacagttctggatgagttgtgtcactggaaacactgttttatacaattaaacactttgatgatttttgagga

SEQ ID NO: 164114 - DNA, 1260 bp, Homo sapiens
  Payload ID: 12311
  Gene Symbol: PDZD9
  Gene Name: PDZ domain containing 9
  Uniprot ID: Q8IXQ8
  ENST ID: ENST00000424898
  CDS Start-End: 64-858
attgggactgactccagcctctgctccgggaggccctcccgggctgcctgacctcccgggaccatgcagaaggcctcccacaaaaacaaaaaagaaagaggagtcagcaacaaggtcaaaacatctgtacacaacttgagcaaaacacagcagaccaaactcactgtgggtagcctgggattaggcctcatcatcatccagcatggaccctacctccagatcacccacctcatcaggaagggggctgcagccaacgacgggaaactccagccaggtgatgttctgattagtgttggccatgccaatgtgttaggatatactcttcgagaatttttacagcttttgcaacatatcactattggaacagtgctacaaatcaaggtttaccgagattttattaacattcctgaagaatggcaagaaatatatgatttaatccctgaggccaaattcccagtaacaagcacaccaaagaaaattgagctggcaaaagatgaatctttcacaagcagtgatgataatgaaaatgtagatttagataaaagacttcaatattatagatatccgtggtcaactgtgcatcaccctgcaaggagaccaatatccatctccagagactggcatggatataagaagaagaaccatactattagtgtaggaaaagacattaattgtgacgtgatgattcacagagacgacaagaaagaagtgagggccccttctccatactggataatggtgaagcaagacaatgaaagctcttcctcctctacctcctctacctcagatgcattttggctggaagattgtgcccaagttgaagagggtaaagcccaactggtatcaaaggttggttagcaaatctgtggtcatatgagcatttatcttgcagacacccaagttttgtgcctcaccaggcacaagtttgctgtacttatcaaggactgtctgtagactcaccaattctcttctcttatgactgcgttataaagcctttagagatgttcttcaacaggattatctaaagacttccttgggttcttgcaggcctcacaaatcttattttcagaataagaccctcctttttgagaagaatttctttcttttagaaaatgccgtagagaaatccaatatcagaatgtctgaacatagtagagaatgtcactttatgtaaacactacatttttctttaaatatttagtttctctcttttttttggtaaacttcaagtactataattaaaataactaagagacataa

SEQ ID NO: 164115 - DNA, 1331 bp, Homo sapiens
  Payload ID: 12311
  Gene Symbol: PDZD9
  Gene Name: PDZ domain containing 9
  ENST ID: ENST00000523914
  CDS Start-End: 64-357
attgggactgactccagcctctgctccgggaggccctcccgggctgcctgacctcccgggaccatgcagaaggcctcccacaaaaacaaaaaagaaagaggagtcagcaacaaggtcaaaacatctgtacacaacttgagcaaaacacagcagaccaaactcactgtgggtagcctgggattaggcctcatcatcatccagcatggaccctacctccagatcacccacctcatcaggaagggggctgcagccaacgacgggaaactccagccaggctgtacaggaagcatggctggggaggcctcaggaaacttacaatcatggcagaaggtgaagaggaaggaggtgatgttctgattagtgttggccatgccaatgtgttaggatatactcttcgagaatttttacagcttttgcaacatatcactattggaacagtgctacaaatcaaggtttaccgagattttattaacattcctgaagaatggcaagaaatatatgatttaatccctgaggccaaattcccagtaacaagcacaccaaagaaaattgagctggcaaaagatgaatctttcacaagcagtgatgataatgaaaatgtagatttagataaaagacttcaatattatagatatccgtggtcaactgtgcatcaccctgcaaggagaccaatatccatctccagagactggcatggatataagaagaagaaccatactattagtgtaggaaaagacattaattgtgacgtgatgattcacagagacgacaagaaagaagtgagggccccttctccatactggataatggtgaagcaagacaatgaaagctcttcctcctctacctcctctacctcagatgcattttggctggaagattgtgcccaagttgaagagggtaaagcccaactggtatcaaaggttggttagcaaatctgtggtcatatgagcatttatcttgcagacacccaagttttgtgcctcaccaggcacaagtttgctgtacttatcaaggactgtctgtagactcaccaattctcttctcttatgactgcgttataaagcctttagagatgttcttcaacaggattatctaaagacttccttgggttcttgcaggcctcacaaatcttattttcagaataagaccctcctttttgagaagaatttctttcttttagaaaatgccgtagagaaatccaatatcagaatgtctgaacatagtagagaatgtcactttatgtaaacactacatttttctttaaatatttagtttctctcttttttttggtaaacttcaagtactataattaaaataactaagagacataa

SEQ ID NO: 164116 - DNA, 1068 bp, Homo sapiens
  Payload ID: 12311
  Gene Symbol: PDZD9
  Gene Name: PDZ domain containing 9
  Uniprot ID: Q8IXQ8
  ENST ID: ENST00000537222
  CDS Start-End: 52-666
tccagcctctgctccgggaggccctcccgggctgcctgacctcccgggaccatgcagaaggcctcccacaaaaacaaaaaaggtgatgttctgattagtgttggccatgccaatgtgttaggatatactcttcgagaatttttacagcttttgcaacatatcactattggaacagtgctacaaatcaaggtttaccgagattttattaacattcctgaagaatggcaagaaatatatgatttaatccctgaggccaaattcccagtaacaagcacaccaaagaaaattgagctggcaaaagatgaatctttcacaagcagtgatgataatgaaaatgtagatttagataaaagacttcaatattatagatatccgtggtcaactgtgcatcaccctgcaaggagaccaatatccatctccagagactggcatggatataagaagaagaaccatactattagtgtaggaaaagacattaattgtgacgtgatgattcacagagacgacaagaaagaagtgagggccccttctccatactggataatggtgaagcaagacaatgaaagctcttcctcctctacctcctctacctcagatgcattttggctggaagattgtgcccaagttgaagagggtaaagcccaactggtatcaaaggttggttagcaaatctgtggtcatatgagcatttatcttgcagacacccaagttttgtgcctcaccaggcacaagtttgctgtacttatcaaggactgtctgtagactcaccaattctcttctcttatgactgcgttataaagcctttagagatgttcttcaacaggattatctaaagacttccttgggttcttgcaggcctcacaaatcttattttcagaataagaccctcctttttgagaagaatttctttcttttagaaaatgccgtagagaaatccaatatcagaatgtctgaacatagtagagaatgtcactttatgtaaacactacatttttctttaaatatttagtttctctcttttttttggtaaacttcaagtactataattaaaataactaagagacataa

SEQ ID NO: 164117 - DNA, 4248 bp, Homo sapiens
  Payload ID: 12312
  Gene Symbol: PDZRN3
  Gene Name: PDZ domain containing ring finger 3
  Uniprot ID: Q9UPQ7
  ENST ID: ENST00000263666
  CDS Start-End: 116-3316
gtccggggagagccagcgagcgcgcgggcggcgtagccggcctgtctgggccgcctcgtggggagggagggggcgcccggccgcccggcggcgaccccggggcctggccgccaccatgggcttcgagctggaccgcttcgacggcgacgtggacccggacctgaagtgcgcgctgtgccacaaggtcctggaggacccgctgaccacgccgtgcggccacgtcttctgcgccggctgcgtgctgccctgggtggtgcaggagggcagctgcccggcgcgctgccgcggtcgcctgtcggccaaagagctcaaccacgtcctgccgctcaagcgccttatcctcaagctggacatcaagtgcgcgtacgcgacgcgcggctgcggccgggtggtcaagctgcagcagctgccggagcacctcgagcgctgcgacttcgcgcccgcgcgctgtcgccacgcgggttgcggccaggtgctgctgcggcgcgacgtggaggcgcacatgcgcgacgcctgcgacgcgcggccagtgggccgctgccaggagggctgcgggctacccttgacgcacggcgagcagcgcgcgggcggccactgctgcgcgcgagcgctgcgggcgcacaacggcgcgctccaggcccgcctgggcgcgctgcacaaggcgctcaagaaggaggcgctgcgcgctgggaagcgcgagaagtcgctggtggcccagctggccgcggcgcagcttgagctgcagatgaccgcgctgcgctaccagaagaaattcaccgaatacagcgcgcgcctcgactcgctcagccgctgcgtggccgcgccgcccggcggcaagggcgaagaaaccaaaagtctgactcttgtcctgcatcgggactccggctccctgggattcaatattattggtggccggccgagtgtggataaccacgatggatcatccagtgaaggaatctttgtatccaagatagttgacagtgggcctgcagccaaggaaggaggcctgcaaattcatgacaggattattgaggtcaacggcagagacttatccagagcaactcatgaccaggctgtggaagctttcaagacagccaaggagcccatagtggtgcaggtgttgagaagaacaccaaggaccaaaatgttcacgcctccatcagagtctcagctggtggacacgggaacccaaaccgacatcacctttgaacatatcatggccctcactaagatgtcctctcccagcccacccgtgctggatccctatctcttgccagaggagcatccctcagcccatgaatactacgatccaaatgactacattggagacatccatcaggagatggacagggaggagctggagctggaggaagtggacctctacagaatgaacagccaggacaagctgggcctcactgtgtgctaccggacggacgatgaagacgacattgggatttatatcagtgagattgaccctaacagcattgcagccaaggatgggcgcatccgagaaggagaccgcattatccagattaatgggatagaggtgcagaaccgtgaagaggctgtggctcttctaaccagtgaagaaaataaaaacttttcattgctgattgcaaggcctgaactccagctggatgagggctggatggatgatgacaggaacgactttctggatgacctgcacatggacatgctggaggagcagcaccaccaggccatgcaattcacagctagcgtgctgcagcagaagaagcacgacgaagacggtgggaccacagatacagccaccatcttgtccaaccagcacgagaaggacagcggtgtggggcggaccgacgagagcacccgtaatgacgagagctcggagcaagagaacaatggcgacgacgccaccgcatcctccaacccgctggcggggcagaggaagctcacctgcagccaggacaccttgggcagcggcgacctgcccttcagcaacgagtctttcatttcggccgactgcacggacgccgactacctggggatcccggtggacgagtgcgagcgcttccgcgagctcctggagctcaagtgccaggtgaagagcgccaccccttacggcctgtactaccctagcggccccctggacgccggcaagagtgaccctgagagcgtggacaaggagctggagctgctgaacgaagagctgcgcagcatcgagctggagtgcctgagcatcgtgcgcgcccacaagatgcagcagctcaaggagcagtaccgcgagtcctggatgctgcacaacagcggcttccgcaactacaacaccagcatcgacgtgcgcagacacgagctctcagatatcaccgagctcccggagaaatccgacaaggacagctcgagcgcctacaacacaggcgagagctgccgcagcaccccgctcaccctggagatctcccccgacaactccttgaggagagcggcggagggcatcagctgcccgagcagcgaaggggctgtggggaccacggaagcctacgggccagcctccaagaatctgctctccatcacggaagatcccgaagtgggcacccctacctatagcccgtccctgaaggagctggaccccaaccagcccctggaaagcaaagagcggagagccagcgacgggagccggagccccacgcccagccagaagctgggcagcgcctacctgccctcctatcaccactccccatacaagcacgcgcacatcccggcgcacgcccagcactaccagagctacatgcagctgatccagcagaagtcggccgtggagtacgcgcaaagccagatgagcctggtgagcatgtgcaaggacctgagctctcccaccccgtcggagccgcgcatggagtggaaggtgaagatccgcagcgacgggacgcgctacatcaccaagaggcccgtgcgggaccgcctgctgcgggagcgcgccctgaagatccgggaagagcgcagcggcatgaccaccgacgacgacgcggtgagcgagatgaagatggggcgctactggagcaaggaggagaggaagcagcacctggtgaaggccaaggagcagcggcggcggcgcgagttcatgatgcagagcaggttggattgtctcaaggagcagcaagcagccgatgacaggaaggagatgaacattctcgaactgagccacaaaaagatgatgaagaagaggaataagaaaatcttcgataactggatgacgatccaagaactcttaacccacggcacaaaatccccggacggcactagagtatacaattccttcctatcggtgactactgtataattttcacttctgcattatgtacataaaggagaccactaccactggggtagaaattcctgcctcgttcaatgcggcaagtttttgtatataagataagtacggtcttcatgtttatagtccaaatttgcaaaccctacaactctgggtgtcataggtctattttaagggaagagagagaaaaacacccttactatcttggaaggcaatattaacaaacagagcttttttcaaatagcaattgtacttttctacctgtacccttttacataaagtgtttaaatttcagaaagatcttttattaagcatactttcacagaataacttgtttaaactatattcatataaaaaagttaaacacgctttttttcctgcctaaaacacaaatacaactgccagtatgtatttttaatggaaccctattttataatggtacgttactgaatgtgtttcatatgcgtgaccgttaagatattatcatttaggtgaaggtttcaactcaaaaccacccaacccggtggttaacgatttaatacatataaccaaaccggcagcgtttagagttgggatatacatttaaacattttcctggttaaggttcccaagagagtgtaaaggttttagcagaaagcaaaatatcttgcatctttatggaagtttaaagcatgtttgcaaatattgcagcccattgaaagaatttgcatgtacaggaaagttgtggatggagacggtttgtggaattttaagtgctcattgtagtaaacttttgctttgtagatttgaaggtacagacttatacaggcaagttcacaaaatcatgattagttacaaacagtaaaatgaagttaaaataaattattattttctatttgatatgttttgatgtgattcctcattttgcagtggtgcctataaaataaaagccttttgcagtg

SEQ ID NO: 164118 - DNA, 1136 bp, Homo sapiens
  Payload ID: 12312
  Gene Symbol: PDZRN3
  Gene Name: PDZ domain containing ring finger 3
  Uniprot ID: Q9UPQ7
  ENST ID: ENST00000308537
  CDS Start-End: 16-1098
ggcctggccgccaccatgggcttcgagctggaccgcttcgacggcgacgtggacccggacctgaagtgcgcgctgtgccacaaggtcctggaggacccgctgaccacgccgtgcggccacgtcttctgcgccggctgcgtgctgccctgggtggtgcaggagggcagctgcccggcgcgctgccgcggtcgcctgtcggccaaagagctcaaccacgtcctgccgctcaagcgccttatcctcaagctggacatcaagtgcgcgtacgcgacgcgcggctgcggccgggtggtcaagctgcagcagctgccggagcacctcgagcgctgcgacttcgcgcccgcgcgctgtcgccacgcgggttgcggccaggtgctgctgcggcgcgacgtggaggcgcacatgcgcgacgcctgcgacgcgcggccagtgggccgctgccaggagggctgcgggctacccttgacgcacggcgagcagcgcgcgggcggccactgctgcgcgcgagcgctgcgggcgcacaacggcgcgctccaggcccgcctgggcgcgctgcacaaggcgctcaagaaggaggcgctgcgcgctgggaagcgcgagaagtcgctggtggcccagctggccgcggcgcagcttgagctgcagatgaccgcgctgcgctaccagaagaaattcaccgaatacagcgcgcgcctcgactcgctcagccgctgcgtggccgcgccgcccggcggcaagggcgaagaaaccaaaagtctgactcttgtcctgcatcgggactccggctccctgggattcaatattattggtggccggccgagtgtggataaccacgatggatcatccagtgaaggaatctttgtatccaagatagttgacagtgggcctgcagccaaggaaggaggcctgcaaattcatgacaggattattgagatgagaaaactggaactgagaacagttaaattgcccaaagcccacagccaggattccaacgctggcttcatcccacaattgctgtccctgcacactccacctctgagctgtgaaaaaggaggaggtcatctggcttgtggaggggcttatttgaactgtatttgattgaaaactgcatgggctactaaaattgttttcttggg

SEQ ID NO: 164119 - DNA, 2927 bp, Homo sapiens
  Payload ID: 12312
  Gene Symbol: PDZRN3
  Gene Name: PDZ domain containing ring finger 3
  ENST ID: ENST00000462146
  CDS Start-End: 290-2461
agcatttgctcagtactctcaacataaaccaagcttagatcgcaatgaaactgcggacctgcaggctgccttgcttcactgagtcaatttttaaatgaagatggaacacaagaggatgatcttattgttcagtaaatttactctaatacataaaccccatggtggaagatggtatttggtcaacggcagagacttatccagagcaactcatgaccaggctgtggaagctttcaagacagccaaggagcccatagtggtgcaggtgttgagaagaacaccaaggaccaaaatgttcacgcctccatcagagtctcagctggtggacacgggaacccaaaccgacatcacctttgaacatatcatggccctcactaagatgtcctctcccagcccacccgtgctggatccctatctcttgccagaggagcatccctcagcccatgaatactacgatccaaatgactacattggagacatccatcaggagatggacagggaggagctggagctggaggaagtggacctctacagaatgaacagccaggacaagctgggcctcactgtgtgctaccggacggacgatgaagacgacattgggatttatatcagtgagattgaccctaacagcattgcagccaaggatgggcgcatccgagaaggagaccgcattatccagattaatgggatagaggtgcagaaccgtgaagaggctgtggctcttctaaccagtgaagaaaataaaaacttttcattgctgattgcaaggcctgaactccagctggatgagggctggatggatgatgacaggaacgactttctggatgacctgcacatggacatgctggaggagcagcaccaccaggccatgcaattcacagctagcgtgctgcagcagaagaagcacgacgaagacggtgggaccacagatacagccaccatcttgtccaaccagcacgagaaggacagcggtgtggggcggaccgacgagagcacccgtaatgacgagagctcggagcaagagaacaatggcgacgacgccaccgcatcctccaacccgctggcggggcagaggaagctcacctgcagccaggacaccttgggcagcggcgacctgcccttcagcaacgagtctttcatttcggccgactgcacggacgccgactacctggggatcccggtggacgagtgcgagcgcttccgcgagctcctggagctcaagtgccaggtgaagagcgccaccccttacggcctgtactaccctagcggccccctggacgccggcaagagtgaccctgagagcgtggacaaggagctggagctgctgaacgaagagctgcgcagcatcgagctggagtgcctgagcatcgtgcgcgcccacaagatgcagcagctcaaggagcagtaccgcgagtcctggatgctgcacaacagcggcttccgcaactacaacaccagcatcgacgtgcgcagacacgagctctcagatatcaccgagctcccggagaaatccgacaaggacagctcgagcgcctacaacacaggcgagagctgccgcagcaccccgctcaccctggagatctcccccgacaactccttgaggagagcggcggagggcatcagctgcccgagcagcgaaggggctgtggggaccacggaagcctacgggccagcctccaagaatctgctctccatcacggaagatcccgaagtgggcacccctacctatagcccgtccctgaaggagctggaccccaaccagcccctggaaagcaaagagcggagagccagcgacgggagccggagccccacgcccagccagaagctgggcagcgcctacctgccctcctatcaccactccccatacaagcacgcgcacatcccggcgcacgcccagcactaccagagctacatgcagctgatccagcagaagtcggccgtggagtacgcgcaaagccagatgagcctggtgagcatgtgcaaggacctgagctctcccaccccgtcggagccgcgcatggagtggaaggtgaagatccgcagcgacgggacgcgctacatcaccaagaggcccgtgcgggaccgcctgctgcgggagcgcgccctgaagatccgggaagagcgcagcggcatgaccaccgacgacgacgcggtgagcgagatgaagatggggcgctactggagcaaggaggagaggaagcagcacctggtgaaggccaaggagcagcggcggcggcgcgagttcatgatgcagagcaggttggattgtctcaaggagcagcaagcagccgatgacaggaaggagatgaacattctcgaactgagccacaaaaagatgatgaagaagaggaataagaaaatcttcgataactggatgacgatccaagaactcttaacccacggcacaaaatccccggacggcactagagtatacaattccttcctatcggtgactactgtataattttcacttctgcattatgtacataaaggagaccactaccactggggtagaaattcctgcctcgttcaatgcggcaagtttttgtatataagataagtacggtcttcatgtttatagtccaaatttgcaaaccctacaactctgggtgtcataggtctattttaagggaagagagagaaaaacacccttactatcttggaaggcaatattaacaaacagagcttttttcaaatagcaattgtacttttctacctgtacccttttacataaagtgtttaaatttcagaaagatcttttattaagcatactttcacagaataacttgtttaaactatattcatataaaaaagttaaacacgctttttttcctgcctaaaacacaaatacaactgccagtatgtatttttaatggaaccctattttataatggtacgttactgaatgtgtttcatatgcgtgaccgtta

SEQ ID NO: 164120 - DNA, 2737 bp, Homo sapiens
  Payload ID: 12312
  Gene Symbol: PDZRN3
  Gene Name: PDZ domain containing ring finger 3
  ENST ID: ENST00000466780
  CDS Start-End: 280-2451
tatataatagccttgcaagtgaacggataagcaaagtcagttgctgagaaataacacttccgagctgacgcatccaaatgtttaggatacacctgagatgtctctcttactgaatagaaacaacatccctggaagctctagacttctgaggcaccccagctttccctggtcaacggcagagacttatccagagcaactcatgaccaggctgtggaagctttcaagacagccaaggagcccatagtggtgcaggtgttgagaagaacaccaaggaccaaaatgttcacgcctccatcagagtctcagctggtggacacgggaacccaaaccgacatcacctttgaacatatcatggccctcactaagatgtcctctcccagcccacccgtgctggatccctatctcttgccagaggagcatccctcagcccatgaatactacgatccaaatgactacattggagacatccatcaggagatggacagggaggagctggagctggaggaagtggacctctacagaatgaacagccaggacaagctgggcctcactgtgtgctaccggacggacgatgaagacgacattgggatttatatcagtgagattgaccctaacagcattgcagccaaggatgggcgcatccgagaaggagaccgcattatccagattaatgggatagaggtgcagaaccgtgaagaggctgtggctcttctaaccagtgaagaaaataaaaacttttcattgctgattgcaaggcctgaactccagctggatgagggctggatggatgatgacaggaacgactttctggatgacctgcacatggacatgctggaggagcagcaccaccaggccatgcaattcacagctagcgtgctgcagcagaagaagcacgacgaagacggtgggaccacagatacagccaccatcttgtccaaccagcacgagaaggacagcggtgtggggcggaccgacgagagcacccgtaatgacgagagctcggagcaagagaacaatggcgacgacgccaccgcatcctccaacccgctggcggggcagaggaagctcacctgcagccaggacaccttgggcagcggcgacctgcccttcagcaacgagtctttcatttcggccgactgcacggacgccgactacctggggatcccggtggacgagtgcgagcgcttccgcgagctcctggagctcaagtgccaggtgaagagcgccaccccttacggcctgtactaccctagcggccccctggacgccggcaagagtgaccctgagagcgtggacaaggagctggagctgctgaacgaagagctgcgcagcatcgagctggagtgcctgagcatcgtgcgcgcccacaagatgcagcagctcaaggagcagtaccgcgagtcctggatgctgcacaacagcggcttccgcaactacaacaccagcatcgacgtgcgcagacacgagctctcagatatcaccgagctcccggagaaatccgacaaggacagctcgagcgcctacaacacaggcgagagctgccgcagcaccccgctcaccctggagatctcccccgacaactccttgaggagagcggcggagggcatcagctgcccgagcagcgaaggggctgtggggaccacggaagcctacgggccagcctccaagaatctgctctccatcacggaagatcccgaagtgggcacccctacctatagcccgtccctgaaggagctggaccccaaccagcccctggaaagcaaagagcggagagccagcgacgggagccggagccccacgcccagccagaagctgggcagcgcctacctgccctcctatcaccactccccatacaagcacgcgcacatcccggcgcacgcccagcactaccagagctacatgcagctgatccagcagaagtcggccgtggagtacgcgcaaagccagatgagcctggtgagcatgtgcaaggacctgagctctcccaccccgtcggagccgcgcatggagtggaaggtgaagatccgcagcgacgggacgcgctacatcaccaagaggcccgtgcgggaccgcctgctgcgggagcgcgccctgaagatccgggaagagcgcagcggcatgaccaccgacgacgacgcggtgagcgagatgaagatggggcgctactggagcaaggaggagaggaagcagcacctggtgaaggccaaggagcagcggcggcggcgcgagttcatgatgcagagcaggttggattgtctcaaggagcagcaagcagccgatgacaggaaggagatgaacattctcgaactgagccacaaaaagatgatgaagaagaggaataagaaaatcttcgataactggatgacgatccaagaactcttaacccacggcacaaaatccccggacggcactagagtatacaattccttcctatcggtgactactgtataattttcacttctgcattatgtacataaaggagaccactaccactggggtagaaattcctgcctcgttcaatgcggcaagtttttgtatataagataagtacggtcttcatgtttatagtccaaatttgcaaaccctacaactctgggtgtcataggtctattttaagggaagagagagaaaaacacccttactatcttggaaggcaatattaacaaacagagcttttttcaaatagcaattgtacttttctacctgtacccttttacataaagtgtttaaatttcag

SEQ ID NO: 164121 - DNA, 2778 bp, Homo sapiens
  Payload ID: 12312
  Gene Symbol: PDZRN3
  Gene Name: PDZ domain containing ring finger 3
  ENST ID: ENST00000479530
  CDS Start-End: 198-2549
gcgaggggaggaagggaagcgtggaaggggggagagagttgttgtctagcctctgagagcagcgccaatgtgaagcgttgcagtcgcttgactcacctgaggctctccaaggataccttcaatgcctgcactgtaagggagctgcttttcccgggtgctggcgagaacggaagccttcctttgacgtttttctaaacatgggatgcagtctgtgcagcctgcagaagcaagaggagcagtacaaattactctatgaagtttgtcaggtcaacggcagagacttatccagagcaactcatgaccaggctgtggaagctttcaagacagccaaggagcccatagtggtgcaggtgttgagaagaacaccaaggaccaaaatgttcacgcctccatcagagtctcagctggtggacacgggaacccaaaccgacatcacctttgaacatatcatggccctcactaagatgtcctctcccagcccacccgtgctggatccctatctcttgccagaggagcatccctcagcccatgaatactacgatccaaatgactacattggagacatccatcaggagatggacagggaggagctggagctggaggaagtggacctctacagaatgaacagccaggacaagctgggcctcactgtgtgctaccggacggacgatgaagacgacattgggatttatatcagtgagattgaccctaacagcattgcagccaaggatgggcgcatccgagaaggagaccgcattatccagattaatgggatagaggtgcagaaccgtgaagaggctgtggctcttctaaccagtgaagaaaataaaaacttttcattgctgattgcaaggcctgaactccagctggatgagggctggatggatgatgacaggaacgactttctggatgacctgcacatggacatgctggaggagcagcaccaccaggccatgcaattcacagctagcgtgctgcagcagaagaagcacgacgaagacggtgggaccacagatacagccaccatcttgtccaaccagcacgagaaggacagcggtgtggggcggaccgacgagagcacccgtaatgacgagagctcggagcaagagaacaatggcgacgacgccaccgcatcctccaacccgctggcggggcagaggaagctcacctgcagccaggacaccttgggcagcggcgacctgcccttcagcaacgagtctttcatttcggccgactgcacggacgccgactacctggggatcccggtggacgagtgcgagcgcttccgcgagctcctggagctcaagtgccaggtgaagagcgccaccccttacggcctgtactaccctagcggccccctggacgccggcaagagtgaccctgagagcgtggacaaggagctggagctgctgaacgaagagctgcgcagcatcgagctggagtgcctgagcatcgtgcgcgcccacaagatgcagcagctcaaggagcagtaccgcgagtcctggatgctgcacaacagcggcttccgcaactacaacaccagcatcgacgtgcgcagacacgagctctcagatatcaccgagctcccggagaaatccgacaaggacagctcgagcgcctacaacacaggcgagagctgccgcagcaccccgctcaccctggagatctcccccgacaactccttgaggagagcggcggagggcatcagctgcccgagcagcgaaggggctgtggggaccacggaagcctacgggccagcctccaagaatctgctctccatcacggaagatcccgaagtgggcacccctacctatagcccgtccctgaaggagctggaccccaaccagcccctggaaagcaaagagcggagagccagcgacgggagccggagccccacgcccagccagaagctgggcagcgcctacctgccctcctatcaccactccccatacaagcacgcgcacatcccggcgcacgcccagcactaccagagctacatgcagctgatccagcagaagtcggccgtggagtacgcgcaaagccagatgagcctggtgagcatgtgcaaggacctgagctctcccaccccgtcggagccgcgcatggagtggaaggtgaagatccgcagcgacgggacgcgctacatcaccaagaggcccgtgcgggaccgcctgctgcgggagcgcgccctgaagatccgggaagagcgcagcggcatgaccaccgacgacgacgcggtgagcgagatgaagatggggcgctactggagcaaggaggagaggaagcagcacctggtgaaggccaaggagcagcggcggcggcgcgagttcatgatgcagagcaggttggattgtctcaaggagcagcaagcagccgatgacaggaaggagatgaacattctcgaactgagccacaaaaagatgatgaagaagaggaataagaaaatcttcgataactggatgacgatccaagaactcttaacccacggcacaaaatccccggacggcactagagtatacaattccttcctatcggtgactactgtataattttcacttctgcattatgtacataaaggagaccactaccactggggtagaaattcctgcctcgttcaatgcggcaagtttttgtatataagataagtacggtcttcatgtttatagtccaaatttgcaaaccctacaactctgggtgtcataggtctattttaagggaagagagagaaaaacacccttactatcttggaaggcaatattaacaaacagagcttttttc

SEQ ID NO: 164122 - DNA, 2080 bp, Homo sapiens
  Payload ID: 12312
  Gene Symbol: PDZRN3
  Gene Name: PDZ domain containing ring finger 3
  ENST ID: ENST00000494559
  CDS Start-End: 1-1148
gagacatccatcaggagatggacagggaggagctggagctggaggaagtggacctctacagaatgaacagccaggacaagctgggcctcactgtgtgctaccggacggacgatgaagacgacattgggatttatatcagtgagattgaccctaacagcattgcagccaaggatgggcgcatccgagaaggagaccgcattatccagattaatgggatagaggtgcagaaccgtgaagaggctgtggctcttctaaccagtgaagaaaataaaaacttttcattgctgattgcaaggcctgaactccagctggatgagggctggatggatgatgacaggaacgactttctggatgacctgcacatggacatgctggaggagcagcaccaccaggccatgcaattcacagctagcgtgctgcagcagaagaagcacgacgaagacggtgggaccacagatacagccaccatcttgtccaaccagcacgagaaggacagcggtgtggggcggaccgacgagagcacccgtaatgacgagagctcggagcaagagaacaatggcgacgacgccaccgcatcctccaacccgctggcggggcagaggaagctcacctgcagccaggacaccttgggcagcggcgacctgcccttcagcaacgagtctttcatttcggccgactgcacggacgccgactacctggggatcccgtggaaggtgaagatccgcagcgacgggacgcgctacatcaccaagaggcccgtgcgggaccgcctgctgcgggagcgcgccctgaagatccgggaagagcgcagcggcatgaccaccgacgacgacgcggtgagcgagatgaagatggggcgctactggagcaaggaggagaggaagcagcacctggtgaaggccaaggagcagcggcggcggcgcgagttcatgatgcagagcaggttggattgtctcaaggagcagcaagcagccgatgacaggaaggagatgaacattctcgaactgagccacaaaaagatgatgaagaagaggaataagaaaatcttcgataactggatgacgatccaagaactcttaacccacggcacaaaatccccggacggcactagagtatacaattccttcctatcggtgactactgtataattttcacttctgcattatgtacataaaggagaccactaccactggggtagaaattcctgcctcgttcaatgcggcaagtttttgtatataagataagtacggtcttcatgtttatagtccaaatttgcaaaccctacaactctgggtgtcataggtctattttaagggaagagagagaaaaacacccttactatcttggaaggcaatattaacaaacagagcttttttcaaatagcaattgtacttttctacctgtacccttttacataaagtgtttaaatttcagaaagatcttttattaagcatactttcacagaataacttgtttaaactatattcatataaaaaagttaaacacgctttttttcctgcctaaaacacaaatacaactgccagtatgtatttttaatggaaccctattttataatggtacgttactgaatgtgtttcatatgcgtgaccgttaagatattatcatttaggtgaaggtttcaactcaaaaccacccaacccggtggttaacgatttaatacatataaccaaaccggcagcgtttagagttgggatatacatttaaacattttcctggttaaggttcccaagagagtgtaaaggttttagcagaaagcaaaatatcttgcatctttatggaagtttaaagcatgtttgcaaatattgcagcccattgaaagaatttgcatgtacaggaaagttgtggatggagacggtttgtggaattttaagtgctcattgtagtaaacttttgctttgtagatttgaaggtacagacttatacaggcaagttcacaaaatcatgattagttacaaacagtaaaatgaagttaaaataaattattattttctatttgatatgttttgatgtgattcctcattttgcagtggtgcctataaaataaaagccttttgcagtg

SEQ ID NO: 164123 - DNA, 1776 bp, Homo sapiens
  Payload ID: 12312
  Gene Symbol: PDZRN3
  Gene Name: PDZ domain containing ring finger 3
  ENST ID: ENST00000492909
  CDS Start-End: 300-1776
gtagacgcctcggggcttaagagaacgtgacatggaagagacaggaaatatgtactcttgtacaggtatgcggcacacatgtggccccctccctcccagcctcctcactaaagattattaacctgcttattctcctggttcacctgaggctgttttgagagaatctcagtatctcagtcttcatttcatacgacattcttcgggctcctcttgttcatctttgcagactgaagtatttatgaaggaccttcagaaatctgattcctcctgatgaatcaaagagtaaagaagaatcaaacatgattaaccaggtcaacggcagagacttatccagagcaactcatgaccaggctgtggaagctttcaagacagccaaggagcccatagtggtgcaggtgttgagaagaacaccaaggaccaaaatgttcacgcctccatcagagtctcagctggtggacacgggaacccaaaccgacatcacctttgaacatatcatggccctcactaagatgtcctctcccagcccacccgtgctggatccctatctcttgccagaggagcatccctcagcccatgaatactacgatccaaatgactacattggagacatccatcaggagatggacagggaggagctggagctggaggaagtggacctctacagaatgaacagccaggacaagctgggcctcactgtgtgctaccggacggacgatgaagacgacattgggatttatatcagtgagattgaccctaacagcattgcagccaaggatgggcgcatccgagaaggagaccgcattatccagattaatgggatagaggtgcagaaccgtgaagaggctgtggctcttctaaccagtgaagaaaataaaaacttttcattgctgattgcaaggcctgaactccagctggatgagggctggatggatgatgacaggaacgactttctggatgacctgcacatggacatgctggaggagcagcaccaccaggccatgcaattcacagctagcgtgctgcagcagaagaagcacgacgaagacggtgggaccacagatacagccaccatcttgtccaaccagcacgagaaggacagcggtgtggggcggaccgacgagagcacccgtaatgacgagagctcggagcaagagaacaatggcgacgacgccaccgcatcctccaacccgctggcggggcagaggaagctcacctgcagccaggacaccttgggcagcggcgacctgcccttcagcaacgagtctttcatttcggccgactgcacggacgccgactacctggggatcccggtggacgagtgcgagcgcttccgcgagctcctggagctcaagtgccaggtgaagagcgccaccccttacggcctgtactaccctagcggccccctggacgccggcaagagtgaccctgagagcgtggacaaggagctggagctgctgaacgaagagctgcgcagcatcgagctggagtgcctgagcatcgtgcgcgcccacaagatgcagcagctcaaggagcagtaccgcgagtcctggatgctgcacaacagcggcttccgcaactacaacaccagcatcgacgtgcgcagacacgagctctcagatatcaccgagctcccggagaaatccgacaaggacagctcgagcgcctacaacacaggcgagagctgccgcagcaccccgctcaccctggagatctcccccgacaactccttgaggagagcggcggagggcatcagctgcccgagcagcgaaggggctg

SEQ ID NO: 164124 - DNA, 3411 bp, Homo sapiens
  Payload ID: 12313
  Gene Symbol: PDZRN4
  Gene Name: PDZ domain containing ring finger 4
  Uniprot ID: Q6ZMN7
  ENST ID: ENST00000298919
  CDS Start-End: 389-2719
aagatacttagggaaagcgaagaagagcatgctgctacacaccactctggcttacgcttccagctaacagcggtttgtctgtgtttctggactgaagtgactgatgaaaaacagtagtcaagtctggagggtgattccctttcagttcacttgcctttcagttctggggaaattagaagatttgctctctctctctgcttcttagaatgggctgcaatttgtgcacttttcagaaaagagaggaacactacaaactgctgtatgaagtttcccaggagctgtgacttgaacaatgctattctgcatgaaattgagaaattgccagtgttcccaacctgatggagagtatgtgtgggatcttagttctgcttcattaagctccttgtgaatgagtggtaagagacaatttttccttaaacctttggcattgttgacatgttggccatccactgtcaatgggaaggatctttcaaaggccactcatgaagaggcagtggaagcttttcgcaatgccaaggagcccattgtggtgcaggtgttaaggcgaacacctcttagtagaccagcctatgggatggcttcagaagtgcagcttatgaatgccagcactcagacggacatcaccttcgaacacatcatggctctggccaagcttcgtccacctacccctccagtgccagacatctgtccattcctgctctcagacagctgccattctctacatccaatggagcatgaattttatgaggacaatgagtatatttccagcttgcctgctgatgcagacagaacagaagactttgaatatgaggaggtcgagttgtgtcgtgttagcagtcaagagaagctgggcctgacagtctgttaccgaacagatgatgaagaagacaccggcatttatgtcagcgaggttgacccaaatagcattgctgccaaagacggccggattcgagaaggggatcggattttgcaaataaatggggaagatgtccagaatcgagaagaagcagtggccttgctgtctaacgatgagtgtaagagaatcgtgctgcttgttgcaaggccagagattcagctggatgaaggctggctggaagatgaaaggaatgaattcttagaggagttaaacttggagatgttggaagaagagcataatgaagcaatgcagcccactgccaatgaggtggagcagccaaaaaagcaagaagaagaagaaggcacaacagacactgcaacatcctcatccaacaaccatgagaaggacagtggagtaggacgtacagatgaaagcttgcgaaatgatgagagctcagagcaggagaatgcagccgaggaccccaatagcacatctttgaagagcaagagagacctggggcagagccaagacactctgggaagtgttgaacttcagtacaatgagagcctcgtatctggtgaatacattgactcagactgcattggcaacccagatgaggactgtgaaagattcaggcagctcttggagctcaaatgcaagattcgaaatcatggagagtatgacctgtattactcaagcagcacaattgaatgcaatcaaggggagcaagagggagtggagcatgagctacagttgcttaatgaagaactgagaaacattgagcttgagtgtcagaatatcatgcaggctcacaggctccagaaagtgacagaccagtatggagacatctggacattgcatgatggaggattccggaattataacaccagcatagatatgcaaaggggaaagctagatgacatcatggagcatccagaaaagtctgacaaggacagttctagtgcttacaacacagctgagagctgcagaagtactccgctcactgtagaccgttcccctgacagttcccttccaagggtgatcaacctcaccaataagaaaaacctgagaagcacaatggcagccacccagtcctcttccggacagagcagtaaagagtcgacctccaccaaagccaaaaccactgagcaaggttgtagcgctgaaagcaaggagaaggttttagaaggcagcaagcttcctgatcaagagaaggcagtcagcgaacacatcccttacctctctccttaccacagctcctcatatagatatgcaaacatcccagcacacgcccggcattatcaaagctacatgcagttaattcaacagaaatctgcagtcgagtatgctcagagtcagctcagcttggtgagcatgtgcaaggagtctcagaagtgttcagagcccaagatggaatggaaggtgaaaattaggagcgacgggacacggtacatcacaaagagacccgtgcgagaccgaatcctgaaggaacgtgccttaaagatcaaggaagagcggagtggcatgaccacagacgatgacaccatgagcgagatgaaaatggggcgctactggagcaaagaggagagaaagcagcacctggttagggccaaagagcagcgccgtcgccgtgagttcatgatgcgaagcaggttagagtgtctcaaggagagccctcagagcggcagtgagggcaagaaggagatcaatatcattgaactgagtcacaaaaagatgatgaaaaagagaaacaagaaaattttggacaactggatgacaatccaagaactgatgacccatggggccaagtctccagatggcacgagagtccataatgccttcttgtcggtgaccactgtatgaccgaatgaatggaatgcatgcgactgattttaggaggatgctaccagtttcggtagagtatgattgcctcgttcaatgtggcgtttttatatatattttgtgactctttatagtttaaattttttgtaagcaaaaaatacctggtaatttttcatttgtttttcatatactggtaccttctttttggctgagatctttcttttacttgtgatatattcatattactcgtttataaaaaatcaaaaacaaaaggaaagaaaacaaaaaaaacttgcacaaaaatactgaggagccaattaatttcctacttcaatgtatctaatgtaagtgaaaatctggatttatttctctagtttacttattttctactttaataataactcaatgccaaaatatttctatgcttgtttcttggcataatacattttaaatcaaacctgttcgtaataaatcatgtgccacatcttgtcttacacataaaagccactgcttttaacatcccattgtacatttaacacataaatggtgttaacatcccattgtacatttaacacataaatggccattgtctttgtctcagtaaagtgtaggtggacaatcttcctgtgatatgtagtgacattggtcatgtagctagataattatggtaattgtgacaattaaagagaaataaattattgattatccttcag

SEQ ID NO: 164125 - DNA, 3347 bp, Homo sapiens
  Payload ID: 12313
  Gene Symbol: PDZRN4
  Gene Name: PDZ domain containing ring finger 4
  Uniprot ID: Q6ZMN7
  ENST ID: ENST00000402685
  CDS Start-End: 9-3119
tccctaacatgggctttgccctggagcgcttcgcagaagccgtggacccggctctggagtgcaaactgtgcggccaggtgcttgaagagcccctgtgcacgccgtgcgggcacgtcttctgcgccagctgcctgttgccctgggcggtgcggaggcgccggtgcccgctgcagtgccagcccttggcgcccggcgagctgtaccgggtgctgccgctgcgcagcctcatccagaagctgcgagtccagtgcgactaccgcgcccgcggctgcggccactcggtcaggctgcacgagctggaggcgcacgtcgagcactgcgacttcggccctgcccgccggctccgcagccgcgggggctgcgcttcggggctgggcggtggtgaggtgcccgcgcgggggggctgcggtccgacacccagggctggccggggcgggggcgcgcgcggggggccgccgggcggccgctggggccgcgggcggggacccgggcctcgggtcctcgcctggaggcggcgcgagaaggcgctgctggcgcagctctgggcgctgcagggcgaggtgcagctcacggcgcgcaggtaccaggagaagttcacccaatacatggctcacgtccgcaacttcgtcggcgacctcggtggcggccaccgcagggatggagagcataagccattcactattgtgttagaaagagaaaatgacactttgggattcaatattataggaggtcgaccaaatcagaataatcaggaaggaacatcgactgaaggaatttacgtttcaaaaattttagaaaatggacctgctgacagagcagatggcctggagattcatgacaaaatcatggaggtcaatgggaaggatctttcaaaggccactcatgaagaggcagtggaagcttttcgcaatgccaaggagcccattgtggtgcaggtgttaaggcgaacacctcttagtagaccagcctatgggatggcttcagaagtgcagcttatgaatgccagcactcagacggacatcaccttcgaacacatcatggctctggccaagcttcgtccacctacccctccagtgccagacatctgtccattcctgctctcagacagctgccattctctacatccaatggagcatgaattttatgaggacaatgagtatatttccagcttgcctgctgatgcagacagaacagaagactttgaatatgaggaggtcgagttgtgtcgtgttagcagtcaagagaagctgggcctgacagtctgttaccgaacagatgatgaagaagacaccggcatttatgtcagcgaggttgacccaaatagcattgctgccaaagacggccggattcgagaaggggatcggattttgcaaataaatggggaagatgtccagaatcgagaagaagcagtggccttgctgtctaacgatgagtgtaagagaatcgtgctgcttgttgcaaggccagagattcagctggatgaaggctggctggaagatgaaaggaatgaattcttagaggagttaaacttggagatgttggaagaagagcataatgaagcaatgcagcccactgccaatgaggtggagcagccaaaaaagcaagaagaagaagaaggcacaacagacactgcaacatcctcatccaacaaccatgagaaggacagtggagtaggacgtacagatgaaagcttgcgaaatgatgagagctcagagcaggagaatgcagccgaggaccccaatagcacatctttgaagagcaagagagacctggggcagagccaagacactctgggaagtgttgaacttcagtacaatgagagcctcgtatctggtgaatacattgactcagactgcattggcaacccagatgaggactgtgaaagattcaggcagctcttggagctcaaatgcaagattcgaaatcatggagagtatgacctgtattactcaagcagcacaattgaatgcaatcaaggggagcaagagggagtggagcatgagctacagttgcttaatgaagaactgagaaacattgagcttgagtgtcagaatatcatgcaggctcacaggctccagaaagtgacagaccagtatggagacatctggacattgcatgatggaggattccggaattataacaccagcatagatatgcaaaggggaaagctagatgacatcatggagcatccagaaaagtctgacaaggacagttctagtgcttacaacacagctgagagctgcagaagtactccgctcactgtagaccgttcccctgacagttcccttccaagggtgatcaacctcaccaataagaaaaacctgagaagcacaatggcagccacccagtcctcttccggacagagcagtaaagagtcgacctccaccaaagccaaaaccactgagcaaggttgtagcgctgaaagcaaggagaaggttttagaaggcagcaagcttcctgatcaagagaaggcagtcagcgaacacatcccttacctctctccttaccacagctcctcatatagatatgcaaacatcccagcacacgcccggcattatcaaagctacatgcagttaattcaacagaaatctgcagtcgagtatgctcagagtcagctcagcttggtgagcatgtgcaaggagtctcagaagtgttcagagcccaagatggaatggaaggtgaaaattaggagcgacgggacacggtacatcacaaagagacccgtgcgagaccgaatcctgaaggaacgtgccttaaagatcaaggaagagcggagtggcatgaccacagacgatgacaccatgagcgagatgaaaatggggcgctactggagcaaagaggagagaaagcagcacctggttagggccaaagagcagcgccgtcgccgtgagttcatgatgcgaagcaggttagagtgtctcaaggagagccctcagagcggcagtgagggcaagaaggagatcaatatcattgaactgagtcacaaaaagatgatgaaaaagagaaacaagaaaattttggacaactggatgacaatccaagaactgatgacccatggggccaagtctccagatggcacgagagtccataatgccttcttgtcggtgaccactgtatgaccgaatgaatggaatgcatgcgactgattttaggaggatgctaccagtttcggtagagtatgattgcctcgttcaatgtggcgtttttatatatattttgtgactctttatagtttaaattttttgtaagcaaaaaatacctggtaatttttcatttgtttttcatatactggtaccttctttttggctgagatctttcttttacttgtgatatattcatattactcg

SEQ ID NO: 164126 - DNA, 3041 bp, Homo sapiens
  Payload ID: 12313
  Gene Symbol: PDZRN4
  Gene Name: PDZ domain containing ring finger 4
  Uniprot ID: Q6ZMN7
  ENST ID: ENST00000539469
  CDS Start-End: 263-2599
acgggggagtgttgccatgaactgactggaaactctgtgtgtgtatccgtgagtgcaagatacttagggaaagcgaagaagagcatgctgctacacaccactctggcttacgcttccagctaacagcggtttgtctgtgtttctggactgaagtgactgatgaaaaacagtagtcaagtctggagggtgattccctttcagttcacttgcctttcagttctggggaaattagaagatttgctctctctctctgcttcttagaatgggctgcaatttgtgcacttttcagaaaagagaggaacactacaaactgctgtatgaagtttcccaggtcaatgggaaggatctttcaaaggccactcatgaagaggcagtggaagcttttcgcaatgccaaggagcccattgtggtgcaggtgttaaggcgaacacctcttagtagaccagcctatgggatggcttcagaagtgcagcttatgaatgccagcactcagacggacatcaccttcgaacacatcatggctctggccaagcttcgtccacctacccctccagtgccagacatctgtccattcctgctctcagacagctgccattctctacatccaatggagcatgaattttatgaggacaatgagtatatttccagcttgcctgctgatgcagacagaacagaagactttgaatatgaggaggtcgagttgtgtcgtgttagcagtcaagagaagctgggcctgacagtctgttaccgaacagatgatgaagaagacaccggcatttatgtcagcgaggttgacccaaatagcattgctgccaaagacggccggattcgagaaggggatcggattttgcaaataaatggggaagatgtccagaatcgagaagaagcagtggccttgctgtctaacgatgagtgtaagagaatcgtgctgcttgttgcaaggccagagattcagctggatgaaggctggctggaagatgaaaggaatgaattcttagaggagttaaacttggagatgttggaagaagagcataatgaagcaatgcagcccactgccaatgaggtggagcagccaaaaaagcaagaagaagaagaaggcacaacagacactgcaacatcctcatccaacaaccatgagaaggacagtggagtaggacgtacagatgaaagcttgcgaaatgatgagagctcagagcaggagaatgcagccgaggaccccaatagcacatctttgaagagcaagagagacctggggcagagccaagacactctgggaagtgttgaacttcagtacaatgagagcctcgtatctggtgaatacattgactcagactgcattggcaacccagatgaggactgtgaaagattcaggcagctcttggagctcaaatgcaagattcgaaatcatggagagtatgacctgtattactcaagcagcacaattgaatgcaatcaaggggagcaagagggagtggagcatgagctacagttgcttaatgaagaactgagaaacattgagcttgagtgtcagaatatcatgcaggctcacaggctccagaaagtgacagaccagtatggagacatctggacattgcatgatggaggattccggaattataacaccagcatagatatgcaaaggggaaagctagatgacatcatggagcatccagaaaagtctgacaaggacagttctagtgcttacaacacagctgagagctgcagaagtactccgctcactgtagaccgttcccctgacagttcccttccaagggtgatcaacctcaccaataagaaaaacctgagaagcacaatggcagccacccagtcctcttccggacagagcagtaaagagtcgacctccaccaaagccaaaaccactgagcaaggttgtagcgctgaaagcaaggagaaggttttagaaggcagcaagcttcctgatcaagagaaggcagtcagcgaacacatcccttacctctctccttaccacagctcctcatatagatatgcaaacatcccagcacacgcccggcattatcaaagctacatgcagttaattcaacagaaatctgcagtcgagtatgctcagagtcagctcagcttggtgagcatgtgcaaggagtctcagaagtgttcagagcccaagatggaatggaaggtgaaaattaggagcgacgggacacggtacatcacaaagagacccgtgcgagaccgaatcctgaaggaacgtgccttaaagatcaaggaagagcggagtggcatgaccacagacgatgacaccatgagcgagatgaaaatggggcgctactggagcaaagaggagagaaagcagcacctggttagggccaaagagcagcgccgtcgccgtgagttcatgatgcgaagcaggttagagtgtctcaaggagagccctcagagcggcagtgagggcaagaaggagatcaatatcattgaactgagtcacaaaaagatgatgaaaaagagaaacaagaaaattttggacaactggatgacaatccaagaactgatgacccatggggccaagtctccagatggcacgagagtccataatgccttcttgtcggtgaccactgtatgaccgaatgaatggaatgcatgcgactgattttaggaggatgctaccagtttcggtagagtatgattgcctcgttcaatgtggcgtttttatatatattttgtgactctttatagtttaaattttttgtaagcaaaaaatacctggtaatttttcatttgtttttcatatactggtaccttctttttggctgagatctttcttttacttgtgatatattcatattactcgtttataaaaaatcaaaaacaaaaggaaagaaaacaaaaaaaacttgcacaaaaatactgaggagccaattaatttcctacttcaatgtatctaatgtaagtgaaaatctggatttatttctctagtttacttattttctactttaataataactcaatgccaaaatatttctatgcttgtttcttggcataatacattttaaatcaaacctgtt

SEQ ID NO: 164127 - DNA, 846 bp, Homo sapiens
  Payload ID: 12314
  Gene Symbol: PDZK1IP1
  Gene Name: PDZK1 interacting protein 1
  Uniprot ID: Q13113
  ENST ID: ENST00000294338
  CDS Start-End: 124-468
gctcctctcctccagggccagactgagcccaggttgatttcaggcggacaccaatagactccacagcagctccaggagcccagacaccggcggccagaagcaaggctaggagctgctgcagccatgtcggccctcagcctcctcattctgggcctgctcacggcagtgccacctgccagctgtcagcaaggcctggggaaccttcagccctggatgcagggccttatcgcggtggccgtgttcctggtcctcgttgcaatcgcctttgcagtcaaccacttctggtgccaggaggagccggagcctgcacacatgatcctgaccgtcggaaacaaggcagatggagtcctggtgggaacagatggaaggtactcttcgatggcggccagtttcaggtccagtgagcatgagaatgcctatgagaatgtgcccgaggaggaaggcaaggtccgcagcaccccgatgtaaccttctctgtggctccaaccccaagactcccaggcacatgggatggatgtccagtgctaccacccaagccccctccttctttgtgtggaatctgcaatagtgggctgactccctccagccccatgccggccctacccgcccttgaagtatagccagccaaggttggagctcagaccgtgtctaggttggggctcggctgtggccctggggtctcctgctcagctcagaagagccttctggagaggacagtcagctgagcacctcccatcctgctcacacgtccttccccataactatggaaatggccctaatttctgtgaaataaagactttttgtatttctggggctgaggctcagcaacagcccctcaggcttcca

SEQ ID NO: 164128 - DNA, 770 bp, Homo sapiens
  Payload ID: 12314
  Gene Symbol: PDZK1IP1
  Gene Name: PDZK1 interacting protein 1
  Uniprot ID: Q13113
  ENST ID: ENST00000371885
  CDS Start-End: 426-770
gtggacaccacgtgatcctggggaggcttttgcctcttccgagggctctggctccagggcctccctgttccaggggctaggtgtgccttcctcaatgctgcttttggctatgagggtgacgggcccagggcttcagggccccagatcgcaccttgccatctggggtgtccgtcctttgtcccccacagcaggctgtgtttgcccattttctcctctgccatgggtggagatggatctgaagttgggtgttgaagcctctgaccaaggctgtatcttgttttgaggccctgcccggtttccagggaccacatctggggccaagaggaagaaccgaactgggactaggcggacaccaatagactccacagcagctccaggagcccagacaccggcggccagaagcaaggctaggagctgctgcagccatgtcggccctcagcctcctcattctgggcctgctcacggcagtgccacctgccagctgtcagcaaggcctggggaaccttcagccctggatgcagggccttatcgcggtggccgtgttcctggtcctcgttgcaatcgcctttgcagtcaaccacttctggtgccaggaggagccggagcctgcacacatgatcctgaccgtcggaaacaaggcagatggagtcctggtgggaacagatggaaggtactcttcgatggcggccagtttcaggtccagtgagcatgagaatgcctatgagaatgtgcccgaggaggaaggcaaggtccgcagcaccccgatgtaa

SEQ ID NO: 164129 - DNA, 12919 bp, Homo sapiens
  Payload ID: 12315
  Gene Symbol: PCNX
  Gene Name: pecanex homolog (Drosophila)
  Uniprot ID: Q96RV3
  ENST ID: ENST00000304743
  CDS Start-End: 447-7472
gaggaggagctggagggggcgcggcttcctctcggtcgctccctggcgccgggcctctttctctgcctggcccagggctggcggccggcgggggtcgcggcggcggcagtgggggcgctggcgggccgcgggtggcgggggccgggccgcggctccgggtgttaggagacaagatggcggcggctctcagaaggccggtctcctcctctccgccgtcctccgccccgccgctcgccgcctcctcctctcgggtctcctcctcctcgtttgctgcctcctcctcctcctgcagcagcaccagcgaccgccgaagcgccggctcgctcacccggagctccggaggtggatagacggggcagctgcaggctccggcgaccgaggccgagctggggccggggcggggacggcggcggcggcggcggcgacggcggcggcgccgggtggggatggggtcgcagacgctgcagatcctccgacagggggtgtgggccgcgctcagcgggggctggtactacgacccgcaccaggccaccttcgtgaacgcgctgcacctctacctgtggctctttctgctgggcctgcccttcaccctctacatggcccttccttctaccatgattatagtagcagtttattgtcctgtgatagctgctgttttcattgttctgaagatggtcaactatcgactacacagagcacttgatgctggagaagttgtagataggactgcaaatgagttcacggatcagcgaaccaaagctgaacaaggcaactgttcaaccaggagaaaagacagcaatggaccgagtgatcctggtggagggattgaaatgtctgagttcatccgagaggccacacccccagttggttgcagttccagaaattcttatgccggtctagatccaagcaaccagattggatctggttcctcgcgtcttggaacagcagcaactattaaaggagatacagacactgctaagacttctgatgatatcagtttaagtctgggccaaagttctagtctttgtaaggaaggaagtgaagaacaagatttggcagctgatcggaagctctttcgtcttgtctccaatgactccttcatctctattcagccttccttatcctcttgtggacaggacttgccaagggacttcagtgacaaagtgaacctgccaagtcataaccaccaccaccatgttgatcagtctctgtccagcgcctgtgacacagaagtagcttctcttgtacctttacactcacactcttatagaaaagaccaccggccgcgaggtgtaccacggacttctagctctgctgtggcttttccagacacttcactgaatgattttcccctttatcagcaaagacgtggattagatccagttagtgagttagaatcttccaagcctctttctggatccaaagaatccttggtggaaaattctggtttatctggggaatttcagcttgctggtgacttgaaaatcaatacttctcagccacccacaaaaagtgggaagagcaaacctttgaaagcagagaaaagcatggacagcttgaggagcctgagcacacggagtagtgggtcaacagaaagctactgcagtggaacggaccgggacactaacagtactgtcagcagctataaaagtgagcagaccagctcaactcacatagagagcatcctgtcagagcatgaggagtctcctaaagcaggaacaaaaagtgggaggaagaaagagtgctgtgcaggcccagaggagaagaatagctgtgccagtgacaaaaggactagcagtgaaaagattgctatggaagcgagtaccaacagtggggttcacgaggccaaggaccccaccccctctgatgagatgcacaaccagagaggtctcagcacctctgcatctgaagaagccaataaaaatccccatgcaaatgaatttacttcccaaggggacagaccacctgggaacactgcagaaaacaaagaagagaagagtgataagtcagctgtttctgtggattccaaagtgcgtaaagatgttggtggaaagcaaaaggaaggggatgttcgacctaaatcttctagcgtaatccatcggacagcttctgcccacaagtcaggcaggagacgcacaggaaaaaaacgggctagcagttttgattcaagccggcatagggactatgtttgctttcgaggtgtttctggtaccaagccacacagtgctatattttgtcatgacgaagactctagtgatcagagtgacttgagtagagcatcaagtgttcagtctgctcaccagttcagcagtgatagctcttctagcaccacttctcattcctgtcagtctcctgagggcagatacagtgctctaaagaccaaacacactcataaagaaaggggcacagactctgaacacacacacaaagctcatttggttcctgaaggaaccagcaaaaagcgtgcaacacgacggacttctagcacaaatagtgccaagactcgtgcccgagtgttgagcctggacagtggcacagtagcatgtttgaatgactcaaacaggttaatggcacctgaaagtataaagcccttaaccacttcaaaatcagatcttgaggccaaagagggagaggtgctagatgagctatctttattaggacgggcttcccagttagagacagtcactcgatctaggaatagcttgccaaaccaggttgcatttcctgaaggggaagagcaagatgcagtcagtggagcagcacaagccagcgaggaggcagtgtcatttcgccgtgaacgcagcacatttaggcgccaggcagtacggcgccggcacaatgcagggagtaaccctacccctcctacattgctcatcggatcacccctaagccttcaagatggtcagcaaggccagcagtccacagcccaggtcaaagtccagtcccgccccccttcccaggctgcagtgctcagtgctagtgcctccttgctggtgagaaatgggagtgtccacttagaagcatcacatgacaatgcatctgctgtaggcggtagcagtttgcacgatgaacttggtaagttctcttctacgctgtatgagactggtggctgtgatatgtcacttgtgaattttgaaccagcagcaagaagagcatccaatatctgtgacacagattctcatgtatccagttctacctcagttcgattttatccacatgatgtgctctctctcccacagattcgattgaatagactattgaccattgatacagatttgttggagcaacaggacattgatctaagccctgacttggcagctacttacggcccaacagaagaagctgcccaaaaggttaaacactattatcgcttttggatcctaccccagctgtggattggcattaactttgacagactcacacttttggccctgtttgatagaaatcgtgagatcctggaaaatgtgttagctgtcatcctggctattctcgtggcctttttgggatctattcttctcatacaaggattcttcagagatatctgggtcttccagttctgcctcgtcatagccagctgtcaatactcactgcttaagagtgttcaaccagattcttcttctcccagacatggtcataatcgtatcattgcctacagtagaccagtttatttctgcatatgttgcggtcttatttggctcttggattatggtagcagaaacctgactgcaaccaagttcaaattatatggaataactttcaccaatccactggtgtttatatcagccagggatttagttatagtgtttacactctgtttcccaatagtgtttttcattggtctcctgcctcaggtgaatacatttgtaatgtacctttgtgaacaattggatattcatatttttggtggtaatgccactacaagcctgcttgcagcactttacagttttatctgtagcattgttgcagtagccttattgtatggattatgttatggggctttaaaggattcttgggatggccagcatattccagtacttttctccattttttgtggtttattagtggcagtgtcttaccatctcagccgacaaagcagtgatccatctgtacttttctctttagtgcaatccaagatttttccaaaaacggaagagaaaaatccagaagaccctctatctgaagtaaaagatccactgcctgaaaaacttagaaattctgttagtgagcgattacagtctgacctggtagtatgcattgtaattggtgtgctgtattttgctattcatgtaagcacagtcttcacagtattgcagcctgccctcaagtatgtgttgtatacattggttggctttgtgggttttgtaacccattatgtgctgcctcaagttagaaaacagctaccatggcactgtttctctcatcctctgctaaagacactagagtataatcagtatgaagttcgaaatgcagccactatgatgtggtttgagaaacttcatgtgtggcttctttttgtggagaagaatataatctatccattgattgttctcaatgaactgagcagcagtgcagagacaattgctagtccaaagaaactgaatacagaattaggtgctttaatgatcactgttgctggtttgaagttgctacgatcctcttttagcagccctacatatcagtatgttacagtcatctttactgtgctgtttttcaaatttgactatgaagctttttcagagaccatgctgttggatctcttctttatgtccatactcttcaacaagctttgggaactactttataaattgcagtttgtgtatacctatattgccccatggcagatcacatggggttctgctttccatgcttttgctcagccttttgcagtgcctcattcagccatgctgtttattcaggctgctgtctcggccttcttctctactccactgaacccctttctgggaagtgcaatattcatcacttcatatgtccgacctgtgaaattctgggagagagactataacacaaaacgagtggatcattcaaataccagattggcttcccagcttgatagaaatccaggatcagatgacaacaatctgaattccatcttttatgagcatttaactagatccctacagcacagcctctgtggtgatttgctactaggacggtggggaaactacagtacaggggactgtttcatccttgcctctgactatctcaatgcattagtacaccttatagagataggcaatggtctggtcacttttcagctgcggggacttgaattcagaggtacctactgtcaacaacgggaagtggaggccattactgaaggtgtagaggaagatgaaggattttgctgttgtgaacctggccatattcctcacatgctttcatttaatgctgcatttagccagcgatggctagcttgggaagtgatagtcacaaagtacattctggagggttatagcatcactgataacagtgctgcttctatgcttcaagtctttgatcttcggaaagtactcaccacttactatgtcaagggtatcatttattatgttacgacctcgtctaagctagaggagtggctagctaatgagacaatgcaggaaggacttcgtctgtgtgctgatcgcaattatgtcgatgtggacccgacctttaatccaaacattgatgaagactatgaccaccgactggcaggcatatctagggagagtttctgtgtgatttacctcaactggatagagtactgctcttcccgaagagcaaagcctgtggatgtggacaaagattcatccctagtgactctctgttatggactctgtgttctgggacggagagctttggggactgcatcccatcatatgtccagtaatttagagtcattcctctatggattgcatgccctatttaaaggagatttccgtatttcttcaattcgagatgaatggatctttgctgacatggaattgctaagaaaagtagtagtccctgggatccgtatgtccattaaacttcatcaggatcattttacttctccagatgaatatgatgaccctactgtgctctatgaagccatagtatctcatgagaagaacctcgtaatagcccatgaaggggaccctgcatggcggagtgcagtacttgccaactctccctccttgcttgctctgcggcatgtcatggatgatggcaccaatgaatataaaatcatcatgctcaacagacgctacctgagcttcagggtcattaaagtgaataaggaatgtgtccgaggtctttgggcagggcaacagcaggagcttgtttttctacgtaaccgtaacccagagagaggtagcatccaaaatgcaaagcaagccctgagaaacatgataaactcatcttgtgatcaacctattggctacccaatctttgtctcacccctgacaacttcttactctgacagccacgaacagcttaaagacattcttgggggtcctatcagcttgggaaatatcaggaacttcatagtgtcaacctggcacaggcttaggaaaggttgcggagctggatgtaacagtggtggcaatattgaagattctgatactggaggtgggacttcctgcactggtaacaatgcaacaactgccaacaatccccacagcaacgtgacccagggaagcattggaaatcctgggcagggatcaggaactggactccacccacctgtcacatcttatcctccaacactaggcactagccacagctctcactctgtgcagtcgggcctggtcagacagtctcctgcccgggcctcagtagccagccagtcttcctactgctatagcagccggcattcatccctccggatgtccaccactgggtttgtgccttgtcggcgctcttctactagtcagatatcgcttcgaaacttgccatcatccatccaatcccgactgtcgatggtgaaccaaatggaaccctcaggtcagagcggcctggcctgtgtgcagcacggcctgccttcctccagcagctccagccaaagcatcccagcctgcaaacatcacactctcgtgggctttcttgcgacagagggaggtcagagcagtgccactgatgcacagccaggcaacaccttaagtcctgccaacaattcacactccagaaaggcagaagtgatttacagagtccaaattgtggatcccagtcaaattctggaagggatcaacctgtctaaaaggaaagagctacagtggcctgatgaaggaatccggttaaaagctgggagaaatagctggaaagactggagtccgcaggagggcatggaaggccatgtgattcaccgatgggtgccttgcagcagagatccaggtaccagatcccacatcgacaaggcagtgcttctggtccagattgatgataaatatgtgactgtaattgaaactggggtactagaacttggggctgaagtgtgagccagtgtttattataaagacatttctttttccctctcaattccaaggcattggaaaaagagaggaacaagcagaagatgcctgcaggtatcactttgatcctatgtgggagcgactgaaaatagaatgagcttggttaagcacctctcctttgcccttcaccctgactcctgtcactgtctccatccccaaataaagctgaaatatttttttaagttagctgccgagaaaacattttgcatgaaggataaagttctgttaaaatacatccttaaaaaaagtttttcctatgcattgcctatgctttaaatcaacaaactcttcatttctaaactatgatctcatatttttctaatttctttgccaaaaataattgccatgttttgtcatagaacatgaaattcatttaccttgatttttaagaacagaccagtgtagaaatgttccttttgacttatagcagtataaaagtttaatgtacagtgaaagagactatgaacagacatagatttatcttattccttgagcgctaaaaactttaataaaaaaaactgcactaattttttacagcaatgcactaaagtctgagatttctcagaacatttatttatatataaaaataaaataccattatttaaattgcctttgggattagccccttccctttccttataaacacaggtagcaggaactgtgctgctcatttttctgttagtagtgtgtacttcatgccaggacattgggtattttctttaaagtgaatatagaatctcaagatatacgtagcttcatcattgacatttcccagagccaatagtcagcggatcggtcttgtgaacaccactgccagctcctgtgtctacatctcagaggagcccatgtgctctgcttctctccaccagagcaagctctgctgggcgtgcttctgggaagaaaacaattttctttaagaagaagatgaatgtccaggaatttaaagaaaggatcgattgccttttatttatgagtttctagctcttgaagttattcacatgcagttcagttagtcaagtaaaattttttttcaaataaaagtatccaagtggtgcagttattattatatccctctttaataattttgctttttatttttcccctcttctttttctgttacttgaattttatttcctgtaatttatagtgtgtagctgtaaattgaaatatttataactgtgaaattgacttaattcatatgttgtctcataactttattttttttaaatgcatattcagggaaatatattactcatatttacaattgggcgatataggaacttcaatttagatttaatttgcaactcttagcattttttaaatccttgataaaattttcccttttggtgtgaaactccaaagaaaattgtacatctcctctgagcatttaggagcagccatctttctaccccttgtgaataaatcattgaaagaaacaggtaaaattaattttaatgatacattttgtttcacccagtatagtcaaagtattactatttcatcatatgtcactagccatatttcaagtactcaatagctacatgtacctagtggctactgtattagacagtacagatttaaagtatcttttgttgaggtgacagaagagagaagctgtttttcctaccaattctgatgtagatctcacattatagcataacattacagtagaaggaatgaaaactaagaaagtaaatagtgaacatacagaacttactgcatttccactttaaaacctatttattttccctttttctaattttaaacttttgtggtcattcagaacctaatgtgccttgtgttgacatttccatagacttcacactttacaaaatttactgtttaaaaatacttgtcaaatgatttactgaacctttatacaaaagtaccctttctaaattgaccatttaaaaatgtatttttgtgataccgtcattatgttctgcatttgcctcattttggcagatctacagtatgccattaaagtttagtgttgtttttggttttggagggtttttttctgaaactgaatttataatctatttctctgtatacgtatatttttaaaatcttctgaaaggaactatgttccctgctgcttcttccctttctgaagtgaatatgatcttttcatggtcattgcctagataaaagtagagccttttcaatcttagatggaagataattcattttcccacacagaaaaaaaatctgacctttacatgatttaatctgaagggctagaattttttaatttctagcccctcctccaaaaaaattttaaacacatcacatactctgaaaagtcagatttcaaatgcaagactagactttatatggaacatatatgttgggttttgattttgggtagcaattgacatatatttttctcaaaacaagttgaattttgttaacatatataattctttagtgaatttataaattaggaaccctgagaagaagccctgttgtttttcttaagagtctaaaactgacaatcttttaaaaatcataatacttttctagtaattgcatcagggaattggtgataattgaagaaagatccatttcttaagaataatttgatctaaattattatatggaaataaacatacttgtgttaactaaattgatcataaattcttgttcctgcctcacccctcaccccccagagaatagtgagtgactcgtttagattctctgctttttttcagttatgtacaagacttcagcatacattaatgtctttagtttataaatttgccaatgctttaatttccataatttgaaagttaaaagatgtaactaaaatactagcttttttattcatttccttttggtggagttgtatgattgaaaactttgctttttcttgtttaattcttccgccaccccctcttttgagagaaaggtaatcgtggaatgagttataaattattgcctttttttcctttatttctttcattcagtggcaaaaaacattttataactcctaagtttttggttaatcttccaacttataccttggtgtgaactctctttttacaccattttcaacactggataaaactttaatgttgactttttgctaaagaactttaatttttccaagaatctagattaacataagatgttgatatttaaggaacttggaagagtaagtggtgaggctgtatgtatattttttaagagattaccttttaggaaattagtgaacaaacttaaccagtgttctgccttctttgactttgttactggaggatgataatctatttctattagattcgaagtattttggaaaatatttcaagtatatctgaactacttataattcttaaaacagaagtagtcagacaatatttgtatcctaagtgagatatggaaaattactctgtatactaaatgtcaggcaatgaaaatgtaagtttttgtgtagaaaacccattaagaagatgtgtttttctttctgaattagtttatttttccatcacataccaaaatataaaaatcagcctcacatttttcagcaagtttagcttatagccttgataaattcctctgtgcttctgagcagcatccttctgcctctgcttagcagctctgcatttggtggattgctgttgtgagtcattcatccagcactgggccttttaagctgaagattcacccagtgtctaaagttgtccttttcttatagctagctttcaagcatctttcctcctaaataaatatgtgacttgagaaaaaggtaataatgattttgtcagaattctttgaatttatatttactagctacttaaccataaactgctgtccagattgttaatttcatttatatttattttaattaatttgtcatgaatatggacaaagccttttctggggtgtgtgtgtgtgtgtatgtttgttttttaagtcgtcattattcattcgtattctttttctgtgtaatgtaatcatataaagttactttggacagagacccagttaattttctcttttgataggatacatggtttagataaggtataaagtgtccctttttattctagaggcttttcctttaattcagagattagtggagataataacgtcagtcaaggctaatgtggtacatggaacttgctaatggaggttggacattctgtttcagtcttacatggatattgtttcattggtgttgaggaagaaaaaaattagatactaccatgcattgggacagcataattctaatattacattgaatatggctttttaaaaataagtattaaaaagccaatcgttttctccatttatctatcttttttgtttgtttttaatttggttgattgatatgcacccaggccgtcttatttttacttgttaaatgtctgtctaggaagaactgtgattggaaaggaattaattattatacaaataaatctggtaggatatgagtggagtaagtttgcttgaaacagaagtatattttctactttgaatcacctcaccagagtcatctgtcaagaattatgtataacaatttatctttattgcctacatacaacatactttttctgaattaagataacttctatttgtgagttgaacttcattatctgccattttgtggaatcaaccttacattctttggtggaactagagctgattgtcaccacaaggttatatgacaactctgttctaagacttatacctattatatagggttataccttttttcttatgcctcagctctgtacctgacaatttatgattcagtggagccaagctagaaggaacaaaggtcatctaacactgtgatggggatgaattcctgagttttacctgcacaatgaggtggtgccccggaattcacaacagagtagtgatagagcataagatggctgctccagatgactcttgggtttagtgtacttgtgattgaacaagattttttatctatgaagcttgattctacaaccaaaataatagaaatgggggggggggggggaatcatgtctgcttatgctttttaaaagcttatagtttaagtaaaagtaaaatgtaaaaactgattaaacctatacaagtctggcaatgagctctgcatgaggaaatggaaggaggaatattgaaaatgattctaggaaagtgaacgtaagaaaggaaaatgggttttccttttctgatcatgggctctggaaagtattcatggcctttaccagcattcagtataaaccagagataaggacatatgtacttacgtgtgtctgtgagtgtgtgtgtgtctgagtgttattctgaacagcttgtaaatattgtagttgtttaaaatggaaaataaaagctgagttcttttggcaaatatattgcatcaaaaatacagtattgacagtggataaaacactgaggaaataaattttttttcattttgc

SEQ ID NO: 164130 - DNA, 6988 bp, Homo sapiens
  Payload ID: 12315
  Gene Symbol: PCNX
  Gene Name: pecanex homolog (Drosophila)
  Uniprot ID: Q96RV3
  ENST ID: ENST00000439984
  CDS Start-End: 113-6805
ctccggaggtggatagacggggcagctgcaggctccggcgaccgaggccgagctggggccggggcggggacggcggcggcggcggcggcgacggcggcggcgccgggtggggatggggtcgcagacgctgcagatcctccgacagggggtgtgggccgcgctcagcgggggctggtactacgacccgcaccaggccaccttcgtgaacgcgctgcacctctacctgtggctctttctgctgggcctgcccttcaccctctacatggcccttccttctaccatgattatagtagcagtttattgtcctgtgatagctgctgttttcattgttctgaagatggtcaactatcgactacacagagcacttgatgctggagaagttgtagataggactgcaaatgagttcacggatcagcgaaccaaagctgaacaaggcaactgttcaaccaggagaaaagacagcaatggaccgagtgatcctggtggagggattgaaatgtctgagttcatccgagaggccacacccccagttggttgcagttccagaaattcttatgccggtctagatccaagcaaccagattggatctggttcctcgcgtcttggaacagcagcaactattaaaggagatacagacactgctaagacttctgatgatatcagtttaagtctgggccaaagttctagtctttgtaaggaaggaagtgaagaacaagatttggcagctgatcggaagctctttcgtcttgtctccaatgactccttcatctctattcagccttccttatcctcttgtggacaggacttgccaagggacttcagtgacaaagtgaacctgccaagtcataaccaccaccaccatgttgatcagtctctgtccagcgcctgtgacacagaagtagcttctcttgtacctttacactcacactcttatagaaaagaccaccggccgcgaggtgtaccacggacttctagctctgctgtggcttttccagacacttcactgaatgattttcccctttatcagcaaagacgtggattagatccagttagtgagttagaatcttccaagcctctttctggatccaaagaatccttggtggaaaattctggtttatctggggaatttcagcttgctggtgacttgaaaatcaatacttctcagccacccacaaaaagtgggaagagcaaacctttgaaagcagagaaaagcatggacagcttgaggagcctgagcacacggagtagtgggtcaacagaaagctactgcagtggaacggaccgggacactaacagtactgtcagcagctataaaagtgagcagaccagctcaactcacatagagagcatcctgtcagagcatgaggagtctcctaaagcaggaacaaaaagtgggaggaagaaagagtgctgtgcaggcccagaggagaagaatagctgtgccagtgacaaaaggactagcagtgaaaagattgctatggaagcgagtaccaacagtggggttcacgaggccaaggaccccaccccctctgatgagatgcacaaccagagaggtctcagcacctctgcatctgaagaagccaataaaaatccccatgcaaatgaatttacttcccaaggggacagaccacctgggaacactgcagaaaacaaagaagagaagagtgataagtcagctgtttctgtggattccaaagtgcgtaaagatgttggtggaaagcaaaaggaaggggatgttcgacctaaatcttctagcgtaatccatcggacagcttctgcccacaagtcaggcaggagacgcacaggaaaaaaacgggctagcagttttgattcaagccggcatagggactatgtttgctttcgaggtgtttctggtaccaagccacacagtgctatattttgtcatgacgaagactctagtgatcagagtgacttgagtagagcatcaagtgttcagtctgctcaccagttcagcagtgatagctcttctagcaccacttctcattcctgtcagtctcctgagggcagatacagtgctctaaagaccaaacacactcataaagaaaggggcacagactctgaacacacacacaaagctcatttggttcctgaaggaaccagcaaaaagcgtgcaacacgacggacttctagcacaaatagtgccaagactcgtgcccgagtgttgagcctggacagtggcacagtagcatgtttgaatgactcaaacaggttaatggcacctgaaagtataaagcccttaaccacttcaaaatcagatcttgaggccaaagagggagaggtgctagatgagctatctttattaggacgggcttcccagttagagacagtcactcgatctaggaatagcttgccaaaccaggttgcatttcctgaaggggaagagcaagatgcagtcagtggaggtaagttctcttctacgctgtatgagactggtggctgtgatatgtcacttgtgaattttgaaccagcagcaagaagagcatccaatatctgtgacacagattctcatgtatccagttctacctcagttcgattttatccacatgatgtgattcgattgaatagactattgaccattgatacagatttgttggagcaacaggacattgatctaagccctgacttggcagctacttacggcccaacagaagaagctgcccaaaaggttaaacactattatcgcttttggatcctaccccagctgtggattggcattaactttgacagactcacacttttggccctgtttgatagaaatcgtgagatcctggaaaatgtgttagctgtcatcctggctattctcgtggcctttttgggatctattcttctcatacaaggattcttcagagatatctgggtcttccagttctgcctcgtcatagccagctgtcaatactcactgcttaagagtgttcaaccagattcttcttctcccagacatggtcataatcgtatcattgcctacagtagaccagtttatttctgcatatgttgcggtcttatttggctcttggattatggtagcagaaacctgactgcaaccaagttcaaattatatggaataactttcaccaatccactggtgtttatatcagccagggatttagttatagtgtttacactctgtttcccaatagtgtttttcattggtctcctgcctcaggtgaatacatttgtaatgtacctttgtgaacaattggatattcatatttttggtggtaatgccactacaagcctgcttgcagcactttacagttttatctgtagcattgttgcagtagccttattgtatggattatgttatggggctttaaaggattcttgggatggccagcatattccagtacttttctccattttttgtggtttattagtggcagtgtcttaccatctcagccgacaaagcagtgatccatctgtacttttctctttagtgcaatccaagatttttccaaaaacggaagagaaaaatccagaagaccctctatctgaagtaaaagatccactgcctgaaaaacttagaaattctgttagtgagcgattacagtctgacctggtagtatgcattgtaattggtgtgctgtattttgctattcatgtaagcacagtcttcacagtattgcagcctgccctcaagtatgtgttgtatacattggttggctttgtgggttttgtaacccattatgtgctgcctcaagttagaaaacagctaccatggcactgtttctctcatcctctgctaaagacactagagtataatcagtatgaagttcgaaatgcagccactatgatgtggtttgagaaacttcatgtgtggcttctttttgtggagaagaatataatctatccattgattgttctcaatgaactgagcagcagtgcagagacaattgctagtccaaagaaactgaatacagaattaggtgctttaatgatcactgttgctggtttgaagttgctacgatcctcttttagcagccctacatatcagtatgttacagtcatctttactgtgctgtttttcaaatttgactatgaagctttttcagagaccatgctgttggatctcttctttatgtccatactcttcaacaagctttgggaactactttataaattgcagtttgtgtatacctatattgccccatggcagatcacatggggttctgctttccatgcttttgctcagccttttgcagtgcctcattcagccatgctgtttattcaggctgctgtctcggccttcttctctactccactgaacccctttctgggaagtgcaatattcatcacttcatatgtccgacctgtgaaattctgggagagagactataacacaaaacgagtggatcattcaaataccagattggcttcccagcttgatagaaatccaggatcagatgacaacaatctgaattccatcttttatgagcatttaactagatccctacagcacagcctctgtggtgatttgctactaggacggtggggaaactacagtacaggggactgtttcatccttgcctctgactatctcaatgcattagtacaccttatagagataggcaatggtctggtcacttttcagctgcggggacttgaattcagaggtacctactgtcaacaacgggaagtggaggccattactgaaggtgtagaggaagatgaaggattttgctgttgtgaacctggccatattcctcacatgctttcatttaatgctgcatttagccagcgatggctagcttgggaagtgatagtcacaaagtacattctggagggttatagcatcactgataacagtgctgcttctatgcttcaagtctttgatcttcggaaagtactcaccacttactatgtcaagggtatcatttattatgttacgacctcgtctaagctagaggagtggctagctaatgagacaatgcaggaaggacttcgtctgtgtgctgatcgcaattatgtcgatgtggacccgacctttaatccaaacattgatgaagactatgaccaccgactggcaggcatatctagggagagtttctgtgtgatttacctcaactggatagagtactgctcttcccgaagagcaaagcctgtggatgtggacaaagattcatccctagtgactctctgttatggactctgtgttctgggacggagagctttggggactgcatcccatcatatgtccagtaatttagagtcattcctctatggattgcatgccctatttaaaggagatttccgtatttcttcaattcgagatgaatggatctttgctgacatggaattgctaagaaaagtagtagtccctgggatccgtatgtccattaaacttcatcaggatcattttacttctccagatgaatatgatgaccctactgtgctctatgaagccatagtatctcatgagaagaacctcgtaatagcccatgaaggggaccctgcatggcggagtgcagtacttgccaactctccctccttgcttgctctgcggcatgtcatggatgatggcaccaatgaatataaaatcatcatgctcaacagacgctacctgagcttcagggtcattaaagtgaataaggaatgtgtccgaggtctttgggcagggcaacagcaggagcttgtttttctacgtaaccgtaacccagagagaggtagcatccaaaatgcaaagcaagccctgagaaacatgataaactcatcttgtgatcaacctattggctacccaatctttgtctcacccctgacaacttcttactctgacagccacgaacagcttaaagacattcttgggggtcctatcagcttgggaaatatcaggaacttcatagtgtcaacctggcacaggcttaggaaaggttgcggagctggatgtaacagtggtggcaatattgaagattctgatactggaggtgggacttcctgcactggtaacaatgcaacaactgccaacaatccccacagcaacgtgacccagggaagcattggaaatcctgggcagggatcaggaactggactccacccacctgtcacatcttatcctccaacactaggcactagccacagctctcactctgtgcagtcgggcctggtcagacagtctcctgcccgggcctcagtagccagccagtcttcctactgctatagcagccggcattcatccctccggatgtccaccactgggtttgtgccttgtcggcgctcttctactagtcagatatcgcttcgaaacttgccatcatccatccaatcccgactgtcgatggtgaaccaaatggaaccctcaggtcagagcggcctggcctgtgtgcagcacggcctgccttcctccagcagctccagccaaagcatcccagcctgcaaacatcacactctcgtgggctttcttgcgacagagggaggtcagagcagtgccactgatgcacagccaggcaacaccttaagtcctgccaacaattcacactccagaaaggcagaagtgatttacagagtccaaattgtggatcccagtcaaattctggaagggatcaacctgtctaaaaggaaagagctacagtggcctgatgaaggaatccggttaaaagctgggagaaatagctggaaagactggagtccgcaggagggcatggaaggccatgtgattcaccgatgggtgccttgcagcagagatccaggtaccagatcccacatcgacaaggcagtgcttctggtccagattgatgataaatatgtgactgtaattgaaactggggtactagaacttggggctgaagtgtgagccagtgtttattataaagacatttctttttccctctcaattccaaggcattggaaaaagagaggaacaagcagaagatgcctgcaggtatcactttgatcctatgtgggagcgactgaaaatagaatgagcttggttaagcacctctcctttgcccttcaccctgactcctgtcactgtctc

SEQ ID NO: 164131 - DNA, 384 bp, Homo sapiens
  Payload ID: 12315
  Gene Symbol: PCNX
  Gene Name: pecanex homolog (Drosophila)
  ENST ID: ENST00000555780
  CDS Start-End: 1-288
aaggcagaagtgatttacagagtccaaattgtggatcccagtcaaattctggaagggatcaacctgtctaaaaggaaagagctacagtggcctgatgaaggaatccggttaaaagctgggagaaatagctggaaagactggagtccgcaggagggcatggaaggccatgtgattcaccgatgggtgccttgcagcagagatccaggcattggaaaaagagaggaacaagcagaagatgcctgcaggtatcactttgatcctatgtgggagcgactgaaaatagaatgagcttggttaagcacctctcctttgcccttcaccctgactcctgtcactgtctccatccccaaataaagctgaaatatttttttaagttagctgccg

SEQ ID NO: 164132 - DNA, 4204 bp, Homo sapiens
  Payload ID: 12315
  Gene Symbol: PCNX
  Gene Name: pecanex homolog (Drosophila)
  ENST ID: ENST00000554691
  CDS Start-End: 1-3986
cagatttgttggagcaacaggacattgatctaagccctgacttggcagctacttacggcccaacagaagaagctgcccaaaaggttaaacactattatcgcttttggatcctaccccagctgtggattggcattaactttgacagactcacacttttggccctgtttgatagaaatcgtgagatcctggaaaatgtgttagctgtcatcctggctattctcgtggcctttttgggatctattcttctcatacaaggattcttcagagatatctgggtcttccagttctgcctcgtcatagccagctgtcaatactcactgcttaagagtgttcaaccagattcttcttctcccagacatggtcataatcgtatcattgcctacagtagaccagtttatttctgcatatgttgcggtcttatttggctcttggattatggtagcagaaacctgactgcaaccaagttcaaattatatggaataactttcaccaatccactggtgtttatatcagccagggatttagttatagtgtttacactctgtttcccaatagtgtttttcattggtctcctgcctcaggtgaatacatttgtaatgtacctttgtgaacaattggatattcatatttttggtggtaatgccactacaagcctgcttgcagcactttacagttttatctgtagcattgttgcagtagccttattgtatggattatgttatggggctttaaaggattcttgggatggccagcatattccagtacttttctccattttttgtggtttattagtggcagtgtcttaccatctcagccgacaaagcagtgatccatctgtacttttctctttagtgcaatccaagatttttccaaaaacggaagagaaaaatccagaagaccctctatctgaagtaaaagatccactgcctgaaaaacttagaaattctgttagtgagcgattacagtctgacctggtagtatgcattgtaattggtgtgctgtattttgctattcatgtaagcacagtcttcacagtattgcagcctgccctcaagtatgtgttgtatacattggttggctttgtgggttttgtaacccattatgtgctgcctcaagttagaaaacagctaccatggcactgtttctctcatcctctgctaaagacactagagtataatcagtatgaagttcgaaatgcagccactatgatgtggtttgagaaacttcatgtgtggcttctttttgtggagaagaatataatctatccattgattgttctcaatgaactgagcagcagtgcagagacaattgctagtccaaagaaactgaatacagaattaggtgctttaatgatcactgttgctggtttgaagttgctacgatcctcttttagcagccctacatatcagtatgttacagtcatctttactgtgctgtttttcaaatttgactatgaagctttttcagagaccatgctgttggatctcttctttatgtccatactcttcaacaagctttgggaactactttataaattgcagtttgtgtatacctatattgccccatggcagatcacatggggttctgctttccatgcttttgctcagccttttgcagtgcctcattcagccatgctgtttattcaggctgctgtctcggccttcttctctactccactgaacccctttctgggaagtgcaatattcatcacttcatatgtccgacctgtgaaattctgggagagagactataacacaaaacgagtggatcattcaaataccagattggcttcccagcttgatagaaatccaggtacctactgtcaacaacgggaagtggaggccattactgaaggtgtagaggaagatgaaggattttgctgttgtgaacctggccatattcctcacatgctttcatttaatgctgcatttagccagcgatggctagcttgggaagtgatagtcacaaagtacattctggagggttatagcatcactgataacagtgctgcttctatgcttcaagtctttgatcttcggaaagtactcaccacttactatgtcaagggtatcatttattatgttacgacctcgtctaagctagaggagtggctagctaatgagacaatgcaggaaggacttcgtctgtgtgctgatcgcaattatgtcgatgtggacccgacctttaatccaaacattgatgaagactatgaccaccgactggcaggcatatctagggagagtttctgtgtgatttacctcaactggatagagtactgctcttcccgaagagcaaagcctgtggatgtggacaaagattcatccctagtgactctctgttatggactctgtgttctgggacggagagctttggggactgcatcccatcatatgtccagtaatttagagtcattcctctatggattgcatgccctatttaaaggagatttccgtatttcttcaattcgagatgaatggatctttgctgacatggaattgctaagaaaagtagtagtccctgggatccgtatgtccattaaacttcatcaggatcattttacttctccagatgaatatgatgaccctactgtgctctatgaagccatagtatctcatgagaagaacctcgtaatagcccatgaaggggaccctgcatggcggagtgcagtacttgccaactctccctccttgcttgctctgcggcatgtcatggatgatggcaccaatgaatataaaatcatcatgctcaacagacgctacctgagcttcagggtcattaaagtgaataaggaatgtgtccgaggtctttgggcagggcaacagcaggagcttgtttttctacgtaaccgtaacccagagagaggtagcatccaaaatgcaaagcaagccctgagaaacatgataaactcatcttgtgatcaacctattggctacccaatctttgtctcacccctgacaacttcttactctgacagccacgaacagcttaaagacattcttgggggtcctatcagcttgggaaatatcaggaacttcatagtgtcaacctggcacaggcttaggaaaggttgcggagctggatgtaacagtggtggcaatattgaagattctgatactggaggtgggacttcctgcactggtaacaatgcaacaactgccaacaatccccacagcaacgtgacccagggaagcattggaaatcctgggcagggatcaggaactggactccacccacctgtcacatcttatcctccaacactaggcactagccacagctctcactctgtgcagtcgggcctggtcagacagtctcctgcccgggcctcagtagccagccagtcttcctactgctatagcagccggcattcatccctccggatgtccaccactgggtttgtgccttgtcggcgctcttctactagtcagatatcgcttcgaaacttgccatcatccatccaatcccgactgtcgatggtgaaccaaatggaaccctcaggtcagagcggcctggcctgtgtgcagcacggcctgccttcctccagcagctccagccaaagcatcccagcctgcaaacatcacactctcgtgggctttcttgcgacagagggaggtcagagcagtgccactgatgcacagccaggcaacaccttaagtcctgccaacaattcacactccagaaaggcagaagtgatttacagagtccaaattgtggatcccagtcaaattctggaagggatcaacctgtctaaaaggaaagagctacagtggcctgatgaaggaatccggttaaaagctgggagaaatagctggaaagactggagtccgcaggagggcatggaaggccatgtgattcaccgatgggtgccttgcagcagagatccaggtaccagatcccacatcgacaaggcagtgcttctggtccagattgatgataaatatgtgactgtaattgaaactggggtactagaacttggggctgaagtgtgagccagtgtttattataaagacatttctttttccctctcaattccaaggcattggaaaaagagaggaacaagcagaagatgcctgcaggtatcactttgatcctatgtgggagcgactgaaaatagaatgagcttggttaagcacctctcctttgcccttcaccctgactcctgtcactgtctccatccccaaataaagctgaaatatttttttaagtt

SEQ ID NO: 164133 - DNA, 595 bp, Homo sapiens
  Payload ID: 12315
  Gene Symbol: PCNX
  Gene Name: pecanex homolog (Drosophila)
  ENST ID: ENST00000556849
  CDS Start-End: 1-595
ctttatgtccatactcttcaacaagctttgggaactactttataaattgcagtttgtgtatacctatattgccccatggcagatcacatggggttctgctttccatgcttttgctcagccttttgcagtgcctcattcagccatgctgtttattcaggctgctgtctcggccttcttctctactccactgaacccctttctgggaagtgcaatattcatcacttcatatgtccgacctgtgaaattctgggagagagactataaagttttgcccttgtcatccaggctggagtgcaatgacacaatctcgactcactgcaacctccgcctcccggagtgcaatggcgccatcttgattcactgcaacctccgcctcccaggtacctactgtcaacaacgggaagtggaggccattactgaaggtgtagaggaagatgaaggattttgctgttgtgaacctggccatattcctcacatgctttcatttaatgctgcatttagccagcgatggctagcttgggaagtgatagtcacaaagtacattctggagggttatagcatcactgataacagtgctgcttctatgcttcaagtc

SEQ ID NO: 164134 - DNA, 7518 bp, Homo sapiens
  Payload ID: 12316
  Gene Symbol: PCNXL2
  Gene Name: pecanex-like 2 (Drosophila)
  Uniprot ID: A6NKB5
  ENST ID: ENST00000258229
  CDS Start-End: 236-6649
tggcgctcacctgcccggccgcagcagccggctccggcgccgcggttcgcgggtccgggcggaagagcagctccagcttcaaacgtggggtggaaggaggcggcgggggcgacggcggcggcgacggcgggggcgcggcccgcgggcccgggtgttagacctgagggagcctggagatccggccggggcgcgcagggtgcagcggggcgctcaccagccccggggcgcagccggcatggtgtcccaggtgctgcagctgctccggcagggcgtgtgggccgcgctcaccgggggctggtaccacgacccggagcagagcaagttcaccaacagctgccacctctacctgtggctgttcctcctgctgctgcccctggccctgcacctggcttttcctccaaatgcgatcattgtatttttctactgcagtgcagtgactatattcttcacaataatcaaactggtcagttatcgcctacacctcatgtttgacaaaggagaagtaattcagcaaaagccctccagaaaggaagaaaagccaaataaagacaaggaggccaaaggtgaacacataactaatcacagaaatccaagcaataataggcagattcacaatggcaaaaaggaagaggccagtcgaaacctctccacgcctcccctccgctgcagctccagagggcaaagcataacctctcatcactcttctgggccattggagttgtcagcacaggaaactgtagaagatctcaaaggtgtcattctattagaagaccatcccatagcaccagtgtcatctacctcacctggtatcaaagtggaaagcttacctgcgtctcaagcacacatgctggaaaccacgaccaagtcagtaatacctgtaaaaccagttgccacagaaactctcatcaatggtaaaggaaaggaaagaggaggcaaggggcagcctcctttgcgccacagatccgagggtggcttagtggataagggacccttgaagaagttgccccacctgtctttgtctcagtatgacttactagaaacagacgtttctttccagccgtgggggagtgagaattcagtcctgattccagaacctgtcagttgtccccggggctccataagggaacgggtacaaagcaagtcacctcaggacagcctgagcagcagctgccctcaatgtgacaccatcgtggccaagcctgtggaggagccagcagacacatcctgtcaggtagatacctcctgccagggggacctgcccttgcaccaggaagtggactcctcagatagtgaggtagctgttactctcatcgatacttctcaacccggagacccactgagtctacatgagcccataaaaattgttatcacgatgagcagtaccccaaactccatgacagatttggaaagctccctccacctgagggtggttggcacagagaagaccagtgtaaagtctgacgctgagcccactaacccaggggcggccggttctccaaatgccgagcagatctcaattcctgtaatcaccctggacctgcctgagggtgggggaggaggtgttccctgtcccgaaggcaatggaagtgaaaggactccagagagactgaagacgagggtatccaccaatcagtgttctggctacggatctggggaggggggaaatgccatcaaggatcacagttcttcatcacgggaaccctgggaatcggtgtcccggcttacacctgatacaggctccgagtctaaggtggggaaggaaggccagactaaccttgacccatcgtcttgtaagtccagccatgaaaagaggcatgcccgggtgctcagtgtggacagtgggacagatgtcttcttgagtaaaagttctgcagaaattgttaacgatacagagaaaacaatgccaacttccaaatctgacctagaggctaaggaaggacaaatgccaaatgagtccaacttcctggaatttgtctccctgttagaatccattaatacttccaagatgacggcatccagtcaactgaatggctcagctgagcagaatgaagaaagtgggcttctccgagataactgttcccaggaaaaaaaggaggaaatcctggaaaatgaaaagcccagtggacacagttctaagcaaggaaaaccagatttgcaaagtcaagaccatactagcaccggccccgcatgcactcagcctgccaagaccacagccttttttcagggcaatagacaaagacagataatctacagggtaacttcccaacaagatagttctgtcttgcaagtcatcagtgggcctgaaacatctgtacaagaagagatatctgtggatgctatgcatgtcttcattgatgaacatggggaaattagatcctgttatttaaaatctggaaatcagaaagaaggccctttacagcctctaccatcaaataatgactgtctctctcaggctcgagagatgcaggtcagctcctccagtaccacaacttctgagagtcaagatccgtcttctggggaccctgccgtcagtgcccttcagcaacagctgttactgatggtggctcgcaggacccagtcggaaaccccacggcatgtgagtcaggatctggaagcctcgtcatgttcttcaacacaaggaaaatttaaccgagagcagttttacaaatttatcattttccctggcaagtggattaaagtctggtatgatcgactgaccttgctggcattacttgatcgaactgaagacatcaaggagaatgtactggcgattttactcattgtcctggtttccctccttggatttctgaccttgagccaaggcttttgcaaagatatgtgggtgctcctcttctgcctcgtcatggccagctgccagtactccctgctaaagagtgttcagcctgaccccgcctcaccaatacacggacacaaccaaatcataacatatagcagaccaatctatttttgtgtgctgtgtggccttattttgcttcttgatacaggggccaaagccaggcaccctcccagttacgttgtgtatggcctgaagctcttctctccagtgtttctacaatcagctagggactacttaatagtatttttatattgcttccctgctatttccctccttgggctcttcccgcaaatcaacactttctgcacttatcttttggagcaaattgacatgctgttttttggtggttctgctgtgtctgggataacctcggctgtttacagtgtggcccggagcgtcttggctgccgccctgctccacgcagtctgcttcagtgcagtgaaggaaccgtggagcatgcaacacatcccggcactgttttcggccttctgtggcctcttggtcgccctttcttaccatctgagccgtcagagcagtgacccatctgtactcatgtccttcatccaatgcaggctgtttcctaaatttttacatcaaaatctggcagagtcagctgctgaccctctccccaagaagatgaaagattcagtgacggatgtcttaaaatgggatctcatcgtctgcgcagtggttgctgtcctctcatttgcagtcagcgccagcactgtattcctgtcattgcgaccatttctcagcatcgtgctgtttgccttggctggagccgtggggtttgtaacacattacgtgctccctcagctccgcaagcatcatccctggatgtggatttcacaccccattctcaaaaacaaagagtatcatcaacgggaagtgagagatgttgcccatttaatgtggttcgaaagactctatgtttggcttcagtgttttgaaaaatacatcttgtacccagcgctaattttgaatgccctcactattgatgcatttttaataagcaatcaccggagacttggtacccactgggacatttttctgatgatcattgctggcatgaagctgttgcggacatcattctgcaacccggtttaccagtttattaacttgagcttcactgtcatctttttccactttgactacaaagatatttcagagagcttcttactggatttcttcatggtgtccattttatttagcaagctcggggacctgcttcacaagttacagttcgtcctgacatatgtggctccttggcagatggcttggggttcttcgtttcacgtgtttgctcagctctttgccattcctcattctgccatgcttttctttcagacgattgccacatcaatcttttctaccccattgagcccatttcttgggagtgtcattttcatcacatcatatgtcaggccagtgaaattctgggagaaaaactacaatacaaggcgagtggataattccaacacaagactggcagtccaaattgaaagagatccagggaatgatgacaacaatctcaattccattttttatgaacacttgacaaggaccctccaggagtccctctgtggagacttagttcttggacgttggggcaactacagctctggcgattgctttattttggcttcagatgacctcaatgcctttgttcacctgattgaaattggaaatggtcttgtcacctttcaacttcgaggactggaattccgaggaacctactgccagcagagggaggtagaagccatcatggagggcgacgaggaggacagaggctgctgctgctgcaaaccaggccacttgcctcacctgctgtcctgcaacgctgcctttcacctccgctggctcacctgggaaatcacgcagacccagtacatcctggagggctacagcatcctggacaacaacgcggccaccatgctgcaggtgtttgacctccgaaggatcctcatccgctactacatcaagagtataatatactatatggtaacgtctcccaaactcctctcctggatcaaaaatgaatcacttctgaagtccctgcagccctttgccaagtggcattacattgagcgtgaccttgcaatgttcaacattaacattgatgatgactacgtcccgtgtctccaggggatcacacgagctagcttctgcaatgtttatctagaatggattcaacactgtgcacggaaaagacaagagccttcaacgaccctggacagtgacgaggactctcccttggtgactctgtccttcgccctgtgcaccctggggaggagagctctgggaacagccgctcacaatatggccatcagcctggattctttcctgtatggcctccatgtcctcttcaaaggtgacttcagaataacagcacgtgacgagtgggtatttgctgacatggacctactgcataaagttgtagctccagctatcaggatgtccctgaaacttcaccaggaccagttcacttgccctgacgagtatgaagacccagcagtcctctacgaggccatccagtccttcgagaagaaggtggtcatctgccacgagggcgacccggcctggcggggcgcagtgctgtccaacaaggaagagctgctcaccctgcggcacgtggtggacgagggtgccgacgagtacaaggtcatcatgctccacagaagcttcctgagcttcaaggtgatcaaggttaacaaagaatgcgtccgaggactttgggccgggcagcagcaggagcttatatttcttcgcaaccgcaatccggagcgcggcagtatccagaacaataagcaggtcctgcggaacttgattaactcctcctgcgatcagcccctggggtaccccatgtatgtctccccactaaccacatcctacctagggacacacaggcagctgaagaacatctggggtggacccatcactttggacagaattaggacctggttctggaccaagtgggtaaggatgcggaaggattgcaatgcccgccagcacagtggcggcaacattgaagacgtggacggaggaggggccccgacgacaggtggcaacaatgccccgagtggtggcagccaggagagcagcgcagaacagcccagaaaaggcggtgctcagcacggggtgtcatcctgtgaagggacacagagaacaggcaggaggaaaggcaggagccagtccgtgcaggcacactcagcgctaagccaaaggccgcccatgctgagctcatctggccccatcttagagagccgccaaacattcctccagacgtccacctcagtgcacgagctggcccagaggctctcgggcagccggctctccttgcacgcctcggccacgtccctgcactctcagcccccgcccgtcaccaccaccggccacctgagtgtccgtgagcgggccgaggcgctcatcaggtccagcctgggctcctccaccagctccaccctgagcttcctcttcggcaagaggagcttttccagcgcgctcgtcatttccggactctctgctgcggaggggggcaataccagtgacacccagtcatccagcagcgtcaacatcgtgatgggcccctcagccagggctgccagccaggccactcggcacctctccgagccatgtgagccccctgatgccaccgagcaggggcagcttcatgaccgatgtctggctgaggctgtggcggacactctcggggttgtctgcaggagagcaagccaggaggacatgggcctggacgacacggcctcgcagcaaagtgtgtcagacgagcagtgacgggcgtgcggccgggcggggaggctggctcccccacacctcccacctgcattgctctccctcgtgctccccaaatcaccacaaccaaccaataccgcgatccatgagggactcctcctgtggaaaaggagagctgttccagaacacagaactgatctcaggtttttgaaaaaaaaaaaaaaaaaaaaaaaaaaatcaaacaacaacaacaaaaaaacctcacatgatggggaaacaaaaaaaagcaacaaagaagccacaccacacctccctggccaggcacagcgctgcccagagcggcacaccgcggacagcaccacacatgttccagaatctgaaatctcaaaagccattcactaacttaaaacaactcaacagagccatgaaacaaatgccctgatgaaaataagacaactgcatgttacatcatcggcactttatacattactgttaccatgaaaaagaaatgaacagcagcacgtctgataccatcagctgggcagatgcattaaggttaaatctaagtgtcaagaaaaccctatttctttataatatttatgcagctgttaagcgtaacatggtggcagcttcacaacaagaaccgtgatcatgcatgcagtcatgtctccagtattctgtgaaaagccaggatacgttaggatgtgagtttagaaactgagtccattcggtgcatggaaatccaccgcggagtcacacaatgctcctcactgtagtccaggcgattggtgggccgccagcaccctgcgggcttcacagggacgcgtgcttgttctccaagccccgcaacccttactgtgcacacaacatcgcacacacctttgtttttgaaattaaaatgtttatagtta

SEQ ID NO: 164135 - DNA, 5348 bp, Homo sapiens
  Payload ID: 12316
  Gene Symbol: PCNXL2
  Gene Name: pecanex-like 2 (Drosophila)
  Uniprot ID: A6NKB5
  ENST ID: ENST00000344698
  CDS Start-End: 1197-3530
cgaatatatcagatttaaccatatgaaattgccattttgtaggtgataataaacagttgactatcgtcaatttcataggcctgatgtcaatttcatatttcattctttaaagaccgccactcattgttggaaataaaaggacaaaggtaggctggcatagcctctccaagagagcagatcgctgcacttacaaagggttttggggatgtgtggagttcaaggactggtgaggttttggaggcatacatgggttgatggcatctgtataggtggttacttgaaaagcctgttattcatcagttgcccctcaagtctgcagtgagtcggctaactctcagaagccaggggttgtcatggactggctgccttacaaaagctgtgcactgaggggtgtttacatgatggaataggttcaaagctggttctagtggccacttgttaccatggctgcagatgatccgagagctttcattctcatggttcaacctaagaaaggtctataagagtataccccactcttgaaagcaggtggtggagacgttgactactcaccaccatttcctgaaatcaatttgaagagaaagatacctttgtggacactgttctcaagttctgaaagtgggtagcattacattggcagtttaaacacttgcttttttttttttgagtcttgctctgtcacccaggttggagtgcagtggtgcaatctcggctcactgcgacctcggcctcctggattcaagttcagcctcccaagtagctgagattataggagtgtgccaccacacatggctaatctttttgtatttttagtagagatggagtttcacactgtttgccagactggtaccaagctcctgacttcaaatgatctgcctgcctcagcctccctaagtgttgggattacaggcatgagccaccgtgctcagcctaaatacttgctttgattttgcagatctggtgctccaaattgattaagacacaagaccgttctctccaaatcagagagctactcatctctcccttccatgtgtttcttgtactgctccctctatctcttatcatgagactcctctcttcctgcagtgtggtaaaactacagcaatcgtcttaacctgtgagatctgtcacctttgcattttccactcatgcagctggttctataaaccaactcttctgcttggggggatctaatcatgaccttttacccttttgtggcctcttctagtacaaggcgagtggataattccaacacaagactggcagtccaaattgaaagagatccagggaatgatgacaacaatctcaattccattttttatgaacacttgacaaggaccctccaggagtccctctgtggagacttagttcttggacgttggggcaactacagctctggcgattgctttattttggcttcagatgacctcaatgcctttgttcacctgattgaaattggaaatggtcttgtcacctttcaacttcgaggactggaattccgaggaacctactgccagcagagggaggtagaagccatcatggagggcgacgaggaggacagaggctgctgctgctgcaaaccaggccacttgcctcacctgctgtcctgcaacgctgcctttcacctccgctggctcacctgggaaatcacgcagacccagtacatcctggagggctacagcatcctggacaacaacgcggccaccatgctgcaggtgtttgacctccgaaggatcctcatccgctactacatcaagagtataatatactatatggtaacgtctcccaaactcctctcctggatcaaaaatgaatcacttctgaagtccctgcagccctttgccaagtggcattacattgagcgtgaccttgcaatgttcaacattaacattgatgatgactacgtcccgtgtctccaggggatcacacgagctagcttctgcaatgtttatctagaatggattcaacactgtgcacggaaaagacaagagccttcaacgaccctggacagtgacgaggactctcccttggtgactctgtccttcgccctgtgcaccctggggaggagagctctgggaacagccgctcacaatatggccatcagcctggattctttcctgtatggcctccatgtcctcttcaaaggtgacttcagaataacagcacgtgacgagtgggtatttgctgacatggacctactgcataaagttgtagctccagctatcaggatgtccctgaaacttcaccaggaccagttcacttgccctgacgagtatgaagacccagcagtcctctacgaggccatccagtccttcgagaagaaggtggtcatctgccacgagggcgacccggcctggcggggcgcagtgctgtccaacaaggaagagctgctcaccctgcggcacgtggtggacgagggtgccgacgagtacaaggtcatcatgctccacagaagcttcctgagcttcaaggtgatcaaggttaacaaagaatgcgtccgaggactttgggccgggcagcagcaggagcttatatttcttcgcaaccgcaatccggagcgcggcagtatccagaacaataagcaggtcctgcggaacttgattaactcctcctgcgatcagcccctggggtaccccatgtatgtctccccactaaccacatcctacctagggacacacaggcagctgaagaacatctggggtggacccatcactttggacagaattaggacctggttctggaccaagtgggtaaggatgcggaaggattgcaatgcccgccagcacagtggcggcaacattgaagacgtggacggaggaggggccccgacgacaggtggcaacaatgccccgagtggtggcagccaggagagcagcgcagaacagcccagaaaaggcggtgctcagcacggggtgtcatcctgtgaagggacacagagaacaggcaggaggaaaggcaggagccagtccgtgcaggcacactcagcgctaagccaaaggccgcccatgctgagctcatctggccccatcttagagagccgccaaacattcctccagacgtccacctcagtgcacgagctggcccagaggctctcgggcagccggctctccttgcacgcctcggccacgtccctgcactctcagcccccgcccgtcaccaccaccggccacctgagtgtccgtgagcgggccgaggcgctcatcaggtccagcctgggctcctccaccagctccaccctgagcttcctcttcggcaagaggagcttttccagcgcgctcgtcatttccggactctctgctgcggaggggggcaataccagtgacacccagtcatccagcagcgtcaacatcgtgatgggcccctcagccagggctgccagccaggccactcgggtaaggggctgggcagggctcaccaggacaggctgggatggtggcacgggctcctggcctgagcgtggcacctgccttgcgttcccacccttctgcctgcagaaccccatccccttctctatggggctcccagagtgacaaaggacagtgattagacacgaagtggcttagctgctcttgaaagcagacaagatacagagcagatatcctgtaaacgataatgcccaggcaggcactgaaaggagtcaccggatacagaggttctgcagaactgtggccatctgccctacaccggggcatgacggagaatgccctccacccattcacacagcaggactcttctcacatgattctggcctgagggagaggaaaggacacctgtcaatgctggagttagagcttcactgcttctcagccaatcgatttgactttaaagctgctgagatggcccactgcttttaggtatttaaatactagacaaggagagttctaaggacttcacccaaataagctgttacttgtccagaatcccaaaccagctgagatgaaatgaatacttgagcttcttcagtgagaaaaaagtaaataaatacccagcagtgctcctatgtgacctggtagacagggaaaatcgatggtgtcaaggcaaaaatgggtcaggtttggagagttcccccactccttttgagtgttcaggttttccttaccatggctcatgctttccatcaagcaccagagttgcagtggcttggcctctggttctgggtgaggttatttgcaggtggagacggggggctgcacctgaacatttctagtgtcaccctccctctccttcatgggaaacagctctccagggaagtaccttcctgccaggggaagccaaggctgggccggccgccctacaaggagccacaggattgcagccatgggtgccacctttcatggaaggggagatttatgggctttcctggaacccccaggctgtcctggccaagaggaaagaggtggttacttcaggagtttgaccttagttagataactaaaagaatacatttcccctcccttttctttatttcctcaataaaaatgtacaaagtatcacccttctccatgccccaatctgtgttaaagtcacaatctatgggtgtagttctgggattctgtcaaattctccttcctgctctccaaaatggacaattgtcgtagggaccacatgcccccagaatacaatggcctctgtgttctactggggtcaagcctgctagaactcagcattcatgacaggggctaagtgtgcatgaagtgacactgactacagctagaaagccaggcgcacaaatgccccttccccccagggccgctctttccagcgcagtcatccagaaaggcccacgtgcagagcccctgtgtctcagatgctgcttcagttgcccgtcctgtcctcagaggccactgtgctggccctctatcatttgacctgactttagaacctgacctcaaggatatggcagcgctagcctttagctcccacagcacggatgggggtgatgccagttagaagtgggtagtgaacgtttgctgagctgttcactgtttctctcttctctttggaagcacctctccgagccatgtgagccccctgatgccaccgagcaggggcagcttcatgaccgatgtctggctgaggctgtggcggacactctcggggttgtctgcaggagagcaagccaggaggacatgggcctggacgacacggcctcgcagcaaagtgtgtcagacgagcagtgacgggcgtgcggccgggcggggaggctggctcccccacacctcccacctgcattgctctccctcgtgctccccaaatcaccacaaccaaccaataccgcgatccatgagggactcctcctgtggaaaaggagagctgttccagaacacagaactgatctcaggtttttg

SEQ ID NO: 164136 - DNA, 1982 bp, Homo sapiens
  Payload ID: 12316
  Gene Symbol: PCNXL2
  Gene Name: pecanex-like 2 (Drosophila)
  ENST ID: ENST00000430153
  CDS Start-End: 747-1982
gccaaatgagtccaacttcctggaatttgtctccctgttagaatccattaatacttccaagatgacggcatccagtcaactgaatggctcagctgagcagaatgaagaaagtgggcttctccgagataactgttcccaggaaaaaaaggaggaaatcctggaaaatgaaaagcccagtggacacagttctaagcaaggaaaaccagatttgcaaagtcaagaccatactagcaccggccccgcatgcactcagcctgccaagaccacagccttttttcagggcaatagacaaagacagataatctacagggtaacttcccaacaagatagttctgtcttgcaagtcatcagtgggcctgaaacatctgtacaagaagagatatctgtggatgctatgcatgtcttcattgatgaacatggggaaattagatcctgttatttaaaatctggaaatcagaaagaaggccctttacagcctctaccatcaaataatgactgtctctctcaggctcgagagatgcaggtcagctcctccagtaccacaacttctgagagtcaagatccgtcttctggggaccctgccgtcagtgcccttcagcaacagctgttactgatggtggctcgcaggacccagtcggaaaccccacggaactgaagacatcaaggagaatgtactggcgattttactcattgtcctggtttccctccttggatttctgaccttgagccaaggcttttgcaaagatatgtgggtgctcctcttctgcctcgtcatggccagctgccagtactccctgctaaagagtgttcagcctgaccccgcctcaccaatacacggacacaaccaaatcataacatatagcagaccaatctatttttgtgtgctgtgtggccttattttgcttcttgatacaggggccaaagccaggcaccctcccagttacgttgtgtatggcctgaagctcttctctccagtgtttctacaatcagctagggactacttaatagtatttttatattgcttccctgctatttccctccttgggctcttcccgcaaatcaacactttctgcacttatcttttggagcaaattgacatgctgttttttggtggttctgctgtgtctgggataacctcggctgtttacagtgtggcccggagcgtcttggctgccgccctgctccacgcagtctgcttcagtgcagtgaaggaaccgtggagcatgcaacacatcccggcactgttttcggccttctgtggcctcttggtcgccctttcttaccatctgagccgtcagagcagtgacccatctgtactcatgtccttcatccaatgcaggctgtttcctaaatttttacatcaaaatctggcagagtcagctgctgaccctctccccaagaagatgaaagattcagtgacggatgtcttaaaatgggatctcatcgtctgcgcagtggttgctgtcctctcatttgcagtcagcgccagcactgtattcctgtcattgcgaccatttctcagcatcgtgctgtttgccttggctggagccgtggggtttgtaacacattacgtgctccctcagctccgcaagcatcatccctggatgtggatttcacaccccattctcaaaaacaaagagtatcatcaacgggaagtgagagatgttgcccatttaatgtggttcgaaagactctatgtttggcttcagtgttttgaaaaatacatcttgtacccagcgctaattttgaatgccctcactattgatgcatttttaataagcaatcaccggagacttggtacccactgggacatttttctgatgatcattgctggcatgaagctgttgcggacatcattctgcaacccggtttaccagtttattaacttgagcttcactgtcatctttttccactttgactacaaagatatttcagagagcttcttactggatttcttcatggtgtccattttatttagcaag

SEQ ID NO: 164137 - DNA, 561 bp, Homo sapiens
  Payload ID: 12316
  Gene Symbol: PCNXL2
  Gene Name: pecanex-like 2 (Drosophila)
  ENST ID: ENST00000490102
  CDS Start-End: 1-328
gttcgaaagactctatgtttggcttcagtgttttgaaaaatacatcttgtacccagcgctaattttgaatgccctcactattgatgcatttttaataagcaatcaccggagacttggtacccactgggacatttttctgatgatcattgctggcatgaagctgttgcggacatcattctgcaacccggtttaccagtttattaacttgagcttcactgtcatctttttccactttgactacaaagatatttcagagagcttcttactggatttcttcatggtgtccattttatttagcaaggacggcacccacacacaaagaggatgatttcccttaactcaaaccatgcaagttactgcagttcatctcatgggaggggctgaaatacacgctagtaactcctctgcccttcagccttcaaactcggggacctgcttcacaagttacagttcgtcctgacatatgtggctccttggcagatggcttggggttcttcgtttcacgtgtttgctcagctctttgccattcctcattctgccatgcttttctttcagacgatt

SEQ ID NO: 164138 - DNA, 803 bp, Homo sapiens
  Payload ID: 12316
  Gene Symbol: PCNXL2
  Gene Name: pecanex-like 2 (Drosophila)
  ENST ID: ENST00000484347
  CDS Start-End: 1-537
gagtatcatcaacgggaagtgagagatgttgcccatttaatgtggttcgaaagactctatgtttggcttcagtgttttgaaaaatacatcttgtacccagcgctaattttgaatgccctcactattgatgcatttttaataagcaatcaccggagacttggtacccactgggacatttttctgatgatcattgctggcatgaagctgttgcggacatcattctgcaacccggtttaccagtttattaacttgagcttcactgtcatctttttccactttgactacaaagatatttcagagagcttcttactggatttcttcatggtgtccattttatttagcaagctcggggacctgcttcacaagttacagttcgtcctgacatatgtggctccttggcagatggcttggggttcttcgtttcacgtgtttgctcagctctttgccattcctcgtatcctttctgcttctattttcaccctccagctgagattcacattttacggaagcaagcttttcattgacccctggcaataaaaagattttaaagtctataagattacattttaatggggacatgaagaggcactttggatccctttaggccacttagccttaaaagatatttctttattttgaactcttcctgcttcttaatgcatattcaggagttacttttattttttctggtccttccatttcccatgcccagatctgcattaaggtaccctgtcttttaaactgcttaaatgattgggttgccttgtgcaaaatagtgcaaataaatttgctgttattaagca

SEQ ID NO: 164139 - DNA, 3392 bp, Homo sapiens
  Payload ID: 12316
  Gene Symbol: PCNXL2
  Gene Name: pecanex-like 2 (Drosophila)
  ENST ID: ENST00000462233
  CDS Start-End: 1-1471
tttggagcaaattgacatgctgttttttggtggttctgctgtgtctgggataacctcggctgtttacagtgtggcccggagcgtcttggctgccgccctgctccacgcagtctgcttcagtgcagtgaaggaaccgtggagcatgcaacacatcccggcactgttttcggccttctgtggcctcttggtcgccctttcttaccatctgagccgtcagagcagtgacccatctgtactcatgtccttcatccaatgcaggctgtttcctaaatttttacatcaaaatctggcagagtcagctgctgaccctctccccaagaagatgaaagattcagtgacggatgtcttaaaatgggatctcatcgtctgcgcagtggttgctgtcctctcatttgcagtcagcgccagcactgtattcctgtcattgcgaccatttctcagcatcgtgctgtttgccttggctggagccgtggggtttgtaacacattacgtgctccctcagctccgcaagcatcatccctggatgtggatttcacaccccattctcaaaaacaaagagtatcatcaacgggaagtgagagatgttgcccatttaatgtggttcgaaagactctatgtttggcttcagtgttttgaaaaatacatcttgtacccagcgctaattttgaatgccctcactattgatgcatttttaataagcaatcaccggagacttggtacccactgggacatttttctgatgatcattgctggcatgaagctgttgcggacatcattctgcaacccggtttaccagtttattaacttgagcttcactgtcatctttttccactttgactacaaagatatttcagagagcttcttactggatttcttcatggtgtccattttatttagcaagctcggggacctgcttcacaagttacagttcgtcctgacatatgtggctccttggcagatggcttggggttcttcgtttcacgtgtttgctcagctctttgccattcctcattctgccatgcttttctttcagacgattgccacatcaatcttttctaccccattgagcccatttcttgggagtgtcattttcatcacatcatatgtcaggccagtgaaattctgggagaaaaactacaatacaaggcgagtggataattccaacacaagactggcagtccaaattgaaagagatccagggaatgatgacaacaatctcaattccattttttatgaacacttgacaaggaccctccaggagtccctctgtggagacttagttcttggacgttggggcaactacagctctggcgattgctttattttggcttcagatgacctcaatgcctttgttcacctgattgaaattggaaatggtcttgtcacctttcaacttcgaggactggaattccgagagtataatatactatatggtaacgtctcccaaactcctctcctggatcaaaaatgaatcacttctgaagtccctgcagccctttgccaagtggcattacattgagcgtgaccttgcaatgttcaacattaacattgatgatgactacgtcccgtgtctccaggggatcacacgagctagcttctgcaatgtttatctagaatggattcaacactgtgcacggaaaagacaagagccttcaacgaccctggacagtgacgaggactctcccttggtgactctgtccttcgccctgtgcaccctggggaggagagctctgggaacagccgctcacaatatggccatcagcctggattctttcctgtatggcctccatgtcctcttcaaaggtgacttcagaataacagcacgtgacgagtgggtatttgctgacatggacctactgcataaagttgtagctccagctatcaggatgtccctgaaacttcaccaggaccagttcacttgccctgacgagtatgaagacccagcagtcctctacgaggccatccagtccttcgagaagaaggtggtcatctgccacgagggcgacccggcctggcggggcgcagtgctgtccaacaaggaagagctgctcaccctgcggcacgtggtggacgagggtgccgacgagtacaaggtcatcatgctccacagaagcttcctgagcttcaaggtgatcaaggttaacaaagaatgcgtccgaggactttgggccgggcagcagcaggagcttatatttcttcgcaaccgcaatccggagcgcggcagtatccagaacaataagcaggtcctgcggaacttgattaactcctcctgcgatcagcccctggggtaccccatgtatgtctccccactaaccacatcctacctagggacacacaggcagctgaagaacatctggggtggacccatcactttggacagaattaggacctggttctggaccaagtgggtaaggatgcggaaggattgcaatgcccgccagcacagtggcggcaacattgaagacgtggacggaggaggggccccgacgacaggtggcaacaatgccccgagtggtggcagccaggagagcagcgcagaacagcccagaaaaggcggtgctcagcacggggtgtcatcctgtgaagggacacagagaacaggcaggaggaaaggcaggagccagtccgtgcaggcacactcagcgctaagccaaaggccgcccatgctgagctcatctggccccatcttagagagccgccaaacattcctccagacgtccacctcagtgcacgagctggcccagaggctctcgggcagccggctctccttgcacgcctcggccacgtccctgcactctcagcccccgcccgtcaccaccaccggccacctgagtgtccgtgagcgggccgaggcgctcatcaggtccagcctgggctcctccaccagctccaccctgagcttcctcttcggcaagaggagcttttccagcgcgctcgtcatttccggactctctgctgcggaggggggcaataccagtgacacccagtcatccagcagcgtcaacatcgtgatgggcccctcagccagggctgccagccaggccactcggcacctctccgagccatgtgagccccctgatgccaccgagcaggggcagcttcatgaccgatgtctggctgaggctgtggcggacactctcggggttgtctgcaggagagcaagccaggaggacatgggcctggacgacacggcctcgcagcaaagtgtgtcagacgagcagtgacgggcgtgcggccgggcggggaggctggctcccccacacctcccacctgcattgctctccctcgtgctccccaaatcaccacaaccaaccaataccgcgatccatgagggactcctcctgtggaaaaggagagctgttccagaacacagaactgatctcaggtttttg

SEQ ID NO: 164140 - DNA, 654 bp, Homo sapiens
  Payload ID: 12316
  Gene Symbol: PCNXL2
  Gene Name: pecanex-like 2 (Drosophila)
  ENST ID: ENST00000486012
  CDS Start-End: 1-142
tgaccctctccccaagaagatgaaagattcagtgacggatgtcttaaaatgggatctcatcgtctgcgcagtggttgctgtcctctcatttgcagtcagcgccagcactgtattcctgtcattgcgaatgttgcccatttaatgtggttcgaaagactctatgtttggcttcagtgttttgaaaaatacatcttgtacccagcgctaattttgaatgccctcactattgatgcatttttaataagcaatcaccggagacttggtacccactgggacatttttctgatgatcattgctggcatgaagctgttgcggacatcattctgcaacccggtttaccagtttattaacttgagcttcactgtcatctttttccactttgactacaaagatatttcagagagcttcttactggatttcttcatggtgtccattttatttagcaagctcggggacctgcttcacaagttacagttcgtcctgacatatgtggctccttggcagatggcttggggttcttcgtttcacgtgtttgctcagctctttgccattcctcgtatcctttctgcttctattttcaccctccagctgagattcacattttacggaagcaagcttttcattgacccctggcaataaaaagattttaaagtc

SEQ ID NO: 164141 - DNA, 545 bp, Homo sapiens
  Payload ID: 12316
  Gene Symbol: PCNXL2
  Gene Name: pecanex-like 2 (Drosophila)
  ENST ID: ENST00000518351
  CDS Start-End: 1-545
aaagtctggtatgatcgactgaccttgctggcattacttgatcgaactgaagacatcaaggagaatgtactggcgattttactcattgtcctggtttccctccttggatttctgaccttgagccaaggcttttgcaaagatatgtgggtgctcctcttctgcctcgtcatggccagctgccagtactccctgctaaagggacacaaccaaatcataacatatagcagaccaatctatttttgtgtgctgtgtggccttattttgcttcttgatacaggggccaaagccaggcaccctcccagttacgttgtgtatggcctgaagctcttctctccagtgtttctacaatcagctagggactacttaatagtatttttatattgcttccctgctatttccctccttgggctcttcccgcaaatcaacactttctgcacttatcttttggagcaaattgacatgctgttttttggtggttctgctgtgtctgggataacctcggctgtttacagtgtggcccggagcgtcttggctgccgccctgct

SEQ ID NO: 164142 - DNA, 307 bp, Homo sapiens
  Payload ID: 12316
  Gene Symbol: PCNXL2
  Gene Name: pecanex-like 2 (Drosophila)
  ENST ID: ENST00000517808
  CDS Start-End: 1-137
atatgtgggtgctcctcttctgcctcgtcatggccagctgccagtactccctgctaaagagtgttcagcctgaccccgcctcaccaatacacgggccaaagccaggcaccctcccagttacgttgtgtatggcctgaagctcttctctccagtgtttctacaatcagctagggactacttaatagtatttttatattgcttccctgctatttccctccttgggctcttcccgcaaatcaacactttctgcacttatcttttggagcaaattgacatgctgttttttggtggttctgctgtgtctggg

SEQ ID NO: 164143 - DNA, 2183 bp, Homo sapiens
  Payload ID: 12316
  Gene Symbol: PCNXL2
  Gene Name: pecanex-like 2 (Drosophila)
  ENST ID: ENST00000475463
  CDS Start-End: 1-655
gccaaatgagtccaacttcctggaatttgtctccctgttagaatccattaatacttccaagatgacggcatccagtcaactgaatggctcagctgagcagaatgaagaaagtgggcttctccgagataactgttcccaggaaaaaaaggaggaaatcctggaaaatgaaaagcccagtggacacagttctaagcaaggaaaaccagatttgcaaagtcaagaccatactagcaccggccccgcatgcactcagcctgccaagaccacagccttttttcagggcaatagacaaagacagataatctacagggtaacttcccaacaagatagttctgtcttgcaagtcatcagtgggcctgaaacatctgtacaagaagagatatctgtggatgctatgcatgtcttcattgatgaacatggggaaattagatcctgttatttaaaatctggaaatcagaaagaaggccctttacagcctctaccatcaaataatgactgtctctctcaggctcgagagatgcaggtcagctcctccagtaccacaacttctgagagtcaagatccgtcttctggggaccctgccgtcagtgcccttcagcaacagctgttactgatggtggctcgcaggacccagtcggaaaccccacggaactgaagacatcaaggagaatgtactggcgattttactcattgtcctggtttccctccttggatttctgaccttgagccaaggcttttgcaaagatatgtgggtgctcctcttctgcctcgtcatggccagctgccagtactccctgctaaagagtgttcagcctgaccccgcctcaccaatacacggacacaaccaaatcataacatatagcagaccaatctatttttgtgtgctgtgtggccttattttgcttcttgatacaggggccaaagccaggcaccctcccagttacgttgtgtatggcctgaagctcttctctccagtgtttctacaatcagctagggactacttaatagtatttttatattgcttccctgctatttccctccttgggctcttcccgcaaatcaacactttctgcacttatcttttggagcaaattgacatgctgttttttggtggttctgctgtgtctgggataacctcggctgtttacagtgtggcccggagcgtcttggctgccgccctgctccacgcagtctgcttcagtgcagtgaaggaaccgtggagcatgcaacacatcccggcactgttttcggccttctgtggcctcttggtcgccctttcttaccatctgagccgtcagagcagtgacccatctgtactcatgtccttcatccaatgcaggctgtttcctaaatttttacatcaaaatctggcagagtcagctgctgaccctctccccaagaagatgaaagattcagtgacggatgtcttaaaatgggatctcatcgtctgcgcagtggttgctgtcctctcatttgcagtcagcgccagcactgtattcctgtcattgcgaccatttctcagcatcgtgctgtttgccttggctggagccgtggggtttgtaacacattacgtgctccctcagctccgcaagcatcatccctggatgtggatttcacaccccattctcaaaaacaaagagtatcatcaacgggaagtgagagatgttgcccatttaatgtggttcgaaagactctatgtttggcttcagtgttttgaaaaatacatcttgtacccagcgctaattttgaatgccctcactattgatgcatttttaataagcaatcaccggagacttggtacccactgggacatttttctgatgatcattgctggcatgaagctgttgcggacatcattctgcaacccggtttaccagtttattaacttgagcttcactgtcatctttttccactttgactacaaagatatttcagagagcttcttactggatttcttcatggtgtccattttatttagcaaggtgtttctgggctacgtgaggcaaaaataaaaacagagaaactcaccacagtgtttttccttggatcccatgatgcccagatgctctactttttccttttacctttcagaaggtgtttttataacatgtaaaatccagggttttcgttgtaccaagtagaggaataaggaaaaatacaccaactccatatttccggaagaa

SEQ ID NO: 164144 - DNA, 1465 bp, Homo sapiens
  Payload ID: 12316
  Gene Symbol: PCNXL2
  Gene Name: pecanex-like 2 (Drosophila)
  ENST ID: ENST00000488780
  CDS Start-End: 1-1275
atgtgggtgctcctcttctgcctcgtcatggccagctgccagtactccctgctaaagagtgttcagcctgaccccgcctcaccaatacacggacacaaccaaatcataacatatagcagaccaatctatttttgtgtgctgtgtggccttattttgcttcttgatacaggggccaaagccaggcaccctcccagttacgttgtgtatggcctgaagctcttctctccagtgtttctacaatcagctagggactacttaatagtatttttatattgcttccctgctatttccctccttgggctcttcccgcaaatcaacactttctgcacttatcttttggagcaaattgacatgctgttttttggtggttctgctgtgtctgggataacctcggctgtttacagtgtggcccggagcgtcttggctgccgccctgctccacgcagtctgcttcagtgcagtgaaggaaccgtggagcatgcaacacatcccggcactgttttcggccttctgtggcctcttggtcgccctttcttaccatctgagccgtcagagcagtgacccatctgtactcatgtccttcatccaatgcaggctgtttcctaaatttttacatcaaaatctggcagagtcagctgctgaccctctccccaagaagatgaaagattcagtgacggatgtcttaaaatgggatctcatcgtctgcgcagtggttgctgtcctctcatttgcagtcagcgccagcactgtattcctgtcattgcgaccatttctcagcatcgtgctgtttgccttggctggagccgtggggtttgtaacacattacgtgctccctcagctccgcaagcatcatccctggatgtggatttcacaccccattctcaaaaacaaagagtatcatcaacgggaagtgagagatgttgcccatttaatgtggttcgaaagactctatgtttggcttcagtgttttgaaaaatacatcttgtacccagcgctaattttgaatgccctcactattgatgcatttttaataagcaatcaccggagacttggtacccactgggacatttttctgatgatcattgctggcatgaagctgttgcggacatcattctgcaacccggtttaccagtttattaacttgagcttcactgtcatctttttccactttgactacaaagatatttcagagagcttcttactggatttcttcatggtgtccattttatttagcaaggcaagtgaattagctattttcttcattttaacattttaaagggggctgttcttatcaaatgttttaagagtttaaaacttattctttataaaaaaaattatgggaggatatgaaattgaattatacatgtatgttaaactcttgctaccatttggggaaaactgcccatggaatgtaagtatgccatgttatttgctaaaaatcactaattaaaatgaattagccatta

SEQ ID NO: 164145 - DNA, 7105 bp, Homo sapiens
  Payload ID: 12317
  Gene Symbol: PCNXL3
  Gene Name: pecanex-like 3 (Drosophila)
  Uniprot ID: Q9H6A9
  ENST ID: ENST00000355703
  CDS Start-End: 540-6644
ggcgcatgcgccactgcaggctggcggttcgcggctccttcttccggcctcctccttaggccggcaccagcagaagccgggcgagcgcggagccccaagcaagtgacctgcgaccccgaaagtggaccccagatcctggggttctccctggtccggagactagggagctgtcgcctgcaccccgggagcacccaccccacgaccacctctggatgccgccgacgggtacccggcccgtgccccgcgcctgcctgccggctcggcccctcggagcaattctgggccaggagtggggacccggaccccgcccctgatgcagccccacccccgcgtccgggccttgcaccactgactgtcccggccggccccgccccctgctcgcaccctcgcgcggccgagcccccctcccccgctgggggaggccatggcgtgagcgtgaggccgggccccggggccctcaggcgccagacggggcatgggccgggggccgcccccatgagggtcccgggagggggggcgcgggcagcagcggcggggccatggggtcgcaggtgttgcagatcctgcgccagggggtgtgggcctcgctcaccggcggttggttcttcgacccgcaccagagcaccttctccaactgcttccacctctatgtctggatcttcctgctcatctttcccttcttactgtacatggtcctgcctcccagcttgatggtggccggcgtgtactgcctcgtggtggctgtcatctttgctactatcaagactgtcaattatcggcttcatgccatgtttgaccagggcgagatcgtggagaagcgcagctctaccatgggggagctggaggaagagcctgcccagggggacagcaatccacccagggaccccggagtggagatgacagtgttccggaaagtcagttccacacccccggtgcgctgcagctcccagcactctgtgtttggcttcaaccaggtctcggagctgctgccccgaatggaggactctgggccccttagagacatcaaggagctggtgcgggagcagggcagcaacaatgtgatcgtgacttctgccgaccgagagatgctgaagctcagctcgcaggagaaactgattggagaccttccccagacgcctccaggggctgtcccagacccctctcttgccagtacagactcttcagagccttctcccctggctggagatggagcgccctggagtgggagcagcatggctgacactcccatgagccccctgctgaaggggagcctcagccaggagctgagcaagagcttcctgaccctgacccagcctgaccgggccctggtgaggaccagcagtcgacgggaacaacgcaggggggcaggtggctatcagccccttgaccggcggggctcaggggagcccacgccccagaaagccggctcctcagactcctgcttcagcggcactgacagggagacattgagcagcttcaagagtgagaagaccaactccacccatctggacagccccccaggggggccagcccctgagggcagcgacacagacccaccctctgaggctgagctgcctgcctcaccagacgccggggtcccctcagatgacacgctgcgttcctttgacacggtcattggagcagggacgccaccgggcctggctgagccgctcctggtcgtgcggcccaaggacttggccctgctacggcctagcaaacggcagccacccctgcgaagacactctccacctggccgtgcccctcgacggcccctgcttgaaggtgggggcttctttgaggatgaagacactagtgagggcagtgaactgagcccggcctccagtctccgatcgcagcgccgctacagtactgacagctcctcttctacttcctgctactcccctgagagctcccggggtgcagcagggggaccccggaagcggagggccccccatggggctgaggagggaactgctgtgccccccaagcggccatatgggacccagcggacgcctagtaccgccagcgctaaaacacatgcccgtgtgctgagcatggatggggctgggggtgatgttctgaggcccccactggctggctgcaaggcagagctggaggcccaggttggggtggagcaggctgctagtgagcctgttgtgctgcctgctgaggcgcgaaggggacccgctgccaaccagcccggctggcggggggagctgcaggaggaaggtgctgtggggggagcggccgaggagactggcaggcgggaccgctcaagcagtgtgaggcggacccaggccattcggagacgccacaatgcaggcagcaaccccacccctccagcctctgtcatgggctcgccgcccagcagcctgcaggaagctcagcggggccgggctgcctcccactcccgggcgctgacgctgccctctgcgctgcatttcgcctcttcactgttgctcacccgggccggtgccaatgtgcatgaggcctgcacctttgatgacacttctgagggtgctgtgcactatttctacgatgagagcggtgtgcggcgttcctacacctttggcctggctggaggcggctacgagaaccctgtagggcagcaaggggagcagacagctaatggagcctgggaccgacactcgcattcctccagcttccactcggctgatgtccctgaggctacaggcggcctgaacctgctgcagccgaggcctgtggttctgcagggcatgcaggtgcgccgggtgcccctggagatcccggaggagcagacactgatggaagaagcgccaccccgggcccagcatagttacaagtactggcttctccctggccgctggacctctgtgcgctatgagcggcttgccctgctggctctgctggaccggacgcggggagtgctggagaacatcttcggcgtgggcctgagcagccttgtggccttcctgggctacctgctgctgctcaagggcttcttcactgacatctgggtcttccagttctgcctggtcatcgcctcctgccagtactccttgctgaagagcgtgcagcctgatgcggcgtcccccatgcacggccacaactgggtgatcgcgtacagccgtcctgtctacttctgcatctgctgtctgctcatctggctgctggacgccctgggctcagctcagcccttcccacctgtctccctctacggcctcacgctcttctctgcctccttcttcttctgtgcccgagacgtggccactgtgttcaccctgtgcttccccttcgtcttcctcctgggcctcctgccccaggtcaacacctgcctcatgtacctgctggagcaaatagatatgcacggcttcgggggcacagctgccaccagcccgctcacggcagtcttcagcctctcccgcagcctgctggctgctgccctgctctacggtttctgccttggggccatcaagactccgtggccagagcagcacgtccctgtcctcttctcagtcttctgtggcctcctggtggcactgtcctaccacctgagccggcagagcagcgaccccaccgtgctctggtctctgatccggagcaagctgttccctgagctggaggagcgcagcttggagacagcccgggccgagcccccggaccccttgccggacaagatgcgccagtcggtgcgtgaggtcttgcactccgacctggtgatgtgtgtggtgatcgccgtgctcaccttcgccatcagcgccagcaccgtctttattgccctgaagtcggtgctgggtttcgtgttgtacgcactggctggggccgtgggcttcttcacacattacctgctgccacaactccgcaaacagctgccctggttctgcctgtcacagcccgtgctgaagccgctggagtacagccagtatgaagtgcgcggtgccgcccaggtgatgtggtttgagaagctgtatgctggcctgcagtgcgtagagaagtacctcatctaccccgccgtggtgctcaacgccctcacggtggacgcccacacagtcgtcagccacccggacaagtactgcttctactgccgggcgctgctgatgaccgtggctgggctgaagctgctgcgctcagccttctgctgccccccacagcagtacctgacgttggccttcaccgtcctgctcttccactttgactacccgcgcctctcccagggctttctgcttgactacttcctcatgtccctgctttgcagcaagctgtgggacttgctgtacaagctgcgtttcgtgctgacctacatcgcgccctggcagatcacctggggctcggctttccacgcttttgcccagccgtttgccgtgccacactcggccatgctgttcgtccaggccctgctctcggggctcttctccacgcctctcaacccactgctaggcagtgccgtcttcatcatgtcctacgctcggcccctcaagttctgggagcgcgactacaacactaaacgtgtggatcattccaacacccgcctggtcacacagctggacaggaaccctggcgctgatgacaacaacctcaactccatcttctatgagcacttgacacgttcgctgcagcacacactgtgtggggacctggtgctgggccgctggggcaactatggccctggtgactgcttcgtcctggcctctgactacctcaacgccctggtgcacctcatcgaggttggcaatggcctcgtcaccttccagctgcgtggccttgagttccggggcacttactgccagcagcgcgaggtggaggctatcaccgagggtgtggaggaggacgagggctgttgctgctgtgaacctggccacctgccacgggtcctgtccttcaatgctgcctttgggcagcgctggctggcttgggaggtaacagccagcaagtacgtgctggagggctatagcattagtgacaataatgctgcctccatgctgcaggttttcgacctccgcaagatcctcatcacctactatgtcaagagcatcatctactacgtgagccgctcaccaaagctggaggtgtggctcagccatgagggcatcacggcagccctgaggcctgtgcgggtgcccggctatgccgactcggatcccaccttctcgctgagtgtggatgaggactatgacctccgcctgtctggcctctcgctgccctccttttgtgctgtgcacctcgagtggatccagtactgcgcctcccggcgcagccagcccgtggaccaggattggaactccccgctggtcacgctgtgttttggcctgtgtgtgctgggccgccgggccctggggacagcctctcacagcatgtctgcaagcctggagcccttcctctacggcctgcacgccctgttcaagggggattttcgcatcacctccccacgtgacgagtgggtctttgccgacatggacctgcttcaccgcgttgtggcgcctggggttcgcatggccctcaagcttcaccaggaccacttcacgtccccagatgaatatgaggagccagcagccctatacgatgccattgcggccaacgaggagcggctggtcatctcacatgagggtgacccagcatggcgcagcgccatcctcagcaacacgccctccctgctggcgctgcgccatgtcctggatgatgcctccgacgagtacaagatcatcatgctcaaccggcgccacctcagcttccgagtcatcaaggtgaaccgggagtgcgtgcgcggcctgtgggccgggcagcagcaggagctggtgttcctgcgcaaccgcaaccccgagcgtggcagcatccagaacgccaagcaggcgcttcgcaacatgatcaactcctcctgtgaccagccgctgggctaccccatctacgtgtcgcctctcaccacctcgctggctggcagccacccccagctacgggcactgtggggtggccccatcagcctgggtgccattgcccactggctcctgcgcacctgggagaggcttcacaagggctgtggcgccggctgcaatagtggcgggaacgtggatgattcagactgtagtgggggcggtggcctgacctccctcagcaataacccccccgtggcacaccccacacctgagaacacggcaggcaatggtgaccaacccctcccaccaggccctggctgggggccgcggtcctccctgagtggctctggtgatgggcggcccccacctctgctgcagtggcctccccctcggctccctggaccaccccctgcatcgcctatccccacagagggtccccggacctcacggccccctggcccgggtctcctcagttctgagggccccagtggaaagtggagcctggggggccggaaggggctgggaggatctgacggggagccagcctcagggagccccaaaggaggtacccccaaatctcaggcgcctctagacctcagcctcagcctcagcctcagcctcagccccgatgtcagcactgaggcctcaccccccagagcttcccaggacattccttgcttggacagcagtgcccctgagagtggcacacctatgggtgccctgggcgactggcctgcccctattgaggagcgtgagagcccggcagcccagcccctgctggaacaccagtactgagctacctggcgcccactggaccacctcctaggattcagtaacggacctgctctgctgcctctctgctggaccacagaactgagtggctttggcctacatgtctgaaccctgacctttggctgccttggccagagtaccaaaactgagtgacccagacctctgaccttgacccctgatctctctcatccccagtccagggcctgggctccccagatggaggcagtcagcctcccagccaggccctaagagccaaaccatgggctggtcccacttggagcctgtggccaggaccacctcagcccctgggcctgcactgcctgcaggtgtggcccccttggcctggacctggggcctgaattgtgggaagggtggtttctttctttccttttttttcttttcttttttttttttttttttgtgcttcggagacatcagaattaataacactatttttgattttg

SEQ ID NO: 164146 - DNA, 17339 bp, Homo sapiens
  Payload ID: 12318
  Gene Symbol: PCNXL4
  Gene Name: pecanex-like 4 (Drosophila)
  ENST ID: ENST00000317623
  CDS Start-End: 523-3339
aacgacgctcttgcgtaaaggcccggcccaagggaacgttcagggcgtctcggctttccccgctgctgcttctgctaggcccagtgcgagaccagagcacgagcgactcccgtcgtccccggccaggcagatgttggcctagtcctggcgcgaacgaagcgcgctatttccctgcttcctctaggccaagcctgctttacggcagggcccgcctcgggagcgagcacagaccggggcagcgaggccagccaggcgccgacgaggtccccgaacgcgcacgcgctccgttcagctccgggtggcggccgccggagtagacgttagccatggaaaccgagagctggcccgggcggggccgcggtgagctcgttattcggccgccgcagcttttctgcctccgcattcgggcactaaccaacctcccggcgggagcgcccagcccgagtttacctgcaaaaatgcggtccctgggatgccttcgcgtcttctcttccctcgggtgacttgaggtttgtggtaaatatgccagctctagaacacatgaatcagattttacacatcttgtttgtatttttaccctttctgtgggcacttgggactctgcccccacccgatgcacttctcttatgggcaatggagcaggttttagagttcggccttggaggctcatctatgtcaacccacttacggttattagtaatgttcatcatgtctgctggaacagctatagcatcatatttcattccaagcactgttggtgtggttcttttcatgactggatttggtttcttgctgagtctgaacttaagtgatatgggtcacaaaattggaaccaaatctaaggatttacccagtggtccggaaaaacatttttcatggaaggaatgccttttctacatcattatattagtcttggctcttttagaaactagcttgcttcatcactttgctggcttctcacagatttctaaaagcaattcccaggctattgtgggctatggtttgatgatattacttataatactgtggatacttagagaaattcaaagcgtatatatcattggaattttccgaaatcccttttatccgaaggatgtgcaaactgtgactgtattctttgagaagcaaactaggctcatgaagattggtattgtcagacggattttgctaactttagtatcaccttttgccatgatagcatttctttcattggacagttccttacaagggctccactcagtgtctgtctgtattggattcacaagagcctttagaatggtatggcagaatacagaaaatgctttattggagacagtcattgtatcaacagtacacttgatctccagtacagacatatggtggaacagaagcctggatacaggactcagactcttactggttggtatcatacgtgatcgtttgattcagttcatctctaaattgcagtttgccgtgactgtgcttttgacatcatggacagagaaaaaacaacgtcgaaaaacaactgccactttatgtatactcaacattgtcttttctccattcgtgttggtcatcatagttttttctacactactctcttctcccttactccctcttttcacccttcctgtgttcttggtggggtttccccgacctattcagagttggccaggagcagcaggcaccacagcctgtgtgtgtgcagatacagtgtactactaccaaatggtgcccaggttgactgctgtactgcagactgcaatggcagctggaagtttaggtctcctcctacctggatctcattacttgggccgttttcaggatcgtttaatgtggataatgattctggaatgtggctatacttactgctctattaacattaaggggttagaattgcaggaaacatcctgtcatactgcagaagctcgcagagttgatgaagtttttgaagatgcttttgagcaagaatacacaagagtatgttcccttaatgaacactttggaaatgtcttgacaccctgtactgttttgcctgtgaaattgtattctgatgccaggaatgttctatcaggcataattgattctcatgaaaacttaaaagaatttaaaggtgacctcattaaagtacttgtgtggatacttgttcaatactgctccaaaaggcctggcatgaaagagaatgttcacaacactgaaaataaagggaaagcacctctaatgttgcctgctttgaacactttgccacctcccaaatccccagaagacatagacagtttaaattcagaaacttttaatgactggtctgatgataatatttttgatgatgagccaactatcaaaaaagtaatagaagaaaaacatcagttgaaagatttgccaggtacaaatttgtttattccaggatcagtagaatcacagagggttggtgatcattctacaggcactgttcctgaaaacgatctttacaaagcagttctattaggataccctgctgttgacaaaggaaaacaagaggacatgccatatattcctctcatggagttcagttgttcacattctcacttagtatgcttacccgcagagtggaggactagctgtatgcccagttccaaaatgaaggagatgagctcgttatttccagaagactggtaccaatttgttctaaggcagttggaatgttatcattcagaagagaaggcctcaaatgtactggaagaaattgccaaggacaaagttttaaaagacttttatgttcatacagtaatgacttgttattttagtttatttggaatagacaatatggctcctagtcctggtcatatattgagagtttacggtggtgttttgccttggtctgttgctttggactggctcacagaaaagccagaactgtttcaactagcactgaaagcattcaggtatactctgaaactaatgattgataaagcaagtttaggtccaatagaagactttagagaactgattaagtaccttgaagaatatgaacgtgactggtacattggtttggtatctgatgaaaagtggaaggaagcaattttacaagaaaagccatacttgttttctctggggtatgattctaatatgggaatttacactgggagagtgcttagccttcaagaattattgatccaagtgggaaagttaaatcctgaagctgttagaggtcagtgggccaatctttcatgggaattactttatgccacaaacgatgatgaagaacgttatagtatacaagctcatccactacttttaagaaatcttacggtacaagcagcagaacctcccctgggatatccgatttattcttcaaaacctctccacatacatttgtattagagctcattttgactgtaatgtcatcaaatgcaatgtttttattttttcatcctaaaaaagtaactgtgattcttgtaacttgaggacttctccacacccccattcagatgcctgagaacagctaagctccgtaaagttggttctcttagccatcttaatggttctaaaaaacagcaaaaacatctttatgtctaagataaaagaactatttggccaatatttgtgccctctggactttagtaggctttggtaaatgtgagaaaacttttgtagaattatcatataatgaattttgtaatgctttcttaaatgtgttataggtgaattgccatacaaagttaacagctatgtaatttttacatacttaagagataaacatatcagtgttctaagtagtgataatggatcctgttgaaggttaacataatgtgtatatatttgtttgaaatataatttatagtattttcaaatgtgctgatttattttgacatctaatatctgaatgtttttgtatcaagtagtttgttttcatagacttcaattcataaactttaaaaaacttttaataaaatattttccttccttttcaaatatccttctaatatatgtgaaaggagcggggttcatcccattcatcatgtgaatattcacaggaagagcaatgttagggtaatctgcatatgactactaaagcatatatctgactcattatgtatttctttcaactgaatttactgcttctgaaaaatgatttacccaacaggactaccagttactagtgtcttaaggtatatgaactaaagtcagaaggagatggaagaaaatttttataatacgatctgaattttattttcattctcttcttgcttaggaacgttttacagatacatgtaagggggattaataatgaatccacatcagttgagagatcagtttcctctaattcttacttaatttccaatgaaatcagtaggagccccctagatttataataatgtattctccttagaaatcattcaaattatatgaaatgtaccagttaagttgttattagtattccatttatttagtatgtggacgagttcactctaacaatgttaaaggataaactttttggaccaattttcagttaatgaattcaagagatttgtatgttattctttttttggaggtaatatagtacagttactaagataggattttgtattactctgagtttacatctcagacttatgatttaatttacatgattgagatttgctagctgtacacctttatatctttgtcatgtagaaatattttctcatgtcgttaaaagtacttgtaattatcagcttttttttttttccgagatggaatctcgctctgtcacccaggctggggtgcagtggcacgatctcagctcactgcaacctccgccttctgggttcaagcgattctcctggctcagcctcctgagtagctgggattaaaggcgcatgccaccacgccggctaatttttgtatttttagtagagacagagtttcaccatgttggccaggctggtctcgaactcttgacctcatgctccgcccgcctcagcctcccaaagtgctgggattacaggcgtgagccaccgtgcccagccataattatcacttttaatgacagcataaaattccattgatagatattatttattggactactgtcccccaaataatgtgaattttaagttgtttagagattttcactgtgataataatgtcaagctatgccttcgcttaaccttgcatcctcctcaaagtgctcccatatctccatttcattcatagccaggttttctctttcatttacttgtcaaatcattccaatctggatcccatctccatgactctcccaaattaaaaaaaaaaaaagtttttattaaggtcactattgacctttttattgtcaaaccagctagtagtaattgacacatttgaccattccttgaagcagcttttgtgttttcttttgaactttcctgacactacattatctttgttttcttcttatcttcctagcaactcctcaaacatctttgctgcctctcctcttctacctgacctctaaattttagaatttctcaacaattgattctaggcccccctttgtgtttctgcaatcaccatagataatctcatctacttcaagacttgaaatatcatcaataaattgatgatgatcaaatatatgtacctaacccaacctctcttcttacactgaacctatatatatcacttatttggtatcttcacttggtatattaaaaactgactgttagattttgaagggaaggtgagagttaaagaaagacacacagagggcagcttgacagcaaatgcagactttatgtctagcataaaacctacagaagtgggggaccagcttaatgccagagcccaccgctgcttacaggctgggcgtacttataggcatgggtgagaggggtctgggcagtatggcttgctgctcggcaggatattgataagatgctcccatgatgaggtggttctggcccttgttgtggtgggatgtcatcatagtattccttggaactttgcccagcaagatatgatagggatatttcttaggttgggcctttttccgccttgtggtcaggtggttaggcagcatgtttctcactgcccgaacccctgtgaaatgttttactttgatcaaggtctgcaaaatagcggggagcttacaaaatggtgcagtttggactaacactaacgttactgaattttccctaaaacctacttttctacttctaacttttagtggtgcattcataccaactatttcagagaactagcaatgccaggcaaaatagtattttaaaatctgcttaaaggcattagagaaccaaaagacagtgaagaataacatcactaagatctaagacagaatgaaacttagagacctgagctcagcatttgggctgcttttcttataggagacatgccaattcaggataaggtggttgagagtctgagacgctaagtaacacttataacagccttgctgctgagttagagggacaaaaactggagaccaagactctccaaggaagtaggggaggggaaaggaatcctagttaactgaccatacattgggttgtgaccccaaggaccatatccaaattgtaagggtgaagaaaaaccagatgcagttaggatcttctcacttcccaaaactggattcaggtgaccctttgctgcagccgctacccagagcaaatgtaaatcctctctggactgatcttttgagttatttttataacttttcatgtttagtgttggaaagttatttaaggtatctgaggaaacaagacaacatgatgaaaatccgaaagaagcgacagatgatgggacagagccacaggggacccagataatgagctatacaacacagggtctaaaattactatgtttagtgtgtttaaagatctaaaacacaagattgagaatttcagcagaaaatcagaaactatatagaagaatcaatcaacaagtccccaacttaaaagtacattaatcaagtttaagaattcagtgaataggccgggcgcggtggctcacgcctgtaatcccagcactttgggaggctgaggcgggtggatcatgaggtcaggagatcgagaccatcctggctaacacaatgaaaccccatctgtagtaaaaataaaaaaaaaaataaccgggtgtggtggtgggtgcctgtagtcccagctactcaggaggctgaggcaggagaatcacttgaacccgggaggcagaggtttcagtgagccaagatcatgccactgcactccagcctgggcgacagagcgagactccatctcaaaaagaaaaaaaaaaaaaaaggattcagtgaatagatttgatagaaagtgcatacagtgaagtaagaattagtgaactagaagttatgtcagaagtaaataccagatgtgaaaaactaagagacaaaagaatagaaaatatagtagagagtataagagacatagagttaacttgagaagatctaacatacacgtaactggatttccaggagaagagagaatatggcagaagcaacctgtgaggagataatgactgagaattctccaagtttttaagacatgaagacctgcaagatcaaagcatgataaataaaaacaaaattacaacttagcacatcctaagaaaaaataaaacacaaaaagaaaatcattaaaggagccagacaatgataaaagacattacttttaaaggaggcacaattttattaaactgacagctaacttctcaacagaaaatatgggaagcagaaatcaatggcatgatattttcaggttactgaaagaaaatatctgcaattttagaattcaatacccagcctttccccaaaaacaattcttaagaatgaaggcaaagacactttcaaacgcaacaaatttaatagcagattgtcattaaaggtgatagtaaagggtattcttcagacagaaggaaaaagatcccagaaaaaggttagagataaaggtaggaatgaacagtaatttaaaaatatatatatacagtttaagtgaatattaactatataaaatagtcttcgaggttaaaataaataatgttaaaatgtgacaataatatacaaatttggtgcaggaattctaaggtcagaattatcagaaagaagattaaagtataaataagactgctgtgtcatctatagggtaaccactaaaagaacagcaaaaagcaaaataaaacaatcgtagaactacaaagctaatacagggctaaagtggaataataaggcaaaaaggtagagaaaatatagaacaaataggacaaatagaaatcaaacagtagattaggaggtttaaatatcagttacaacattcatatgaatagacagtgtaccaattaaatgcaaagatcatcaaagtgaaaagaaagaaaacccacaaagtacctttatgcaagagatgtcttaagtataggaatacaaaggtttgaagtaaacaagaatggaaaaattataatatgaaatacaaaaaacaaaaacgatagggcaggggactatggtggctattgcaacattattcaatgtagaccttaaggtgaaaagtattacaaagagagacaatttgtaatgataaaagatttgattcaccagaaagtttcaacaggtctaatattttaatgatttaacaatatagcctcaaatatataagcagaaatgaacagaactaaaatgagaaaagacaagtctgcattcccagattttaatatactcagtaacagaacagcagccatgcaaaaatacgtaaatatgtaaagattggaataatactttaaaacttaacctaattggcatatatgaaacagaatacccaacaactgcaaaatacacattattttcaaatgcagatagaatatttatcaaaactgaccatattccaagtcataggaatggaatatattctttggccatgtatcattcacttagaaatcaataataatttcaaaaatagaaaaattctattaagttcataaattaagaaatacacttttaaataactcatggatcagacaataaattacaatgaaaattagaatatatttgaactgagtagtgaaagtgctacatgtcaaaacttatggtagacgcctaaagccatgcttagaaggaaatttatagtcttaaacgcacattaaaaaaaaaagattgaaaatgaacctagtagttaaaatattctaagaatagcaaattaaacctgaagaaaataaaggaaataataaagaacaagaattaatggagtagaaaatgaagataaagtggatcaactaagccaaaagttgattctttgaaaagataattgataagtgtctggtagactgaaaaaggaagaaacacaaacaaccaatatcaggaatgaaaggatattacaaatcctagagtcatctgacaaaatatgtgcacaacttcatgccaattagttggaaattttagatgaagtgaataaattctttaaactatggaagagccaaaattgacaaatgaaaaaatagaaaattcgagtagttccctatctgctaaagaagtggaacctatagttactttatttgcttttccatagtgaaacaacaagcctagatggattgattcgtcaatggaaagacaatcttaaattcttacaaagagcagtagaaatgcaggaaccctccccaactcattttatgatgccagaaaacctagataccaaaacctggcaaaaactttatgagaaagggacctatttcattccccccaacatcaatgcaaaaatcccaaacaaaatactagcaaactaaactacacacatacacacacacacacacacccctacacacacagaataatcacaatcaagttgggtttcttcctgaaaaagtgaggttggtgtgatagttgcaaatcaatcaatatgattcaacacattaacagaatgaaaggagaaaaataatatttcagtagatccagaaaaagtatttgataaaccagtatccactcataaaaagtttgctttttaatattcatctttatttttcttatcttgagtatgcacataagatgttcagagtcagagatagatttcttattactcagggtaaacaagtgcacctgcccacctttgcactcgtccatatcccccagagcaacctgataagaaactcatgggattttggctatgtaagtggccaaatactgcataggcaagggacagggaaaattaattttccctacttataaagatgaaagaggcagccatcctcttcccttcctgaaagagtctgcttttactctattcttgtggtagacaaagtctctccaaaagccagatagccaaccccatgtgtctccaagagctgtctcctacatcccagggaatacctaggaagatagcatattagaaatgaggaaaggtctcagcacaataacctaagttcccaccacaagaaacaagaaaaagaatagcaaaataagcccaaagcaggcaaaagaaaggaaataaccaaaagcagaaatcaatgaaactgcaaatagaaaaatacataaacaaaaaactggttcttcaaaaaacaatcaagaaaatccataaacctgtagaaagactgacaaaaagaaaaaacacaaatcattattatcaagaatgaaatgaagagtatcactataaatcaggcagtcattaaaaagataatgaggaaatactgtaactttcggcttatacacatgacaacttagaagaaataatctgattcttgaaaaccacaaactattaaaactcaaccaagatgaaataatctgaatatcctataaccattaaagaattaaattcataatttaaaatctcctgataaaagaaatctccagacccagatgccctggcttctttgaggttcttccatgttgttttatgtatcaatcattcattattttttatcgctgagtagtgctgcatggtatagaatataacagtttgtttataccattcacctgttgatggacatttgttggttccagttttgggctattatgtaaagctgctatgagcattcatttacaagtctttatgtggacataagctttcatttctcttgggcaaatacctaggactgggatggctaaatcatatgataagtgtatatttaaatttttaaggaactgctaaaagtctttttcaagttaattgtaccttttgacattcccgccagcagtttatgtgtacaaaatgtataattacatttatgtaaaactataaaatgcaaactaatctataataatgcaagcacatcattggttgcctggaatggggtgggcgaggggaaatgattacaaaagggcaaagggaaacttctggggctgatatatgtgtttactctcttgattgtggttatggttcacaagtgtagccatatggcaaaacttaacaaattgtacactttaaatatatgcagtttatcatacatcaattatacctcagtaaaggtgtcagaaataacaggatatttatatttaaatctacctttgaattaccgattgtgactgaggtctcatgtggcttactggtgaatccagtagttgaggaaacgaaagccgtcacttctgctaactcttttaccaactcacctgctgtcaccttacacaaccccaactgtgtttcagctttggagtaatgaacacaccattttcttcctacttaaaagtccactcaggataatgattaagaaatacattgatgccgagtaataaatactttaaaaaaagttaaatgtgaacatttggctttcacagctcttgactgtctttggcgaaccttgacataaagctgccttttccatcttgggctgctgacaaaaaagcctaagaaagaaagagggtgtgtacagaaaattacatgccatagaaaaataccatacacaggccgggagcggtggcactttgggaggccagggcgggtggatcatttgaggtcaggagtttgagaccagcctggccaacatggtgaaacccccgtctctactaaaaatacaaaacttagccgggcatggtggtgcacacctgtagtcccagctacttgggaggttgaggcaggaggatcgcttgaacccaggaggcagagattgcggtgaactgagatagtgccactgtactctagcctgggcgacacagtaagactccatctccaaaagaaagaaagaaagaaagaaaaaaatgccatacagatgaatctttaaagattttaatttatatatacctcttctaccattcattggctggagtagttgaacagacatcagcaggcacaatgctaggcaggcactggagattcagtgatgaataaaacaaaactgacctggaacctggcctcctgaagcttctcttcatctgtctaaattcctttctttcaaggcccagtgcaagtgacaccttcatcaggaagggcttccacatgattctatctgcaaatctcccttttctgaactattatgcttatagtctgtaccaggccacatgacatatgttattttgtggcattctagaattattccaatcttttcattcttataattggtgtgttgtattcaataaataatgttgttattccagttttcatcactggtcacgcaagagtcctctctttattatattttatccccatagttcaccccgtttcctccccatcctaagtaactattaccatacctaaatatatatctaattaggttgtatgttttcttgcaaaatgagcactatcttctgtgcacatatatttgtgtatgtgaacagtattgtgttagcgttgcttctttatttcttcacttatgactatgcctctagtacatatccatgttgttatgtatgcatttattccattgcttctacccgctatacctcatcgtgtacctctaccacatgtcatcttcccccttttccaaggacagccacttgggtggcttccaacttgcccaacaactattctacagttattttatgtatgttactttggctccagctcaattgtgaactgcttgtagataaggaccatgtttttctttacctgttactcctgctgatttcctattagtgcctgtgcatgttttctgctgtaaggtgttaaatgttaaagtaaaattaataatagtagaagtaaggagttgccagtggaatcttcctgagctgaatctaatcatggctttaccccttactagctttgtgaccttgaccttggaaaagtaaaaccttgttggtctttcttcatctatcaaggtaggtaataccatctatcttagtgggctgttatgaggaatgagttaattaactaatactaagcactccagtacagtagaagacatacaacaggtgtttaatgaataataggtgcaatgaatcctacctgctgcttcaaattacagccatctgtacctgtcaacttttctaagagtataagcatcttggaggtaaggtcatttcaaatacttctttatatctggtcattacccagcactctgctttgtgtgaaatattctatacatttatgttgctatggtttggatgtttttgtcccctccaaaattcatgtcgaaacttaatccccaaagcaacagtattaaaggatgtggcctttaagaggtgactgagtaatgaatgagattaaatgctcttttgaaagcattttgctcctctttcccttctgtcccttccaccatgtgaggacatacattcctccactgtggaggatgcagcaatgaggtgccatcttggaagcagagatcagccttcaccagacactaattctgctggtgcattggtcttggaattcccagcctcaagagccaggaaaaacagatttctgttgtttataaattaccaaatctgtggtattttgttatagcagcacaaatggactaagacaaatctgttaacttagattttaagcatatgtgctaaagtattttaaaaggttattttatccaagaatatagtatgagttaataccttttttgcaagattcatggcaatcttttattatttattttttatttcattccatgttggaagcaaagtcatatctattaaaaagtaaaatcacaaattagtctttgattattcagaagcataagaagattgctgttttcatgttttccatttctccctccagtggcttgaaaagtacaggtgctcttttcagtcatgttttgtcttaaagattttaaaataagaagagtctgcatcctgtaaaagagggacagaaacatggatcagtacctactcctatttactccagtttttaacatttaagtccttctgttttgaggagctgtatcattatgattcactattaagaatctttacaaaagttcagaaactgcttaaattagaatttaaaaatcatagccaaaattctagatgtacacaaaagtacttctaatgagtttagcatcatctctggtttagaggaggtataaatagcattggactgcaatgctaaattctctataatgacttttctggatcagcatatcatacctacactgacttgccctaataaataaaaacaatgagtcagattatgtagaattgagatatatggaagataactctttaaaattatttgtggccaggcaggcactgtggctcatgcctgtaatcccagcactttgggaggccgaggtgggcagatcacctgaggtcaggagttagagaccagcctggcaaaaccccatctctactaaaaatacaaaaattagctgggtgtggtggtgtgcacctgtaatcccagctacccgggaggctgaggcaagagaattgcttgaatccaggaggcggaggttgcagtgagctgagactgcgccattgcactccagcctggccaacaagagggaaactctgtctcaaaaaaaataaaaagaaaaaaaaattatttgtgaactttttgtatattgcttaaggaataaaacaaggcaacctgataatccccaagatgtgatgtttcttttcagaagatatgcatttaccactttcaaaactttgcactaagaaagacaaaataataataatgataatacaaaattcagtgtagccactgttcttgatccctaaaaataataaagattcataaaaacaaagttccagacatacagactaaagaagcaaattctagttaacaagtactattagcttgaaataagctatgctagcattttcttaacttagacgcttatcaataagaaaatttatatatatacatatatataaaatataaaatagtgggagagaggaagagtacagactataaagaatgaggtattatgtcctaaaaattgctttgagaaatgacagaatgcccagcttataataaagagtgacaaagtagtaagactatataataagcaatatttcaaagatggtggtaggaagaaaaaggctgtcatttttttagaaaaacctagatgtaaaaaaaatgcgagatttgctaaatgatgtttatattttacagttagatattctctaaacaaaacaaaatatccttcatatggacatttctggaagtactactacagtgggactgaaattctctagtccctggtccctctttcccctttgaaaaaaaaatcacttctataatatattctttctctgccctattatttaaattgagaatgtgaaccagtacagacattatggaaaatacggaaattcctcaaaaaattaaaaatagaattaccatctgatccagcaattccacttaagggtataaatctaaaggaagtgaaatcagtaccttgaagtgatacctacactcccatgttcattttagcattattcataatagccaagatatggaaacaacctaagtgtccattagtgaatgaatggataaagaaaatgtgtgtgtgtgtctgtgtgtgtatatatatatatggaatattattccacaatggaatatttttcagccataaaacaatggaactcctggcatttgtgaaaacatggataatgaatggacgttaatgctaagtgatataagcaagatacagaaaaacaagtactatgtgatttcacttctgtggaatctaaaaagtcatactcaaaagcagagtagaatgatggttgccaggagccagaagatggaggaaatggggagatcttggtcaaaaggtacacattttggccaggcacagtggctcacacctatgatcccaacactttgggaggccaaggtaggtggatcgcctgagcccaggagtttgagactagcctgggcaacgtggcaaaaacccgtctctacaaaaactacaaaacctagccaggcatggtggtgtgcgcctatagtctcagctactcaggaggctggggtgggaggattgcttgagcctgggaggtagagatgggagtgagccatgatcacgccactgcagactccagcctgggtgacagggcgagaccctgtctcaaagaaaaaaaatggtagatattttcagttataagataaataacttatgttattataatttacagattctaaggatctaatataccgcatggtgactacagttaataatactgtatagcatatttgaaatttgctaagaagattttaagtgttctcaccacacacaaaaaaaggtaactgggtgacatgtattaattagcttgattgtggtaatcattttacagtgtatattagatcatcacaatgtataccttaaatatatataatttttatgtgtcaattataaagaaaatctttgatcattaaggaagctgaatatcctgctatatctaactcaagctgagaagggggaaaaagcacaatagctaacacttagaacactccaagttgtgttttaagtgcttttcatatattaaattcatgtaattcccataacaatcctgtgactgggcactattatcatcattaatctccatcttatattaatagatggggagactgagtgatagagaagtaacttgctttaagggcatggggcagagctgggatttgaacccaggtagcctagcaccaggctgcatgctctgccaggaggctgtgcttcctctgtagtaaggtggcctgtccctctcaactctttccatcactgggcacaaagctactgcatcagctgtcctccatatttaaaactcaggtatactctttgatgaaactctacctttagagcttctacccacactaccaagtcccaacaataccaaaacactcataagggatctggcccaaagcaaactgttccacattactacttggtagaaaacgaaaagctcctttttgatttttcacactctggacattttagtgtgtcatgacccagtctgataaccttttatgtctcttaagcattttgttgtgtttgtaactttttaccccctaattcattttcactgtcctgcaaagagttggaataaattaaatgtctaacaa

SEQ ID NO: 164147 - DNA, 4073 bp, Homo sapiens
  Payload ID: 12318
  Gene Symbol: PCNXL4
  Gene Name: pecanex-like 4 (Drosophila)
  ENST ID: ENST00000391611
  CDS Start-End: 555-1247
tcttgcgtaaaggcccggcccaagggaacgttcagggcgtctcggctttccccgctgctgcttctgctaggcccagtgcgagaccagagcacgagcgactcccgtcgtccccggccaggcagatgttggcctagtcctggcgcgaacgaagcgcgctatttccctgcttcctctaggccaagcctgctttacggcagggcccgcctcgggagcgagcacagaccggggcagcgaggccagccaggcgccgacgaggtccccgaacgcgcacgcgctccgttcagctccgggtggcggccgccggagtagacgttagccatggaaaccgagagctggcccgggcggggccgcggtgagctcgttattcggccgccgcagcttttctgcctccgcattcgggcactaaccaacctcccggcgggagcgcccagcccgagtttacctgcaaaaatgcggtccctgggatgccttcgcgtcttctcttccctcgggtgacttgagaaactgctgtgttacagaaaagcatgtgactttcagaataatcccgagtgaggatgagtccagatgtgcctctactgaatgattacaagcaggacttctttctgaagcgctttccacagactgttcttggaggccctcgattcaaattaggctattgtgcccctccttacatatatgttaatcaaattattctttttctaatgccatgggtttggggtggagtcggaacacttttataccagttaggcatcctgaaagactattatacagcagcactttcaggtggattaatgctttttactgcatttgtcatccagttcacaagtttatacgccaaaaacaaatcaacaacagtagaaagaatactaaccacggatatcttagcagaggaggatgagcatgaatttaccagttgtactggtgctgagactgtcaaatttctcattcctggcaagaaatatgtagccaatacagtttttcattctattcttgctggattagcgtgtggtcttggaacatggtatctgctcccaaatagaataaccttgctgtatggcagtacaggaggcactgctctactattcttctttggatggatgacactatgtatagcagaatattctttaattgtaaacacagctacagagactgcgactttccaaacacaggatacttatgaaattattcctcttatgagacctctttatatttttttctttgtttctgtggatctggcacacaggtaaaaacctaccaaatactttgtaactaactttgtttttaagtatacagagtaagagagctttccttttagtgttacaaaaaaatgaatccatggattaaaaatcatcaaaccattgggtgacaggttattttgataattattcttttaggattaatctctgtaaaacatactaaagcaatagttaaaacttattaaagagtttttttaaaaaaccctttttgagataaggaacttttcaattttgtgtttcactttaaataaggagctttgagtttttaagatagcctggctaaaacctgtgtaaggagatggaactttcctgtggggggaaagaagaaattaaaatttatacatataaatattatatacagattgaatgaatttaagacaaatacaaaatttatttctaattttatgatagcaacaatagtagaagtaatattgattttttaaaaaccaacttgttacagaagaaaagtagaaaatagtttttttaacagacataattgttcacaaaattgtttgataaccccttttacttgccttttcaagtttgacttttctttctccgtctccgtagattgcagctttcttttcttaggttagtgtccaggtagaaatgttcagcatgttatggactgaatatttgtgtctctccagaattcatatattacagtcttaaaccccaatgtgatggtattttgagatgaggcctttgggaggtaattaggtcatgaaggtgggtccttggtatgatgggactagtccccttatgagaagaggtaccagagagcttgatttgtccctctctgtgccatctaaggacacagcaaaaatgtggccacctgcaagtcaaagaagagagctctcatcaaaacctgaccatactggcagcctgatcatggtctttcggccttcagaagtgtgagaaagtaaattgatgttgtttaagccactcagcttatggcatttttttatggcagcccatgctgattaagattttgctaccaagaagtgggatgcctttgtaccaaatacctaaaaatgtggaaatggctttgtaactgttggtaatgggtagaggctgaaagaggtttttttgtttgtttctttgttttgttttgtttgagatggagtcttcactctcttgcccaggctggagtgcagtggcacaatcttggcccactgcaacgtccgcctcctggcttcaagtgatactcctccctgagcctcctgagtagctggaattacagacatgcgccaccatgcccggctaatttttatatttttaatagagacagggtttcgccatgttggccaggctggtcccaaagtcctgacctcaagtgatccacccgcctcggcctcccaaagttctgggattacaggcttgagccatcacacccagccaagggttttgatgtgcatgctagaaatatggacattaagggtgattctgatgaagtctgaagtcccctgaacccagaggaaaggcagtccttgttacaaagcgtcaaagaacttagctgaactgtgtcctagtgttttgtggagccatgaagttggatacctacgtaaggagagttcaaagcagtgttgaaaggagcagttggcttctcctgtttctagtaaaatgtgaaaggagagagatggattgaagaagggattgttaagcaagagaaggaaccagaacttgaagatttggaaaattttcagcctggattatccatattgtaaaacatgagaaagcatattctgaagagaacaccaaaagtgtggggctggactgtccctcagtaaagagcttttggcattatgtgagtagaaacactgccagtttgaattgaagtggttggagacaggaagtaatgaaggccgacagttgaacttcttggatttgacaggatgtaatgatagaactgttcagctacaaaagtgcagtattcttcaagaaaaggggaaaattatgccaaaggtgatttaagggtcttgagggctaccacctgtttcaacaagtcagctagcctctacccaaagcctcgggagcagaactgaacttcagagccacagaagcaggaccctcacctagagcactggcggtgacctgccaccccagtggcctggtgggcagagtatggaaccaaacagaattattctcaagctctaagatctaatggaatttgccttgctaggttttgacttccttgggatcatcaccctttttttcctgtttctcctattggagtggggatgtctcttctatacctgccctacccttagattttggaagcacgtaactcatctggtttcacagattcacagctggagaggaattttgcctcaggatggattgtacctaggtctcatccatatctgatttagatgagactttgaattttagccatcagagttaatgctagaatgagtgaagactttgggggatatggggatggaatgaatgtcttttgcatttgaatttggaaaggacatgagttttgaggggccagggatggaatgttatagactaattgtgttccctcaaaaatgtttatgttgaagccctaacccccaatgtgttggtatttggagatgggcctctgggaggtagtttatgaaggtgagaccctagtctgataggattagtgcccttaggagagatgccaaagagcttgatgtctctctttttgctacaaaaagacacagcaaaaaggcagccatgtgtaagccaggaagagagtcttcaccagaacctgactatactggcagcctgatcttgtacttgtagcccccagaactgttagaaaataaatttctgttgtttaagcca

SEQ ID NO: 164148 - DNA, 4666 bp, Homo sapiens
  Payload ID: 12318
  Gene Symbol: PCNXL4
  Gene Name: pecanex-like 4 (Drosophila)
  Uniprot ID: Q63HM2
  ENST ID: ENST00000406854
  CDS Start-End: 555-4073
tcttgcgtaaaggcccggcccaagggaacgttcagggcgtctcggctttccccgctgctgcttctgctaggcccagtgcgagaccagagcacgagcgactcccgtcgtccccggccaggcagatgttggcctagtcctggcgcgaacgaagcgcgctatttccctgcttcctctaggccaagcctgctttacggcagggcccgcctcgggagcgagcacagaccggggcagcgaggccagccaggcgccgacgaggtccccgaacgcgcacgcgctccgttcagctccgggtggcggccgccggagtagacgttagccatggaaaccgagagctggcccgggcggggccgcggtgagctcgttattcggccgccgcagcttttctgcctccgcattcgggcactaaccaacctcccggcgggagcgcccagcccgagtttacctgcaaaaatgcggtccctgggatgccttcgcgtcttctcttccctcgggtgacttgagaaactgctgtgttacagaaaagcatgtgactttcagaataatcccgagtgaggatgagtccagatgtgcctctactgaatgattacaagcaggacttctttctgaagcgctttccacagactgttcttggaggccctcgattcaaattaggctattgtgcccctccttacatatatgttaatcaaattattctttttctaatgccatgggtttggggtggagtcggaacacttttataccagttaggcatcctgaaagactattatacagcagcactttcaggtggattaatgctttttactgcatttgtcatccagttcacaagtttatacgccaaaaacaaatcaacaacagtagaaagaatactaaccacggatatcttagcagaggaggatgagcatgaatttaccagttgtactggtgctgagactgtcaaatttctcattcctggcaagaaatatgtagccaatacagtttttcattctattcttgctggattagcgtgtggtcttggaacatggtatctgctcccaaatagaataaccttgctgtatggcagtacaggaggcactgctctactattcttctttggatggatgacactatgtatagcagaatattctttaattgtaaacacagctacagagactgcgactttccaaacacaggatacttatgaaattattcctcttatgagacctctttatatttttttctttgtttctgtggatctggcacacaggtttgtggtaaatatgccagctctagaacacatgaatcagattttacacatcttgtttgtatttttaccctttctgtgggcacttgggactctgcccccacccgatgcacttctcttatgggcaatggagcaggttttagagttcggccttggaggctcatctatgtcaacccacttacggttattagtaatgttcatcatgtctgctggaacagctatagcatcatatttcattccaagcactgttggtgtggttcttttcatgactggatttggtttcttgctgagtctgaacttaagtgatatgggtcacaaaattggaaccaaatctaaggatttacccagtggtccggaaaaacatttttcatggaaggaatgccttttctacatcattatattagtcttggctcttttagaaactagcttgcttcatcactttgctggcttctcacagatttctaaaagcaattcccaggctattgtgggctatggtttgatgatattacttataatactgtggatacttagagaaattcaaagcgtatatatcattggaattttccgaaatcccttttatccgaaggatgtgcaaactgtgactgtattctttgagaagcaaactaggctcatgaagattggtattgtcagacggattttgctaactttagtatcaccttttgccatgatagcatttctttcattggacagttccttacaagggctccactcagtgtctgtctgtattggattcacaagagcctttagaatggtatggcagaatacagaaaatgctttattggagacagtcattgtatcaacagtacacttgatctccagtacagacatatggtggaacagaagcctggatacaggactcagactcttactggttggtatcatacgtgatcgtttgattcagttcatctctaaattgcagtttgccgtgactgtgcttttgacatcatggacagagaaaaaacaacgtcgaaaaacaactgccactttatgtatactcaacattgtcttttctccattcgtgttggtcatcatagttttttctacactactctcttctcccttactccctcttttcacccttcctgtgttcttggtggggtttccccgacctattcagagttggccaggagcagcaggcaccacagcctgtgtgtgtgcagatacagtgtactactaccaaatggtgcccaggttgactgctgtactgcagactgcaatggcagctggaagtttaggtctcctcctacctggatctcattacttgggccgttttcaggatcgtttaatgtggataatgattctggaatgtggctatacttactgctctattaacattaaggggttagaattgcaggaaacatcctgtcatactgcagaagctcgcagagttgatgaagtttttgaagatgcttttgagcaagaatacacaagagtatgttcccttaatgaacactttggaaatgtcttgacaccctgtactgttttgcctgtgaaattgtattctgatgccaggaatgttctatcaggcataattgattctcatgaaaacttaaaagaatttaaaggtgacctcattaaagtacttgtgtggatacttgttcaatactgctccaaaaggcctggcatgaaagagaatgttcacaacactgaaaataaagggaaagcacctctaatgttgcctgctttgaacactttgccacctcccaaatccccagaagacatagacagtttaaattcagaaacttttaatgactggtctgatgataatatttttgatgatgagccaactatcaaaaaagtaatagaagaaaaacatcagttgaaagatttgccaggtacaaatttgtttattccaggatcagtagaatcacagagggttggtgatcattctacaggcactgttcctgaaaacgatctttacaaagcagttctattaggataccctgctgttgacaaaggaaaacaagaggacatgccatatattcctctcatggagttcagttgttcacattctcacttagtatgcttacccgcagagtggaggactagctgtatgcccagttccaaaatgaaggagatgagctcgttatttccagaagactggtaccaatttgttctaaggcagttggaatgttatcattcagaagagaaggcctcaaatgtactggaagaaattgccaaggacaaagttttaaaagacttttatgttcatacagtaatgacttgttattttagtttatttggaatagacaatatggctcctagtcctggtcatatattgagagtttacggtggtgttttgccttggtctgttgctttggactggctcacagaaaagccagaactgtttcaactagcactgaaagcattcaggtatactctgaaactaatgattgataaagcaagtttaggtccaatagaagactttagagaactgattaagtaccttgaagaatatgaacgtgactggtacattggtttggtatctgatgaaaagtggaaggaagcaattttacaagaaaagccatacttgttttctctggggtatgattctaatatgggaatttacactgggagagtgcttagccttcaagaattattgatccaagtgggaaagttaaatcctgaagctgttagaggtcagtgggccaatctttcatgggaattactttatgccacaaacgatgatgaagaacgttatagtatacaagctcatccactacttttaagaaatcttacggtacaagcagcagaacctcccctgggatatccgatttattcttcaaaacctctccacatacatttgtattagagctcattttgactgtaatgtcatcaaatgcaatgtttttattttttcatcctaaaaaagtaactgtgattcttgtaacttgaggacttctccacacccccattcagatgcctgagaacagctaagctccgtaaagttggttctcttagccatcttaatggttctaaaaaacagcaaaaacatctttatgtctaagataaaagaactatttggccaatatttgtgccctctggactttagtaggctttggtaaatgtgagaaaacttttgtagaattatcatataatgaattttgtaatgctttcttaaatgtgttataggtgaattgccatacaaagttaacagctatgtaatttttacatacttaagagataaacatatcagtgttctaagtagtgataatggatcctgttgaaggttaacataatgtgtatatatttgtttgaaatataatttatagtattttcaaatgtgctgatttattttgacatctaatatctgaatgtttttgtatcaagtagtttgttttcatagacttcaattcataaactttaaaaaacttttaataaaatattttccttccttttcaaata

SEQ ID NO: 164149 - DNA, 3513 bp, Homo sapiens
  Payload ID: 12318
  Gene Symbol: PCNXL4
  Gene Name: pecanex-like 4 (Drosophila)
  ENST ID: ENST00000406949
  CDS Start-End: 507-3128
aaaggcccggcccaagggaacgttcagggcgtctcggctttccccgctgctgcttctgctaggcccagtgcgagaccagagcacgagcgactcccgtcgtccccggccaggcagatgttggcctagtcctggcgcgaacgaagcgcgctatttccctgcttcctctaggccaagcctgctttacggcagggcccgcctcgggagcgagcacagaccggggcagcgaggccagccaggcgccgacgaggtccccgaacgcgcacgcgctccgttcagctccgggtggcggccgccggagtagacgttagccatggaaaccgagagctggcccgggcggggccgcggtgagctcgttattcggccgccgcagcttttctgcctccgcattcgggcactaaccaacctcccggcgggagcgcccagcccgagtttacctgcaaaaatgcggtccctgggatgccttcgcgtcttctcttccctcgggtgacttgaggtttgtggtaaatatgccagctctagaacacatgaatcagattttacacatcttgtttgtatttttaccctttctgtgggcacttgggactctgcccccacccgatgcacttctcttatgggcaatggagcaggttttagagttcggccttggaggctcatctatgtcaacccacttacggttattagtaatgttcatcatgtctgctggaacagctatagcatcatatttcattccaagcactgttggtgtggttcttttcatgactggatttggtttcttgctgagtctgaacttaagtgatatgggtcacaaaattggaaccaaatctaaggatttacccagtggtccggaaaaacatttttcatggaaggaatgccttttctacatcattatattagtcttggctcttttagaaactagcttgcttcatcactttgctggcttctcacagatttctaaaagcaattcccaggctattgtgggctatggtttgatgatattacttataatactgtggatacttagagaaattcaaagcgtatatatcattggaattttccgaaatcccttttatccgaaggatgtgcaaactgtgactgtattctttgagaagcaaactaggctcatgaagattggtattgtcagacggattttgctaactttagtatcaccttttgccatgatagcatttctttcattggacagttccttacaagggctccactcagtgtctgtctgtattggattcacaagagcctttagaatggtatggcagaatacagaaaatgctttattggagacagtcattgtatcaacagtacacttgatctccagtacagacatatggtggaacagaagcctggatacaggactcagactcttactggttggtatcatacgtgatcgtttgattcagttcatctctaaattgcagtttgccgtgactgtgcttttgacatcatggacagagaaaaaacaacgtcgaaaaacaactgccactttatgtatactcaacattgtcttttctccattcgtgttggtcatcatagttttttctacactactctcttctcccttactccctcttttcacccttcctgtgttcttggtggggtttccccgacctattcagagttggccaggagcagcaggcaccacagcctgtgtgtgtgcagatacagtgtactactaccaaatggtgcccaggttgactgctgtactgcagactgcaatggcagctggaagtttaggtctcctcctacctggatctcattacttgggccgttttcaggatcgtttaatgtggataatgattctggaatgtggctatacttactgctctattaacattaaggggttagaattgcaggaaacatcctgtcatactgcagaagctcgcagagttgatgaagtttttgaagatgcttttgagcaagaatacacaagagtatgttcccttaatgaacactttggaaatgtcttgacaccctgtactgttttgcctgtgaaattgtattctgatgccaggaatgttctatcaggcataattgattctcatgaaaacttaaaagaatttaaaggtgacctcattaaagtacttgtgtggatacttgttcaatactgctccaaaaggcctggcatgaaagagaatgttcacaacactgaaaataaagggaaagcacctctaatgttgcctgctttgaacactttgccacctcccaaatccccagaagacatagacagtttaaattcagaaacttttaatgactggtctgatgataatatttttgatgatgagccaactatcaaaaaagtaatagaagaaaaacatcagttgaaagatttgccaggtacaaatttgtttattccaggatcagtagaatcacagagggttggtgatcattctacaggcactgttcctgaaaacgatctttacaaagcagttctattaggataccctgctgttgacaaaggaaaacaagaggacatgccatatattcctctcatggagttcagttgttcacattctcacttagtatgcttacccgcagagtggaggactagctgtatgcccagttccaaaatgaaggagatgagctcgttatttccagaagactggtaccaatttgttctaaggcagttggaatgttatcattcagaagagaaggcctcaaatgtactggaagaaattgccaaggacaaagttttaaaagacttttatgttcatacagtaatgacttgttattttagtttatttggaatagacaatatggctcctagtcctggtcatatattgagagtttacggtggtgttttgccttggtctgttgctttggactggctcacagaaaagccagaactgtttcaactagcactgaaagcattcaggtatactctgaaactaatgattgataaagcaagtttaggtccaatagaagactttagagaactgattaagtaccttgaagaatatgaacgtgactggtacattggtttggtatctgatgaaaagtggaaggaagcaattttacaagaaaagccatacttgttttctctggggtatgattctaatatgccaggaccagccttggagataagcagagtgaacagaaatttatggtctcagatttaagaaaaacaaaattctttcttgcttcttaaatcatactccatcccattggcttgcaaacatgctgacactcctcataatttcactcttcataaaccaaagcataaggtcagaggagaacttgacatattagaacacttaggcattgaaagtggttagtctaactaacccattgaagttttggagaacctgggactcaaattttggaagatgtgacagatgatatgttaacatacattgcaccgaggctgaagtgggaggattgcttgagactgcctggaaggcagaagttgcagtgagccgagactgatggtgtcactgcactccagcctgggcaacagagcaagaccctgtcttaaaaaaacaaaacaaacaaacaaaagaaacc

SEQ ID NO: 164150 - DNA, 2545 bp, Homo sapiens
  Payload ID: 12318
  Gene Symbol: PCNXL4
  Gene Name: pecanex-like 4 (Drosophila)
  ENST ID: ENST00000555740
  CDS Start-End: 1-1584
ttatgtatactcaacattgtcttttctccattcgtgttggtcatcatagttttttctacactactctcttctcccttactccctcttttcacccttcctgtgttcttggtggggtttccccgacctattcagagttggccaggagcagcaggcaccacagcctgtgtgtgtgcagatacagtgtactactaccaaatggtgcccaggttgactgctgtactgcagactgcaatggcagctggaagtttaggtctcctcctacctggatctcattacttgggccgttttcaggatcgtttaatgtggataatgattctggaatgtggctatacttactgctctattaacattaaggggttagaattgcaggaaacatcctgtcatactgcagaagctcgcagagttgatgaagtttttgaagatgcttttgagcaagaatacacaagagtatgttcccttaatgaacactttggaaatgtcttgacaccctgtactgttttgcctgtgaaattgtattctgatgccaggaatgttctatcaggcataattgattctcatgaaaacttaaaagaatttaaaggtgacctcattaaagtacttgtgtggatacttgttcaatactgctccaaaaggcctggcatgaaagagaatgttcacaacactgaaaataaagggaaagcacctctaatgttgcctgctttgaacactttgccacctcccaaatccccagaagacatagacagtttaaattcagaaacttttaatgactggtctgatgataatatttttgatgatgagccaactatcaaaaaagtaatagaagaaaaacatcagttgaaagatttgccaggtacaaatttgtttattccaggatcagtagaatcacagagggttggtgatcattctacaggcactgttcctgaaaacgatctttacaaagcagttctattaggataccctgctgttgacaaaggaaaacaagaggacatgccatatattcctctcatggagttcagttgttcacattctcacttagtatgcttacccgcagagtggaggactagctgtatgcccagttccaaaatgaaggagatgagctcgttatttccagaagactggtaccaatttgttctaaggcagttggaatgttatcattcagaagagaaggcctcaaatgtactggaagaaattgccaaggacaaagttttaaaagacttttatgttcatacagtaatgacttgttattttagtttatttggaatagacaatatggctcctagtcctggtcatatattgagagtttacggtggtgttttgccttggtctgttgctttggactggctcacagaaaagccagaactgtttcaactagcactgaaagcattcaggtatactctgaaactaatgattgataaagcaagtttaggtccaatagaagactttagagaactgattaagtaccttgaagaatatgaacgtgactggtacattggtttggtatctgatgaaaagtggaaggaagcaattttacaagaaaagccatacttgttttctctggggtatgattctaatatgtatttatgactatgcatcgctgaggcaacagatcagaaaaggcagacaaagagaagtgactaagattttgcctaatggtgattgagatggctgccaggaaacttttatttaaagaaccaaggaagtagagggaatttacactgggagagtgcttagccttcaagaattattgatccaagtgggaaagttaaatcctgaagctgttagaggtcagtgggccaatctttcatgggaattactttatgccacaaacgatgatgaagaacgttatagtatacaagctcatccactacttttaagaaatcttacggtacaagcagcagaacctcccctgggatatccgatttattcttcaaaacctctccacatacatttgtattagagctcattttgactgtaatgtcatcaaatgcaatgtttttattttttcatcctaaaaaagtaactgtgattcttgtaacttgaggacttctccacacccccattcagatgcctgagaacagctaagctccgtaaagttggttctcttagccatcttaatggttctaaaaaacagcaaaaacatctttatgtctaagataaaagaactatttggccaatatttgtgccctctggactttagtaggctttggtaaatgtgagaaaacttttgtagaattatcatataatgaattttgtaatgctttcttaaatgtgttataggtgaattgccatacaaagttaacagctatgtaatttttacatacttaagagataaacatatcagtgttctaagtagtgataatggatcctgttgaaggttaacataatgtgtatatatttgtttgaaatataatttatagtattttcaaatgtgctgatttattttgacatctaatatctgaatgtttttgtatcaagtagtttgttttcatagacttcaattcataaactttaaaaaacttttaataaaatattttccttccttttc

SEQ ID NO: 164151 - DNA, 711 bp, Homo sapiens
  Payload ID: 12318
  Gene Symbol: PCNXL4
  Gene Name: pecanex-like 4 (Drosophila)
  ENST ID: ENST00000556360
  CDS Start-End: 1-419
caagagtatgttcccttaatgaacactttggaaatgtcttgacaccctgtactgttttgcctgtgaaattgtattctgatgccaggaatgttctatcaggcataattgattctcatgaaaacttaaaagaatttaaaggtgacctcattaaagtacttgtgtggatacttgttcaatactgctccaaaaggcctggcatgaaagagaatgttcacaacactgaaaataaagggaaagcacctctaatgttgcctgctttgaacactttgccacctcccaaatccccagaagacatagacagtttaaattcagaaacttttaatgactggtctgatgataatatttttgatgatgagccaactatcaaaaaagtaatagaagaaaaacatcagttgaaagatttgccaggtatactctgaaactaatgattgataaagcaagtttaggtccaatagaagactttagagaactgattaagtaccttgaagaatatgaacgtgactggtacattggtttggtatctgatgaaaagtggaaggaagcaattttacaagaaaagccatacttgttttctctggggtatgattctaatatgggaatttacactgggagagtgcttagccttcaagaattattgatccaagtgggaaagttaaatcctgaagctgttagaggtcagtgggccaatctttcatgggaattactttatgc

SEQ ID NO: 164152 - DNA, 357 bp, Homo sapiens
  Payload ID: 12318
  Gene Symbol: PCNXL4
  Gene Name: pecanex-like 4 (Drosophila)
  ENST ID: ENST00000554534
  CDS Start-End: 1-357
tgtatcaacagtacacttgatctccagtacagacatatggtggaacagaagcctggatacaggactcagactcttactgagttggccaggagcagcaggcaccacagcctgtgtgtgtgcagatacagtgtactactaccaaatggtgcccaggttgactgctgtactgcagactgcaatggcagctggaagtttaggtctcctcctacctggatctcattacttgggccgttttcaggatcgtttaatgtggataatgattctggaatgtggctatacttactgctctattaacattaaggggttagaattgcaggaaacatcctgtcatactgcagaagctcgcagagttgatga

SEQ ID NO: 164153 - DNA, 711 bp, Homo sapiens
  Payload ID: 12318
  Gene Symbol: PCNXL4
  Gene Name: pecanex-like 4 (Drosophila)
  ENST ID: ENST00000555929
  CDS Start-End: 1-290
tgtactactaccaaatggtgcccaggttgactgctgtactgcagactgcaatggcagctggaagtttaggtctcctcctacctggatctcattacttgggccgttttcaggatcgtttaatgtggataatgattctggaatgtggctatacttactgctctattaacattaaggggttagaattgcaggaaacatcctgtcatactgcagaagctcgcagagttgatgaagtttttgaagatgcttttgagcaagaatacacaagagtatactctgaaactaatgattgataaagcaagtttaggtccaatagaagactttagagaactgattaagtaccttgaagaatatgaacgtgactggtacattggtttggtatctgatgaaaagtggaaggaagcaattttacaagaaaagccatacttgttttctctggggtatgattctaatatgggaatttacactgggagagtgcttagccttcaagaattattgatccaagtgggaaagttaaatcctgaagctgttagaggtcagtgggccaatctttcatgggaattactttatgccacaaacgatgatgaagaacgttatagtatacaagctcatccactacttttaagaaatcttacggtacaagcagcagaacctcccctgggatatccgatttattcttcaaaacctctccacatacatttgtattagagctca

SEQ ID NO: 164154 - DNA, 3750 bp, Homo sapiens
  Payload ID: 12319
  Gene Symbol: PELI1
  Gene Name: pellino E3 ubiquitin protein ligase 1
  Uniprot ID: Q96FA3
  ENST ID: ENST00000358912
  CDS Start-End: 444-1700
ggctagacccctcccctccttgcgagtgtatgtcagtgacccagaggcggtgtgaggcggagggaccgtcggggggcgccgccgccgcctccactagcagcagcggcagcagccctagtcccgcggtgcggtcgaattggtccccagccctccgggagcgcaccacaaagcagccccaacgcctctccctgcgtccgcggctcctcagcgctcggctccgtggtcaacttcccctcgctgggctcggctggcgggcgcggagggcagcggcggaacggcgggctgtctgctcgcgctccccgcgcacaacacttcaccctctcgcctcgggtctcgggggccgctctgggatcccggccaccagcaattgtccggaaataatgcaaaaggtgtcccaaggctcctgaccagtgaacaaagatttgagaaagacagccaagctcatgttttctcctgatcaagaaaatcatccatctaaagcaccagtaaaatatggtgaactcattgtcttagggtataatgggtctctcccaaatggcgatagaggaaggaggaaaagtaggtttgctttgtttaaaagacctaaggcaaatggggtgaagcccagcactgtgcatattgcttgtactcctcaggctgcaaaggcaataagcaacaaagaccagcatagcatatcatatactttatctcgggcccagactgtggtggttgaatatactcatgacagcaacaccgatatgtttcagattggccggtcgactgaaagccccattgattttgtagtaactgacacggttcctggaagtcaaagtaattctgatacacagtcagtacaaagcactatatcaagatttgcctgcagaatcatatgtgaacggaatcctccctttacagcacggatttatgctgcaggatttgactcatcaaaaaacatctttcttggggagaaggctgccaaatggaagacatcagatggacagatggatggcttgaccactaatggtgttcttgtgatgcatccacgcaatgggttcacagaagactccaagcctggaatatggagagaaatatcggtgtgtggaaatgtatttagcctacgtgaaaccagatcggctcagcagagaggaaaaatggtggaaattgaaaccaatcagttacaagatggctcgttaattgacctctgtggtgcaacattgttatggcgtactgcagaaggcctttcccacactcctaccgtgaagcatttagaagctttaagacaggaaatcaatgcagcacgacctcagtgccctgtagggttcaacacactagcatttcctagtatgaagaggaaagacgttgtagatgaaaaacaaccatgggtatatctaaactgcggccatgtacatggctatcataactggggaaacaaagaagaacgtgatggaaaagatcgtgaatgtcctatgtgtaggtctgttggtccctatgttcctctgtggcttggatgtgaagctggattttatgtggacgccggccctccaacccatgcgtttagcccgtgtgggcatgtgtgttcagaaaagacaactgcctattggtcccagatcccacttcctcatggtactcatacttttcatgcagcctgtcccttttgtgcacatcagttggctggtgaacaaggctacatcagacttatttttcaaggacctctagactaacagaccattgtcttgcaggactacattataaatttataagctaagtgagttgggttttcgaacctgttgtccacgtcacagtttttctgctctggtcatttgcattaagatgaagaattttttaaaacatttataataaatagtagcaatttctgagcaaaaatctgggaaactcaagcaaaggaatttctgaaagtatcagtcttctgaattctgagttttgaaaatatattttgaggagaaaaagacatagtctaatttgatgccttccttttagtgtttttgaatcacctatcctcagtgctgaaattgttttgtataactgagggtactgttggttcaaactatgttagtttacagtttgttgcaaacattgtaaaatacagcgacatgtatattaacttttttctatttatctttattatagaaaataccttagaatgttcttgatagagtagcatggtaacgatggtgtcacacccttggtgtgaatggtagcttagtgagcaacctagctcaaggatttgcaaagttaggaagaaggacgagagagcctctctccccaccccaatctaaatatggaatttggtaaattagaatactttgtaatttgtaagaccaaattcatactaattacccgcgtgaaaggtgtttgtttttaacaacattgaagataatcaggaaagattttttcttaatgtttctctcgagcgtagtactataacaaaaacttaatgctaagaaacattttatatgctcctttggatatgcaatttaatctagattatctatttttctcccatgataactaatctgtttttagtatcagcagcatttggcaagtttattttttggatataaactgtggttcatctgttcactgtttctagaaaaaaatcattgccataagaaaaagtataaattagcaagaaaggagagtgacttgatttgcttttggaaaaagaaatgcttaattaattattctgtatttggccttattcgggcattaggaaatctagagatctaaagggttgaatgacaatagtgcccccgtttttagcagaccagccttaactctgggtttgaatcctaaggagattgccacagtgagacttaaggaaatgtttggttggcagatgagcaccaatgactgcagcgtggagtgacgcactgcatggtctgtttattctctaattccaatatgtcttttgcttccagaagcaagaaaagtttcttctctcccctccttcccacccttttttcaaaggcaccacaagtatagacagttgcactacatcaaatctttttttgacacttgtagaaaccagtacacttttagattagacagtatcttcttttaatattttgatttgttttcctttagtttgaaaagttgtataatacttaactgactgtagcaaagttttatatgtggtagcatacctttaatttatcctattacaaaactgttctgaattttcttttggtttttaaaaaacaaaacttgttgcttagaagccatgaattattttattttacttcaactgtcgaaacttccttgttttaaaaaatgatcatttgggttcactcaggaaatgcatgtcaggaaacttgtattataagtttattagttgtgatgtatcagtaactgctgttacccctttttcaaagaaatgtaattgattttgaagttttctagattgtcacatgctttgtgactaatgcaagaaagcaagtcctgtgttgtatttgttctagtcatttttattcaggctatatattgtagcttaatttttatttgcaattaatttatttaaactaagtaaatacttttcaaaatacataattgaattcgtctctgtgagttcatttttgcataatcgagaatgagaaaccagaagtgaaaactgtgaacaactctattccacactccaaaaatactcatttgaaatagatgaagagtttgcatttaatgtaacactttaaagtatctggttcttttttaaaagcatctcttactaataaaggaactttgttagtggttgaataa

SEQ ID NO: 164155 - DNA, 5909 bp, Homo sapiens
  Payload ID: 12320
  Gene Symbol: PELI2
  Gene Name: pellino E3 ubiquitin protein ligase family member 2
  Uniprot ID: Q9HAT8
  ENST ID: ENST00000267460
  CDS Start-End: 287-1549
ggcgctcagcgcaggcaggtccccctgctgccgggtcccatttgttgccggctctgactcggggcggccgcggcgcgcggagctccggggagtcaggcggagcagccgcgcagccacgacggagcagcagcgggactggccgccccgcgcccccttcgccgccgtgcccttccccggcgcgctcaccccgttctcgggatgggattgtagcggcggcgcggactcggcggggatcgcggcggaggcggcggcgtcggcggcggcgtcggcggccgagcggggctccatgttttcccctggccaggaggaacactgcgcccccaataaggagccagtgaaatacggggagctggtggtgctcgggtacaatggtgctttacccaatggagatagaggacggaggaaaagtagatttgccctctacaagcggcccaaggcaaatggtgtcaaacccagcaccgtccatgtgatatccacgccccaggcatccaaggctatcagctgcaaaggtcaacacagtatatcctacactttgtcaaggaatcagactgtggtggtggagtacacacatgataaggatacggatatgtttcaggtgggcagatcaacagaaagccctatcgacttcgttgtcacagacacgatttctggcagccagaacacggacgaagcccagatcacacagagcaccatatccaggttcgcctgcaggatcgtgtgcgacaggaatgaaccttacacagcacggatattcgccgccggatttgactcttccaaaaacatatttcttggagaaaaggcagcaaagtggaaaaaccccgacggccacatggatgggctcactactaatggcgtcctggtgatgcatccacgagggggcttcaccgaggagtcccagcccggggtctggcgcgagatctctgtctgtggagatgtgtacaccttgcgagaaaccaggtcggcccagcaacgaggaaagctggtggaaagtgagaccaacgtcctgcaggacggctccctcattgacctgtgtggggccactctcctctggagaacagcagatgggctttttcatactccaactcagaagcacatagaagccctccggcaggagattaacgccgcccggcctcagtgtcctgtggggctcaacaccctggccttccccagcatcaacaggaaagaggtggtggaggagaagcagccctgggcatatctcagttgtggccacgtgcacgggtaccacaactggggccatcggagtgacacggaggccaacgagagggagtgtcccatgtgcaggactgtgggcccctatgtgcctctctggcttggctgtgaggcaggattttatgtagacgcaggaccgccaactcatgctttcactccctgtggacacgtgtgctcggagaagtctgcaaaatactggtctcagatcccgttgcctcatggaactcatgcatttcacgctgcttgccctttctgtgctacacagctggttggggagcaaaactgcatcaaattaattttccaaggtccaattgactgacgcccttgacagccatctacgactttattaacaggttactgtgaagattttgccactaactctagattttacctttttgtaatgctgtttatcagaggagggtgacaggggctggaaataaagagaggggacatggtgatgaaacatggcaggagtgtaacagataccagtggtgtgttgcatgctcaaaacagcagcgtcgtcattgaagtctgcttgattaaaccataatatctttgtaataattggatttaaaatgctatgcttctatttttaaccttgggtttttaaccaagtttttttttttttgtaatcttggacaagactttaaatcatattttacagatgtagaagaaatttattcaaaagtgtgggctcatgaagttcacttcagtgcagtgtggtgtaggtgttacgcgaagggcgcacagtgtctagaaatacttgatcgtggctcaaacctgaccagacagcagaggggcggctctgtacagtgtgactggtggacagatggccttaggcacaggtggttttgaaatctggggctttttctgatttatttttctgacttgttgggggagagaatattcataacttgtgggctttttttttttttaacttcagtggaatttactttagatattcattcatcaaatacatgggacttcacaaacaattttccataactttttagcctgtcttttgttatttctgcctaatatgatttgccccgatactcatcttgcacggccagaactgtttggttgattaaaatacatcagctcttaaaaactcattaactgagggtaattacagtagtagacatggtctgggtactatactaccatgtttatttgctgactgaattaagatttaagaatgattaaaaataagcttttactttttaaaaccacttgaggtttcataaagcttggggtttttttttttcctttgttaagaaagccaaccaatcacaatgatatagtcattgttgtgcactcccttttcaccatctgtcaccttcccttgcagcttaaggagcccagtaagttttgaaaatgtttgcgaatcaaactaaatttaagtgggatgattagatatacacaacaccaagtggtacatctgcagagataattcaaaattcctgcttttgagagagcaaatgagtgttgctgaggaataattaaatgagaatttcataggagctccaccattcctgttactttcatttcattttgattaataattcttggatgcttggcatcgatcgtatcactgctcctagaaggtaaagatcctttaggacatgagactggtagaagctggctgagataaaataagtatttatttaaactaatgttctcttaatttgaccattgcagatttgggtgacttttttttaacctttgtacatatacgtaatttatatgattctaatgtactatatccatacttgaattggttttttcgtattttgcctactggcaaatattttgcctattttcagtcgttctaacctatttgaatacgcttttccttaaagtgatacgataatattactcttgattgctgctgcttaatttgatgtaatatgtttaaagttcagcctctcagttttaatatagctttatttttcagtggagatcattgtttaggatgagacatttttggttttggttttgtttgggtaaattttaaatggtgtgaaaatcgatgacaacagtcctcttacagatagcttgctgtattctgtatagcttactctacctgcagacagaaaatgaaagaaaaaaatggacttgcctagaataatatattgaatgccttttgatttagccagagtctctgatgattagctttcactgatagagtatgtcttttcagcctgtaattctttgggccccaaagaatgacaaaggaggcactcgttctcttttcttgctgtatgcctagaaagtggttgaaggattcttgatgccctaaaaccatcttgtaagctaaatggtcttgcatccagaaaggccagattttacctaccaagaaaaaaagatatttttccagagagttaggtatatcataattttccatttcaagtcctgtttataagtctagtcattctgcaacgtgacatatcccccaaaatgaagttaccttccaagttggacacgtcccgtagttgggcatatgtctaactaaaagtttctgacttttagtaaattcagcttaaatataagttgaaatttgggaaataatttccaagctcttggaaggggtaacagtgaaccgccctccatgggctccacatcttttcctttggcttccaaagtcaggtcccgcccaccctgcctaaggaactgcagagaggtggcaaatcagcaaaaaggacaccaggctcttcttggccacttgtaggaagatccctttacaattttgactaaggagattttttttttcacagttgagttagtttgtgaaaataaagaactctgtagctcaccaaggtggagaaacgcaattcagaaaagtaatttctccaaggtcacttctttttttatgtcttgccatcactttaaaggactagccccactcccccatgtgtatacacaaggaaattgcagaccaattagttgtcttggcctgactctaatgccttttgcaagtagctttccagaagtaaaagtcccagtgatgtattcccatagaaatatttttcagttgtttatgtcgtttactacaaaaaaaaagattcagagtggatggagtacaactctgagtatttttctagtccggaattttttattaataatcggtgctgccgggtcatgcatgctgcaactctcaacatttcccttatttggttcagcttttagcaaaaagggctacagttcaccctgcagagtattaaggtttctggatttttttctcccaactgtggcccaaaagaattaaaatctgttaatataaatagagaacatatttatcattcctcgatagttaattatagactttggtacctttgtgcctcagggaagccacgtgatataactggttatagaatttcagggttagggtttaaagaaaggagaaagccattggaaaaatgatgggctccattaaggagactaatgaatctggatgcagaaatatgtcagaaactggcataaacatgattgtagtagaatttattttccagtaccaatagggaaattattttaagttattacatttactgtattgggaaacttgaggagaactctttagttcataaagcttcaatgtcttttttttttttttcatggaaaaactcaaacctctgttatttgggagctcagtattgtgtggacacttacgagagttttctgcttaattgaagtgtaatataggttgtagaattgttacctgcagttctatggttttgtttcacttcttttcttttttaaagccattctgttctttggatgtgcttgaaagggtgtgtgattacaccattgttaatgctgggtaaaaactatcttcttgcagccttgcctcataacagtggaatttctgatagacaaaccacaggactttgattttaagccaaatccatctccatccctttactgtcaatcttctgtcccagtagtttagcctttgtggcttaggttatgatgcgcctccttctgtgcgaccaatgagacgacttcagcatctttttaaaataatctaagcatcattgaagcagtaacacaaaaaaaaggttcagtattttctttttagtataacttacatcctttcaaataagtctttgccctcatgaagaatccctagaggaagataaggaaaataagtattttccagttttgcttgacagtttctaaacaaacaaaaataaactcaatgaaaggaaagatgtttctttttagctgagatgacagattgcttctctgtattaaatagtctagaagttaaggggatggtcacatttaccatgtattgtgttattagcagttaaattttatgaatatgtttgtaaaattgttgttttatatttcatgtcaaattgaaaagtttatttcttcactattgtacctgtggaaatacaagccattttacaggaaaaaatcttcaaaaactattaaatggatatcagcctgtttgtgagccattgtcttcagattctgtggttgtcactgagttcattaggacatttagtaggttgatacgagtagaactgatttttttcacttctctaacttccaagttaatctccagctgttgagtttattaattgttttatattctgcacaatacatatttaaaccttgattctgaaaatcccctacattttttaattaaagaaatttccttggtgcctata

SEQ ID NO: 164156 - DNA, 774 bp, Homo sapiens
  Payload ID: 12320
  Gene Symbol: PELI2
  Gene Name: pellino E3 ubiquitin protein ligase family member 2
  ENST ID: ENST00000559044
  CDS Start-End: 491-774
aattttctagacgcctttctgcttggttttggaaggggaggcacccaagtgggtgtgtgcgacacctctagttgtaagccgggacacagtgacgtcgagagagcgctattctactcggagaggaagttaatcccatcgaactccagccaggaaaacgtgggcttgggaaccgcggccgctcgtttccaggatctcccgcgggccttcgcggctgaagaaccaggcggcgagggctgaggaccccgcgctctaagtttggggaaggaagtacaatggtgctttacccaatggagatagaggacggaggaaaagtagatttgccctctacaagcggcccaaggcaaatggtgtcaaacccagcaccgtccatgtgatatccacgccccaggcatccaaggctatcagctgcaaaggtcaacacagtatatcctacactttgtcaaggaatcagactgtggtggtggagtacacacatgataaggatacggatatgtttcaggtgggcagatcaacagaaagccctatcgacttcgttgtcacagacacgatttctggcagccagaacacggacgaagcccagatcacacagagcaccatatccaggttcgcctgcaggatcgtgtgcgacaggaatgaaccttacacagcacggatattcgccgccggatttgactcttccaaaaacatatttcttggagaaaaggcagcaaagtggaaaaaccccgacggccacatggatgggctcactactaatggcgtcctggtgatgcatcc

SEQ ID NO: 164157 - DNA, 558 bp, Homo sapiens
  Payload ID: 12320
  Gene Symbol: PELI2
  Gene Name: pellino E3 ubiquitin protein ligase family member 2
  ENST ID: ENST00000561019
  CDS Start-End: 326-558
atgtgaggcgccgcggtcgcgggcgcttcgcggggtcgcttcccgaagctgagaggccggccggcgcggagccccgtcttcccacctccctcgcggaccgtggtacaatggtgctttacccaatggagatagaggacggaggaaaagtagatttgccctctacaagcggcccaaggcaaatggtgtcaaacccagcaccgtccatgtgatatccacgccccaggcatccaaggctatcagctgcaaaggtcaacacagtatatcctacactttgtcaaggaatcagactgtggtggtggagtacacacatgataaggatacggatatgtttcaggtgggcagatcaacagaaagccctatcgacttcgttgtcacagacacgatttctggcagccagaacacggacgaagcccagatcacacagagcaccatatccaggttcgcctgcaggatcgtgtgcgacaggaatgaaccttacacagcacggatattcgccgccggatttgactcttccaaaaacatatttcttggagaaaaggcagcaaagtggaaaaaccc

SEQ ID NO: 164158 - DNA, 2783 bp, Homo sapiens
  Payload ID: 12321
  Gene Symbol: PELI3
  Gene Name: pellino E3 ubiquitin protein ligase family member 3
  Uniprot ID: Q8N2H9
  ENST ID: ENST00000349459
  CDS Start-End: 285-1622
gaaggggcggagctccgcctacgaaggctgagcatcgccgcaagaggcggagtctggagcgaggcggagctctcctaggggcggggaaaatggggcggggcctccggacagggggcggagcgtggctgttcgcgctcatccccctcccccggccctgggtgtccccgtgacgaggcagcgcggagccgccgcgggccgggcccatcccgccgcagcggcccggggccgagcaggggctaggcggggagggagcggcgcccagcggggcccggagcgtggccagaatggtgctggaaggaaaccctgaagtggggtccccccgaacctcagacctccagcaccgggggaacaagggctcttgcgttctctcctctcccggtgaagatgcgcagccaggcgaggagcccatcaagtatggtgaactcatcgtcctgggctacaatggttgtctggcaagtggggacaagggccgccggcgaagccgcctggcactgagccgccggtcgcacgccaacggggtgaagccagacgtcatgcaccacatctccacgccgctcgtctccaaggcactgagtaaccgtggtcagcacagcatctcgtatacactgtcccggagccactcggtcatagtggagtatacacatgatagcgacacagacatgttccagattggccgctccacagagaacatgattgacttcgtggtaacagacacgtcccctggaggaggggctgccgagggcccttctgcccagagcaccatctcccgctatgcctgccgcatcctctgtgaccgccggccaccctatactgcccgcatctatgccgctggcttcgatgcctctagcaacatcttccttggagagcgagcggccaaatggcggaccccagatggcctgatggatggactgaccaccaatggagtcctggtgatgcacccggcaggcggcttctccgaggactcagccccgggtgtctggcgggagatctcggtctgtgggaatgtgtacacattgcgggacagccgctcagcccagcagcggggcaagctggtggaaaacgagtccaacgtgctgcaggacggctctctcatcgacctgtgtggggccacactgctgtggcgcacaccggcggggctgctgcgggctcccacactgaagcaactggaggcccagcggcaggaggcaaatgcagcgcggccccagtgccccgtgggcctcagcactctggccttccccagcccagcccgtggccgcacagcgcccgacaaacagcagccctgggtctacgtccgctgcgggcacgtccatggctaccacggctggggctgccggcgggagcggggcccccaggagcgcgaatgtcctctctgccgccttgtggggccttatgtgcctctatggcttggccaggaggccggcctctgcctggaccctgggccgcctagccatgcctttgcaccttgcggccacgtctgctctgagaagactgcccgctactgggcccagacaccactgccccacggcacccatgctttccatgccgcctgccccttttgcggggcctggcttaccggcgagcatggctgcgtccgcctcattttccagggcccgctggattaggctccctggggccccctgctgctgtgcccacctgcccacccaggtccccacctcctgcagcccagagggagctctgcatgtgggacactccctgctggcacagccacaccagatggacatgttggatgggctgtgcccttccccccaactgtggccccccaaggaggtccccaagatctccaccccagtcatgctgatggggccttcagcaccagctctgtcctgggtcgatggaggaaagcccagccccatggccttgcccttcctggggcatcccacatcgtgccgccgacactgtgtgcccctgggggagtgaaggggccaggggcctttgacccccagcttaggctggctatgccctgagcctgccaacccagtttcagacactcatccttcatccttcctgctgccgccctgggttcctctataaacctcgctgctcagctgcccccacaagtcccacatgccccgcatgcgtgcaatgcctccagcccccaagtgagtggtgggtgggtggcaggctgggcctagcacttgctgatagccactatgggctcgactctgtgctaagtggtatctggggacacagaggcaatcagacctggttccccccctggtggagttcacagtctagtggaggacagactgttaacaaatggcaacacggcttcatgcgtgccaggatcagagtacaaatcaggctgtggcaggcctcactggtaatggaaaagtgagggaggcttcacggaggaggtgtcataggagctcagcctcaacggctgctcggaaccctccgagtccacaagatgggaagcaagtccacaagatgggaagcgtgctctatacagaagggagggcctgtgcacaggctcaggtgtcagtaagccagaaatccagggacagagtcaggatggctggagcatggactgcggggggaacagagaagggggtggagcaaaaggttgggaccatgtgaccagggaagatgctggatggaggattctgaacctcatttgtggacggtcaggagtcaacaaagggaggagagaggactcactggtcaagagtgtcggctgtgacacaagggccatcatccctgaatgcccaccatgtgccccgcactgtgctgatgatgataataataactacgtccattgagca

SEQ ID NO: 164159 - DNA, 2740 bp, Homo sapiens
  Payload ID: 12321
  Gene Symbol: PELI3
  Gene Name: pellino E3 ubiquitin protein ligase family member 3
  Uniprot ID: Q8N2H9
  ENST ID: ENST00000320740
  CDS Start-End: 161-1570
gctgttcgcgctcatccccctcccccggccctgggtgtccccgtgacgaggcagcgcggagccgccgcgggccgggcccatcccgccgcagcggcccggggccgagcaggggctaggcggggagggagcggcgcccagcggggcccggagcgtggccagaatggtgctggaaggaaaccctgaagtggggtccccccgaacctcagacctccagcaccgggggaacaagggctcttgcgttctctcctctcccggtgaagatgcgcagccaggcgaggagcccatcaagtatggtgaactcatcgtcctgggatgctgtgaggaaggaggtgaggaaaccgaggctcagagaggggaagtgactggcccaagggcacacagctgctacaatggttgtctggcaagtggggacaagggccgccggcgaagccgcctggcactgagccgccggtcgcacgccaacggggtgaagccagacgtcatgcaccacatctccacgccgctcgtctccaaggcactgagtaaccgtggtcagcacagcatctcgtatacactgtcccggagccactcggtcatagtggagtatacacatgatagcgacacagacatgttccagattggccgctccacagagaacatgattgacttcgtggtaacagacacgtcccctggaggaggggctgccgagggcccttctgcccagagcaccatctcccgctatgcctgccgcatcctctgtgaccgccggccaccctatactgcccgcatctatgccgctggcttcgatgcctctagcaacatcttccttggagagcgagcggccaaatggcggaccccagatggcctgatggatggactgaccaccaatggagtcctggtgatgcacccggcaggcggcttctccgaggactcagccccgggtgtctggcgggagatctcggtctgtgggaatgtgtacacattgcgggacagccgctcagcccagcagcggggcaagctggtggaaaacgagtccaacgtgctgcaggacggctctctcatcgacctgtgtggggccacactgctgtggcgcacaccggcggggctgctgcgggctcccacactgaagcaactggaggcccagcggcaggaggcaaatgcagcgcggccccagtgccccgtgggcctcagcactctggccttccccagcccagcccgtggccgcacagcgcccgacaaacagcagccctgggtctacgtccgctgcgggcacgtccatggctaccacggctggggctgccggcgggagcggggcccccaggagcgcgaatgtcctctctgccgccttgtggggccttatgtgcctctatggcttggccaggaggccggcctctgcctggaccctgggccgcctagccatgcctttgcaccttgcggccacgtctgctctgagaagactgcccgctactgggcccagacaccactgccccacggcacccatgctttccatgccgcctgccccttttgcggggcctggcttaccggcgagcatggctgcgtccgcctcattttccagggcccgctggattaggctccctggggccccctgctgctgtgcccacctgcccacccaggtccccacctcctgcagcccagagggagctctgcatgtgggacactccctgctggcacagccacaccagatggacatgttggatgggctgtgcccttccccccaactgtggccccccaaggaggtccccaagatctccaccccagtcatgctgatggggccttcagcaccagctctgtcctgggtcgatggaggaaagcccagccccatggccttgcccttcctggggcatcccacatcgtgccgccgacactgtgtgcccctgggggagtgaaggggccaggggcctttgacccccagcttaggctggctatgccctgagcctgccaacccagtttcagacactcatccttcatccttcctgctgccgccctgggttcctctataaacctcgctgctcagctgcccccacaagtcccacatgccccgcatgcgtgcaatgcctccagcccccaagtgagtggtgggtgggtggcaggctgggcctagcacttgctgatagccactatgggctcgactctgtgctaagtggtatctggggacacagaggcaatcagacctggttccccccctggtggagttcacagtctagtggaggacagactgttaacaaatggcaacacggcttcatgcgtgccaggatcagagtacaaatcaggctgtggcaggcctcactggtaatggaaaagtgagggaggcttcacggaggaggtgtcataggagctcagcctcaacggctgctcggaaccctccgagtccacaagatgggaagcaagtccacaagatgggaagcgtgctctatacagaagggagggcctgtgcacaggctcaggtgtcagtaagccagaaatccagggacagagtcaggatggctggagcatggactgcggggggaacagagaagggggtggagcaaaaggttgggaccatgtgaccagggaagatgctggatggaggattctgaacctcatttgtggacggtcaggagtcaacaaagggaggagagaggactcactggtcaagagtgtcggctgtgacacaagggccatcatccctgaatgcccaccatgtgccccgcactgtgctgatgatgataataataactacgtccattgagcactctccaga

SEQ ID NO: 164160 - DNA, 525 bp, Homo sapiens
  Payload ID: 12321
  Gene Symbol: PELI3
  Gene Name: pellino E3 ubiquitin protein ligase family member 3
  ENST ID: ENST00000527230
  CDS Start-End: 169-525
gtgctgcagcccgagctcgaggggggagcgccgcctccgcaggcctcctgagacccgggcggctggggacgcagacagacacctgagggagggaagagcgcgcacccaggaggagtctattggcctacccgcagggggaggccgagatggggagactgaggcagatgaatggtgctggaaggaaaccctgaagtggggtccccccgaacctcagacctccagcaccgggggaacaagggctcttgcgttctctcctctcccggtgaagatgcgcagccaggcgaggagcccatcaagtatggtgaactcatcgtcctgggatgctgtgaggaaggaggtgaggaaaccgaggctcagagaggggaagtgactggcccaagggcacacagctgctacaatggttgtctggcaagtggggacaagggccgccggcgaagccgcctggcactgagccgccggtcgcacgccaacggggtgaagccagacgtcatgcaccacatctccacgccgctcgtctccaaggca

SEQ ID NO: 164161 - DNA, 2572 bp, Homo sapiens
  Payload ID: 12321
  Gene Symbol: PELI3
  Gene Name: pellino E3 ubiquitin protein ligase family member 3
  ENST ID: ENST00000532970
  CDS Start-End: 112-387
ggcagcgcggagccgccgcgggccgggcccatcccgccgcagcggcccggggccgagcaggggctaggcggggagggagcggcgcccagcggggcccggagcgtggccagaatggtgctggaaggaaaccctgaagtggggtccccccgaacctcagacctccagcaccgggggaacaagggctcttgcgttctctcctctcccggtgaagatgcgcagccaggcgaggagcccatcaagtatggtgaactcatcgtcctgggctacaatggttgtctggcaagtggggacaagggccgccggcgaagccgcctggcactgagccgccggtcgcacgccaacggggtgaagccagacgtcatgcaccacatctccacgccgctctgacttttttctccccaccaggcactgagtaaccgtggtcagcacagcatctcgtatacactgtcccggagccactcggtcatagtggagtatacacatgatagcgacacagacatgttccagattggccgctccacagagaacatgattgacttcgtggtaacagacacgtcccctggaggaggggctgccgagggcccttctgcccagagcaccatctcccgctatgcctgccgcatcctctgtgaccgccggccaccctatactgcccgcatctatgccgctggcttcgatgcctctagcaacatcttccttggagagcgagcggccaaatggcggaccccagatggcctgatggatggactgaccaccaatggagtcctggtgatgcacccggcaggcggcttctccgaggactcagccccgggtgtctggcgggagatctcggtctgtgggaatgtgtacacattgcgggacagccgctcagcccagcagcggggcaagctggtggaaaacgagtccaacgtgctgcaggacggctctctcatcgacctgtgtggggccacactgctgtggcgcacaccggcggggctgctgcgggctcccacactgaagcaactggaggcccagcggcaggaggcaaatgcagcgcggccccagtgccccgtgggcctcagcactctggccttccccagcccagcccgtggccgcacagcgcccgacaaacagcagccctgggtctacgtccgctgcgggcacgtccatggctaccacggctggggctgccggcgggagcggggcccccaggagcgcgaatgtcctctctgccgccttgtggggccttatgtgcctctatggcttggccaggaggccggcctctgcctggaccctgggccgcctagccatgcctttgcaccttgcggccacgtctgctctgagaagactgcccgctactgggcccagacaccactgccccacggcacccatgctttccatgccgcctgccccttttgcggggcctggcttaccggcgagcatggctgcgtccgcctcattttccagggcccgctggattaggctccctggggccccctgctgctgtgcccacctgcccacccaggtccccacctcctgcagcccagagggagctctgcatgtgggacactccctgctggcacagccacaccagatggacatgttggatgggctgtgcccttccccccaactgtggccccccaaggaggtccccaagatctccaccccagtcatgctgatggggccttcagcaccagctctgtcctgggtcgatggaggaaagcccagccccatggccttgcccttcctggggcatcccacatcgtgccgccgacactgtgtgcccctgggggagtgaaggggccaggggcctttgacccccagcttaggctggctatgccctgagcctgccaacccagtttcagacactcatccttcatccttcctgctgccgccctgggttcctctataaacctcgctgctcagctgcccccacaagtcccacatgccccgcatgcgtgcaatgcctccagcccccaagtgagtggtgggtgggtggcaggctgggcctagcacttgctgatagccactatgggctcgactctgtgctaagtggtatctggggacacagaggcaatcagacctggttccccccctggtggagttcacagtctagtggaggacagactgttaacaaatggcaacacggcttcatgcgtgccaggatcagagtacaaatcaggctgtggcaggcctcactggtaatggaaaagtgagggaggcttcacggaggaggtgtcataggagctcagcctcaacggctgctcggaaccctccgagtccacaagatgggaagcaagtccacaagatgggaagcgtgctctatacagaagggagggcctgtgcacaggctcaggtgtcagtaagccagaaatccagggacagagtcaggatggctggagcatggactgcggggggaacagagaagggggtggagcaaaaggttgggaccatgtgaccagggaagatgctggatggaggattctgaacctcatttgtggacggtcaggagtcaacaaagggaggagagaggactcactggtcaagagtgtcggctgtgacacaagggccatcatccctgaatgcccaccat

SEQ ID NO: 164162 - DNA, 1671 bp, Homo sapiens
  Payload ID: 12321
  Gene Symbol: PELI3
  Gene Name: pellino E3 ubiquitin protein ligase family member 3
  Uniprot ID: Q8N2H9
  ENST ID: ENST00000524466
  CDS Start-End: 106-1101
gcggagccgccgcgggccgggcccatcccgccgcagcggcccggggccgagcaggggctaggcggggagggagcggcgcccagcggggcccggagcgtggccagaatggtgctggaaggaaaccctgaagtggggtccccccgaacctcagacctccagcaccgggggaacaagggctcttgcgttctctcctctcccggtgaagatgcgcagccaggcgaggagcccatcaagtatggtgaactcatcgtcctgggatgctgtgaggaaggaggtgaggaaaccgaggctcagagaggggaagtgactggcccaagggcacacagctgctacaatggttgtctggcaagtggggacaagggccgccggcgaagccgcctggcactgagccgccggtcgcacgccaacggggtgaagccagacgtcatgcaccacatctccacgccgctcgtctccaaggcactgagtaaccgtggtcagcacagcatctcgtatacactgtcccggagccactcggtcatagtggagtatacacatgatagcgacacagacatgttccagattggccgctccacagagaacatgattgacttcgtggtaacagacacgtcccctggaggaggggctgccgagggcccttctgcccagagcaccatctcccgctatgcctgccgcatcctctgtgaccgccggccaccctatactgcccgcatctatgccgctggcttcgatgcctctagcaacatcttccttggagagcgagcggccaaatggcggaccccagatggcctgatggatggactgaccaccaatggagtcctggtgatgcacccggcaggcggcttctccgaggactcagccccgggtgtctggcgggagatctcggtctgtgggaatgtgtacacattgcgggacagccgctcagcccagcagcggggcaagctggtaggtggcccgctccattccccacccctatccttgccaggccctcacaagctgcccatccccctgcccaagccaggagatgatctccagtccttctgccccagggagccccaacaggctccatatcagggaatcccaggcccagggggttcttagcatgagccacttgtcccacagacaggcagacagaccagggtccccaagcatagcatgcataccactggaggtccagggggtgatgcgatcaaggcacacacagacatactgtgcagtcccaggtggcttcaaggctgctggcagcttaaaaaaaatcacaccttcttatgagagtgacacttggcccatgtgtgagcagtttatagcctaaagggttggcagtttgtagcatgtctatcacgttcagacaggtttagcactgttctcctctcgcaggaggaaagggtccttacagtagttctgacacaggtgttagtggcagctccttgtggtacagatcagagagctgaggttagggaccgggagtgagtcctagagagaggcaggggctgtccaaggtcacatggccgtgctcctcaaactggccatgcactgctcttctctggcatgagcacattggccaaggagatgcaaaacctcagagaaaagcctggcttttctttccagagcgtcaactctgtggggaggtctggggaagcattgtttgttaaaacaatgcatgtgaatgtt

SEQ ID NO: 164163 - DNA, 1967 bp, Homo sapiens
  Payload ID: 12321
  Gene Symbol: PELI3
  Gene Name: pellino E3 ubiquitin protein ligase family member 3
  ENST ID: ENST00000528752
  CDS Start-End: 1-204
atcttccttggagagcgagcggccaaatggcggaccccagatggcctgatggatggactgaccaccaatggagtcctggtgatgcacccggcaggcggcttctccgaggactcagccccgggtgtctggcgggagatctcggtctgtgggaatgtgtacacattgcgggacagccgctcagcccagcagcggggcaagctgtaaggcccttctactgcctctggcaggtggaaaacgagtccaacgtgctgcaggacggctctctcatcgacctgtgtggggccacactgctgtggcgcacaccggcggggctgctgcgggctcccacactgaagcaactggaggcccagcggcaggaggcaaatgcagcgcggccccagtgccccgtgggcctcagcactctggccttccccagcccagcccgtggccgcacagcgcccgacaaacagcagccctgggtctacgtccgctgcgggcacgtccatggctaccacggctggggctgccggcgggagcggggcccccaggagcgcgaatgtcctctctgccgccttgtggggccttatgtgcctctatggcttggccaggaggccggcctctgcctggaccctgggccgcctagccatgcctttgcaccttgcggccacgtctgctctgagaagactgcccgctactgggcccagacaccactgccccacggcacccatgctttccatgccgcctgccccttttgcggggcctggcttaccggcgagcatggctgcgtccgcctcattttccagggcccgctggattaggctccctggggccccctgctgctgtgcccacctgcccacccaggtccccacctcctgcagcccagagggagctctgcatgtgggacactccctgctggcacagccacaccagatggacatgttggatgggctgtgcccttccccccaactgtggccccccaaggaggtccccaagatctccaccccagtcatgctgatggggccttcagcaccagctctgtcctgggtcgatggaggaaagcccagccccatggccttgcccttcctggggcatcccacatcgtgccgccgacactgtgtgcccctgggggagtgaaggggccaggggcctttgacccccagcttaggctggctatgccctgagcctgccaacccagtttcagacactcatccttcatccttcctgctgccgccctgggttcctctataaacctcgctgctcagctgcccccacaagtcccacatgccccgcatgcgtgcaatgcctccagcccccaagtgagtggtgggtgggtggcaggctgggcctagcacttgctgatagccactatgggctcgactctgtgctaagtggtatctggggacacagaggcaatcagacctggttccccccctggtggagttcacagtctagtggaggacagactgttaacaaatggcaacacggcttcatgcgtgccaggatcagagtacaaatcaggctgtggcaggcctcactggtaatggaaaagtgagggaggcttcacggaggaggtgtcataggagctcagcctcaacggctgctcggaaccctccgagtccacaagatgggaagcaagtccacaagatgggaagcgtgctctatacagaagggagggcctgtgcacaggctcaggtgtcagtaagccagaaatccagggacagagtcaggatggctggagcatggactgcggggggaacagagaagggggtggagcaaaaggttgggaccatgtgaccagggaagatgctggatggaggattctgaacctcatttgtggacggtcaggagtcaacaaagggaggagagaggactcactggtcaagagtgtcggctgtgacacaagggccatcatccctgaatgcccaccatgtgccccgcactgtgctgatgatgataataataactacgtccattgagcactctccaga

SEQ ID NO: 164164 - DNA, 964 bp, Homo sapiens
  Payload ID: 12321
  Gene Symbol: PELI3
  Gene Name: pellino E3 ubiquitin protein ligase family member 3
  ENST ID: ENST00000526296
  CDS Start-End: 200-964
ggagccgccgcgggccgggcccatcccgccgcagcggcccggggccgagcaggggctaggcggggagggagcggcgcccagcggggcccggagcgtggccagctacaatggttgtctggcaagtggggacaagggccgccggcgaagccgcctggcactgagccgccggtcgcacgccaacggggtgaagccagacgtcatgcaccacatctccacgccgctcgtctccaaggcactgagtaaccgtggtcagcacagcatctcgtatacactgtcccggagccactcggtcatagtggagtatacacatgatagcgacacagacatgttccagattggccgctccacagagaacatgattgacttcgtggtaacagacacgtcccctggaggaggggctgccgagggcccttctgcccagagcaccatctcccgctatgcctgccgcatcctctgtgaccgccggccaccctatactgcccgcatctatgccgctggcttcgatgcctctagcaacatcttccttggagagcgagcggccaaatggcggaccccagatggcctgatggatggactgaccaccaatggagtcctggtgatgcacccggcaggcggcttctccgaggactcagccccgggtgtctggcgggagatctcggtctgtgggaatgtgtacacattgcgggacagccgctcagcccagcagcggggcaagctggtggaaaacgagtccaacgtgctgcaggacggctctctcatcgacctgtgtggggccacactgctgtggcgcacaccggcggggctgctgcgggctcccacactgaagcaactggaggcccagcggcaggaggcaaatgcagcgcggccccagtgccccgtgggcctcagcactctggccttccccagcccagcccgtggccgcacagcgcccgacaaacagcagccctgggtctacgtccgctgc

SEQ ID NO: 164165 - DNA, 2508 bp, Homo sapiens
  Payload ID: 12321
  Gene Symbol: PELI3
  Gene Name: pellino E3 ubiquitin protein ligase family member 3
  Uniprot ID: Q8N2H9
  ENST ID: ENST00000618547
  CDS Start-End: 121-1341
agacaggtctgcgactctggtcaactgcagctgctttccccggcctccaccgctgccgcacaccccctttgcctttagcattttcctcctctcctctaattgcgtggcgtccccagatgaatggtgctggaaggaaaccctgaagtggggtccccccgaacctcagacctccagcaccgggggaacaagggctcttgcgttctctcctctcccggtgaagatgcgcagccaggcgaggagcccatcaagtatggtgaactcatctccacgccgctcgtctccaaggcactgagtaaccgtggtcagcacagcatctcgtatacactgtcccggagccactcggtcatagtggagtatacacatgatagcgacacagacatgttccagattggccgctccacagagaacatgattgacttcgtggtaacagacacgtcccctggaggaggggctgccgagggcccttctgcccagagcaccatctcccgctatgcctgccgcatcctctgtgaccgccggccaccctatactgcccgcatctatgccgctggcttcgatgcctctagcaacatcttccttggagagcgagcggccaaatggcggaccccagatggcctgatggatggactgaccaccaatggagtcctggtgatgcacccggcaggcggcttctccgaggactcagccccgggtgtctggcgggagatctcggtctgtgggaatgtgtacacattgcgggacagccgctcagcccagcagcggggcaagctggtggaaaacgagtccaacgtgctgcaggacggctctctcatcgacctgtgtggggccacactgctgtggcgcacaccggcggggctgctgcgggctcccacactgaagcaactggaggcccagcggcaggaggcaaatgcagcgcggccccagtgccccgtgggcctcagcactctggccttccccagcccagcccgtggccgcacagcgcccgacaaacagcagccctgggtctacgtccgctgcgggcacgtccatggctaccacggctggggctgccggcgggagcggggcccccaggagcgcgaatgtcctctctgccgccttgtggggccttatgtgcctctatggcttggccaggaggccggcctctgcctggaccctgggccgcctagccatgcctttgcaccttgcggccacgtctgctctgagaagactgcccgctactgggcccagacaccactgccccacggcacccatgctttccatgccgcctgccccttttgcggggcctggcttaccggcgagcatggctgcgtccgcctcattttccagggcccgctggattaggctccctggggccccctgctgctgtgcccacctgcccacccaggtccccacctcctgcagcccagagggagctctgcatgtgggacactccctgctggcacagccacaccagatggacatgttggatgggctgtgcccttccccccaactgtggccccccaaggaggtccccaagatctccaccccagtcatgctgatggggccttcagcaccagctctgtcctgggtcgatggaggaaagcccagccccatggccttgcccttcctggggcatcccacatcgtgccgccgacactgtgtgcccctgggggagtgaaggggccaggggcctttgacccccagcttaggctggctatgccctgagcctgccaacccagtttcagacactcatccttcatccttcctgctgccgccctgggttcctctataaacctcgctgctcagctgcccccacaagtcccacatgccccgcatgcgtgcaatgcctccagcccccaagtgagtggtgggtgggtggcaggctgggcctagcacttgctgatagccactatgggctcgactctgtgctaagtggtatctggggacacagaggcaatcagacctggttccccccctggtggagttcacagtctagtggaggacagactgttaacaaatggcaacacggcttcatgcgtgccaggatcagagtacaaatcaggctgtggcaggcctcactggtaatggaaaagtgagggaggcttcacggaggaggtgtcataggagctcagcctcaacggctgctcggaaccctccgagtccacaagatgggaagcaagtccacaagatgggaagcgtgctctatacagaagggagggcctgtgcacaggctcaggtgtcagtaagccagaaatccagggacagagtcaggatggctggagcatggactgcggggggaacagagaagggggtggagcaaaaggttgggaccatgtgaccagggaagatgctggatggaggattctgaacctcatttgtggacggtcaggagtcaacaaagggaggagagaggactcactggtcaagagtgtcggctgtgacacaagggccatcatccctgaatgcccaccatgtgccccgcactgtgctgatgatgataataataactacgtccattgagcactctcc

SEQ ID NO: 164166 - DNA, 4349 bp, Homo sapiens
  Payload ID: 12322
  Gene Symbol: PELO
  Gene Name: pelota homolog (Drosophila)
  Uniprot ID: Q9BRX2
  ENST ID: ENST00000274311
  CDS Start-End: 986-2143
gatttggcccggagaacgagatcaccctctcaatgaaaggcagatgtccctttaaggtttgcttctacagcccgtggactttagcctaaacacggacccgcgaagctggctttatttgtccatgtctcggacagagcctgggaagctgccagtgagatttcagagaccaagagcgcgaaggggcgggcgatgtggcaatccgtctgggatgtgaaaagcgtggagcgcatttagaggaattcgacgaaaacacaggaaatcactcctctcccgctcctgggcgccgctgccactggggcagaggactgggaaccgcggcagcgggataagtggcccagccagagagcgcagctcccgcgcccggtcctgccctgcgaaccagcgcggccccctggcgctgaggctgctccggccatggcccctcggccccgcgcccgcccaggggtcgctgtcgcctgctgctggctcctcactgacagggatggaagagaaaacttaggaagttgaagtttggcattaaaataaaggactcgccaccactctgtgcaccttcttgagggagttcattcgtccggagcgcctcacagcttagtgcgcctgcgcacgcgcgaactgcggccccgcctctcctttggggacgggagacgtgcgtcgggtcgcgggacgggggctgcgcatgcgccttcatttcgtcagcccgctgttgcgtgctgccagcgggaactgtgtaggggtagattttcgctgcagtgttccccgagcctgttagacgcagcgcgccgggagactgagagaggaaaggatagaggaagtgctgccctaggctgcatgagtcgaagcaagcgtgtttccttcccgccaggcaagtgcccttagaaaccgggccccgcccccttcctggcctgcattcccatcccctctcccggggcggaggtgaggacctccttggttcctttggttctgtcagtgagccccttccttggccatgaagctcgtgaggaagaacatcgagaaggacaatgcgggccaggtgaccctggtccccgaggagcctgaggacatgtggcacacttacaacctcgtgcaggtgggcgacagcctgcgcgcctccaccatccgcaaggtacagacagagtcctccacgggcagcgtgggcagcaaccgggtccgcactaccctcactctctgcgtggaggccatcgacttcgactctcaagcctgccagctgcgggttaaggggaccaacatccaagagaatgagtatgtcaagatgggggcttaccacaccatcgagctggagcccaaccgccagttcaccctggccaagaagcagtgggatagtgtggtactggagcgcatcgagcaggcctgtgacccagcctggagcgctgatgtggcggctgtggtcatgcaggaaggcctcgcccatatctgcttagtcactcccagcatgaccctcactcgggccaaggtggaggtgaacatccctaggaaaaggaaaggcaattgctctcagcatgaccgggccttggagcggttctatgaacaggtggtccaggctatccagcgccacatacactttgatgttgtaaagtgcatcctggtggccagcccaggatttgtgagggagcagttctgcgactacctgtttcaacaagcagtgaagaccgacaacaaactgctcctggaaaaccggtccaaatttcttcaggtacatgcctcctccggacacaagtactccctgaaagaggccctttgtgaccctactgtggctagccgcctttcagacactaaagctgctggggaagtcaaagccttggatgacttctataaaatgttacagcatgaaccggatcgagctttctatggactcaagcaggtggagaaggccaatgaagccatggcaattgacacattgctcatcagcgatgagctcttcaggcatcaggatgtagccacacggagccggtatgtgaggctggtggacagtgtgaaagagaatgcaggcaccgttaggatattctctagtcttcacgtttctggggaacagctcagccagttgactggggtagctgccattctccgcttccctgttcccgaactttctgaccaagagggtgattccagttctgaagaggattaatgattgaaacttaaaattgagacaatcttgtgtttcctaaactgttacagtacatttctcagcatccttgtgacagaaagctgcaagaatggcactttttgattcatacagggatttcttatgtctttggctacactagatattttgtgattggcaagacatgtatttaaacaataaactaaaaggaaataatctccacgtactaccatcttgattaaattgtgtaattttttataggaattatgagttatctgtagtacttggaaacagaaaatgtgtgtatttaaagacgatgcctatgcagtatattgtttgggatagattgcaaaatttcacactgcatgctttgaaacagttttccttagaaaaagcttttgctatcttatcctgtttacattatttctttattttaattctgcttggtgttcttgcattgcatttaatgatcccttttctccccacctccacacactacattttttttagatttaaatagttttactattttaaatgattgccgtacaattagtagacttgaagacaagttttaaatatttttcttcaaaggcttgttaaaccaatcatgttaaaaggaaattcttggttttggtttgttgttgttagcattagtcatatttgatttagagggtaacttaaatcagttatttttagctttttagaactttgatctgctagggattgtcaaaataatctccttgaggcatctttatttttaaaatgagattaaagtatgtgatttgcttgttatgtggctaattagtggcaaagctggaagtcattcccagtctggactttagttctttgcgccaaaacatgctatattatttatttatttttttgcttgtcaaagttatacttaattctgttttatatttgtatgtggcattaatttgggtttgcacatttttattggactattttagttgtgaagaagcctgttctaaagtttaagtcacatgactagtatgtggcagttgacttaaactccaatactctttactatcattgacttaaactctgatactctttactataattatggaattgtgcaaatacctctgagtttaaaatattatttttattatttttggtgcacattcctaaaagttaaggaaggagcctcagtaatggaattgcttcttgaccttttgcaaacctcaatttagcaaaataattaggaacgatctaatagtgatgatacagtttttaactgctggatcagcgacgcctatttcaagtagtgatactaactaaactttcgccggtctttcctgtgtctgtgggccttcctcctggtgtgacagacttggggatttcttgtaaacttcctaactagtctgaacctttttatttcttattgggaactgacacttccctatactttaaaactcacatatgtatatttttgtacatctatctcctaattcaaaagtaattgagattgtcatttcattataattccgtgagtatctttaaattactatcaaatatgttactaaataatttaataagaatatagaaatgaagccactgagatccttaaagttgaaacctgattgttattatattttcagtaaggatttggagatttttggacatttttactctcataatctatgcagtactgaaatgaggtctaataaatataaccaatacatgttaggccataggttcttaaatttagctacctgttcacctcaacttgagagctcttaaaaccctcagtgtccaggttgcagctcagactagttaaataacgttttatccctagaaatgttttttttaaagctacccagatgattccaataggcgtcaaggctaatagccactgattcaggccttgctattcaaaagtatggtccgtaaaccagcagcatccctgagagcttgttggaaactagaattcagggatcttttgtagacctactgagacaggcgctacctgtaccaacatctctagatgattcctgtgcataataaaatctgataaacaaaggcaataggttattcttcctgtgctggtaaatctctggcaggggtccccagtcaggaaaaagatttgagtattaaggtctttcaaaaaagttaactggccatactcaactgtctataaaacctctataaatttctgtttttatgtctatgaattattaaataaaatttaactcatttttaagaaattaca

SEQ ID NO: 164167 - DNA, 1629 bp, Homo sapiens
  Payload ID: 12323
  Gene Symbol: PEF1
  Gene Name: penta-EF-hand domain containing 1
  Uniprot ID: Q9UBV8
  ENST ID: ENST00000373703
  CDS Start-End: 24-878
ctgagtgtgacgtcagaatcaccatggccagctatccttaccggcagggctgcccaggagctgcaggacaagcaccaggagcccctccgggtagctactaccctggaccccccaatagtggagggcagtatggtagtgggctaccccctggtggtggttatgggggtcctgcccctggagggccttatggaccaccagctggtggagggccctatggacaccccaatcctgggatgttcccctctggaactccaggaggaccatatggcggtgcagctcccgggggcccctatggtcagccacctccaagttcctacggtgcccagcagcctgggctttatggacagggtggcgcccctcccaatgtggatcctgaggcctactcctggttccagtcggtggactcagatcacagtggctatatctccatgaaggagctaaagcaggccctggtcaactgcaattggtcttcattcaatgatgagacctgcctcatgatgataaacatgtttgacaagaccaagtcaggccgcatcgatgtctacggcttctcagccctgtggaaattcatccagcagtggaagaacctcttccagcagtatgaccgggaccgctcgggctccattagctacacagagctgcagcaagctctgtcccaaatgggctacaacctgagcccccagttcacccagcttctggtctcccgctactgcccacgctctgccaatcctgccatgcagcttgaccgcttcatccaggtgtgcacccagctgcaggtgctgacagaggccttccgggagaaggacacagctgtacaaggcaacattcggctcagcttcgaggacttcgtcaccatgacagcttctcggatgctatgacccaaccatctgtggagagtggagtgcaccagggacctttcctggcttcttagagtgagagaagtatgtggacatctcttcttttcctgtccctctagaagaacattctcccttgcttgatgcaacactgttccaaaagagggtggagagtcctgcatcatagccaccaaatagtgaggaccggggctgaggccacacagataggggcctgatggaggagaggatagaagttgaatgtcctgatggccatgagcagttgagtggcacagcctggcaccaggagcaggtccttgtaatggagttagtgtccagtcagctgagctccaccctgatgccagtggtgagtgttcatcggcctgttaccgttagtacctgtgttccctcaccaggccatcctgtcaaacgagcccattttctccaaagtggaatctgaccaagcatgagagagatctgtctatgggaccagtggcttggattctgccacacccataaatccttgtgtgttaacttctagctgcctggggctggccctgctcagacaaatctgctccctgggcatctttggccaggcttctgccctctgcagctgggacccctcacttgcctgccatgctctgctcggcttcagtctccaggagacagtggtcacctctccctgccaatactttttttaatttgcattttttttcatttggggccaaaagtccagtgaaattgtaagcttcaataaaaggatgaaactctggagttc

SEQ ID NO: 164168 - DNA, 5582 bp, Homo sapiens
  Payload ID: 12324
  Gene Symbol: PTCD1
  Gene Name: pentatricopeptide repeat domain 1
  Uniprot ID: O75127
  ENST ID: ENST00000292478
  CDS Start-End: 252-2354
cttgcgcctgtccaggcactgccaatcgagactccgccgttccgctagtcccagctagccgccagccgaacaccggcctcgccagaaacctgaaaccagccgcgtgagtcggcgacgcggattgcgcctgcgcgcttggggagagggggacccgaggaagagactggttcgccgcggggaccgggcagggctccccgtcggagtgcactgcgccggacacttcaagccctggagggacaggaaagccagaaatggacttcgtgagactcgctcgactgttcgccagggcccgccccatgggactgttcatcctgcaacacctggacccctgtagagccaggtgggcaggaggcagggaggggctgatgcggccaatgtgggcgcccttcagcagctcctcctctcagctgcccctcggccaggagcgtcaggaaaacacgggcagcctgggctctgacccgagccactccaactccacggccacgcaggaagaagacgaggaggaggaggagagttttgggaccctctctgacaaatactcctcccggagactattccgcaaatccgcagcccagttccataacctgcggtttggggaacggagagatgagcaaatggaaccggagcccaaattatggcgaggccggagaaacaccccgtactggtacttcttgcagtgcaaacacctgatcaaggaagggaagctggttgaagccctggacctgtttgagaggcagatgctgaaggaggagcgattgcagcccatggagagcaactacacggtgctgattgggggctgcgggcgggttggctacctgaagaaggccttcaacctctacaaccagatgaaaaagcgggacctggagccctcggacgccacctacacggccctgttcaacgtctgtgccgagtccccctggaaggactcagctctacagagcgccctgaagctccggcagcagctgcaggccaaaaacttcgagctcaacttgaaaacataccacgcgctgctgaagatggctgccaagtgcgcagaccttaggatgtgcctcgatgtgttcaaggaaatcatccacaaagggcacgtggtcacagaggagaccttcagtttcctgctcatgggctgcatccaagacaagaagacaggcttccggtacgccctccaggtgtggcggctgatgctgagtctagggctacagccgagccgggacagctacaacctgctgttggtggcagctcgggactgtggcctaggggacccccaggtggcctcagagctgcttctgaagcccagggaggaggcgactgtgcttcagcccccagtgagcaggcagcggccaaggaggacagcccaggccaaggcaggcaacctcatgtcagccatgctgcatgtggaggccctggagaggcagctgtttctggaaccttctcaggcacttgggcctccagagcctccggaagccagagtgcccggcaaggcccaaccagaggtggatactaaggcagagcccagccacacagcagccctcaccgcagtggccctgaagccacctcccgtggagctggaagtcaacctcctgacccccggggccgttccccctacagtggtctcctttggaacggtgaccaccccagctgaccggctggccttgatagggggcctggagggcttcctgagcaagatggcagagcacaggcagcagcccgacatcaggaccctcacgctactggccgaggtggtggagtccgggagtcctgcagagtccttgctgctggccctcctggatgagcaccaggtagaggccgacctgacattctttaacacgctggtgagaaagaagagcaagctgggagacctggagggggccaaggcgctgttgccggtcctggcaaagaggggcctcgtccccaacctgcagacattctgcaacctggccatcgggtgccacaggccgaaggacggtctacagcttctcacagacatgaagaagtcccaggtgacccccaacactcacatctacagtgccctcatcaacgcggccatcaggaagctgaactacacctatctcatcagcatcttgaaggacatgaagcagaacagggtcccggtgaacgaagtggtcatccgccagctggagtttgcagcccagtaccctcccacctttgaccggtaccaagggaagaacacctacctggagaagattgacggcttccgagcctattacaagcagtggctgacagtgatgcccgcagaggaaaccccgcacccctggcagaagttccggaccaagccccagggggaccaggacaccggcaaggaggctgatgacggatgtgcccttgggggcaggtgatgggagcacagctggaacaatgtgctcggcccccagtgctctgtgggagccccaggacaagtgagctggtgtcacctcctgcctgggggaagagccaggccctgaggaacagccgcagcgtgtcacaggtgttggtgaggacacacactaggcccaaggtgcctgtgctcccagcaggtccaagtgcagctccagccacctttgcgtgtcaccttcacgggacttccagctccagctacctttgtgtgtcacctcacacaccacaagggggctggggcatctggtccctggggcctgggccgccccgccgggttccataggccgatgctctgaaagaagagacgtggggctcgagagatttaaagattttatttttacaaatcacagctgatagacagcgaagccttccccatagagaccgtgctccaactcgggcctggggcactgctcgctgctcccaggaagggggtggcgtgacaggcaggaacctgcgaagtccagagtccagggtggagcgcgccagcctcagccagagcagccacgacagccacagtgtgtgcactcgatgatgcggccctgcaacggaggaggacagtgagacgatgccactgcgccacgctcgcccctgcacactcacatatgtggcaaccctcccacgaaggacctgccaccatgccatatagggacacacctcagaaacccttccttgacagctctggacagggaaaatttggctccctcatgaaggtagaaccagctgctgttgacaccgaggttacatctgtatgtctatttataatatgttctgcaaatccaacacacgtttgccaatcaagaaaaagaaatcggtgtgaatgagtctcgttattctgctaagtgagcatgacagaccctgcgatgagcagacgtggctctgctactgtttggggacttcaggggggcctctgggctggtacactctggtgggggaagagggcaggagactatgcacttgagtcacacccttctggcccagagccccccagaaagaagggtcttgtcccccaggcctggtgcggcccaacacttggccagccagaaagccctagaacagtggcttgtgtttattttactttttcaagttctttttttggaagaacaagaccatagtttaagtaaacaggatcctctggtgaaacccaggtaagtctacagcgggctgttttggccacagggctgaagcagcaccccagcccaccagcccctgacctggactccttgtggaatctgggcactcagaggaagggggcttctgccactctgccacctgtccctgcctccatcagaaaaccaacaccccagtcttccgtcggggaggcggcccttgctcgcccccactgctcagtacccaagtcctcagcatccagccacagctctccattgtcagtctcactgcagcataaaggggactcatgtgaagaggcccctgtgtggagctggggaaaagaaggccaggctggcagatgggcggtggggccaacaactgtgctgaggggctgcactgagcggccactgctgtgactctgcctcgggccacagctgcctttcagaggggcttggaaccggatggagctcagctcctgtccctcagcaccactcctgaggcgcctggcctaggagtggtacttggaacagaaagttctgaaagaagaaacacagtgggctgggcgcagtagctcatgcctgtaatcccggcactttgggaggctgaggcgggtggatcacctgaggtcgggagttcgagaccagcctgagcaacattgagaaaccccgtctctactaaaaatacaaaattagccaggcgtggtggtgcatgcctgtagtcccagctactcaggaggatgaggcaggagaaccgcttgaacccgggaggtggaggttgcagtgagccaagatggcatcactgcactccagcctgggcgacaaagcaagactccgtcttgggggggcgggaaagatagtgatggtaatgttaaagtatcactgtgaggactgaaagggacaggaactcactggttgtccttccctgatgtcaccctgccaccaccttgggattagggctccccaccaccatttcctaagtgaggaaaggggttcagtaatttgcccaaaagtggagttgagattgaccccagacctaacaaacacacagccacacgctgcctcacatggattcctgaatacagggacccactcccacgagggagagccagcaggacatccagggacaaaacgacattccagcccaaccaaataacataagatcccttgcagtcgactaaggcagaattttgagctgaaaacaacaccaagcttgagtgtcagacattaccacttccagcttgcttttgggcacgcggcagatgcagttcgtcccgaagttggtgtcccgtgtctgaatgcaccgcaggcagcacaagttctcatatccttgctttttccattttgcaatcaggtttttgtctgcatagccttctttaatacaatattcatagagttctgtcaaaaagatggggaaagagcatcaggccatggtctaaaaaccttccccacccttgatcaaaaaaagcattcaggccgggtgcagtggctcacacctgtaatcccagcactttgggaggccgaggcaggcggatcacctgaggtcaggagttcaggaccagcccggccaacatggtaaaaccccgtctctactaaaaatacaaaaattactcgggcgtggtagcagctgtaatcccagctacttaggaggctgaggcaggagaatcacttgaacccaggaggcggaggttgtagtgacctgaggtcgtgccactggactccagcctgggtgacagcgaaactccatctcaaaaaaaaaaaggcattcagtattgcaacgggacagtccttggaggaggaacaaaaaaaaaaagtacttaggccaggcaaggtgcctcacacctgtaatcccagcacttttggaagccaacgccagaggatcatttgagttaagaaaccagcctgggccaagggcccatctccacaaaaaatttaaaaattagctgggtgtggtggtgcacacctgtagtcacagctactcaggaggttgaggtgagaggatcccttgagcccagaaggttgaggctgcagtgagccatcattgcaccactgcactccagcctgtggaacagagcaagaccctgtttc

SEQ ID NO: 164169 - DNA, 571 bp, Homo sapiens
  Payload ID: 12324
  Gene Symbol: PTCD1
  Gene Name: pentatricopeptide repeat domain 1
  ENST ID: ENST00000430982
  CDS Start-End: 80-571
cagcggacaccaggactccaaaatggcgtcagttggtgagtgtccggccccaggccctggagggacaggaaagccagaaatggacttcgtgagactcgctcgactgttcgccagggcccgccccatgggactgttcatcctgcaacacctggacccctgtagagccaggtgggcaggaggcagggaggggctgatgcggccaatgtgggcgcccttcagcagctcctcctctcagctgcccctcggccaggagcgtcaggaaaacacgggcagcctgggctctgacccgagccactccaactccacggccacgcaggaagaagacgaggaggaggaggagagttttgggaccctctctgacaaatactcctcccggagactattccgcaaatccgcagcccagttccataacctgcggtttggggaacggagagatgagcaaatggaaccggagcccaaattatggcgaggccggagaaacaccccgtactggtacttcttgcagtgcaaacacctgatcaaggaagggaagctggttgaagccctggacctgtttgagaggcagatgctg

SEQ ID NO: 164170 - DNA, 533 bp, Homo sapiens
  Payload ID: 12324
  Gene Symbol: PTCD1
  Gene Name: pentatricopeptide repeat domain 1
  ENST ID: ENST00000419981
  CDS Start-End: 216-533
gactggttcgccgcggggaccgggcagggctccccgtcggagtgcactgcgccggacacttcaagtgagttcctgtgtgatcctcgcaggagccccgggacccgggccaagacacgccagaggggaaggaagtgcccgagccgggattggagccgggggcgtctgaggagggaaactgaggctgcagaagccctggagggacaggaaagccagaaatggacttcgtgagactcgctcgactgttcgccagggcccgccccatgggactgttcatcctgcaacacctggacccctgtagagccaggtgggcaggaggcagggaggggctgatgcggccaatgtgggcgcccttcagcagctcctcctctcagctgcccctcggccaggagcgtcaggaaaacacgggcagcctgggctctgacccgagccactccaactccacggccacgcaggaagaagacgaggaggaggaggagagttttgggaccctctctgacaaatactcctcccggagactattccgcaaatccgca

SEQ ID NO: 164171 - DNA, 556 bp, Homo sapiens
  Payload ID: 12324
  Gene Symbol: PTCD1
  Gene Name: pentatricopeptide repeat domain 1
  ENST ID: ENST00000430029
  CDS Start-End: 124-556
aagacacgccagaggggaaggaagtgcccgagccgggattggagccgggggcgtctgaggagggaaactgaggctgcagaagtccgtgtggagaggggccctggagggacaggaaagccagaaatggacttcgtgagactcgctcgactgttcgccagggcccgccccatgggactgttcatcctgcaacacctggacccctgtagagccaggtgggcaggaggcagggaggggctgatgcggccaatgtgggcgcccttcagcagctcctcctctcagctgcccctcggccaggagcgtcaggaaaacacgggcagcctgggctctgacccgagccactccaactccacggccacgcaggaagaagacgaggaggaggaggagagttttgggaccctctctgacaaatactcctcccggagactattccgcaaatccgcagcccagttccataacctgcggtttggggaacggagagatgagcaaatggaaccggagcccaaattatggcgaggccggagaaacaccccgtactggtacttcttgcagtgcaaac

SEQ ID NO: 164172 - DNA, 2195 bp, Homo sapiens
  Payload ID: 12325
  Gene Symbol: PTCD2
  Gene Name: pentatricopeptide repeat domain 2
  Uniprot ID: Q8WV60
  ENST ID: ENST00000308077
  CDS Start-End: 11-1177
agtagttggtatggtccgagacagtatggctgctgcatttcggccctcgaatcgagttctcctgcaggcgctgcagattttggtgtatcctggggtgggaggctccggctctgtcagctgccgctgccctctcggagctaaaagatacctacttacagataatgtggtgaaattaaaagaatttcaacaaaagaaagtggctgttgcatgtaatctttctggcactaaagaaacgtattttagaaacttgaaaaagaaactgacccagaacaagctcatcttgaagggggagttgataaccttactacatttgtgtgagtctcgggaccatgtggaactggctaaaaatgtcatttacaggtaccatgcagagaacaaaaatttcactttgggggagtataaatttggaccgctttttgtgaggttgtgttacgagttggatctcgaggaatctgcagtggagctcatgaaagaccagcatttacgaggtttcttctcagactccacatcattcaatattttgatggatatgttatttatcaaaggcaaatataaaagtgctttgcaagtattgatagagatgaaaaaccaagatgtgaagttcaccaaagatacctatgttcttgcttttgcaatttgctacaaactgaatagccctgagtctttcaaaatctgtactacattaagagaagaagctctactcaaaggagaaattctctccaggagagcatcctgtttcgctgtggcattagctctgaatcagaatgagatggcaaaagctgtgtccattttttctcaaatcatgaatccagaaagcatagcctgcattaatttaaatattataatccatatccagtcaaatatgttggaaaacctgataaagactctaaaaaatgctgcagaaggaaatttatcaaaatttgtgaaaagacatgtgttctcggaggaagtgctggccaaagtgagggaaaaagtgaaggatgtgcctgcccttgtggccaaatttgatgagatctatgggacactgcacatcactggccaggtcaccactgattctttggatgctgtgctctgccacacccccagggacaggaaatctcacacgttgctattaaacaagaggatggtcagccgtcgcaccttccagccactcagccagtccctgttggctgagtaaccctggtttcagtccacctatggatctgaggggcctgcttctagtgagttattacctttcctaagaagccaggtatcgcacttcagcagacagtgtgctgacacttggtcttctcctgaaattcccaaattcactgaatggtaccatgccgatctctgagaagttatgttgcaccactgtgaaggtctagatgcaagcttggctccctcagaaaggcgcttcccttttgcatggctgaggatccttgaaggaacctggtcagtctccggttcagcttccgacaccagagtggaacccagtaagcaccatcaggaatgaatttcactacaagtgtggataactctgattttcaaaggagtagttacttgcaaattacatccttgctgaattcaggaggttaaggaaacgatccatgcaagagaggcccaatctcaactgtagactgtgtcccagtaagagagtcacagcttcaggtgtttgctgaatccaggtctgagatcacaatcccacctgaggacaggatccgcatatgagagtcgcacattggtataattgatttgtggtagagctgagattagaatccagattcctagtctagtatccttcccactgtaccacattatctcttttcagaggggaaaaaggagcagctcttaagaaacagaatactaagggcccccattactgtgtggccctgggcatcctcagtttcctcatttggtaaatggggataatggtaccgacctcttaggcttggtgtgaggatgaaatgagatagggaatataaagcaagcagatagtggctggcacatagtacatgcaatatgtttgaaactagttaaggaattataaaaacaaatgagttcttccttctgctcaaaaatattgaatttcttgtccttgtgctctgtgaaacattgaacagccccatttagagaaacaaattctctgccctcatagaatcctaattgtttctgtatgtgtctggtgttttgcacatgcaaaaaaaaaaaaaaaa

SEQ ID NO: 164173 - DNA, 11151 bp, Homo sapiens
  Payload ID: 12325
  Gene Symbol: PTCD2
  Gene Name: pentatricopeptide repeat domain 2
  Uniprot ID: Q8WV60
  ENST ID: ENST00000380639
  CDS Start-End: 17-1183
ggttccagtagttggtatggtccgagacagtatggctgctgcatttcggccctcgaatcgagttctcctgcaggcgctgcagattttggtgtatcctggggtgggaggctccggctctgtcagctgccgctgccctctcggagctaaaagatacctacttacagataatgtggtgaaattaaaagaatttcaacaaaagaaagtggctgttgcatgtaatctttctggcactaaagaaacgtattttagaaacttgaaaaagaaactgacccagaacaagctcatcttgaagggggagttgataaccttactacatttgtgtgagtctcgggaccatgtggaactggctaaaaatgtcatttacaggtaccatgcagagaacaaaaatttcactttgggggagtataaatttggaccgctttttgtgaggttgtgttacgagttggatctcgaggaatctgcagtggagctcatgaaagaccagcatttacgaggtttcttctcagactccacatcattcaatattttgatggatatgttatttatcaaaggcaaatataaaagtgctttgcaagtattgatagagatgaaaaaccaagatgtgaagttcaccaaagatacctatgttcttgcttttgcaatttgctacaaactgaatagccctgagtctttcaaaatctgtactacattaagagaagaagctctactcaaaggagaaattctctccaggagagcatcctgtttcgctgtggcattagctctgaatcagaatgagatggcaaaagctgtgtccattttttctcaaatcatgaatccagaaagcatagcctgcattaatttaaatattataatccatatccagtcaaatatgttggaaaacctgataaagactctaaaaaatgctgcagaaggaaatttatcaaaatttgtgaaaagacatgtgttctcggaggaagtgctggccaaagtgagggaaaaagtgaaggatgtgcctgcccttgtggccaaatttgatgagatctatgggacactgcacatcactggccaggtcaccactgattctttggatgctgtgctctgccacacccccagggacaggaaatctcacacgttgctattaaacaagaggatggtcagccgtcgcaccttccagccactcagccagtccctgttggctgagtaaccctggtttcagtccacctatggatctgaggggcctgcttctagtgagttattacctttcctaagaagccaggtatcgcacttcagcagacagtgtgctgacacttggtcttctcctgaaattcccaaattcactgaatggtaccatgccgatctctgagaagttatgttgcaccactgtgaaggtctagatgcaagcttggctccctcagaaaggcgcttcccttttgcatggctgaggatccttgaaggaacctggtcagtctccggttcagcttccgacaccagagtggaacccagtaagcaccatcaggaatgaatttcactacaagtgtggataactctgattttcaaaggagtagttacttgcaaattacatccttgctgaattcaggaggtatgaaaccctattttaccatgttagaaaacagcccaggattttctcattgctctgccatcatatatgtctatgacttgagcccttatttttccatctgcaaaacaataatgcctatgtgtctttgcatatagatttgaaatcttcattcaaggtttagtaggatcatattttctcaaaaataagagaaataaggttcataaggaaacttgctgggattgtggttgttttgttttctcagcagcacaaacaaaaccagaatttagcctttaggactgctgagtaagccaaatttaaatgactactgctttgttcatgggtaagccatgtgcttttcaaaataagtgccactaaaaaccacataatgctttggtttctatgtggataataaatatttagtcctatagtttatcttatttgttaatgatttttctctcttgaatgcctcatattaaaaaaaaatgtgccatgagagcagttcaaagctgcttcatacttatggtctcaaatatagtatgtgttgaattttaccgtgtctggtcaccagtgagcagaagatacacagtgaccccacctcacttgctccttttgtttcagaaagcccagagggttgctcagacctcaggagctgtctgccaagattgctgcagactcttcattgccacctccaaaactaagactgttcacttggttgttgttctaaggcaaggattatagagtcagaaattgtagactaggagaagtcttctgagtctcctaattaattccttcatctttcaggttaaggaaacgatccatgcaagagaggcccaatctcaactgtagactgtgtcccagtaagagagtcacagcttcaggtgtttgctgaatccaggtctgagatcacaatcccacctgaggacaggatccgcatatgagagtcgcacattggtataattgatttgtggtagagctgagattagaatccagattcctagtctagtatccttcccactgtaccacattatctcttttcagaggggaaaaaggagcagctcttaagaaacagaatactaagggcccccattactgtgtggccctgggcatcctcagtttcctcatttggtaaatggggataatggtaccgacctcttaggcttggtgtgaggatgaaatgagatagggaatataaagcaagcagatagtggctggcacatagtacatgcaatatgtttgaaactagttaaggaattataaaaacaaatgagttcttccttctgctcaaaaatattgaatttcttgtccttgtgctctgtgaaacattgaacagccccatttagagaaacaaattctctgccctcatagaatcctaattgtttctgtatgtgtctggtgttttgcacatgcaaaaaaaaaaaaaaaagtgcttggatttctccactttcagtcttagggaataatagggcatgcttcctgtccccccagcttacttttcatcttctccaactctcacagttcaaatggctccagtgctgtgggtgagtgtggccttggttgttagctaacaaccattcattagcgaaataaccaaattttgtgagcagtaaatagcaacaagcttcccaatccctgctgcccagccgactggaaaaactggtccattccacctgttcccagaaacctcagtacagaggtagctatatgcataatgttcaccccaaagtaatagatgattttaaagtcttaaaagtccaataaaacagtgttcagtataggttatgataggcatttcattctttaaaactcagtaattcctttgaaaaaatgatgtttctttataagcagtagtttgcctacatcatttacttgtttttttctgctttggggtttttttttttttgagacacaatttcactctgtcgcccaggctggagtgcagtggtgtgatctcagctcactgcaacttctgcctcctgggttcaagcaattctcatgccccagcctcccaagtagctgggaatacagttgtgtgccaccacactggcttattttttgtatttttttagtagagatggggtttcaccatgttggccaggctggtctctaactcttatcctcaagtgatctgcctgccttggcctcccaaagtgctgggattacaggcatgagccaccgcacctggcctacttatcctgttaatgaaaatatttgattggacagaacatcttattccttaactctgttatgtgcttttgtagattgtttttacttactgtagatatctgttgctccagagtcccagaaatcagtatgatgagttcagcacagttactagaaggagacaaaaagatatcttcttaattaggtgatatcagggatagttctggttattgattgctgtgtggaaaacactccaaaactcagtgactttaaacaacaccagtcattgtgttatttctcattatcctaagtactgactgggctcagccagacagttcttattcgggttctcatgcagttatagtcatcatcagattgtggccgcgactggcataatctcaaaggcttccttagtatttctggcagttgatgctaggacctcagctagtgctggggctggaacatgtctacacatagcttccccacagcatggtggctaggtactaggagtgactgtcccaagaggaccaggcagaagcagttacattttatgacctagtctcagaagtctcataacatcacttccactaaagtcccaagcccccccagattcaaatggagggagcatatatcccatctcagtggtaggaatttcaaagaataaattctgtgaaactgtagtagatagtctgttttctcccctgtttaaaacctcctgaggacctcacatgcttctggataaagctcaggctcttcaacatggtttagaaggtccttcctaatctggcccacatttgtccatccagctccaactcttgctactctacgcccctcttcccctcttgtggaatggctaattcctactcatcattcaggtcttggcttagacatcttttcatctgagaaggctttctggtctagtctcacctggttaggtgaactccccatgtgccccatgtacctcatttatcaaagtgcttatcatatgcctgtcactgtctgttttcttcactagactcaggtgccatgtctgtcctttctgctctgtttgctgggtgcctagcatggtaggggatgtatcagaggattagtacttatttaactcaccagctcatttaactatattgtataacaatgttggtggtcatattggtcccccatggacagcttttcgtctctaataccatacactcagtgcagggtctgaatgtccccccaaactcatatgttgaactccaaatccccaaggtgttggtattagatgatgtagcctttgggaaggaattagggtggtgccctcatgaatgggatttgtgtcattataaaacaagcccaaagaaatttggtcaccccttcctttaagcgaggtcatggcaaaaagacgctgtctatgaaccagaaaatgggctctcactagacaccaaatgctggtgtcttgttcttggatttcccagccttcagaactgtgagaaatatatttctgttatttataagccacccagtttttggtattttgttatagcagcctgaagagactaagacagccagtcccaaccttccacatttagacctgactccaagttttgctcagcccactgtgtatcccttcctcctcccaaccaaagtgtccccactctttctctattctgttctgcctattattcaaggtctaacttgtgtcactttttcaatgaggcatttgcaagctctttaaattctcaaggattctccattaattcaccatatctattttgagaatctacaaaggacaaggcactacgaaagactctacatgccacagggaaaagacagacaagatctctgtcccaacacagaaaattttagcctgccatgttgactcccagggatctttttgtttctgtaggaggtgctcattacagagtggccaaattcctactgaagaatggacttggttgtgaaataaaacaatcctgggcaatatttgttgatagttttgttgaggatgattcaggaaataaatacaaacttttaactactcataatgaatattgttgggatattataatgaggaggtaaggatttacctgctacaatttgggtaggcaaaaatgtaggcttctctgtttctttgcagtgaactaaaacttcttatgaactctggttatactgaaaacaggagtcatgggagacttgatcttgcttaaaggatattttagtctttgatttctttgaggtaaatgttcaatctttttgcgtatcttcctcctaccttttcatagccaagatgacagctgaacaggctctcatcttaaacctgaacaggcatcagaatcacttggagagcttgttaaaatacagattgatgggccccacccccagaatatctgattccatacatatgagtcagggcccaagaatttgcattacaaatgcattctcagatgatgcctttgctagtctgggcaacacactttaagaatagttggtataacagaaagcttgtgtgtcttgtgtgtctatgtggacaggagttgtgggcttcagattcatcctctgtgtcctctggtctcagttgtgaggagggggaagagtgggaagtctggccttgtctctggactcctgagtaaataatgtgctgatgcagtgttgggcccagcaggccttttagagggtcatgccagcacccactgctgaggtctgtagtctctaccatctgccctacacataataagtacccttcctctgctattctctcttgctgaccccaagcccaccaatgaattaattgaatcaagagttccaaggcattaggttaaagacattgaaaaatatatccatttattttttcaaatatacataaagaaatccatacaaactaaggccaattgtggcaaaactacatgagacttgactaaaataacccacaattcaaatttccttcataacatttctacctataaatttgattcagagaaattacacttcatagataaactagccataaaaaagattacagcggcaaaagctatcatcagtaatatttgatatgcataagaaaccgtgaggaaccaaatcatggtaaaattgattctaaggaaatggttgcacaaaaataaaagtgaaatggtattttttaaaaggaagtggttcaactgtattgcatagaaaatgaatcaaggaattacattggcttaaatggcattagctcaaaaaagtgttctcaaaaattaatggaaattggtgtattctgattgagatatgttttattcaataacatggagtcaaaacaagaagattttttaaatgtcctctgttcccatggagcttgcattctgcaagagcaacagacatcaaaaagataactgggcaaatgaccacatgattgcagttgggataagtgctaagtctagggtaatcttcatatcaccctgtggcatgtataaaggaagaccttttgctggtgttttgtaaaaccagttgtctgtgtcatttattttaacatgtaaagtacactgccttgtattgttacagatctttttctccatatccggtctctcctgaagaacagagtattctacatttgttttatatgaccccaaggtgcttatgtagcatattatttatacatctaatgaggtcttaatattttttgaaagagtgatttcattaattaacggcagattttagttaatatgtacagtctgccacaatatactttaggcatttcacagttttctcataaactggttgctgtttctgtcccggttttacacatgacagagccaagacacagacaagtagaatgacttgcctgtgcgggggtcctgggttggccagtgcattcatgtactggaccagggcccctgtatcttgcagtaatgtatccgtgggcgtttccccccagacattcgaagcacacagctaatctgagaaagaagtgatttggcgaggggttgggggagtaggcggtgggcacaacggttccaggtgactttcaagttgctaatgaaagaggatcaaagcgctgctgaactgctcacctccccgcttggcctgccttgcccagctgactttcttccaagggcctcagaggcagcattaccacaggcattaaagatggggatggggaaagaaggcccagagggaaagggaaccacatgcttacctgctaatcactgccctgcagctgaaacactgcagagctggctgctctgggataggagaggaaggcctcatttaatcaggagaagaaagagaaccaggggcctctgagatggcctgcaaggcatcacggtctgtgaactggtctgtgaactgcgggcctgcctggaaatgcattgtcagagtagagtgatgctttctttgtaaatcccttgtcttccctgattcctttttcctgactgaatcaggccaagatgctcacccagaagagcacagcatcaccctgtctttcaatccccaaagtagcccttacccctagacagcaacatcatctgttacaattgacagcatgaaggaaggcataacccctgcaaagtgactgccctacaactcaatttgattttgaatccgcaagtgcaagtctcattcctggtaactaatagtaacagaatctgctgatgtattctaccgcatcccagggagactcatgtagccatgaagactgaagaggattaagttaaccttccattttatagctgcaaattactgggttgatgtcaggtagggtgaggagtatgttccggttatagctggtagcaagatggctgcatgcatcatgaggctttggcctaaaaagcttgtcattatataaaaaagctatagagagcagagaaaatgtcatttccaatttagaagatcataatcgatttttaacacattggtccttaggtgatacagaattcaacaaaaacggggcttataaaaagccagggttcataaaattacaaagattatagacaaaaatagataacatataagacttaccagctgggcaaggtagctcaagtttgtaatcccagcacttagggaggccgaggcaggcagatcacctgaggtcaggggttctagaccagcctggccagcatggtgaaaccccatctctactaaaaatacaaaaaaattagccaggcgtggtggcgggcatctgtaatttcagctactcaggaggttgagacgggagaattgcttgaacctgggagacggaggttacagtgagcctagactgcgccattgcactctagcctaggcgacaagagcgaaactatgtttcaaataataataataataataagacttaccatttgccaggtcctgtgcaaagcactttatctcatttgatccctgggaaaccccataaagtactattatgccatttctcagataaagaaactgaagctcagagacgtttagttgcttgcctgtggatataacactagagagcgggagagcacagtatttgaacccaggaggtctgatgctggaggtcatgtttttaaccttatctctgtattgcctgcccaagtgctggctgtgtgcatgtattctcaataatccctggccaacttcctgctttgctgtcagtagcagagctgaagaacttacaatagacggcagagggcgtccagagtcactatttttaaaaggtgctagttttcaaaagcatttctggaattcagagagaacagaggtccacatagcaggctagacaggaaaggtagctgtagatagactttagggagtatatagaatattgccttcacgcaggttaagaaatatttagtgttgaaaggatacttttaaaagagagaaagcagtaaagttgatcctctgcagaaagtagaccaatgtaagtatcatgcaatgtgtccatgtgcgtgtacacgtgagcacacatgcacacacacattagatgttttgtgagaaaacatacactcagtttcttatgaaagaaaaaggatggtcatttgtctcacttgggaaagggtttcctcccaaattgagaaggaaaatccccccaattaactgtttgcctttattaactaaaatcacatttgtgtgtgaaagaagtaaaaaggaattaggatcttggttattttgattgtctctctacccttccagattcatcaaatgatagtcaaccttactgtctcttcctgccatcatcaggaatgactaaatcttggagcgttctccatttaagtgagggaaatgttggattcccggtgtatttatcactgcccatctctaagaataggtcaaagatgaaattcccattatcatgaaactttaatatatattgagacttcacagagcactaactatactggggctgggatggggattctgatgagagatatccctgacagagaccagagctcaggaggaagaaaggacagatgcccttgttcaagatgacttcttcatgggcatcgatagatacattcttgaaaaccacccaaagtacctagaggagaccctagtgcaactgtgcattgtacaacaactgatgaggtaaaagaaacaaactgttaatgactctaaacaatgtggcccacagagttggtatggtttggccacaccagctcagggataaaggtactagaaaaaatcttggggaaaatcctattgtacatattccttacataatgtctgtgatttacctcacttatcaaatgaaaaaaacccaaaacacctggttgatggccatttggtcaaacacctctaggagtctggagttgagtggccagaactcagtctttctttacatgctgtgttaagcaggcttttatctcattcaggtgttagaagtggagggaggaacacagttaggctgtgttctactgcactgcatagggaggcagggtatcacccaggcacaacgcccactttgcaagtaaataatcagtagcatgaagctcacttctgcaggacccaccatgacaaagtggagagctgggcggttaaccagtgaaccaattgagtggctctgggctcctatacccctttcattccacagcctgtgatacacccttagagtcaaaatatcaaattcagtgggccatgagtcttgcccaaaagtataaatctttttttcatatggactatttgggtctattttcaaaaatccctttttcttctctaaactatctcaattccacatttcactttgcaggtgtagacatgacttttaggttgttgatgatttaatgctattgaaatgttcttatatgcaaaacacctagatagatgcagagtgtgggacaaagacaaccagcacattgctaagcccaagtagcaaatttcctgaccccattttaaaggttctgagacagataggcggaataggtccccctgtctttgagtagaagagttggcaagcaagctggactaaatgggccatgtgcaattttgctgtctgttcacatttcaaataaactaatgtgttatga

SEQ ID NO: 164174 - DNA, 2648 bp, Homo sapiens
  Payload ID: 12325
  Gene Symbol: PTCD2
  Gene Name: pentatricopeptide repeat domain 2
  ENST ID: ENST00000486995
  CDS Start-End: 11-235
agtagttggtatggtccgagacagtatggctgctgcatttcggccctcgaatcgagttctcctgcaggcgctgcagattttggtgtatcctggggtgggaggctccggctctgtcagctgccgctgccctctcggaggtatccgcggctttagcctagggaaggaggggagggatgggagagaagggagtgttagatcccagctagcatctctgtggagcagccacagctcctaagtcactcactggcctggagcgcaccctcgccctctagttgcacgtgggtgcagtggtgaccactgggggtcgtggatacccccagtgcctgcaaatcgaaggactgctggggtattgaccttggggctgtagtgctccctcagatggggcgacgttcgtcttcaggaacatccctcccgccttgggtgacttttatttatttatttatttatttttgagacgaagtcttgctctgtcgcccaagctggagtgcggtggcgcgatctcggctcactgcagcctccgcctcccgggttcaagcgattctcctgcctcagctttccgagtagttgggactacaggcgtgcgccaccacgcccgggtaattttttgtatttttagtagagacgggtttcactatgttggccaggctggtttcgaactcctgacctcgtggtccacccgcctcggcctcccaaagtgctgggattataggagtgagccaccgcgcccggcctttttcttttctgcagagtttggaagcagaggtcttatggagtctcagttctgctaacaatctaaaagacttaacgctaaaagatacctacttacagataatgtggtgaaattaaaagaatttcaacaaaagaaagtggctgttgcatgtaatctttctggcactaaagaaacgtattttagaaacttgaaaaagaaactgacccagaacaagctcatcttgaagggggagttgataaccttactacatttgtgtgagtctcgggaccatgtggaactggctaaaaatgtcatttacaggtaccatgcagagaacaaaaatttcactttgggggagtataaatttggaccgctttttgtgaggttgtgttacgagttggatctcgaggaatctgcagtggagctcatgaaagaccagcatttacgaggtttcttctcagactccacatcattcaatattttgatggatatgttatttatcaaaggcaaatataaaagtgctttgcaagtattgatagagatgaaaaaccaagatgtgaagttcaccaaagatacctatgttcttgcttttgcaatttgctacaaactgaatagccctgagtctttcaaaatctgtactacattaagagaagaagctctactcaaaggagaaattctctccaggagagcatcctgtttcgctgtggcattagctctgaatcagaatgagatggcaaaagctgtgtccattttttctcaaatcatgaatccagaaagcatagcctgcattaatttaaatattataatccatatccagtcaaatatgttggaaaacctgataaagactctaaaaaatgctgcagaaggaaatttatcaaaatttgtgaaaagacatgtgttctcggaggaagtgctggccaaagtgagggaaaaagtgaaggatgtgcctgcccttgtggccaaatttgatgagatctatgggacactgcacatcactggccaggtcaccactgattctttggatgctgtgctctgccacacccccagggacaggaaatctcacacgttgctattaaacaagaggatggtcagccgtcgcaccttccagccactcagccagtccctgttggctgagtaaccctggtttcagtccacctatggatctgaggggcctgcttctagtgagttattacctttcctaagaagccaggtatcgcacttcagcagacagtgtgctgacacttggtcttctcctgaaattcccaaattcactgaatggtaccatgccgatctctgagaagttatgttgcaccactgtgaaggtctagatgcaagcttggctccctcagaaaggcgcttcccttttgcatggctgaggatccttgaaggaacctggtcagtctccggttcagcttccgacaccagagtggaacccagtaagcaccatcaggaatgaatttcactacaagtgtggataactctgattttcaaaggagtagttacttgcaaattacatccttgctgaattcaggaggtatgaaaccctattttaccatgttagaaaacagcccaggattttctcattgctctgccatcatatatgtctatgacttgagcccttatttttccatctgcaaaacaataatgcctatgtgtctttgcatatagatttgaaatcttcattcaaggtttagtaggatcatattttctcaaaaataagagaaataaggttcataaggaaacttgctgggattgtggttgttttgttttctcagcagcacaaacaaaaccagaatttagcctttaggactgctgagtaagccaaatttaaatgactactgctttgttcatgggtaagccatgtgcttttcaaaataagtgccactaaaaaccacataatgctttggtttctatgtggataataaatatttagtcctat

SEQ ID NO: 164175 - DNA, 1440 bp, Homo sapiens
  Payload ID: 12325
  Gene Symbol: PTCD2
  Gene Name: pentatricopeptide repeat domain 2
  ENST ID: ENST00000503315
  CDS Start-End: 1-432
atggctgctgcatttcggccctcgaatcgagttctcctgcaggcgctgcagattttggtgtatcctggggtgggaggctccggctctgtcagctgccgctgccctctcggagctaaaagatacctacttacagataatgtggtgaaattaaaagaatttcaacaaaagaaagtggctgttgcatgtaatctttctggcactaaagaaacgtattttagaaacttgaaaaagaaactgacccagaacaagctcatcttgaagggggagttgataaccttactacatttgtgtgagtctcgggaccatgtggaactggctaaaaatgtcatttacaggtgctttgcaagtattgatagagatgaaaaaccaagatgtgaagttcaccaaagatacctatgttcttgcttttgcaatttgctacaaactgaatagccctgagtctttcaaaatctgtactacattaagagaagaagctctactcaaaggagaaattctctccaggagagcatcctgtttcgctgtggcattagctctgaatcagaatgagatggcaaaagctgtgtccattttttctcaaatcatgaatccagaaagcatagcctgcattaatttaaatattataatccatatccagtcaaatatgttggaaaacctgataaagactctaaaaaatgctgcagaaggaaatttatcaaaatttgtgaaaagacatgtgttctcggaggaagtgctggccaaagtgagggaaaaagtgaaggatgtgcctgcccttgtggccaaatttgatgagatctatgggacactgcacatcactggccaggtcaccactgattctttggatgctgtgctctgccacacccccagggacaggaaatctcacacgttgctattaaacaagaggatggtcagccgtcgcaccttccagccactcagccagtccctgttggctgagtaaccctggtttcagtccacctatggatctgaggggcctgcttctagtgagttattacctttcctaagaagccaggtatcgcacttcagcagacagtgtgctgacacttggtcttctcctgaaattcccaaattcactgaatggtaccatgccgatctctgagaagttatgttgcaccactgtgaaggtctagatgcaagcttggctccctcagaaaggcgcttcccttttgcatggctgaggatccttgaaggaacctggtcagtctccggttcagcttccgacaccagagtggaacccagtaagcaccatcaggaatgaatttcactacaagtgtggataactctgattttcaaaggagtagttacttgcaaattacatccttgctgaattcaggaggtatgaaaccctattttaccatgttagaaaacagcccaggattttctcattgctctgccatcatatatgtctatgacttgagcccttat

SEQ ID NO: 164176 - DNA, 1001 bp, Homo sapiens
  Payload ID: 12325
  Gene Symbol: PTCD2
  Gene Name: pentatricopeptide repeat domain 2
  ENST ID: ENST00000510676
  CDS Start-End: 391-1001
ccgagacagtatggctgctgcatttcggccctcgaatcgagttctcctgcaggcgctgcagattttggtgtatcctggggtgggaggctccggctctgtcagctgccgctgccctctcggagctaaaagatacctacttacagataatgtggtgaaattaaaagaatttcaacaaaagaaagtggctgttgcatgtaatctttctggcactaaagaaacgtattttagaaacttgaaaaagaaactgacccagaacaagctcatcttgaagggggagttgataaccttactacatttgtgtgagtctcgggaccatgtggaactggctaaaaatgtcatttacagcatttacgaggtttcttctcagactccacatcattcaatattttgatggatatgttatttatcaaaggcaaatataaaagtgctttgcaagtattgatagagatgaaaaaccaagatgtgaagttcaccaaagatacctatgttcttgcttttgcaatttgctacaaactgaatagccctgagtctttcaaaatctgtactacattaagagaagaagctctactcaaaggagaaattctctccaggagagcatcctgtttcgctgtggcattagctctgaatcagaatgagatggcaaaagctgtgtccattttttctcaaatcatgaatccagaaagcatagcctgcattaatttaaatattataatccatatccagtcaaatatgttggaaaacctgataaagactctaaaaaatgctgcagaaggaaatttatcaaaatttgtgaaaagacatgtgttctcggaggaagtgctggccaaagtgagggaaaaagtgaaggatgtgcctgcccttgtggccaaatttgatgagatctatgggacactgcacatcactggccaggtcaccactgattctttggatgctgtgctctgccacacccccagggacaggaaatctcacacgttgctattaaacaagaggatggtcagccg

SEQ ID NO: 164177 - DNA, 1653 bp, Homo sapiens
  Payload ID: 12325
  Gene Symbol: PTCD2
  Gene Name: pentatricopeptide repeat domain 2
  Uniprot ID: Q8WV60
  ENST ID: ENST00000503868
  CDS Start-End: 8-847
agttggtatggtccgagacagtatggctgctgcatttcggccctcgaatcgagttctcctgcaggcgctgcagattttggtgtatcctggggtgggaggctccggctctgtcagctgccgctgccctctcggagctaaaagatacctacttacagataatgtggtgaaattaaaagaatttcaacaaaagaaagtggctgttgcatgtaatctttctggcactaaaggtgctttgcaagtattgatagagatgaaaaaccaagatgtgaagttcaccaaagatacctatgttcttgcttttgcaatttgctacaaactgaatagccctgagtctttcaaaatctgtactacattaagagaagaagctctactcaaaggagaaattctctccaggagagcatcctgtttcgctgtggcattagctctgaatcagaatgagatggcaaaagctgtgtccattttttctcaaatcatgaatccagaaagcatagcctgcattaatttaaatattataatccatatccagtcaaatatgttggaaaacctgataaagactctaaaaaatgctgcagaaggaaatttatcaaaatttgtgaaaagacatgtgttctcggaggaagtgctggccaaagtgagggaaaaagtgaaggatgtgcctgcccttgtggccaaatttgatgagatctatgggacactgcacatcactggccaggtcaccactgattctttggatgctgtgctctgccacacccccagggacaggaaatctcacacgttgctattaaacaagaggatggtcagccgtcgcaccttccagccactcagccagtccctgttggctgagtaaccctggtttcagtccacctatggatctgaggggcctgcttctagtgagttattacctttcctaagaagccaggtatcgcacttcagcagacagtgtgctgacacttggtcttctcctgaaattcccaaattcactgaatggtaccatgccgatctctgagaagttatgttgcaccactgtgaaggtctagatgcaagcttggctccctcagaaaggcgcttcccttttgcatggctgaggatccttgaaggaacctggtcagtctccggttcagcttccgacaccagagtggaacccagtaagcaccatcaggaatgaatttcactacaagtgtggataactctgattttcaaaggagtagttacttgcaaattacatccttgctgaattcaggaggtatgaaaccctattttaccatgttagaaaacagcccaggattttctcattgctctgccatcatatatgtctatgacttgagcccttatttttccatctgcaaaacaataatgcctatgtgtctttgcatatagatttgaaatcttcattcaaggtttagtaggatcatattttctcaaaaataagagaaataaggttcataaggaaacttgctgggattgtggttgttttgttttctcagcagcacaaacaaaaccagaatttagcctttaggactgctgagtaagccaaatttaaatgactactgctttgttcatgggtaagccatgtgcttttcaaaataagtgccactaaaaaccacataatgctttggtttctatgtggataataaatatttagtcctatagttt

SEQ ID NO: 164178 - DNA, 881 bp, Homo sapiens
  Payload ID: 12325
  Gene Symbol: PTCD2
  Gene Name: pentatricopeptide repeat domain 2
  ENST ID: ENST00000515198
  CDS Start-End: 16-501
gttccagtagttggtatggtccgagacagtatggctgctgcatttcggccctcgaatcgagttctcctgcaggcgctgcagattttggtgtatcctggggtgggaggctccggctctgtcagctgccgctgccctctcggagctaaaagatacctacttacagataatgtggtgaaattaaaagaatttcaacaaaagaaagtggctgttgcatgtaatctttctggcactaaagaaacgtattttagaaacttgaaaaagaaactgacccagaacaagctcatcttgaagggggagttgataaccttactacatttgtgtgagtctcgggaccatgtggaactggctaaaaatgtcatttacaggtaccatgcagagaacaaaaatttcactttgggggagtataaatttggaccgctttttgtgaggttgtgttacgagttggatctcgaggaatctgcagtggagctcatgaaagaccaggtgctttgcaagtattgatagagatgaaaaaccaagatgtgaagttcaccaaagatacctatgttcttgcttttgcaatttgctacaaactgaatagccctgagtctttcaaaatctgtactacattaagagaagaagctctactcaaaggagaaattctctccaggagagcatcctgtttcgctgtggcattagctctgaatcagaatgagatggcaaaagctgtgtccattttttctcaaatcatgaatccagaaagcatagcctgcattaatttaaatattataatccatatccagtcaaatatgttggaaaacctgataaagactctaaaaaatgctgcagaaggaaatttatcaaaatttgtgaaaagacatgtgttctcggaggaagtggtg

SEQ ID NO: 164179 - DNA, 569 bp, Homo sapiens
  Payload ID: 12325
  Gene Symbol: PTCD2
  Gene Name: pentatricopeptide repeat domain 2
  ENST ID: ENST00000511752
  CDS Start-End: 11-292
agtagttggtatggtccgagacagtatggctgctgcatttcggccctcgaatcgagttctcctgcaggcgctgcagattttggtgtatcctggggtgggaggctccggctctgtcagctgccgctgccctctcggagctaaaagatacctacttacagataatgtggtgaaattaaaagaatttcaacaaaagaaagtggctgttgcatgtaatctttctggcactaaaggtaccatgcagagaacaaaaatttcactttgggggagtataaatttggaccgctttttgtgaggttgtgttacgagttggatctcgaggaatctgcagtggagctcatgaaagaccagcatttacgaggtttcttctcagactccacatcattcaatattttgatggatatgttatttatcaaaggcaaatataaaagtgctttgcaagtattgatagagatgaaaaaccaagatgtgaagttcaccaaagatacctatgttcttgcttttgcaatttgctacaaactgaatagccctgagtctttcaaaatctgtactacattaagagaagaagctct

SEQ ID NO: 164180 - DNA, 2029 bp, Homo sapiens
  Payload ID: 12325
  Gene Symbol: PTCD2
  Gene Name: pentatricopeptide repeat domain 2
  ENST ID: ENST00000543322
  CDS Start-End: 508-1104
ggttccagtagttggtatggtccgagacagtatggctgctgcatttcggccctcgaatcgagttctcctgcaggcgctgcagattttggtgtatcctggggtgggaggctccggctctgtcagctgccgctgccctctcggagctaaaagatacctacttacagataatgtggtgaaattaaaagaatttcaacaaaagaaagtggctgttgcatgtaatctttctggcactaaagaaacgtattttagaaacttgaaaaagaaactgacccagaacaagctcatcttgaagggggagttgataaccttactacatttgtgtgagtctcgggaccatgtggaactggctaaaaatgtcatttacaggtaccatgcagagaacaaaaatttcactttgggggagtataaatttggaccgctttttgtgaggttgtgttacgagttggatctcgaggaatctgcagtggagctcatgaaagaccaggtgctttgcaagtattgatagagatgaaaaaccaagatgtgaagttcaccaaagatacctatgttcttgcttttgcaatttgctacaaactgaatagccctgagtctttcaaaatctgtactacattaagagaagaagctctactcaaaggagaaattctctccaggagagcatcctgtttcgctgtggcattagctctgaatcagaatgagatggcaaaagctgtgtccattttttctcaaatcatgaatccagaaagcatagcctgcattaatttaaatattataatccatatccagtcaaatatgttggaaaacctgataaagactctaaaaaatgctgcagaaggaaatttatcaaaatttgtgaaaagacatgtgttctcggaggaagtgctggccaaagtgagggaaaaagtgaaggatgtgcctgcccttgtggccaaatttgatgagatctatgggacactgcacatcactggccaggtcaccactgattctttggatgctgtgctctgccacacccccagggacaggaaatctcacacgttgctattaaacaagaggatggtcagccgtcgcaccttccagccactcagccagtccctgttggctgagtaaccctggtttcagtccacctatggatctgaggggcctgcttctagtgagttattacctttcctaagaagccaggtatcgcacttcagcagacagtgtgctgacacttggtcttctcctgaaattcccaaattcactgaatggtaccatgccgatctctgagaagttatgttgcaccactgtgaaggtctagatgcaagcttggctccctcagaaaggcgcttcccttttgcatggctgaggatccttgaaggaacctggtcagtctccggttcagcttccgacaccagagtggaacccagtaagcaccatcaggaatgaatttcactacaagtgtggataactctgattttcaaaggagtagttacttgcaaattacatccttgctgaattcaggaggtatgaaaccctattttaccatgttagaaaacagcccaggattttctcattgctctgccatcatatatgtctatgacttgagcccttatttttccatctgcaaaacaataatgcctatgtgtctttgcatatagatttgaaatcttcattcaaggtttagtaggatcatattttctcaaaaataagagaaataaggttcataaggaaacttgctgggattgtggttgttttgttttctcagcagcacaaacaaaaccagaatttagcctttaggactgctgagtaagccaaatttaaatgactactgctttgttcatgggtaagccatgtgcttttcaaaataagtgccactaaaaaccacataatgctttggtttctatgtggataataaatatttagtcctatagtttatcttatttgttaatgatttttctctcttgaatgcctcatattaaaaaaaaatgtgccatgagagcagttcaaagctgcttcatacttatggtctcaaatatagtatgtgttgaatttt

SEQ ID NO: 164181 - DNA, 1911 bp, Homo sapiens
  Payload ID: 12325
  Gene Symbol: PTCD2
  Gene Name: pentatricopeptide repeat domain 2
  Uniprot ID: Q8WV60
  ENST ID: ENST00000536805
  CDS Start-End: 336-986
ggttccagtagttggtatggtccgagacagtatggctgctgcatttcggccctcgaatcgagttctcctgcaggcgctgcagattttggtgtatcctggggtgggaggctccggctctgtcagctgccgctgccctctcggagctaaaagatacctacttacagataatgtggtgaaattaaaagaatttcaacaaaagaaagtggctgttgcatgtaatctttctggcactaaagaaacgtattttagaaacttgaaaaagaaactgacccagaacaagctcatcttgaagggggagttgataaccttactacatttgtgtgagtctcgggaccatgtggaactggctaaaaatgtcatttacaggtgctttgcaagtattgatagagatgaaaaaccaagatgtgaagttcaccaaagatacctatgttcttgcttttgcaatttgctacaaactgaatagccctgagtctttcaaaatctgtactacattaagagaagaagctctactcaaaggagaaattctctccaggagagcatcctgtttcgctgtggcattagctctgaatcagaatgagatggcaaaagctgtgtccattttttctcaaatcatgaatccagaaagcatagcctgcattaatttaaatattataatccatatccagtcaaatatgttggaaaacctgataaagactctaaaaaatgctgcagaaggaaatttatcaaaatttgtgaaaagacatgtgttctcggaggaagtgctggccaaagtgagggaaaaagtgaaggatgtgcctgcccttgtggccaaatttgatgagatctatgggacactgcacatcactggccaggtcaccactgattctttggatgctgtgctctgccacacccccagggacaggaaatctcacacgttgctattaaacaagaggatggtcagccgtcgcaccttccagccactcagccagtccctgttggctgagtaaccctggtttcagtccacctatggatctgaggggcctgcttctagtgagttattacctttcctaagaagccaggtatcgcacttcagcagacagtgtgctgacacttggtcttctcctgaaattcccaaattcactgaatggtaccatgccgatctctgagaagttatgttgcaccactgtgaaggtctagatgcaagcttggctccctcagaaaggcgcttcccttttgcatggctgaggatccttgaaggaacctggtcagtctccggttcagcttccgacaccagagtggaacccagtaagcaccatcaggaatgaatttcactacaagtgtggataactctgattttcaaaggagtagttacttgcaaattacatccttgctgaattcaggaggtatgaaaccctattttaccatgttagaaaacagcccaggattttctcattgctctgccatcatatatgtctatgacttgagcccttatttttccatctgcaaaacaataatgcctatgtgtctttgcatatagatttgaaatcttcattcaaggtttagtaggatcatattttctcaaaaataagagaaataaggttcataaggaaacttgctgggattgtggttgttttgttttctcagcagcacaaacaaaaccagaatttagcctttaggactgctgagtaagccaaatttaaatgactactgctttgttcatgggtaagccatgtgcttttcaaaataagtgccactaaaaaccacataatgctttggtttctatgtggataataaatatttagtcctatagtttatcttatttgttaatgatttttctctcttgaatgcctcatattaaaaaaaaatgtgccatgagagcagttcaaagctgcttcatacttatggtctcaaatatagtatgtgttgaatttt

SEQ ID NO: 164182 - DNA, 6734 bp, Homo sapiens
  Payload ID: 12326
  Gene Symbol: PTCD3
  Gene Name: pentatricopeptide repeat domain 3
  Uniprot ID: Q96EY7
  ENST ID: ENST00000254630
  CDS Start-End: 67-2136
cactgcgccccaccttcctgaaggtcgaggcacgctttcccaacatgctctgcagagaaatcaaagatggcggttgtatctgctgttcgctggctgggcctccgcagcaggcttggccagccgctgacgggtcggcgggcgggtttgtgtgaacaggcacgcagctgcagattttattctggtagtgcaaccctctcaaaggttgaaggaactgatgtaacagggattgaagaagtagtaattccaaaaaagaaaacttgggataaagtagccgttcttcaggcacttgcatccacagtaaacagggataccacagctgtgccttatgtgtttcaagatgatccttaccttatgccagcatcatctttggaatctcgttcatttttactggcaaagaaatccggggagaatgtggccaagtttattattaattcataccccaaatattttcagaaggacatagctgaacctcatataccgtgtttaatgcctgagtactttgaacctcagatcaaagacataagtgaagccgccctgaaggaacgaattgagctcagaaaagtcaaagcctctgtggacatgtttgatcagcttttgcaagcaggaaccactgtgtctcttgaaacaacaaatagtctcttggatttattgtgttactatggtgaccaggagccctcaactgattaccattttcaacaaactggacagtcagaagcattggaagaggaaaatgatgagacatctaggaggaaagctggtcatcagtttggagttacatggcgagcaaaaaacaacgctgagagaatcttttctctaatgccagagaaaaatgaacattcctattgcacaatgatccgaggaatggtgaagcaccgagcttatgagcaggcattaaacttgtacactgagttactaaacaacagactccatgctgatgtatacacatttaatgcattgattgaagcaacagtatgtgcgataaatgagaaatttgaggaaaaatggagtaaaatactggagctgctaagacacatggttgcacagaaggtgaaaccaaatcttcagacttttaataccattctgaaatgtctccgaagatttcatgtgtttgcaagatcgccagccttacaggttttacgtgaaatgaaagccattggaatagaaccctcgcttgcaacatatcaccatattattcgcctgtttgatcaacctggagaccctttaaagagatcatccttcatcatttatgatataatgaatgaattaatgggaaagagattttctccaaaggacccggatgatgataagttttttcagtcagccatgagcatatgctcatctctcagagatctagaacttgcctaccaagtacatggccttttaaaaaccggagacaactggaaattcattggacctgatcaacatcgtaatttctattattccaagttcttcgatttgatttgtctaatggaacaaattgatgttaccttgaagtggtatgaggacctgataccttcagcctactttccccactcccaaacaatgatacatcttctccaagcattggatgtggccaatcggctagaagtgattcctaaaatttggaaagatagtaaagaatatggtcatactttccgcagtgacctgagagaagagatcctgatgctcatggcaagggacaagcacccaccagagcttcaggtggcatttgctgactgtgctgctgatatcaaatctgcgtatgaaagccaacccatcagacagactgctcaggattggccagccacctctctcaactgtatagctatcctctttttaagggctgggagaactcaggaagcctggaaaatgttggggcttttcaggaagcataataagattcctagaagtgagttgctgaatgagcttatggacagtgcaaaagtgtctaacagcccttcccaggccattgaagtagtagagctggcaagtgccttcagcttacctatttgtgagggcctcacccagagagtaatgagtgattttgcaatcaaccaggaacaaaaggaagccctaagtaatctaactgcattgaccagtgacagtgatactgacagcagcagtgacagcgacagtgacaccagtgaaggcaaatgaaagtggagattcaggagcagcaatgggtctcaccatagctgctggaatcacacctgagaactgagatataccaatatttaacattgttacaaagaagaaaagatacagatttggtgaatttgttactgtgaggtacagtcagtacacagctgacttatgtagatttaagctgctaatatgctacttaaccatctattaatgcaccattaaaggcttagcatttaagtagcaacattgcggttttcagacacatggtgaggtccatggctcttgtcatcaggataagcctgcacacctagagtgtcggtgagctgacctcacgatgctgtcctcgtgcgattgccctctcctgctgctggacttctgcctttgttggcctgatgtgctgctgtgatgctggtccttcatcttaggtgttcatgcagttctaacacagttggggttgggtcaatagtttcccaatttcaggatatttcgatgtcagaaataacgcatcttaggaatgactaaacaagataatggcagtttaggctgcacaactggtaaaatgactgtagataaatgttgtaattagtgtacacgtttgtatttttgttaatatagccgctgccatagttttctaacttgaacagccatgaatgtttcatgtctccctttttttttgtctatagctgttacctattttagtggttgaaatgagagctagtgatgacagaaggatgtggaatgtcttcttgacatcattgtgtattgctggtaatcaagttggtaacgactacttctagcagctcttaccactatgacttaagtggtcctggaaggcagtaagtggaggtttgcagcattcctgccttcatgagggcttctaccactgaccactttgcacgtacctggctcccagatttacttaggtaccccacgagttgtccacataagcagcttcatctttaccttgccagagttgacaattatgggatactctagtctacttatacttgtgttcccatctgtctgccatcctctgaaggccgggacccagtcatacatccttagaaaccaaagtatggtttttgttttctcttggaatgtcaggtcttaaggcatttaattgagggacaaaaaaaaaaaaagccgatatagtagctagctacttaagcatccatgggtattgctccatatcaaagcagatttgcaggacagagagagtaaattagccttcagtcttggtttacagcttccaaggagagccttggccacctgaaatgttaactcggtcccttcctgtctctagttcatcagcacctgcagatgcctgactcttgttagccttactattcaatacagtccttagattcacggtatgcctcttcctatccaggcacctattctgaatcaccatgttgctctgcagctagagttgataggagaaaatccatttgggtagatggcctatgaatttgtagtagactttcaaaatgagtgatttgttagcttggtacttttaagtttgtggtacagatcctccaaacccatactctgagcaattaactgccttgaacatagagaaaaattaaggcctcacaggatgagtctccattctctgtaaatgcttattttatcatagtctttagcctctactatgagtaaaatgttctcttcggccgggtgtggtgactcacacctgtaacctcagcactttgggaggcagaggtgggaggatcacttaggtccaggagttcgagactagcctgggcaacatagtgagacaccggatctacaaaaaaataaaaagccagactggtggtatgtatctgtgtcccagctaattgggagggtgagttgggaggattgtttgagcctaggagagggaggttgcagtgagccgtgattgcaccactgcactccagcctgggcaacagagcaagaccctgtcttggagaaaccagaattttggaagagcaaatggggctgagtgcagtggctcatgcctgtaatcccagcacttagggtgccaatgtggattacctgagcccaggagtttgagaccagcctgggtaacagtgagacccccctccctacaaaagattttaataattagttgggcgtagtggtgcatgcctgtaatcccagctactctggagacaggtggaggggattgcttgagcctgggaagctgaggctgcagtagccatgactgcaccactgcattccagcctggttgacagagtgacccttgtctccaagaaaaaaaaaaagcaaatgggattaaggactcatggaatgggaaggggaaggggagtcttactatatgtggaataaacttgctcagtgttgccacagagttacattaccaatgtgtagaagtcagaaactagacttctagtttggttcaacatttgagggttgttttatagccatcaaagtattcaagaggttggatggcactcaaaagattctacatgtctagaatcaaactcaaatctggcacgtaggtgcttcttagtaaatgcttaatgaatgccaccaactctgcaaagtattcattgattttgagaccttagtcatgttgctactaaaagtagggcatatgaccgcctaagaaacagaacttcgagaagtcctaacgtaaccacagtaaagcagactcccctttcagcaacctcaaagcaaaaaaaaaaaaaaaaaaaccagttagctgctatataaacactataccaagcactaggcttagaggaaaagatgtcagattgtactgtcactggctatgtacccatattctctaagacagggtagcatttgtctttcaaactgcagggtttgaaatcagtttttgtgggtgattgcaattttttaatgaaatgcattagaacatctaagcacgtcacctacagttttgtgatggtgcatttttgcattgcagtatagatctgtgcatagatatatgcattaagtgtagcaaatcgtgatgtaaattttttactgctggtcatggtcaaaaagtaagatacgctaggaaattgagtcactaggagcatggatgtataaggcaggttttatacaaccatttagattcaacattaatggtagagtggcattttaccaaaaaaatgggtgtatttgatttgggtgctgtaaggcaatttgctaggacatgggataatcagattacacaaaatctaggcagtgaacaagtcttcatcctggcccaggaaatagcctattaaaaaatgctgtccaggccaggcacagtggctcacacctgtaatcccaggacttcgggaggctgaggctggaggattgcttgagttcaagaccagcctgagcaacacagtgaaaacccatctcaaaaaaaaaaaaaaaaaaccaaaaaaactgtccagctgtggactttcaggattcaggactgctggggatcaagcccaaggatgtttttcagagctctgtgatttaagatgctcgaaaagagtgtccaagaggagtaaaggtcatgacagaatttactcccaggacaatctaagttctgccacaagtacccgtggtgtctgttcccacaacaatggccctttcacaagctcttgcctcacaacccctgcagaagtccttcaacaaaactaataatagactagtgaaacctactcctcacatgggtaagagttgcagtgggcaggtgaccctcctccctgcccccatcctttgcttcctcaagctccctgccaacctctggatacatcaatgggaaggaaaccagggaagcatagacctatagtacaacaggggtgtagtgaccactggacctgatgaagcgaatctgcctgaaatttaatacgcctttttatttcccttctgtgttaaatcaaatgatctgttctgcactgagccaagcaagttacttttaaaactggtggcaccactcatttgggacttggagactgcttttatccagaacctgttaagagaacaggggatttaaatacaaaggaatatgaaggtggtgtgccttaaagacagtctaaaattaggttttagtttgttacattattttgaaatattaaacatgaaaatgttaaatcaggatgtgtgagttttaagatgttgaacactgtcctacatcagtgaggagggaggcaataaagtaatttcagagtaaaacagattgaggatgaaaccaagacagaagtgatgatttggctttttatgatttttgctgtggaaatggcagtcgtgtgacttttcacttgcagtttaaatgaaagggtgaagagaagcctacctgccctaatggctcagggctatatccacctcccggataaccctggcccttgggactccatcatctccttgaagtagcactgagaatccaagaagaggctccgctgctttttgcacatgttactgagttacatctcaggaagatttttaagcacgaggaaggaaaatacaggcctggccaagcagggtccccttttcggtatcatctttgttcctaataagcaatcaaggggggtgggtgtgttggctggtaaaggaactactaagattcagaagcttgtagtcttcattattttgttttacaggttaaaataaaccacttgactggg

SEQ ID NO: 164183 - DNA, 587 bp, Homo sapiens
  Payload ID: 12326
  Gene Symbol: PTCD3
  Gene Name: pentatricopeptide repeat domain 3
  ENST ID: ENST00000409783
  CDS Start-End: 25-587
acatgctctgcagagaaatcaaagatggcggttgtatctgctgttcgctggctgggcctccgcagcaggcttggccagccgctgacgggtcggcgggcgggtttgtgtgaacaggcacgcagctgcagattttattctggtagtgcaaccctctcaaaggttgaaggaactgatgtaacagggattgaagaagtagtaattccaaaaaagaaaacttgggataaagtagccgttcttcaggcacttgcatccacagtaaacagggataccacagctgtgccttatgtgtttcaagatgatccttaccttatgccagcatcatctttggaatctcgttcatttttactggcaaagaaatccggggagaatgtggccaagtttattattaattcataccccaaatattttcagaaggacatagctgaacctcatataccggaaccactgtgtctcttgaaacaacaaatagtctcttggatttattgtgttactatggtgaccaggagccctcaactgattaccattttcaacaaactggacagtcagaagcattggaagaggaaaatgatgagacatctaggaggaaa

SEQ ID NO: 164184 - DNA, 522 bp, Homo sapiens
  Payload ID: 12326
  Gene Symbol: PTCD3
  Gene Name: pentatricopeptide repeat domain 3
  ENST ID: ENST00000409326
  CDS Start-End: 26-262
aacatgctctgcagagaaatcaaagatggcggttgtatctgctgttcgctggctgggcctccgcagcaggcttggccagccgctgacgggtcggcgggcgggtttgtgtgaacaggcacgcagctgcagttcccctcaagaaagagaaaccactccatctgatactgcagaaacctttgtgctgccattcaatgccagtcctccgtttcctgattttattctggtagtgcaaccctctcaaaggttgaaggaactgatgtaacagggattgaagaagtagtaattccaaaaaagaaaacttgggataaagtagccgttcttcaggcacttgcatccacagtaaacagggataccacagctgtgccttatgtgtttcaagatgatccttaccttatgccagcatcatctttggaatctcgttcatttttactggcaaagaaatccggggagaatgtggccaagtttattattaattcataccccaaatattttcagaaggacatagctgaacctcatataccg

SEQ ID NO: 164185 - DNA, 532 bp, Homo sapiens
  Payload ID: 12326
  Gene Symbol: PTCD3
  Gene Name: pentatricopeptide repeat domain 3
  ENST ID: ENST00000418628
  CDS Start-End: 23-232
atgctctgcagagaaatcaaagatggcggttgtatctgctgttcgctggctgggcctccgcagcaggcttggccagccgctgacgggtcggcgggcgggtttgtgtgaacaggcacgcagctgcagattttattctggtagtgcaaccctctcaaaggttgaaggaactgatgtaacagggattgaagaagtagtaattccaaaaaagaaaacttgtgaccttgtgacataaccagcttcagatgagatctgcactatgttattggccagtacactgagagtagaatcacttgttcggtttgtggctatgaagagccctgatgaggattaacttgtggttcttatttttagggataaagtagccgttcttcaggcacttgcatccacagtaaacagggataccacagctgtgccttatgtgtttcaagatgatccttaccttatgccagcatcatctttggaatctcgttcatttttactggcaaagaaatccggggagaatgtggccaagtttattattaattcatacccc

SEQ ID NO: 164186 - DNA, 210 bp, Homo sapiens
  Payload ID: 12326
  Gene Symbol: PTCD3
  Gene Name: pentatricopeptide repeat domain 3
  ENST ID: ENST00000627371
  CDS Start-End: 1-210
atggcggttgtatctgctgttcgctggctgggcctccgcagcaggcttggccagccgctgacgggtcggcgggcgggtttgtgtgaacaggcacgcagctgcagattttattctggtagtgcaaccctctcaaaggttgaaggaactgatgtaacagggattgaagaagtagtaattccaaaaaagaaaacttgtgaccttgtgacataa

SEQ ID NO: 164187 - DNA, 1940 bp, Homo sapiens
  Payload ID: 12327
  Gene Symbol: PTX3
  Gene Name: pentraxin 3, long
  Uniprot ID: P26022
  ENST ID: ENST00000295927
  CDS Start-End: 146-1291
tcattcatccccattcaggctttcctcagcatttattaaggactctctgctccagcctctcactctcactctcctccgctcaaactcagctcacttgagagtctcctcccgccagctgtggaaagaactttgcgtctctccagcaatgcatctccttgcgattctgttttgtgctctctggtctgcagtgttggccgagaactcggatgattatgatctcatgtatgtgaatttggacaacgaaatagacaatggactccatcccactgaggaccccacgccgtgcgcctgcggtcaggagcactcggaatgggacaagctcttcatcatgctggagaactcgcagatgagagagcgcatgctgctgcaagccacggacgacgtcctgcggggcgagctgcagaggctgcgggaggagctgggccggctcgcggaaagcctggcgaggccgtgcgcgccgggggctcccgcagaggccaggctgaccagtgctctggacgagctgctgcaggcgacccgcgacgcgggccgcaggctggcgcgtatggagggcgcggaggcgcagcgcccagaggaggcggggcgcgccctggccgcggtgctagaggagctgcggcagacgcgagccgacctgcacgcggtgcagggctgggctgcccggagctggctgccggcaggttgtgaaacagctattttattcccaatgcgttccaagaagatttttggaagcgtgcatccagtgagaccaatgaggcttgagtcttttagtgcctgcatttgggtcaaagccacagatgtattaaacaaaaccatcctgttttcctatggcacaaagaggaatccatatgaaatccagctgtatctcagctaccaatccatagtgtttgtggtgggtggagaggagaacaaactggttgctgaagccatggtttccctgggaaggtggacccacctgtgcggcacctggaattcagaggaagggctcacatccttgtgggtaaatggtgaactggcggctaccactgttgagatggccacaggtcacattgttcctgagggaggaatcctgcagattggccaagaaaagaatggctgctgtgtgggtggtggctttgatgaaacattagccttctctgggagactcacaggcttcaatatctgggatagtgttcttagcaatgaagagataagagagaccggaggagcagagtcttgtcacatccgggggaatattgttgggtggggagtcacagagatccagccacatggaggagctcagtatgtttcataaatgttgtgaaactccacttgaagccaaagaaagaaactcacacttaaaacacatgccagttgggaaggtctgaaaactcagtgcataataggaacacttgagactaatgaaagagagagttgagaccaatctttatttgtactggccaaatactgaataaacagttgaaggaaagacattggaaaaagcttttgaggataatgttactagactttatgccatggtgctttcagtttaatgctgtgtctctgtcagataaactctcaaataattaaaaaggactgtattgttgaacagagggacaattgttttacttttctttggttaattttgttttggccagagatgaattttacattggaagaataacaaaataagatttgttgtccattgttcattgttattggtatgtaccttattacaaaaaaaagatgaaaacatatttatactacaaggtgacttaacaactataaatgtagtttatgtgttataatcgaatgtcacgtttttgagaagatagtcatataagttatattgcaaaagggatttgtattaatttaagactatttttgtaaagctctactgtaaataaaatattttataaaactagctcacgtcatttaattataaatttaagagatgttttgga

SEQ ID NO: 164188 - DNA, 1422 bp, Homo sapiens
  Payload ID: 12328
  Gene Symbol: PTX4
  Gene Name: pentraxin 4, long
  Uniprot ID: Q96A99
  ENST ID: ENST00000293922
  CDS Start-End: 1-1422
atggggagtggaaactgggaggtcacaggtccaccttgtggcagtcggtgtgaacggcctcccggactcccacgcggggtccacggacagttccggagtgctgtgggcctgtcgggcctgcgctggttccggagattccaggaggtgacctggacacacctgcagaacatcgccagcaactacaacgtgtcctacaacgttgacgtccggttccggagcctggcggaagagagccaggctgtggctcaggcagtcaaccggtcacaggcctcggtgcagggggagctggcgcagctcaaggcctgggtgaggaagctgcagcgccgaggccggaaagtagacacgcggctgcgggccttggacctcaccctgggcgagaggagccagcagcgggcccgggaaaggaaggcacacaaggcccagagggacgccctgcaggactcactggcacgcctggagggcctcgtccacagccagggcgccaggctggctgctctggaggggcggctgcccgtggcccaccctggcactgcagccctcgggccggccctggtcccaaccccaacccagcctgaggagctgggcccgacctccctgaagcttcagagggacaggcaggagctccgagctgcctctgagcacaggggccccccacaggactcctcggcccctctccaagggaggcgggagcctccagcctcaggcagccatcgggtactcagtgggactgccccaaaagaccctcggcagcaggcatggtccccccaggtgccaggagagatttgcggcgtgggccccaccctcgttttcccaaacgcctccaccaggaacgtggtcttcctcagccctggtttcgtcactgccctgcgagccctgtccttctgcagctgggtccgcacggcctccggccgcctgggcaccctcctgtcctacgccaccgaggacaatgacaacaagctggtgctgcacggccgagactccctgctgcccggatccatccacttcgtgatcggggacccggccttcagggagctgcccttgcagctgctgctggacggccagtggcaccacatctgtgtcatctggacgtccacccagggcaggtactggctccacgtggatcgcaggctggtggccaccggctcccgcttcagggagggctatgagatcccccccggagggtccctcgtgctgggccaggaacaagacagcgtggggggcggattcgacagctccgaggccttcgtggggagcatgtctggcttggctatctgggatcgggcgctggttcccggggaagttgcaaaccttgccatcgggaaagagttcccgacaggtgccatcctgacgctggccaatgctgcactagcaggcggatttgtgcagggggccaactgcacctgcctggaacgctgtccctga

SEQ ID NO: 164189 - DNA, 1516 bp, Homo sapiens
  Payload ID: 12328
  Gene Symbol: PTX4
  Gene Name: pentraxin 4, long
  Uniprot ID: Q96A99
  ENST ID: ENST00000447419
  CDS Start-End: 27-1463
ctgctggggccttgccgtctctccggatgggttgctcgtggaggaagaccttgtctttcttccttgtttttgtgcctatatatctacatggggcttcatcgcaggaagccgccccagtggggcccaggaaaccgtttttcgagaggctccgtaggctggaggaacagttccggagattccaggaggtgacctggacacacctgcagaacatcgccagcaactacaacgtgtcctacaacgttgacgtccggttccggagcctggcggaagagagccaggctgtggctcaggcagtcaaccggtcacaggcctcggtgcagggggagctggcgcagctcaaggcctgggtgaggaagctgcagcgccgaggccggaaagtagacacgcggctgcgggccttggacctcaccctgggcgagaggagccagcagcgggcccgggaaaggaaggcacacaaggcccagagggacgccctgcaggactcactggcacgcctggagggcctcgtccacagccagggcgccaggctggctgctctggaggggcggctgcccgtggcccaccctggcactgcagccctcgggccggccctggtcccaaccccaacccagcctgaggagctgggcccgacctccctgaagcttcagagggacaggcaggagctccgagctgcctctgagcacaggggccccccacaggactcctcggcccctctccaagggaggcgggagcctccagcctcaggcagccatcgggtactcagtgggactgccccaaaagaccctcggcagcaggcatggtccccccaggtgccaggagagatttgcggcgtgggccccaccctcgttttcccaaacgcctccaccaggaacgtggtcttcctcagccctggtttcgtcactgccctgcgagccctgtccttctgcagctgggtccgcacggcctccggccgcctgggcaccctcctgtcctacgccaccgaggacaatgacaacaagctggtgctgcacggccgagactccctgctgcccggatccatccacttcgtgatcggggacccggccttcagggagctgcccttgcagctgctgctggacggccagtggcaccacatctgtgtcatctggacgtccacccagggcaggtactggctccacgtggatcgcaggctggtggccaccggctcccgcttcagggagggctatgagatcccccccggagggtccctcgtgctgggccaggaacaagacagcgtggggggcggattcgacagctccgaggccttcgtggggagcatgtctggcttggctatctgggatcgggcgctggttcccggggaagttgcaaaccttgccatcgggaaagagttcccgacaggtgccatcctgacgctggccaatgctgcactagcaggcggatttgtgcagggggccaactgcacctgcctggaacgctgtccctgaggccgagccgcacgggggctgaggccagcaagggcagcatgcccccatccaca

SEQ ID NO: 164190 - DNA, 1117 bp, Homo sapiens
  Payload ID: 12328
  Gene Symbol: PTX4
  Gene Name: pentraxin 4, long
  ENST ID: ENST00000440447
  CDS Start-End: 73-651
cagacccacggagccaccttcaccctctcctgcggctggagggagactgctggggccttgccgtctctccggatgggttgctcgtggaggaagaccttgtctttcttccttgtttttgtgcctatatatctacatggggcttcatcgcaggaagccgccccagtggggcccaggaaaccgtttttcgagaggctccgtaggctggaggaacagttccggagattccaggaggtgacctggacacacctgcagaacatcgccagcaactacaacgtgtcctacaacgttgacgtccggttccggagcctggcggaagagagccaggctgtggctcaggcagtcaaccggtcacaggcctcggtgcagggggagctggcgcagctcaaggcctgggtgaggaagctgcagcgccgaggccggaaatttgcggcgtgggccccaccctcgttttcccaaacgcctccaccaggaacgtggtcttcctcagccctggtttcgtcactgccctgcgagccctgtccttctgcagctgggtccgcacggcctccggccgcctgggcaccctcctgtcctacgccaccgaggacaatgacaacaagctggtgctgcacggccgagactccctgctgcccggatccatccacttcgtgatcggggacccggccttcagggagctgcccttgcagctgctgctggacggccagtggcaccacatctgtgtcatctggacgtccacccagggcaggtactggctccacgtggatcgcaggctggtggccaccggctcccgcttcagggagggctatgagatcccccccggagggtccctcgtgctgggccaggaacaagacagcgtggggggcggattcgacagctccgaggccttcgtggggagcatgtctggcttggctatctgggatcgggcgctggttcccggggaagttgcaaaccttgccatcgggaaagagttcccgacaggtgccatcctgacgctggccaatgctgcactagcaggcggatttgtgcagggggccaactgcacctgcctggaacgctgtccctgaggccgagccgcacgggggctgaggccagcaagggcagcatgcccccatccaca

SEQ ID NO: 164191 - DNA, 1748 bp, Homo sapiens
  Payload ID: 12329
  Gene Symbol: PGA3
  Gene Name: pepsinogen 3, group I (pepsinogen A)
  Uniprot ID: P0DJD8
  ENST ID: ENST00000325558
  CDS Start-End: 186-1352
tcagaatgtggcttagggcagccacaatcttatcaggagcttctctgtttgggatcaggggaaccggtgactttcagaggccgataaggcgggacccaacttgtatataaggggcagctcatgctgctgctctgcaccttcctcccgtcttgccttctccctcgagttgggacccgggaagaaccatgaagtggctgctgctgctgggtctggtggcactctctgagtgcatcatgtacaaggtccccctcatcagaaagaagtccttgaggcgcaccctgtccgagcgtggcctgctgaaggacttcctgaagaagcacaacctcaacccagccagaaagtacttcccccagtggaaggctcccaccctggtagatgaacagcccctggagaactacctggatatggagtacttcggcactatcggcatcggaactcctgcccaggatttcaccgtcgtctttgacaccggctcctccaacctgtgggtgccctcagtctactgctccagtcttgcctgcaccaaccacaaccgcttcaaccctgaggattcttccacctaccagtccaccagcgagacagtctccatcacctacggcaccggcagcatgacaggcatcctcggatacgacactgtccaggttggaggcatctctgacaccaatcagatcttcggcctgagcgagacggaacctggctccttcctgtattatgctcccttcgatggcatcctggggctggcctaccccagcatttcctcctccggggccacacccgtctttgacaacatctggaaccagggcctggtttctcaggacctcttctctgtctacctcagcgccgatgaccagagtggcagcgtggtgatctttggtggcattgactcttcttactacactggaagtctgaactgggtgcctgttaccgtcgagggttactggcagatcaccgtggacagcatcaccatgaacggagaggccatcgcctgcgctgagggctgccaggccattgttgacaccggcacctctctgctgaccggcccaaccagccccattgccaacatccagagcgacatcggagccagcgagaactcagatggcgacatggtggtcagctgctcagccatcagcagcctgcccgacatcgtcttcaccatcaatggagtccagtaccccgtgccacccagtgcctacatcctgcagagcgaggggagctgcatcagtggcttccagggcatgaacctccccaccgaatctggagagctttggatcctgggtgatgtcttcatccgccagtactttaccgtcttcgacagggcaaacaaccaggtcggcctggcccccgtggcttaagcctaagtctcttcagccacctcccaggaagatctggcctctgtcctgtgcccactttagatgtatctaattctcctgactgttcttcccaggggagtgtggaggtcttggccctgttccctgtcctaccaataacgtagaataaaaacataacccactgaaacaggttttgtggagctgcttctctttgctggtctttttccttcacattactggggttagaacaccagggcagggatgaaaatgaccacatccatttggatggcacccaacatagtgaccccagcagctgacacttcatgatggagccaagaagacagagaggcttcgggggttgtgctggaagcatcataaaaagacctgggggtcaaaatactgggctaattgtcttctcat

SEQ ID NO: 164192 - DNA, 867 bp, Homo sapiens
  Payload ID: 12329
  Gene Symbol: PGA3
  Gene Name: pepsinogen 3, group I (pepsinogen A)
  ENST ID: ENST00000538258
  CDS Start-End: 344-730
gtttttgttccctgcctcatgcctgactgatcatcttgcccttctgccaacataacttatcttgccagctaggcagggagctccctgcagcctggaactgtgaggctgtcttgtttcacttggcatttcccatgcctggcagagagtaggcacttgggaaatatttgttgggcaaatgaatgcgggacgaatgagtgcgtgaacgagaggaacagaaatttcacgcattggccaatggatgggtggggaagaaatgtctgggctcacctcctagttcctccttggagagaagtacccctgagagctcagggagcttaacttgcttcttgccctcagcatcaccatgaacggagaggccatcgcctgcgctgagggctgccaggccattgttgacaccggcacctctctgctgaccggcccaaccagccccattgccaacatccagagcgacatcggagccagcgagaactcagatggcgacatggtggtcagctgctcagccatcagcagcctgcccgacatcgtcttcaccatcaatggagtccagtaccccgtgccacccagtgcctacatcctgcagagcgaggggagctgcatcagtggcttccagggcatgaacctccccaccgaatctggagagctttggatcctgggtgatgtcttcatccgccagtactttaccgtcttcgacagggcaaacaaccaggtcggcctggcccccgtggcttaagcctaagtctcttcagccacctcccaggaagatctggcctctgtcctgtgcccactttagatgtatctaattctcctgactgttcttcccaggggagtgtggaggtcttggccctgttccctgtcctaccaataacg

SEQ ID NO: 164193 - DNA, 968 bp, Homo sapiens
  Payload ID: 12329
  Gene Symbol: PGA3
  Gene Name: pepsinogen 3, group I (pepsinogen A)
  ENST ID: ENST00000543125
  CDS Start-End: 101-805
tcaacctaaaaggcctgtgttcttccaaacgtagttccaccactcccccgctgtatgaccttgggcaggtggcctcacctccctcaggctcagtgtcctcatggtaagtggaaataacagtgacagtgcccactgcataggcactggcctaagaggaaaagaaaccacattagtcacaccgcaggacagccctagaaagtgcccaatcaagggtagccctgaggaggcaacagcagatggtcacacaaatggacgaacaaaaaaattcatgtcttctcccctcactttccacagcgatgaccagagtggcagcgtggtgatctttggtggcattgactcttcttactacactggaagtctgaactgggtgcctgttaccgtcgagggttactggcagatcaccgtggacagcatcaccatgaacggagaggccatcgcctgcgctgagggctgccaggccattgttgacaccggcacctctctgctgaccggcccaaccagccccattgccaacatccagagcgacatcggagccagcgagaactcagatggcgacatggtggtcagctgctcagccatcagcagcctgcccgacatcgtcttcaccatcaatggagtccagtaccccgtgccacccagtgcctacatcctgcagagcgaggggagctgcatcagtggcttccagggcatgaacctccccaccgaatctggagagctttggatcctgggtgatgtcttcatccgccagtactttaccgtcttcgacagggcaaacaaccaggtcggcctggcccccgtggcttaagcctaagtctcttcagccacctcccaggaagatctggcctctgtcctgtgcccactttagatgtatctaattctcctgactgttcttcccaggggagtgtggaggtcttggccctgttccctgtcctaccaataacgtagaataaaaacataacccactgaaa

SEQ ID NO: 164194 - DNA, 608 bp, Homo sapiens
  Payload ID: 12329
  Gene Symbol: PGA3
  Gene Name: pepsinogen 3, group I (pepsinogen A)
  ENST ID: ENST00000543349
  CDS Start-End: 55-608
cagtggaaggctcccaccctggtagatgaacagcccctggagaactacctggatatggagtacttcggcactatcggcatcggaactcctgcccaggatttcaccgtcgtctttgacaccggctcctccaacctgtgggtgccctcagtctactgctccagtcttgcctgcaccaaccacaaccgcttcaaccctgaggattcttccacctaccagtccaccagcgagacagtctccatcacctacggcaccggcagcatgacaggcatcctcggatacgacactgtccaggttggaggcatctctgacaccaatcagatcttcggcctgagcgagacggaacctggctccttcctgtattatgctcccttcgatggcatcctggggctggcctaccccagcatttcctcctccggggccacacccgtctttgacaacatctggaaccagggcctggtttctcaggacctcttctctgtctacctcagcgccgatgaccagagtggcagcgtggtgatctttggtggcattgactcttcttactacactggaagtctgaactgggtgcctgttaccgtcgagggttactggcagatcaccgtggacag

SEQ ID NO: 164195 - DNA, 1627 bp, Homo sapiens
  Payload ID: 12329
  Gene Symbol: PGA3
  Gene Name: pepsinogen 3, group I (pepsinogen A)
  ENST ID: ENST00000543505
  CDS Start-End: 831-1627
acagcaagcagaccagtgtggcgggaacagagccggcagggggaaaatgctgccactaacaagaaaaatactggttgattggcggaggcgggtggatcacttgaggtcaggagttcgagaccagcccggcaacatggtgaaaccccgtctctactaaaaatacaaaaatttgccgggcatgatggcacacacctgtaatctcagctacttgggaggttgaggcaggagaatcactggaacccaggaggaggaggctgcagtgagccgaggtcgcgccactgcactcccgcctggacaacagagtgagacttgtctcaaaaaaaaagaataaaaattctggcaatgccctttctcaaaacctgctgtacacatctagacgtagaaataagaaaactggacaggtttccatctttaagtggcttgcttagcttctgataaacaatttaaggcacaagcacttaagctgtaacttgcccggtgctagaaggttccaccgccatcctctgagaacatgcgctgtacggatgggaagactgtgacagacaagacaatggctaaagagggaacagcagattgttaggtgcttgtggtgcttaacagagagcagagggtaaattgggggagcaatcagggaagacttcaaggaggaagggacgccagggctgggatttgaaggatgaagacagtggctgggaagagaaagataagaactgtgaggaatgaaggaaaagatggagaggcagactgaggagatgacccagagacagcccctagggaggccctgacagagagaccccgttccgtgaactgccctgtcctcgcctggacagatggagtacttcggcactatcggcatcggaactcctgcccaggatttcaccgtcgtctttgacaccggctcctccaacctgtgggtgccctcagtctactgctccagtcttgcctgcaccaaccacaaccgcttcaaccctgaggattcttccacctaccagtccaccagcgagacagtctccatcacctacggcaccggcagcatgacaggcatcctcggatacgacactgtccaggttggaggcatctctgacaccaatcagatcttcggcctgagcgagacggaacctggctccttcctgtattatgctcccttcgatggcatcctggggctggcctaccccagcatttcctcctccggggccacacccgtctttgacaacatctggaaccagggcctggtttctcaggacctcttctctgtctacctcagcgccgatgaccagagtggcagcgtggtgatctttggtggcattgactcttcttactacactggaagtctgaactgggtgcctgttaccgtcgagggttactggcagatcaccgtggacagcatcaccatgaacggagaggccatcgcctgcgctgagggctgccaggccattgttgacaccggcacctctctgctgaccggcccaaccagccccattgccaacatccagagcgacatcggagccagcgagaactcagatggcgacatggtggtcagctgctcagccatcagcagcctgcccgacatcgtcttcaccatcaatggagtccagtaccccgtgccacccagtgcctacatcctgca

SEQ ID NO: 164196 - DNA, 1748 bp, Homo sapiens
  Payload ID: 12330
  Gene Symbol: PGA4
  Gene Name: pepsinogen 4, group I (pepsinogen A)
  Uniprot ID: P0DJD7
  ENST ID: ENST00000378149
  CDS Start-End: 186-1352
tcagaatgtggctcagggcagccacaatcttatcaggagcttctctgtttgggatcaggggaaccggtgactttcagaggccgataaggcgggacccaacttgtatataaggggcagctcatgctgctgctctgcaccttcctcccatcttgccttctccctcgagttgggacccgggaagaaccatgaagtggctgctgctgctgggtctggtggcgctctctgagtgcatcatgtacaaggtccccctcatcagaaagaagtccttgaggcgcaccctgtccgagcgtggcctgctgaaggacttcctgaagaagcacaacctcaacccagccagaaagtacttcccccagtgggaggctcccaccctggtagatgaacagcccctggagaactacctggatatggagtacttcggcactatcggcatcggaactcctgcccaggatttcaccgtcgtctttgacaccggctcctccaacctgtgggtgccctcagtctactgctccagtcttgcctgcaccaaccacaaccgcttcaaccctgaggattcttccacctaccagtccaccagcgagacagtctccatcacctacggcaccggcagcatgacaggcatcctcggatacgacactgtccaggttggaggcatctctgacaccaatcagatcttcggcctgagcgagacggaacctggctccttcctgtattatgctcccttcgatggcatcctggggctggcctaccccagcatttcctcctccggggccacacccgtctttgacaacatctggaaccagggcctggtttctcaggacctcttctctgtctacctcagcgccgatgaccagagtggcagcgtggtgatctttggtggcattgactcttcttactacactggaagtctgaactgggtgcctgttaccgtcgagggttactggcagatcaccgtggacagcatcaccatgaacggagaggccatcgcctgcgctgagggctgccaggccattgttgacaccggcacctctctgctgaccggcccaaccagccccattgccaacatccagagcgacatcggagccagcgagaactcagatggcgacatggtggtcagctgctcagccatcagcagcctgcccgacatcgtcttcaccatcaatggagtccagtaccccgtgccacccagtgcctacatcctgcagagcgaggggagctgcatcagtggcttccagggcatgaacctccccaccgaatctggagagctttggatcctgggtgatgtcttcatccgccagtactttaccgtcttcgacagggcaaacaaccaggtcggcctggcccccgtggcttaagcctaagtctcttcagccacctcccaggaagatctggcctctgtcctgtgcccactttagatgtatctaattctcctgactgttcttcccaggggagtgtggaggtcttggccctgttccctgtcctaccaataacgtagaataaaaacataacccactgaaacaggttttgtggagctgcttctctttgctggtctttttccttcacattactggggttagaacgccagggcagggatgaaaatgaccacatccatttggatggcacccaacatagtgaccccagcagctgacacttcatgatggagccaagaagacagagaggcttcgggggttgtgctggaagcatcataaaaagacctgggggtcaaaatactgggctaattgtcttctcat

SEQ ID NO: 164197 - DNA, 840 bp, Homo sapiens
  Payload ID: 12330
  Gene Symbol: PGA4
  Gene Name: pepsinogen 4, group I (pepsinogen A)
  ENST ID: ENST00000537932
  CDS Start-End: 101-805
tcaacctaaaaggcctgtgttcttccaaacgtagttccaccactcccccgctgtatgaccttgggcaggtggcctcacctccctcaggctcagtgtcctcatggtaagtggaaataacagtgacagtgcccactgcataggcactggcctaagaggaaaagaaaccacattagtcacaccgcaggacagccctagaaagtgcccaatcaagggtagccctgaggaggcaacagcagatggtcacacaaatggacgaacaaaaaaattcatgtcttctcccctcactttccacagcgatgaccagagtggcagcgtggtgatctttggtggcattgactcttcttactacactggaagtctgaactgggtgcctgttaccgtcgagggttactggcagatcaccgtggacagcatcaccatgaacggagaggccatcgcctgcgctgagggctgccaggccattgttgacaccggcacctctctgctgaccggcccaaccagccccattgccaacatccagagcgacatcggagccagcgagaactcagatggcgacatggtggtcagctgctcagccatcagcagcctgcccgacatcgtcttcaccatcaatggagtccagtaccccgtgccacccagtgcctacatcctgcagagcgaggggagctgcatcagtggcttccagggcatgaacctccccaccgaatctggagagctttggatcctgggtgatgtcttcatccgccagtactttaccgtcttcgacagggcaaacaaccaggtcggcctggcccccgtggcttaagcctaagtctcttcagccacctcccaggaagatct

SEQ ID NO: 164198 - DNA, 867 bp, Homo sapiens; identical to SEQ ID NO: 164192
  Payload ID: 12330
  Gene Symbol: PGA4
  Gene Name: pepsinogen 4, group I (pepsinogen A)
  ENST ID: ENST00000544899
  CDS Start-End: 344-730

SEQ ID NO: 164199 - DNA, 1519 bp, Homo sapiens
  Payload ID: 12331
  Gene Symbol: PGA5
  Gene Name: pepsinogen 5, group I (pepsinogen A)
  Uniprot ID: P0DJD9
  ENST ID: ENST00000312403
  CDS Start-End: 186-1352
tcagaatgtggctcagggcagccacaatcttatcaggagcttctctgtttgggatcaggggaaccggtgactttcagaggccgataaggcgggacccaacttgtatataaggggcagctcatgctgctgctctgcaccttcctcccatcttgccttctccctcgagttgggacccgggaagaaccatgaagtggctgctgctgctgggtctggtggcgctctctgagtgcatcatgtacaaggtccccctcatcagaaagaagtccttgaggcgcaccctgtccgagcgtggcctgctgaaggacttcctgaagaagcacaacctcaacccagccagaaagtacttcccccagtgggaggctcccaccctggtagatgaacagcccctggagaactacctggatatggagtacttcggcactatcggcatcggaactcctgcccaggatttcaccgtcgtctttgacaccggctcctccaacctgtgggtgccctcagtctactgctccagtcttgcctgcaccaaccacaaccgcttcaaccctgaggattcttccacctaccagtccaccagcgagacagtctccatcacctacggcaccggcagcatgacaggcatcctcggatacgacactgtccaggttggaggcatctctgacaccaatcagatcttcggcctgagcgagacggaacctggctccttcctgtattatgctcccttcgatggcatcctggggctggcctaccccagcatttcctcctccggggccacacccgtctttgacaacatctggaaccagggcctggtttctcaggacctcttctctgtctacctcagcgccgatgacaagagtggcagcgtggtgatctttggtggcattgactcttcttactacactggaagtctgaactgggtgcctgttaccgtcgagggttactggcagatcaccgtggacagcatcaccatgaacggagagaccatcgcctgtgctgagggctgccaggccattgttgacaccggcacctctctgctgaccggcccaaccagccccattgccaacatccagagcgacatcggagccagcgagaactcagatggcgacatggtggtcagctgctcagccatcagcagcctgcccgacatcgtcttcaccatcaatggagtccagtaccccgtgccacccagtgcctacatcctgcagagcgaggggagctgcatcagtggcttccagggcatgaacgtccccaccgaatctggagagctttggatcctgggtgatgtcttcatccgccagtactttaccgtcttcgacagggcaaacaaccaggtcggcctggcccctgtggcttaagcctaagtctcttcagccacctcccaggaagatctggcctccgtcctatgcccactttagatgtatctaattctcctgactgttcttcccaggggagtgtgaaggtcttggccctgttccctgtcctaccaataacgtagaataaaaacataacccactgaaacagg

SEQ ID NO: 164200 - DNA, 971 bp, Homo sapiens
  Payload ID: 12331
  Gene Symbol: PGA5
  Gene Name: pepsinogen 5, group I (pepsinogen A)
  ENST ID: ENST00000451616
  CDS Start-End: 104-808
cattcaaactataaggcctgtgttcttccaaacgtagttccaccactcccccgctgtgtgaccttgggcaggtggcctcacctccctcaggctcagtgtcctcatggtaagtggaaacaacagtgacggtgcccactgcatgggccctggcctaagaggaaaagaaaccacattggtcacaccccaggacagccctggaaagtgcccaatcaacggtcgctctgaggaggcaacagcagatggtcacacaaatggacgaacaaaaaaattcatgtcttctcccctcactttccacagcgatgacaagagtggcagcgtggtgatctttggtggcattgactcttcttactacactggaagtctgaactgggtgcctgttaccgtcgagggttactggcagatcaccgtggacagcatcaccatgaacggagagaccatcgcctgtgctgagggctgccaggccattgttgacaccggcacctctctgctgaccggcccaaccagccccattgccaacatccagagcgacatcggagccagcgagaactcagatggcgacatggtggtcagctgctcagccatcagcagcctgcccgacatcgtcttcaccatcaatggagtccagtaccccgtgccacccagtgcctacatcctgcagagcgaggggagctgcatcagtggcttccagggcatgaacgtccccaccgaatctggagagctttggatcctgggtgatgtcttcatccgccagtactttaccgtcttcgacagggcaaacaaccaggtcggcctggcccctgtggcttaagcctaagtctcttcagccacctcccaggaagatctggcctccgtcctatgcccactttagatgtatctaattctcctgactgttcttcccaggggagtgtgaaggtcttggccctgttccctgtcctaccaataacgtagaataaaaacataacccactgaaa

SEQ ID NO: 164201 - DNA, 867 bp, Homo sapiens
  Payload ID: 12331
  Gene Symbol: PGA5
  Gene Name: pepsinogen 5, group I (pepsinogen A)
  ENST ID: ENST00000541528
  CDS Start-End: 344-730
gtttttgttccctgcctcatgcctgactgatcatcttgcccttctgccaacataacttatcttgccagctaggccgggagctccctgcagcctggaactgtgaggctgtcttgtttcgcttggcgtttcccatgcctggcagagggtaggcacttgggaaatatttgtagggtaaatgaatgcgggatgaatgagtgcgtgaacgagaggaacagaaatttcacgcattggccaatggatgggtggggaaggaatgtctgggctcacctcctggttcctccttggagagatgaacccctgagggctcagggagcttaacttgcttcttaccctcagcatcaccatgaacggagagaccatcgcctgtgctgagggctgccaggccattgttgacaccggcacctctctgctgaccggcccaaccagccccattgccaacatccagagcgacatcggagccagcgagaactcagatggcgacatggtggtcagctgctcagccatcagcagcctgcccgacatcgtcttcaccatcaatggagtccagtaccccgtgccacccagtgcctacatcctgcagagcgaggggagctgcatcagtggcttccagggcatgaacgtccccaccgaatctggagagctttggatcctgggtgatgtcttcatccgccagtactttaccgtcttcgacagggcaaacaaccaggtcggcctggcccctgtggcttaagcctaagtctcttcagccacctcccaggaagatctggcctccgtcctatgcccactttagatgtatctaattctcctgactgttcttcccaggggagtgtgaaggtcttggccctgttccctgtcctaccaataacg

SEQ ID NO: 164202 - DNA, 2174 bp, Homo sapiens
  Payload ID: 12332
  Gene Symbol: PMPCA
  Gene Name: peptidase (mitochondrial processing) alpha
  Uniprot ID: Q10713
  ENST ID: ENST00000371717
  CDS Start-End: 100-1677
ccgaaagcgcgtgcctgaacgccttgggccgtcggcgagggggaggggaagccgtgggcggaagcggaagtgacgactgaagcggggcggagacgcaagatggcggctgtggtgctggcggcgacgcggttgctgcggggctcgggttcttggggctgttcgcggctgaggtttggacctcctgcgtacagacggtttagtagtggtggtgcctatcccaacatccccctctcttctcccttacctggagtacccaagcctgtttttgctacagttgatggacaggaaaagtttgaaaccaaagtaaccacattggataatgggcttcgcgtggcatctcagaataagtttggacagttttgtacagtaggaattcttatcaattcaggatcgagatatgaagcgaaataccttagtggaattgctcactttttggaaaaattggcattttcgtctactgctcgatttgacagcaaagatgaaattctgcttacgttggaaaagcatgggggtatctgtgactgccagacatcaagagacaccaccatgtatgctgtgtctgctgatagcaaaggcttggacacggtggttgccttactggctgatgtggttctgcagccccggctaacagatgaagaagtcgagatgacgcggatggcggtccagtttgagctggaggacctgaacctgcggcctgacccagagccacttctcaccgagatgattcatgaagcggcttacagggagaacacagttggcctccaccgtttctgccccacagaaaacgtagcaaagatcaaccgagaggtgctgcattcctacctgaggaactactacactcccgaccgcatggtgctggccggcgtgggcgtggagcacgagcatctggtggactgtgcccggaagtacctcctgggggtccagccggcctgggggagcgcagaggccgtggatattgacagatctgtggcccagtacactggggggattgccaagctagaaagagacatgtccaatgtcagcctgggcccgacccccatccccgagctcacgcacatcatggttggactggagagctgctccttcctggaggaggacttcatcccctttgcagtgttgaacatgatgatgggcggaggtggctccttctcggctggtgggcccggcaagggcatgttctccaggctctacctcaacgtgctcaacaggcaccactggatgtataacgcgacctcctaccaccacagctacgaggacactggcctcctttgcatccatgccagcgccgacccaagacaggttcgagaaatggtagaaatcatcacaaaggagtttattttaatgggcggaaccgtggacacggtggagctggaacgagccaagacgcagctgacatcaatgctcatgatgaacctggaatccaggcctgtgatcttcgaggatgtggggaggcaggtgctggccactcgctccagaaagctgccgcacgagctgtgcacgctcatccgcaacgtgaagccggaagatgtgaagagagtcgcttctaagatgctccgagggaagccggcagtggccgccctgggtgacctgactgacctgcccacgtatgagcacatccagaccgccctgtcgagtaaggacgggcgcctgcccaggacgtaccggctcttccggtagaaccgctccccggcctgacagacccagggagctgcagctggagcccgttcccgtgcgtgttagtttggacacgaatttagtctaaaaagctgtctggttgtataaacggtgcaaacaatgtcgccacagcacccacgcggtttgcattcttttggaactcaatgtgccgatcagtggagtcagtatcgagcctgaccaccgcaagccaggaagcaggtgaagtgcccagcgctggagtgcagcgtgccacgaggagggcggtcggtgcttccctcctcgggctgtgggcacatggggccccgcaggttccttggaggagccctgagctgggaggcagcaaaggctgacctatcaaagcctcccggaggccaccgtgctgggtaccaggactcacctctgacaagcaggagaaggtaagggcccggtcagctccaaggagcgcgctccacgcgcgtgcacacagcttccctggtaataaagagctggcatctttctta

SEQ ID NO: 164203 - DNA, 2316 bp, Homo sapiens
  Payload ID: 12332
  Gene Symbol: PMPCA
  Gene Name: peptidase (mitochondrial processing) alpha
  ENST ID: ENST00000444897
  CDS Start-End: 1-816
tacactggggggattgccaagctagaaagagacatgtccaatgtcagcctgggcccgacccccatccccgagctcacgcacatcatggttggactggagagctgctccttcctggaggaggacttcatcccctttgcagtgttgaacatgatgatgggcggaggtggctccttctcggctggtgggcccggcaagggcatgttctccaggctctacctcaacgtgctcaacaggcaccactggatgtataacgcgacctcctaccaccacagctacgaggacactggcctcctttgcatccatgccagcgccgacccaagacaggttcgagaaatggtagaaatcatcacaaaggagtttattttaatgggcggaaccgtggacacggtggagctggaacgagccaagacgcagctgacatcaatgctcatgatgaacctggaatccaggcctgtgatcttcgaggatgtggggaggcaggtgctggccactcgctccagaaagctgccgcacgagctgtgcacgctcatccgtgagtaccgcaggggtagtgaggggctgccgcaggcctcggccaggctcagaggaggccgtctcgccctcccgcaggccgtggtgggcctgtggtatgtccatcacacccagaatctggggccttcaccagttgtcctcagcaggggcggccaagggcagggtcgtggggtcgcagacctggtctcacttcccggccccaccatgcacctgctgcctccttggcaggtgaccccaccctctgcacccctgggaggggctgtcactactgcccagagttgttaaagagcactcaagttagtaggcgagaagggctcagtagaggactgctacattgtacgtggagtagcagtggctcggaatgccgctgtaccgttgctggctctcgggcaggagtctcagccccaggtttccggggcccccatgagtgaccttaggaggtctgaatttcctgaaactgccaagttgtatgtgcatcggactcttctgggggacaggcttaaaacctggcaaggctgcctattacgttggggtggctcgggcttatggtgtcacctgtgggcatctcctttccaggcctggagtcccgggcacttgccctgtcccgtgtgggccctcgtccttccctcaggagcccccgcttaaatcctcaagcgagtgtccagcctctctcgggcctcgttttctgtagaaaacagacccacctggaccctatcactcctgtcctggggttcctgggtgcagccctttggccttctctcaccccacccttctgtccatgcggccctcgggggctgggggttttttctgcaggccgtcctaaagtgagttcatcagacacggagctcgctcttctgtaagtgtaactcttcttgggtggctttgtcctatatttttaagtcattgccatgtccccatttactgagaactcaacgtctgtcacttgtggactcacccttggctacacccagtggctgcctttgggcccaggtgcccccatcagcagcacagcgtgagtgagtggtacagaccagccgccccctccgtgtgtttactgatgcagcctcagcgtgggggccgtggcgcgctcgtgtgacacgcgtttgccctctgcactaggcaacgtgaagccggaagatgtgaagagagtcgcttctaagatgctccgagggaagccggcagtggccgccctgggtgacctgactgacctgcccacgtatgagcacatccagaccgccctgtcgagtaaggacgggcgcctgcccaggacgtaccggctcttccggtagaaccgctccccggcctgacagacccagggagctgcagctggagcccgttcccgtgcgtgttagtttggacacgaatttagtctaaaaagctgtctggttgtataaacggtgcaaacaatgtcgccacagcacccacgcggtttgcattcttttggaactcaatgtgccgatcagtggagtcagtatcgagcctgaccaccgcaagccaggaagcaggtgaagtgcccagcgctggagtgcagcgtgccacgaggagggcggtcggtgcttccctcctcgggctgtgggcacatggggccccgcaggttccttggaggagccctgagctgggaggcagcaaaggctgacctatcaaagcctcccggaggccaccgtgctgggtaccaggactcacctctgacaagcaggagaaggtaagggcccggtcagctccaaggagcgcgctccacgcgcgtgcacacagcttccctggtaataaagagctggcatctttctt

SEQ ID NO: 164204 - DNA, 1987 bp, Homo sapiens
  Payload ID: 12332
  Gene Symbol: PMPCA
  Gene Name: peptidase (mitochondrial processing) alpha
  Uniprot ID: Q10713
  ENST ID: ENST00000399219
  CDS Start-End: 307-1491
gacgcaagatggcggctgtggtgctggcggcgacgcggttgctgcggggctcgggttcttggggctgttcgcggctgaggtttggacctcctgcgtacagacggtttagtagtggtggtgcctatcccaacatccccctctcttctcccttacctggagtacccaagcctgtttttgctacagttgatggacaggaaaagtttgaaaccaaagtaaccacattggataatgggcttcgcgtggcatctcagaataagtttggacagttttgtacagtaggaattcttatcaattcaggatcgagatatgaagcgaaataccttagtggaattgctcactttttggaaaaattggcattttcgtctactgctcgatttgacagcaaagatgaaattctgcttacgttggaaaagcatgggggtatctgtgactgccagacatcaagatgaagaagtcgagatgacgcggatggcggtccagtttgagctggaggacctgaacctgcggcctgacccagagccacttctcaccgagatgattcatgaagcggcttacagggagaacacagttggcctccaccgtttctgccccacagaaaacgtagcaaagatcaaccgagaggtgctgcattcctacctgaggaactactacactcccgaccgcatggtgctggccggcgtgggcgtggagcacgagcatctggtggactgtgcccggaagtacctcctgggggtccagccggcctgggggagcgcagaggccgtggatattgacagatctgtggcccagtacactggggggattgccaagctagaaagagacatgtccaatgtcagcctgggcccgacccccatccccgagctcacgcacatcatggttggactggagagctgctccttcctggaggaggacttcatcccctttgcagtgttgaacatgatgatgggcggaggtggctccttctcggctggtgggcccggcaagggcatgttctccaggctctacctcaacgtgctcaacaggcaccactggatgtataacgcgacctcctaccaccacagctacgaggacactggcctcctttgcatccatgccagcgccgacccaagacaggttcgagaaatggtagaaatcatcacaaaggagtttattttaatgggcggaaccgtggacacggtggagctggaacgagccaagacgcagctgacatcaatgctcatgatgaacctggaatccaggcctgtgatcttcgaggatgtggggaggcaggtgctggccactcgctccagaaagctgccgcacgagctgtgcacgctcatccgcaacgtgaagccggaagatgtgaagagagtcgcttctaagatgctccgagggaagccggcagtggccgccctgggtgacctgactgacctgcccacgtatgagcacatccagaccgccctgtcgagtaaggacgggcgcctgcccaggacgtaccggctcttccggtagaaccgctccccggcctgacagacccagggagctgcagctggagcccgttcccgtgcgtgttagtttggacacgaatttagtctaaaaagctgtctggttgtataaacggtgcaaacaatgtcgccacagcacccacgcggtttgcattcttttggaactcaatgtgccgatcagtggagtcagtatcgagcctgaccaccgcaagccaggaagcaggtgaagtgcccagcgctggagtgcagcgtgccacgaggagggcggtcggtgcttccctcctcgggctgtgggcacatggggccccgcaggttccttggaggagccctgagctgggaggcagcaaaggctgacctatcaaagcctcccggaggccaccgtgctgggtaccaggactcacctctgacaagcaggagaaggtaagggcccggtcagctccaaggagcgcgctccacgcgcgtgcacacagcttccctggtaataaagagctggcatctttctt

SEQ ID NO: 164205 - DNA, 2472 bp, Homo sapiens
  Payload ID: 12333
  Gene Symbol: PMPCB
  Gene Name: peptidase (mitochondrial processing) beta
  Uniprot ID: O75439
  ENST ID: ENST00000249269
  CDS Start-End: 39-1508
aagcacatccttcatcctctaccttccttctagcagaaatggcggctgcggcggctcgagtggtgttgtcatccgcggcgcggcggcggctctggggtttcagcgagagtcttctaatccgaggcgctgcgggacggtcattatattttggagagaacagattaagaagtacacaggctgctacccaagttgttctgaatgttcctgaaacaagagtaacatgtttagaaagtggactcagagtagcttcggaagactctgggctctcaacatgcacagttggactctggattgatgctggaagtagatacgaaaatgagaagaacaatggaacagcacactttctggagcatatggctttcaagggcaccaagaagagatcccagttagatctggaacttgagattgaaaatatgggtgctcatctcaatgcctatacctccagagagcagactgtatactatgccaaagcattctctaaagacttgccaagagctgtagaaattcttgctgatataatacaaaacagcacattgggagaagcagagattgaacgtgagcgtggagtaatccttagagagatgcaggaagttgaaaccaatttacaagaagttgtttttgattatcttcatgccacagcttatcaaaatactgcacttggacggacaattttgggaccaactgaaaatatcaaatctataagtcgtaaggacttagtggattatataaccacacattataaggggccaagaatagtgcttgctgctgctggaggtgtttcccatgatgaattgcttgacttagcaaagtttcatttcggtgactctttatgcacacacaaaggagaaataccagctctgcctccctgcaaattcacaggaagtgagattcgtgtgagggatgacaagatgcctttggcgcaccttgcaatagctgttgaagctgttggttgggcacatccagatacaatctgtctcatggttgcaaacacgctgattggcaactgggatcgctcttttgggggaggaatgaatttatctagcaagctggcccagctcacttgtcatggcaatctttgccatagctttcagtctttcaacacttcctacacagatacaggattatggggactgtatatggtttgtgaatcatccactgttgcagacatgctacatgttgttcaaaaagaatggatgcgactctgtacaagtgtcacagaaagtgaggttgcacgagccagaaatcttctgaaaacaaacatgttgttgcagcttgatggttcaactccaatttgtgaagatattggtaggcaaatgttatgctataatagaaggattcccatccctgagcttgaagcaagaattgatgctgtgaatgctgagacaattcgagaagtatgtaccaaatacatttataataggagtccagctattgctgctgttggtcccattaagcaactaccagattttaaacagatacgcagtaacatgtgttggcttcgtgattaaaatgctcctaatcaagattgtttgaacacatgtatttataaaacagagctagagaaaaataaaaatgaacatgtatatacatttggaaatttgaattaaatactgtatcatactttcaaaggataaaaagactacccctctgaaggttgttttgtattaatggtcagtctttgttctctgagaaattatgttggaagcagcatactttcaaattattaccatgagtataattttaagaatgaaaatgtttacagtattttcagttttattataaaaatgcacacacaacaaagattgtcatttcttggctctacttgcattcagcacttgttcttgagcagctttctttgcttttaccatctcgacaagttcctaggaagggagaaaggtgtgatttaagaagttgcgatttaaaaacagacattttaatctagtgtttggtgtaaagaattcaagcaactaagatagatagtactaaatatactgatttcattatctgccagggcctagaaagtttctaaggttgctcatttcttcctcataatattgaccccataactactggttttgaaataagcactatattattaaccacttaatagacataaaatatgagctatatcacccaagctacaatttaaaatacaacaatctataaacgcttaagtctgcaaccttgtatcgtttcatgcagtccttctttgtcctgccaggcaccgcttctgctattttttcccatctttcaggtgtatttactgggtatgttttcaaagcttgttccaaaagcttctgttcttctgttgtccaaggggtgaagtctgtatatggacctgattaagaaaaatttttatttgaaaactgtctttgaacatgttctcagacaagtcttgtggtccacaagtattcgctaagtgcccatttcaatctgggatgtgtcattttgaaaataaacttgtagagatga

SEQ ID NO: 164206 - DNA, 2385 bp, Homo sapiens
  Payload ID: 12333
  Gene Symbol: PMPCB
  Gene Name: peptidase (mitochondrial processing) beta
  ENST ID: ENST00000444457
  CDS Start-End: 5-373
agaaatggcggctgcggcggctcgagtggtgttgtcatccgcggcgcggcggcggctctggggtttcagcgagagtcttctaatccgaggcgctgcgggacgggtgagcttccctccaggccggtcctgtcctcgagatctcgccagacccggcgcagcgcacctgagagtcggcgccacagatccgaacagtgggtcgggcagggcctcctcgacccggacccgccgggcgccaggcggcctggggctgctgaactggccgggggtgactggcttgtggccacccgccaggagacctgctagtgacgtgtgggatgaccctggttttcggctcctcccgccagctactgaggagtgcatgtttgaccactaaaaacgtagtgcttgcaaattggggaaaactaaaaagtgaaatgggtaccgctccagagttctatttttgcctaagactgaacttcgtcctcagctgggcttcccgcgaacctggacatcaatgaatcattatattttggagagaacagattaagaagtacacaggctgctacccaagttgttctgaatgttcctgaaacaagagtaacatgtttagaaagtggactcagagtagcttcggaagactctgggctctcaacatgcacagttggactctggattgatgctggaagtagatacgaaaatgagaagaacaatggaacagcacactttctggagcatatggctttcaagggcaccaagaagagatcccagttagatctggaacttgagattgaaaatatgggtgctcatctcaatgcctatacctccagagagcagactgtatactatgccaaagcattctctaaagacttgccaagagctgtagaaattcttgctgatataatacaaaacagcacattgggagaagcagagattgaacgtgagcgtggagtaatccttagagagatgcaggaagttgaaaccaatttacaagaagttgtttttgattatcttcatgccacagcttatcaaaatactgcacttggacggacaattttgggaccaactgaaaatatcaaatctataagtcgtaaggacttagtggattatataaccacacattataaggggccaagaatagtgcttgctgctgctggaggtgtttcccatgatgaattgcttgacttagcaaagtttcatttcggtgactctttatgcacacacaaaggagaaataccagctctgcctccctgcaaattcacaggaagtgagattcgtgtgagggatgacaagatgcctttggcgcaccttgcaatagctgttgaagctgttggttgggcacatccagatacaatctgtctcatggttgcaaacacgctgattggcaactgggatcgctcttttgggggaggaatgaatttatctagcaagctggcccagctcacttgtcatggcaatctttgccatagctttcagtctttcaacacttcctacacagatacaggattatggggactgtatatggtttgtgaatcatccactgttgcagacatgctacatgttgttcaaaaagaatggatgcgactctgtacaagtgtcacagaaagtgaggttgcacgagccagaaatcttctgaaaacaaacatgttgttgcagcttgatggttcaactccaatttgtgaagatattggtaggcaaatgttatgctataatagaaggattcccatccctgagcttgaagcaagaattgatgctgtgaatgctgagacaattcgagaagtatgtaccaaatacatttataataggagtccagctattgctgctgttggatataatcacagaagtgaacttcatgaatggaaatggaacaagttattttccaaaaggcaaactatttcatactcctacgtgaacatccttttaccacagcctcagccacagtacgtctaattatttaaaatttgtgattatcgctggtggtcaacaatttttttgtttttcatcctttaactggaaaaaggaggggctgtctcagtttttcttctgactctgtgtgtcacttacaattaataatgctagctgttaacatctacatagcagttgacatgtgccaggcctgtttaccagttaatcttctccatgatcctatgaggaaagtgctattgctgtctccatttcatagatgaggaaaatgaggcacagaggagacgttatgtagccactaccactgcaacttgctcaaacttccggccaagtcggctctagtccagacagcctgactcctcagcctgcgtctgtatgctgcctctcctaattcattatgtttattaataatttttccccgttttgttaacacttatgtttcaaaaacagtcatctttatttacattgactgatcatttcttttgt

SEQ ID NO: 164207 - DNA, 1714 bp, Homo sapiens
  Payload ID: 12333
  Gene Symbol: PMPCB
  Gene Name: peptidase (mitochondrial processing) beta
  ENST ID: ENST00000428154
  CDS Start-End: 26-1498
atcctctaccttccttctagcagaaatggcggctgcggcggctcgagtggtgttgtcatccgcggcgcggcggcggctctggggtttcagcgagagtcttctaatccgaggcgctgcgggacggtcattatattttggagagaacagattaagaagtacacaggctgctacccaagttgttctgaatgttcctgaaacaagagtaacatgtttagaaagtggactcagagtagcttcggaagactctgggctctcaacatgcacagttggactctggattgatgctggaagtagatacgaaaatgagaagaacaatggaacagcacactttctggagcatatggctttcaagggcaccaagaagagatcccagttagatctggaacttgagattgaaaatatgggtgctcatctcaatgcctatacctccagagagcagactgtatactatgccaaagcattctctaaagacttgccaagagctgtagaaattcttgctgatataatacaaaacagcacattgggagaagcagagattgaacgtgagcgtggagtaatccttagagagatgcaggaagttgaaaccaatttacaagaagttgtttttgattatcttcatgccacagcttatcaaaatactgcacttggacggacaattttgggaccaactgaaaatatcaaatctataagtcgtaaggacttagtggattatataaccacacattataaggggccaagaatagtgcttgctgctgctggaggtgtttcccatgatgaattgcttgacttagcaaagtttcatttcggtgactctttatgcacacacaaaggagaaataccagctctgcctccctgcaaattcacaggaagtgagattcgtgtgagggatgacaagatgcctttggcgcaccttgcaatagctgttgaagctgttggttgggcacatccagatacaatctgtctcatggttgcaaacacgctgattggcaactgggatcgctcttttgggggaggaatgaatttatctagcaagctggcccagctcacttgtcatggcaatctttgccatagctttcagtctttcaacacttcctacacagatacaggattatggggactgtatatggtttgtgaatcatccactgttgcagacatgctacatgttgttcaaaaagaatggatgcgactctgtacaagtgtcacagaaagtgaggttgcacgagccagaaatcttctgaaaacaaacatgttgttgcagcttgatggttcaactccaatttgtgaagatattggtaggcaaatgttatgctataatagaaggattcccatccctgagcttgaagcaagaattgatgctgtgaatgctgagacaattcgagaagtatgtaccaaatacatttataataggagtccagctattgctgctgttggtaagcctggcttcttttcttctatgcaaaaagttggccaagtacttttaattaactcttctttttaatccttaggtcccattaagcaactaccagattttaaacagatacgcagtaacatgtgttggcttcgtgattaaaatgctcctaatcaagattgtttgaacacatgtatttataaaacagagctagagaaaaataaaaatgaacatgtatatacatttggaaatttgaattaaatactgtatcatactttcaaaggataaaaagactacccctctgaa

SEQ ID NO: 164208 - DNA, 904 bp, Homo sapiens
  Payload ID: 12333
  Gene Symbol: PMPCB
  Gene Name: peptidase (mitochondrial processing) beta
  ENST ID: ENST00000456433
  CDS Start-End: 8-616
agcagaaatggcggctgcggcggctcgagtggtgttgtcatccgcggcgcggcggcggctctggggtttcagcgagagtcttctaatccgaggcgctgcgggacggtcattatattttggagagaacagattaagaagtacacaggctgctacccaagttgttctgaatgttcctgaaacaagagtaacatgtttagaaagtggactcagagtagcttcggaagactctgggctctcaacatgcacagttggactctggattgatgctggaagtagatacgaaaatgagaagaacaatggaacagcacactttctggagcatatggctttcaagggcaccaagaagagatcccagttagatctggaacttgagattgaaaatatgggtgctcatctcaatgcctatacctccagagagcagactgtatactatgccaaagcattctctaaagacttgccaagagcttatcaaaatactgcacttggacggacaattttgggaccaactgaaaatatcaaatctataagtcgtaaggacttagtggattatataaccacacattataaggggccaagaatagtgcttgctgctgctggagattcgtgtgagggatgacaagatgcctttggcgcaccttgcaatagctgttgaagctgttggttgggcacatccagatacaatctgtctcatggttgcaaacacgctgattggcaactgggatcgctcttttgggggaggaatgaatttatctagcaagctggcccagctcacttgtcatggcaatctttgccatagctttcagtctttcaacacttcctacacagatacaggattatggggactgtatatggtttgtgaatcatccactgttgcagacatgctacatgttgttcaaaaagaatg

SEQ ID NO: 164209 - DNA, 1323 bp, Homo sapiens
  Payload ID: 12333
  Gene Symbol: PMPCB
  Gene Name: peptidase (mitochondrial processing) beta
  ENST ID: ENST00000443722
  CDS Start-End: 7-375
gcagaaatggcggctgcggcggctcgagtggtgttgtcatccgcggcgcggcggcggctctggggtttcagcgagagtcttctaatccgaggcgctgcgggacggtcattatattttggagagaacagattaagaagtacacaggctgctacccaagttgttctgaatgttcctgaaacaagagtaacatgtttagaaagtggactcagagtagcttcggaagactctgggctctcaacatgcacagttggactctggattgatgctggaagtagatacgaaaatgagaagaacaatggaacagcacactttctggagcatatggctttcaaggcaaggcaccaagaagagatcccagttagatctggaacttgagattgaaaatatgggtgctcatctcaatgcctatacctccagagagcagactgtatactatgccaaagcattctctaaagacttgccaagagctgtagaaattcttgctgatataatacaaaacagcacattgggagaagcagagattgaacgtgagcgtggagtaatccttagagagatgcaggaagttgaaaccaatttacaagaagttgtttttgattatcttcatgccacagcttatcaaaatactgcacttggacggacaattttgggaccaactgaaaatatcaaatctataagtcgtaaggacttagtggattatataaccacacattataaggggccaagaatagtgcttgctgctgctggaggtgtttcccatgatgaattgcttgacttagcaaagtttcatttcggtgactctttatgcacacacaaaggagaaataccagctctgcctccctgcaaattcacaggaagtgagattcgtgtgagggatgacaagatgcctttggcgcaccttgcaatagctgttgaagctgttggttgggcacatccagatacaatctgtctcatggttgcaaacacgctgattggcaactgggatcgctcttttgggggaggaatgaatttatctagcaagctggcccagctcacttgtcatggcaatctttgccatagctttcagtctttcaacacttcctacacagatacaggattatggggactgtatatggtttgtgaatcatccactgttgcagacatgctacatgttgttcaaaaagaatggtcccattaagcaactaccagattttaaacagatacgcagtaacatgtgttggcttcgtgattaaaatgctcctaatcaagattgtttgaacacatgtatttataaaacagagctagagaaaaataaaaatgaacatgtatatacatttggaaatttga

SEQ ID NO: 164210 - DNA, 1509 bp, Homo sapiens
  Payload ID: 12333
  Gene Symbol: PMPCB
  Gene Name: peptidase (mitochondrial processing) beta
  ENST ID: ENST00000453466
  CDS Start-End: 4-363
gaaatggcggctgcggcggctcgagtggtgttgtcatccgcggcgcggcggcggctctggggtttcagcgagagtcttctaatccgaggcgctgcgggacggtcattatattttggagagaacagattaagaagtacacaggctgctacccaagttgttctgaatgttcctgaaacaagagtaacatgtttagaaagtggactcagagtagcttcggaagactctgggctctcaacatgcacagttggactctggattgatgctggaagtagatacgaaaatgagaagaacaatggaacagcacactttctggagcatatggctttcaaggcaaaagagatcccagttagatctggaacttgagattgaaaatatgggtgctcatctcaatgcctatacctccagagagcagactgtatactatgccaaagcattctctaaagacttgccaagagctgtagaaattcttgctgatataatacaaaacagcacattgggagaagcagagattgaacgtgagcgtggagtaatccttagagagatgcaggaagttgaaaccaatttacaagaagttgtttttgattatcttcatgccacagcttatcaaaatactgcacttggacggacaattttgggaccaactgaaaatatcaaatctataagtcgtaaggacttagtggattatataaccacacattataaggggccaagaatagtgcttgctgctgctggaggtgtttcccatgatgaattgcttgacttagcaaagtttcatttcggtgactctttatgcacacacaaaggagaaataccagctctgcctccctgcaaattcacaggaagtgagattcgtgtgagggatgacaagatgcctttggcgcaccttgcaatagctgttgaagctgttggttgggcacatccagatacaatctgtctcatggttgcaaacacgctgattggcaactgggatcgctcttttgggggaggaatgaatttatctagcaagctggcccagctcacttgtcatggcaatctttgccatagctttcagtctttcaacacttcctacacagatacaggattatggggactgtatatggtttgtgaatcatccactgttgcagacatgctacatgttgttcaaaaagaatggatgcgactctgtacaagtgtcacagaaagtgaggttgcacgagccagaaatcttctgaaaacaaacatgttgttgcagcttgatggttcaactccaatttgtgaagatattggtaggcaaatgttatgctataatagaaggattcccatccctgagcttgaagcaagaattgatgctgtgaatgctgagacaattcgagaagtatgtaccaaatacatttataataggagtccagctattgctgctgttggtcccattaagcaactaccagattttaaacagatacgcagtaacatgtgttggcttcgtgattaaaatgctcctaatcaagattgtttgaacacatgtatttataa

SEQ ID NO: 164211 - DNA, 1910 bp, Homo sapiens
  Payload ID: 12334
  Gene Symbol: PEPD
  Gene Name: peptidase D
  Uniprot ID: P12955
  ENST ID: ENST00000244137
  CDS Start-End: 35-1516
gccgcacttcacgtgacgccggtgccgggcgaacatggcggcggccaccggaccctcgttttggctggggaatgaaaccctgaaggtgccgctggcgctctttgccttgaaccggcagcgcctgtgtgagcggctgcggaagaaccctgctgtgcaggccggctccatcgtggtcctgcagggcggggaggagactcagcgctactgcaccgacaccggggtcctcttccgccaggagtccttctttcactgggcgttcggtgtcactgagccaggctgctatggtgtcatcgatgttgacactgggaagtcgaccctgtttgtgcccaggcttcctgccagccatgccacctggatgggaaagatccattccaaggagcacttcaaggagaagtatgccgtggacgacgtccagtacgtagatgagattgccagcgtcctgacgtcacagaagccctctgtcctcctcactttgcgtggcgtcaacacggacagcggcagtgtctgcagggaggcctcctttgacggcatcagcaagttcgaagtcaacaataccattcttcacccagagatcgttgagtgccgagtgtttaagacggatatggagctggaggttctgcgctataccaataaaatctccagcgaggcccaccgtgaggtaatgaaggctgtaaaagtgggaatgaaagaatatgagttggaaagcctcttcgagcactactgctactcccggggcggcatgcgccacagctcctacacctgcatctgcggcagtggtgagaactcagccgtgctacactacggacacgccggagctcccaacgaccgaacgatccagaatggggatatgtgcctgttcgacatgggcggtgagtattactgcttcgcttccgacatcacctgctcctttcccgccaacggcaagttcactgcagaccagaaggccgtctatgaggcagtgctgcggagctcccgtgccgtcatgggtgccatgaagccaggtgtctggtggcctgacatgcaccgcctggctgaccgcatccacctggaggagctggcccacatgggcatcctgagcggcagcgtggacgccatggtccaggctcacctgggggccgtgtttatgcctcacgggcttggccacttcctgggcattgacgtgcacgacgtgggaggctacccagagggcgtggagcgcatcgacgagcccggcctgcggagcctgcgcactgcacggcacctgcagccaggcatggtgctcaccgtggagccgggcatctacttcatcgaccacctcctggatgaggccctggcggacccggcccgcgcctccttccttaaccgcgaggtcctgcagcgctttcgcggttttggcggggtccgcatcgaggaggacgtcgtggtgactgacagcggcatagagctgctgacctgcgtgccccgcactgtggaagagattgaagcatgcatggcaggctgtgacaaggcctttacccccttctctggccccaagtagagccagccagaaatcccagcgcacctgggggcctggccttgcaacctcttttcgtgatgggcagcctgctggtcagcactccagtagcgagagacggcacccagaatcagatcccagcttcggcatttgatcagaccaaacagtgctgtttcccggggaggaaacacttttttaattacccttttgcaggctcccacctttaatctgttttataccttgcttattaaatgagcgacttaaaatgattgaaaataatgctgttctttagtagcaactaaaatgtgtcttgctgtcatttatattccttttcccaggaaagaagcatttctgatactttctgtcaaaaatcaatatgcagaatggcatttgcaataaaaggtttcctaaaatggtc

SEQ ID NO: 164212 - DNA, 1754 bp, Homo sapiens
  Payload ID: 12334
  Gene Symbol: PEPD
  Gene Name: peptidase D
  Uniprot ID: P12955
  ENST ID: ENST00000397032
  CDS Start-End: 32-1390
gcacttcacgtgacgccggtgccgggcgaacatggcggcggccaccggaccctcgttttggctggggaatgaaaccctgaaggtgccgctggcgctctttgccttgaaccggcagcgcctgtgtgagcggctgcggaagaaccctgctgtgcaggccggctccatcgtggtcctgcagggcggggaggagactcagcgctactgcaccgacaccggggtcctcttccgccaggagtccttctttcactgggcgttcggtgtcactgagccaggctgctatggtgtcatcgatgttgacactgggaagtcgaccctgtttgtgcccaggcttcctgccagccatgccacctggatgggaaagatccattccaaggagcacttcaaggagaagtatgccgtggacgacgtccagtacgtagatgagattgccagcgtcctgacgtcacagaagccctctgtcctcctcactttgcgtggcgtcaacacggacagcggcagtgtctgcagggaggcctcctttgacggcatcagcaagttcgaagtcaacaataccattcttcacccagagatcgttgagtgcctcttcgagcactactgctactcccggggcggcatgcgccacagctcctacacctgcatctgcggcagtggtgagaactcagccgtgctacactacggacacgccggagctcccaacgaccgaacgatccagaatggggatatgtgcctgttcgacatgggcggtgagtattactgcttcgcttccgacatcacctgctcctttcccgccaacggcaagttcactgcagaccagaaggccgtctatgaggcagtgctgcggagctcccgtgccgtcatgggtgccatgaagccaggtgtctggtggcctgacatgcaccgcctggctgaccgcatccacctggaggagctggcccacatgggcatcctgagcggcagcgtggacgccatggtccaggctcacctgggggccgtgtttatgcctcacgggcttggccacttcctgggcattgacgtgcacgacgtgggaggctacccagagggcgtggagcgcatcgacgagcccggcctgcggagcctgcgcactgcacggcacctgcagccaggcatggtgctcaccgtggagccgggcatctacttcatcgaccacctcctggatgaggccctggcggacccggcccgcgcctccttccttaaccgcgaggtcctgcagcgctttcgcggttttggcggggtccgcatcgaggaggacgtcgtggtgactgacagcggcatagagctgctgacctgcgtgccccgcactgtggaagagattgaagcatgcatggcaggctgtgacaaggcctttacccccttctctggccccaagtagagccagccagaaatcccagcgcacctgggggcctggccttgcaacctcttttcgtgatgggcagcctgctggtcagcactccagtagcgagagacggcacccagaatcagatcccagcttcggcatttgatcagaccaaacagtgctgtttcccggggaggaaacacttttttaattacccttttgcaggctcccacctttaatctgttttataccttgcttattaaatgagcgacttaaaatgattgaaaataatgctgttctttagtagcaactaaaatgtgtcttgctgtcatttatattccttttcccaggaaagaagcatttctgatactttctgtcaaaaatcaatatgcagaatggc

SEQ ID NO: 164213 - DNA, 1638 bp, Homo sapiens
  Payload ID: 12334
  Gene Symbol: PEPD
  Gene Name: peptidase D
  Uniprot ID: P12955
  ENST ID: ENST00000436370
  CDS Start-End: 29-1318
cttcacgtgacgccggtgccgggcgaacatggcggcggccaccggaccctcgttttggctggggaatgaaaccctgaaggtgccgctggcgctctttgccttgaaccggcagcgcctgtgtgagcggctgcggaagaaccctgctgtgcaggccggctccatcgtggtcctgcagggcggggaggagactcagcgctactgcaccgacaccggggtcctcttccgccagattgccagcgtcctgacgtcacagaagccctctgtcctcctcactttgcgtggcgtcaacacggacagcggcagtgtctgcagggaggcctcctttgacggcatcagcaagttcgaagtcaacaataccattcttcacccagagatcgttgagtgccgagtgtttaagacggatatggagctggaggttctgcgctataccaataaaatctccagcgaggcccaccgtgaggtaatgaaggctgtaaaagtgggaatgaaagaatatgagttggaaagcctcttcgagcactactgctactcccggggcggcatgcgccacagctcctacacctgcatctgcggcagtggtgagaactcagccgtgctacactacggacacgccggagctcccaacgaccgaacgatccagaatggggatatgtgcctgttcgacatgggcggtgagtattactgcttcgcttccgacatcacctgctcctttcccgccaacggcaagttcactgcagaccagaaggccgtctatgaggcagtgctgcggagctcccgtgccgtcatgggtgccatgaagccaggtgtctggtggcctgacatgcaccgcctggctgaccgcatccacctggaggagctggcccacatgggcatcctgagcggcagcgtggacgccatggtccaggctcacctgggggccgtgtttatgcctcacgggcttggccacttcctgggcattgacgtgcacgacgtgggaggctacccagagggcgtggagcgcatcgacgagcccggcctgcggagcctgcgcactgcacggcacctgcagccaggcatggtgctcaccgtggagccgggcatctacttcatcgaccacctcctggatgaggccctggcggacccggcccgcgcctccttccttaaccgcgaggtcctgcagcgctttcgcggttttggcggggtccgcatcgaggaggacgtcgtggtgactgacagcggcatagagctgctgacctgcgtgccccgcactgtggaagagattgaagcatgcatggcaggctgtgacaaggcctttacccccttctctggccccaagtagagccagccagaaatcccagcgcacctgggggcctggccttgcaacctcttttcgtgatgggcagcctgctggtcagcactccagtagcgagagacggcacccagaatcagatcccagcttcggcatttgatcagaccaaacagtgctgtttcccggggaggaaacacttttttaattacccttttgcaggctcccacctttaatctgttttataccttgcttattaaatgagcgacttaaaatgattgaaaataatgctgttctttagtagcaactaaaatgtgtcttgctgtcatttatattccttttcccaggaaaga

SEQ ID NO: 164214 - DNA, 581 bp, Homo sapiens
  Payload ID: 12334
  Gene Symbol: PEPD
  Gene Name: peptidase D
  ENST ID: ENST00000588328
  CDS Start-End: 1-581
agtcaacaataccattcttcacccagagatcgttgagtgccgagtgtttaagacggatatggagctggaggttctgcgctataccaataaaatctccagcgaggcccaccgtgaggtaatgaaggctgtaaaagtgggaatgaaagaatatgagttggaaagcctcttcgagcactactgctactcccggggcggcatgcgccacagctcctacacctgcatctgcggcagtggtgagaactcagccgtgctacactacggacacgccggagctcccaacgaccgaacgatccagaatggggatatgtgcctgttcgacatgggcggtgagtattactgcttcgcttccgacatcacctgctcctttcccgccaacggcaagttcactgcagaccagaaggccgtctatgaggcagtgctgcggagctcccgtgccgtcatgggtgccatgaagccaggtgccaggacggggaggactgtcttcagtgtgggcaccatgtccacccctcctgccggccgcaatggtgtctggtggcctgacatgcaccgcctggctgaccgcatccacctggaggagctgg

SEQ ID NO: 164215 - DNA, 570 bp, Homo sapiens
  Payload ID: 12334
  Gene Symbol: PEPD
  Gene Name: peptidase D
  ENST ID: ENST00000609145
  CDS Start-End: 258-570
gtcattatgaaggaatggtggcatgtcatcttcattaggcttagtggtgcctctaaagtgggtttttctttccgaccttctagattgccagcgtcctgacgtcacagaagccctctgtcctcctcactttgcgtggcgtcaacacggacagcggcagtgtctgcagggaggcctcctttgacggcatcagcaagttcgaagtcaacaataccattcttcacccagagatcgttgagtgccgagtgtttaagacggatatggagctggaggttctgcgctataccaataaaatctccagcgaggcccaccgtgaggtaatgaaggctgtaaaagtgggaatgaaagaatatgagttggaaagcctcttcgagcactactgctactcccggggcggcatgcgccacagctcctacacctgcatctgcggcagtggtgagaactcagccgtgctacactacggacacgccggagctcccaacgaccgaacgatccagaatggggatatgtgcctgttcgacatgggcggtgagtattactgcttcgcttccgacatcacctgctcctttcccg

SEQ ID NO: 164216 - DNA, 547 bp, Homo sapiens
  Payload ID: 12334
  Gene Symbol: PEPD
  Gene Name: peptidase D
  ENST ID: ENST00000590755
  CDS Start-End: 1-168
attgccagcgtcctgacgtcacagaagccctctgtcctcctcactttgcgtggcgtcaacacggacagcggcagtgtctgcagggaggcctcctttgacggcatcagcaagttcgaagtcaacaataccattcttcacccagagatcgttgagtgctgggagctctgactcgcctcgtcttagagcttgggaccaaggaggtatcctgaaagatgaatgggcatcggctgtggaaaaagaaggagtaggagagagtgaccctggcaaaaggaccactcgttcacagaaacaagagaaagggtggtggctctgtgtggccagtgcggagccagggagcagagcccgagaacagttggagagacaggcagtggctggccgagtgtttaagacggatatggagctggaggttctgcgctataccaataaaatctccagcgaggcccaccgtgaggtaatgaaggctgtaaaagtgggaatgaaagaatatgagttggaaaggtaagccaccatgtttctccgggtaaaattaaaaggtaaaaaacagtaa

SEQ ID NO: 164217 - DNA, 433 bp, Homo sapiens
  Payload ID: 12334
  Gene Symbol: PEPD
  Gene Name: peptidase D
  ENST ID: ENST00000590408
  CDS Start-End: 1-127
ggcgttcggtgtcactgagccaggctgctatggtgtcatcgatgttgacactgggaagtcgaccctgtttgtgcccaggcttcctgccagccatgccacctggatgggaaaattgccagcgtcctgacgtcacagaagccctctgtcctcctcactttgcgtggcgtcaacacggacagcggcagtgtctgcagggaggcctcctttgacggcatcagcaagttcgaagtcaacaataccattcttcacccagagatcgttgagtgccgagtgtttaagacggatatggagctggaggttctgcgctataccaataaaatctccagcgaggcccaccgtgaggtaatgaaggctgtaaaagtgggaatgaaagaatatgagttggaaaggtaagccaccatgtttctccgggtaaaattaaaaggtaaaaaac

SEQ ID NO: 164218 - DNA, 2402 bp, Homo sapiens
  Payload ID: 12335
  Gene Symbol: PAMR1
  Gene Name: peptidase domain containing associated with muscle regeneration 1
  ENST ID: ENST00000527605
  CDS Start-End: 378-2402
agatgaggatgggagagcctggcgagctgaaacccgagctcccgctcagctggggctcggggaggtccctgtaaaacccgcctgcccccggcctccctgggtccctcctctccctccccagtagacgctcgggcaccagccgcggcaaggatggagctgggttgctggacgcagttggggctcacttttcttcagctccttctcatctcgtccttgccaagagaatgatgaacgacatacctgagagccagaccagcatgatggttaatgctctctgactctggaaacagcctacttggatttgaatcctgtctctgctacttactacttagtacacagtcattaatgaagcctgccctggagcagagtggaatatcatgtgtcgggagtgctgtgaatatgatcagattgagtgcgtctgccccggaaagagggaagtcgtgggttataccatcccttgctgcaggaatgaggagaatgagtgtgactcctgcctgatccacccaggttgtaccatctttgaaaactgcaagagctgccgaaatggctcatgggggggtaccttggatgacttctatgtgaaggggttctactgtgcagagtgccgagcaggctggtacggaggagactgcatgcgatgtggccaggttctgcgagccccaaagggtcagattttgttggaaagctatcccctaaatgctcactgtgaatggaccattcatgctaaacctgggtttgtcatccaactaagatttgtcatgttgagcctggagtttgactacatgtgccagtatgactatgttgaggttcgtgatggagacaaccgcgatggccagatcatcaagcgtgtctgtggcaacgagcggccagctcctatccagagcataggatcctcactccacgtcctcttccactccgatggctccaagaattttgacggtttccatgccatttatgaggagatcacagcatgctcctcatccccttgtttccatgacggcacgtgcgtccttgacaaggctggatcttacaagtgtgcctgcttggcaggctatactgggcagcgctgtgaaaatcttctggaggctgggaagtccaagatcaaggcgtcagaagattcattgtctgtccttgaagaaagaaactgctcagaccctgggggcccagtcaatgggtaccagaaaataacagggggccctgggcttatcaacggacgccatgctaaaattggcaccgtggtgtctttcttttgtaacaactcctatgttcttagtggcaatgagaaaagaacttgccagcagaatggagagtggtcagggaaacagcccatctgcataaaagcctgccgagaaccaaagatttcagacctggtgagaaggagagttcttccgatgcaggttcagtcaagggagacaccattacaccagctatactcagcggccttcagcaagcagaaactgcagagtgcccctaccaagaagccagcccttccctttggagatctgcccatgggataccaacatctgcatacccagctccagtatgagtgcatctcacccttctaccgccgcctgggcagcagcaggaggacatgtctgaggactgggaagtggagtgggcgggcaccatcctgcatccctatctgcgggaaaattgagaacatcactgctccaaagacccaagggttgcgctggccgtggcaggcagccatctacaggaggaccagcggggtgcatgacggcagcctacacaagggagcgtggttcctagtctgcagcggtgccctggtgaatgagcgcactgtggtggtggctgcccactgtgttactgacctggggaaggtcaccatgatcaagacagcagacctgaaagttgttttggggaaattctaccgggatgatgaccgggatgagaagaccatccagagcctacagatttctgctatcattctgcatcccaactatgaccccatcctgcttgatgctgacatcgccatcctgaagctcctagacaaggcccgtatcagcacccgagtccagcccatctgcctcgctgccagtcgggatctcagcacttccttccaggagtcccacatcactgtggctggctggaatgtcctggcagacgtgaggagccctggcttcaagaacgacacactgcgctctggggtggtcagtgtggtggactcgctgctgtgtgaggagcagcatgaggaccatggcatcccagtgagtgtcactgataacatgttctgtgccagctgggaacccactgccccttctgatatctgcactgcagagacaggaggcatcgcggctgtgtccttcccgggacgagcatctcctgagccacgctggcatctgatgggactggtcagctggagctatgataaaacatgcagc

SEQ ID NO: 164219 - DNA, 551 bp, Homo sapiens
  Payload ID: 12335
  Gene Symbol: PAMR1
  Gene Name: peptidase domain containing associated with muscle regeneration 1
  ENST ID: ENST00000529303
  CDS Start-End: 19-551
gcaccagccgcggcaaggatggagctgggttgctggacgcagttggggctcacttttcttcagctccttctcatctcgtccttgccaagagagtacacagtcattaatgaagcctgccctggagcagagtggaatatcatgtgtcgggagtgctgtgaatatgatcagattgagtgcgtctgccccggaaagagggaagtcgtgggttataccatcccttgctgcaggaatgaggagaatgagtgtgactcctgcctgatccacccaggttgtaccatctttgaaaactgcaagagctgccgaaatggctcatgggggggtaccttggatgacttctatgtgaaggggttctactgtgcagagtgccgagcaggctggtacggaggagactgcatgccatgctcctcatccccttgtttccatgacggcacgtgcgtccttgacaaggctggatcttacaagtgtgcctgcttggcaggctatactgggcagcgctgtgaaaatctccttgaagaaagaaactgctcagaccctgggggcccagtcaatgg

SEQ ID NO: 164220 - DNA, 2613 bp, Homo sapiens
  Payload ID: 12335
  Gene Symbol: PAMR1
  Gene Name: peptidase domain containing associated with muscle regeneration 1
  ENST ID: ENST00000611014
  CDS Start-End: 840-2090
agagtacacagtcattaatgaagcctgccctggagcagagtggaatatcatgtgtcgggagtgctgtgaatatgatcagattgagtgcgtctgccccggaaagagggaagtcgtgggttataccatcccttgctgcaggaatgaggagaatgagtgtgactcctgcctgatccacccaggttgtaccatctttgaaaactgcaagagctgccgaaatggctcatgggggggtaccttggatgacttctatgtgaaggggttctactgtgcagagtgccgagcaggctggtacggaggagactgcatgcgatgtggccaggttctgcgagccccaaagggtcagattttgttggaaagctatcccctaaatgctcactgtgaatggaccattcatgctaaacctgggtttgtcatccaactaagatttgtcatgttgagcctggagtttgactacatgtgccagtatgactatgttgaggttcgtgatggagacaaccgcgatggccagatcatcaagcgtgtctgtggcaacgagcggccagctcctatccagagcataggatcctcactccacgtcctcttccactccgatggctccaagaattttgacggtttccatgccatttatgaggagatcacagcatgctcctcatccccttgtttccatgacggcacgtgcgtccttgacaaggctggatcttacaagtgtgcctgcttggcaggctatactgggcagcgctgtgaaaatctccttgaagaaagaaactgctcagaccctgggggcccagtcaatgggtaccagaaaataacagggggccctgggcttatcaacggacgccatgctaaaattggcaccgtggtgtctttcttttgtaacaactcctatgttcttagtggcaatgagaaaagaacttgccagcagaatggagtggtcagggaaacagcccatctgcataaaagcctgccgagaaccaaagatttcagacctggtgagaaggagagttcttccgatgcaggttcagtcaagggagacaccattacaccagctatactcagcggccttcagcaagcagaaactgcagagtgcccctaccaagaagccagcccttccctttggagatctgcccatgggataccaacatctgcatacccagctccagtatgagtgcatctcacccttctaccgccgcctgggcagcagcaggaggacatgtctgaggactgggaagtggagtgggcgggcaccatcctgcatccctatctgcgggaaaattgagaacatcactgctccaaagacccaagggttgcgctggccgtggcaggcagccatctacaggaggaccagcggggtgcatgacggcagcctacacaagggagcgtggttcctagtctgcagcggtgccctggtgaatgagcgcactgtggtggtggctgcccactgtgttactgacctggggaaggtcaccatgatcaagacagcagacctgaaagttgttttggggaaattctaccgggatgatgaccgggatgagaagaccatccagagcctacagatttctgctatcattctgcatcccaactatgaccccatcctgcttgatgctgacatcgccatcctgaagctcctagacaaggcccgtatcagcacccgagtccagcccatctgcctcgctgccagtcgggatctcagcacttccttccaggagtcccacatcactgtggctggctggaatgtcctggcagacgtgaggagccctggcttcaagaacgacacactgcgctctggggtggtcagtgtggtggactcgctgctgtgtgaggagcagcatgaggaccatggcatcccagtgagtgtcactgataacatgttctgtgccagctgggaacccactgccccttctgatatctgcactgcagagacaggaggcatcgcggctgtgtccttcccgggacgagcatctcctgagccacgctggcatctgatgggactggtcagctggagctatgataaaacatgcagccacaggctctccactgccttcaccaaggtgctgccttttaaagactggattgaaagaaatatgaaatgaaccatgctcatgcactccttgagaagtgtttctgtatatccgtctgtacgtgtgtcattgcgtgaagcagtgtgggcctgaagtgtgatttggcctgtgaacttggctgtgccagggcttctgacttcagggacaaaactcagtgaagggtgagtagacctccattgctggtaggctgatgccgcgtccactactaggacagccaattggaagatgccagggcttgcaagaagtaagtttcttcaaagaagaccatatacaaaacctctccactccactgacctggtggtcttccccaactttcagttatacgaatgccatcagcttgaccagggaagatctgggcttcatgaggccccttttgaggctctcaagttctagagagctgcctgtgggacagcccagggcagcagagctgggatgtggtgcatgcctttgtgtacatggccacagtacagtctggtccttttccttccccatctcttgtacacattttaataaaataagggttggcttctgaact

SEQ ID NO: 164221 - DNA, 2801 bp, Homo sapiens
  Payload ID: 12335
  Gene Symbol: PAMR1
  Gene Name: peptidase domain containing associated with muscle regeneration 1
  Uniprot ID: Q6UXH9
  ENST ID: ENST00000615849
  CDS Start-End: 447-2276
agggcaaagccagctcccgtctcagcctcccgtaggaagatctcccggcctcacctgagcgccccgcagccctgggtacctctgctcccgcccagggtcctatggcccctcctcccagcacccaacactgggaccccacctgtacccaggctggcctccctcccccgcagcttcctttgcagccgccgtccgcgggtctccaggcgtggccacacctcccggggccccgcaagggttaaggcagcagagaggagaggtttgggctgacgtcgctctggctgaaggtggttcccctcagatgaggatgggagagcctggcgagctgaaacccgagctcccgctcagctggggctcggggaggtccctgtaaaacccgcctgcccccggcctccctgggtccctcctctccctccccagtagacgctcgggcaccagccgcggcaaggatggagctgggttgctggacgcagttggggctcacttttcttcagctccttctcatctcgtccttgccaagagagtacacagtcattaatgaagcctgccctggagcagagtggaatatcatgtgtcgggagtgctgtgaatatgatcagattgagtgcgtctgccccggaaagagggaagtcgtgggttataccatcccttgctgcaggaatgaggagaatgagtgtgactcctgcctgatccacccaggttgtaccatctttgaaaactgcaagagctgccgaaatggctcatgggggggtaccttggatgacttctatgtgaaggggttctactgtgcagagtgccgagcaggctggtacggaggagactgcatgccatgctcctcatccccttgtttccatgacggcacgtgcgtccttgacaaggctggatcttacaagtgtgcctgcttggcaggctatactgggcagcgctgtgaaaatctccttgaagaaagaaactgctcagaccctgggggcccagtcaatgggtaccagaaaataacagggggccctgggcttatcaacggacgccatgctaaaattggcaccgtggtgtctttcttttgtaacaactcctatgttcttagtggcaatgagaaaagaacttgccagcagaatggagagtggtcagggaaacagcccatctgcataaaagcctgccgagaaccaaagatttcagacctggtgagaaggagagttcttccgatgcaggttcagtcaagggagacaccattacaccagctatactcagcggccttcagcaagcagaaactgcagagtgcccctaccaagaagccagcccttccctttggagatctgcccatgggataccaacatctgcatacccagctccagtatgagtgcatctcacccttctaccgccgcctgggcagcagcaggaggacatgtctgaggactgggaagtggagtgggcgggcaccatcctgcatccctatctgcgggaaaattgagaacatcactgctccaaagacccaagggttgcgctggccgtggcaggcagccatctacaggaggaccagcggggtgcatgacggcagcctacacaagggagcgtggttcctagtctgcagcggtgccctggtgaatgagcgcactgtggtggtggctgcccactgtgttactgacctggggaaggtcaccatgatcaagacagcagacctgaaagttgttttggggaaattctaccgggatgatgaccgggatgagaagaccatccagagcctacagatttctgctatcattctgcatcccaactatgaccccatcctgcttgatgctgacatcgccatcctgaagctcctagacaaggcccgtatcagcacccgagtccagcccatctgcctcgctgccagtcgggatctcagcacttccttccaggagtcccacatcactgtggctggctggaatgtcctggcagacgtgaggagccctggcttcaagaacgacacactgcgctctggggtggtcagtgtggtggactcgctgctgtgtgaggagcagcatgaggaccatggcatcccagtgagtgtcactgataacatgttctgtgccagctgggaacccactgccccttctgatatctgcactgcagagacaggaggcatcgcggctgtgtccttcccgggacgagcatctcctgagccacgctggcatctgatgggactggtcagctggagctatgataaaacatgcagccacaggctctccactgccttcaccaaggtgctgccttttaaagactggattgaaagaaatatgaaatgaaccatgctcatgcactccttgagaagtgtttctgtatatccgtctgtacgtgtgtcattgcgtgaagcagtgtgggcctgaagtgtgatttggcctgtgaacttggctgtgccagggcttctgacttcagggacaaaactcagtgaagggtgagtagacctccattgctggtaggctgatgccgcgtccactactaggacagccaattggaagatgccagggcttgcaagaagtaagtttcttcaaagaagaccatatacaaaacctctccactccactgacctggtggtcttccccaactttcagttatacgaatgccatcagcttgaccagggaagatctgggcttcatgaggccccttttgaggctctcaagttctagagagctgcctgtgggacagcccagggcagcagagctgggatgtggtgcatgcctttgtgtacatggccacagtacagtctggtccttttccttccccatctcttgtacacattttaataaaataagggttggcttctgaactac

SEQ ID NO: 164222 - DNA, 2842 bp, Homo sapiens
  Payload ID: 12335
  Gene Symbol: PAMR1
  Gene Name: peptidase domain containing associated with muscle regeneration 1
  ENST ID: ENST00000621476
  CDS Start-End: 557-2599
ttcattagggctggagacttccatgaaggggccagttacagcaggctccagtggaagggccctttgtcttttccacaatcctgcccttctccatctctggccttggctgacttgaacttggtgttttgcacagctgatggaaaccaaacttaattaccagaagtctgggatgcctcttataggtttgcagaccagttctacctctggcctgtttcctctggctttcccagtgtgtggttgctgcttagctgctgatctgcagaagtgatagctgggagatagagggaactgtaagaattcacaaagacagtctcctctgctgtttctccctgtggattcacatgcaaccagcctccctggtggcactgaaaaagccctgggattattgtgcagttcaacaagaatgatgaacgacatacctgagagccagaccagcatgatggttaatgctctctgactctggaaacagcctacttggatttgaatcctgtctctgctacttactacttagtacacagtcattaatgaagcctgccctggagcagagtggaatatcatgtgtcgggagtgctgtgaatatgatcagattgagtgcgtctgccccggaaagagggaagtcgtgggttataccatcccttgctgcaggaatgaggagaatgagtgtgactcctgcctgatccacccaggttgtaccatctttgaaaactgcaagagctgccgaaatggctcatgggggggtaccttggatgacttctatgtgaaggggttctactgtgcagagtgccgagcaggctggtacggaggagactgcatgcgatgtggccaggttctgcgagccccaaagggtcagattttgttggaaagctatcccctaaatgctcactgtgaatggaccattcatgctaaacctgggtttgtcatccaactaagatttgtcatgttgagcctggagtttgactacatgtgccagtatgactatgttgaggttcgtgatggagacaaccgcgatggccagatcatcaagcgtgtctgtggcaacgagcggccagctcctatccagagcataggatcctcactccacgtcctcttccactccgatggctccaagaattttgacggtttccatgccatttatgaggagatcacagcatgctcctcatccccttgtttccatgacggcacgtgcgtccttgacaaggctggatcttacaagtgtgcctgcttggcaggctatactgggcagcgctgtgaaaatctccttgaagaaagaaactgctcagaccctgggggcccagtcaatgggtaccagaaaataacagggggccctgggcttatcaacggacgccatgctaaaattggcaccgtggtgtctttcttttgtaacaactcctatgttcttagtggcaatgagaaaagaacttgccagcagaatggagagtggtcagggaaacagcccatctgcataaaagcctgccgagaaccaaagatttcagacctggtgagaaggagagttcttccgatgcaggttcagtcaagggagacaccattacaccagctatactcagcggccttcagcaagcagaaactgcagagtgcccctaccaagaagccagcccttccctttggagatctgcccatgggataccaacatctgcatacccagctccagtatgagtgcatctcacccttctaccgccgcctgggcagcagcaggaggacatgtctgaggactgggaagtggagtgggcgggcaccatcctgcatccctatctgcgggaaaattgagaacatcactgctccaaagacccaagggttgcgctggccgtggcaggcagccatctacaggaggaccagcggggtgcatgacggcagcctacacaagggagcgtggttcctagtctgcagcggtgccctggtgaatgagcgcactgtggtggtggctgcccactgtgttactgacctggggaaggtcaccatgatcaagacagcagacctgaaagttgttttggggaaattctaccgggatgatgaccgggatgagaagaccatccagagcctacagatttctgctatcattctgcatcccaactatgaccccatcctgcttgatgctgacatcgccatcctgaagctcctagacaaggcccgtatcagcacccgagtccagcccatctgcctcgctgccagtcgggatctcagcacttccttccaggagtcccacatcactgtggctggctggaatgtcctggcagacgtgaggagccctggcttcaagaacgacacactgcgctctggggtggtcagtgtggtggactcgctgctgtgtgaggagcagcatgaggaccatggcatcccagtgagtgtcactgataacatgttctgtgccagctgggaacccactgccccttctgatatctgcactgcagagacaggaggcatcgcggctgtgtccttcccgggacgagcatctcctgagccacgctggcatctgatgggactggtcagctggagctatgataaaacatgcagccacaggctctccactgccttcaccaaggtgctgccttttaaagactggattgaaagaaatatgaaatgaaccatgctcatgcactccttgagaagtgtttctgtatatccgtctgtacgtgtgtcattgcgtgaagcagtgtgggcctgaagtgtgatttggcctgtgaacttggctgtgccagggcttctgacttcagggacaaaactcagtgaagggtgagtagacctccattgctggtaggctgatgccgcgtccactactaggacagccaattggaagatgccagggcttgcaagaagtaagtttctt

SEQ ID NO: 164223 - DNA, 2785 bp, Homo sapiens
  Payload ID: 12335
  Gene Symbol: PAMR1
  Gene Name: peptidase domain containing associated with muscle regeneration 1
  Uniprot ID: Q6UXH9
  ENST ID: ENST00000622144
  CDS Start-End: 39-2252
cctccccagtagacgctcgggcaccagccgcggcaaggatggagctgggttgctggacgcagttggggctcacttttcttcagctccttctcatctcgtccttgccaagagagtacacagtcattaatgaagcctgccctggagcagagtggaatatcatgtgtcgggagtgctgtgaatatgatcagattgagtgcgtctgccccggaaagagggaagtcgtgggttataccatcccttgctgcaggaatgaggagaatgagtgtgactcctgcctgatccacccaggttgtaccatctttgaaaactgcaagagctgccgaaatggctcatgggggggtaccttggatgacttctatgtgaaggggttctactgtgcagagtgccgagcaggctggtacggaggagactgcatgcgatgtggccaggttctgcgagccccaaagggtcagattttgttggaaagctatcccctaaatgctcactgtgaatggaccattcatgctaaacctgggtttgtcatccaactaagatttgtcatgttgagcctggagtttgactacatgtgccagtatgactatgttgaggttcgtgatggagacaaccgcgatggccagatcatcaagcgtgtctgtggcaacgagcggccagctcctatccagagcataggatcctcactccacgtcctcttccactccgatggctccaagaattttgacggtttccatgccatttatgaggagatcacagcatgctcctcatccccttgtttccatgacggcacgtgcgtccttgacaaggctggatcttacaagtgtgcctgcttggcaggctatactgggcagcgctgtgaaaatcttctggaggctgggaagtccaagatcaaggcgtcagaagattcattgtctgtccttgaagaaagaaactgctcagaccctgggggcccagtcaatgggtaccagaaaataacagggggccctgggcttatcaacggacgccatgctaaaattggcaccgtggtgtctttcttttgtaacaactcctatgttcttagtggcaatgagaaaagaacttgccagcagaatggagagtggtcagggaaacagcccatctgcataaaagcctgccgagaaccaaagatttcagacctggtgagaaggagagttcttccgatgcaggttcagtcaagggagacaccattacaccagctatactcagcggccttcagcaagcagaaactgcagagtgcccctaccaagaagccagcccttccctttggagatctgcccatgggataccaacatctgcatacccagctccagtatgagtgcatctcacccttctaccgccgcctgggcagcagcaggaggacatgtctgaggactgggaagtggagtgggcgggcaccatcctgcatccctatctgcgggaaaattgagaacatcactgctccaaagacccaagggttgcgctggccgtggcaggcagccatctacaggaggaccagcggggtgcatgacggcagcctacacaagggagcgtggttcctagtctgcagcggtgccctggtgaatgagcgcactgtggtggtggctgcccactgtgttactgacctggggaaggtcaccatgatcaagacagcagacctgaaagttgttttggggaaattctaccgggatgatgaccgggatgagaagaccatccagagcctacagatttctgctatcattctgcatcccaactatgaccccatcctgcttgatgctgacatcgccatcctgaagctcctagacaaggcccgtatcagcacccgagtccagcccatctgcctcgctgccagtcgggatctcagcacttccttccaggagtcccacatcactgtggctggctggaatgtcctggcagacgtgaggagccctggcttcaagaacgacacactgcgctctggggtggtcagtgtggtggactcgctgctgtgtgaggagcagcatgaggaccatggcatcccagtgagtgtcactgataacatgttctgtgccagctgggaacccactgccccttctgatatctgcactgcagagacaggaggcatcgcggctgtgtccttcccgggacgagcatctcctgagccacgctggcatctgatgggactggtcagctggagctatgataaaacatgcagccacaggctctccactgccttcaccaaggtgctgccttttaaagactggattgaaagaaatatgaaatgaaccatgctcatgcactccttgagaagtgtttctgtatatccgtctgtacgtgtgtcattgcgtgaagcagtgtgggcctgaagtgtgatttggcctgtgaacttggctgtgccagggcttctgacttcagggacaaaactcagtgaagggtgagtagacctccattgctggtaggctgatgccgcgtccactactaggacagccaattggaagatgccagggcttgcaagaagtaagtttcttcaaagaagaccatatacaaaacctctccactccactgacctggtggtcttccccaactttcagttatacgaatgccatcagcttgaccagggaagatctgggcttcatgaggccccttttgaggctctcaagttctagagagctgcctgtgggacagcccagggcagcagagctgggatgtggtgcatgcctttgtgtacatggccacagtacagtctggtccttttccttccccatctcttgtacacattttaataaaataagggttggcttctgaactacaaaacaaa

SEQ ID NO: 164224 - DNA, 3142 bp, Homo sapiens
  Payload ID: 12335
  Gene Symbol: PAMR1
  Gene Name: peptidase domain containing associated with muscle regeneration 1
  Uniprot ID: Q6UXH9
  ENST ID: ENST00000619888
  CDS Start-End: 447-2609
agggcaaagccagctcccgtctcagcctcccgtaggaagatctcccggcctcacctgagcgccccgcagccctgggtacctctgctcccgcccagggtcctatggcccctcctcccagcacccaacactgggaccccacctgtacccaggctggcctccctcccccgcagcttcctttgcagccgccgtccgcgggtctccaggcgtggccacacctcccggggccccgcaagggttaaggcagcagagaggagaggtttgggctgacgtcgctctggctgaaggtggttcccctcagatgaggatgggagagcctggcgagctgaaacccgagctcccgctcagctggggctcggggaggtccctgtaaaacccgcctgcccccggcctccctgggtccctcctctccctccccagtagacgctcgggcaccagccgcggcaaggatggagctgggttgctggacgcagttggggctcacttttcttcagctccttctcatctcgtccttgccaagagagtacacagtcattaatgaagcctgccctggagcagagtggaatatcatgtgtcgggagtgctgtgaatatgatcagattgagtgcgtctgccccggaaagagggaagtcgtgggttataccatcccttgctgcaggaatgaggagaatgagtgtgactcctgcctgatccacccaggttgtaccatctttgaaaactgcaagagctgccgaaatggctcatgggggggtaccttggatgacttctatgtgaaggggttctactgtgcagagtgccgagcaggctggtacggaggagactgcatgcgatgtggccaggttctgcgagccccaaagggtcagattttgttggaaagctatcccctaaatgctcactgtgaatggaccattcatgctaaacctgggtttgtcatccaactaagatttgtcatgttgagcctggagtttgactacatgtgccagtatgactatgttgaggttcgtgatggagacaaccgcgatggccagatcatcaagcgtgtctgtggcaacgagcggccagctcctatccagagcataggatcctcactccacgtcctcttccactccgatggctccaagaattttgacggtttccatgccatttatgaggagatcacagcatgctcctcatccccttgtttccatgacggcacgtgcgtccttgacaaggctggatcttacaagtgtgcctgcttggcaggctatactgggcagcgctgtgaaaatctccttgaagaaagaaactgctcagaccctgggggcccagtcaatgggtaccagaaaataacagggggccctgggcttatcaacggacgccatgctaaaattggcaccgtggtgtctttcttttgtaacaactcctatgttcttagtggcaatgagaaaagaacttgccagcagaatggagagtggtcagggaaacagcccatctgcataaaagcctgccgagaaccaaagatttcagacctggtgagaaggagagttcttccgatgcaggttcagtcaagggagacaccattacaccagctatactcagcggccttcagcaagcagaaactgcagagtgcccctaccaagaagccagcccttccctttggagatctgcccatgggataccaacatctgcatacccagctccagtatgagtgcatctcacccttctaccgccgcctgggcagcagcaggaggacatgtctgaggactgggaagtggagtgggcgggcaccatcctgcatccctatctgcgggaaaattgagaacatcactgctccaaagacccaagggttgcgctggccgtggcaggcagccatctacaggaggaccagcggggtgcatgacggcagcctacacaagggagcgtggttcctagtctgcagcggtgccctggtgaatgagcgcactgtggtggtggctgcccactgtgttactgacctggggaaggtcaccatgatcaagacagcagacctgaaagttgttttggggaaattctaccgggatgatgaccgggatgagaagaccatccagagcctacagatttctgctatcattctgcatcccaactatgaccccatcctgcttgatgctgacatcgccatcctgaagctcctagacaaggcccgtatcagcacccgagtccagcccatctgcctcgctgccagtcgggatctcagcacttccttccaggagtcccacatcactgtggctggctggaatgtcctggcagacgtgaggagccctggcttcaagaacgacacactgcgctctggggtggtcagtgtggtggactcgctgctgtgtgaggagcagcatgaggaccatggcatcccagtgagtgtcactgataacatgttctgtgccagctgggaacccactgccccttctgatatctgcactgcagagacaggaggcatcgcggctgtgtccttcccgggacgagcatctcctgagccacgctggcatctgatgggactggtcagctggagctatgataaaacatgcagccacaggctctccactgccttcaccaaggtgctgccttttaaagactggattgaaagaaatatgaaatgaaccatgctcatgcactccttgagaagtgtttctgtatatccgtctgtacgtgtgtcattgcgtgaagcagtgtgggcctgaagtgtgatttggcctgtgaacttggctgtgccagggcttctgacttcagggacaaaactcagtgaagggtgagtagacctccattgctggtaggctgatgccgcgtccactactaggacagccaattggaagatgccagggcttgcaagaagtaagtttcttcaaagaagaccatatacaaaacctctccactccactgacctggtggtcttccccaactttcagttatacgaatgccatcagcttgaccagggaagatctgggcttcatgaggccccttttgaggctctcaagttctagagagctgcctgtgggacagcccagggcagcagagctgggatgtggtgcatgcctttgtgtacatggccacagtacagtctggtccttttccttccccatctcttgtacacattttaataaaataagggttggcttctgaactacaaaacaaa

SEQ ID NO: 164225 - DNA, 6732 bp, Homo sapiens
  Payload ID: 12336
  Gene Symbol: PI15
  Gene Name: peptidase inhibitor 15
  Uniprot ID: O43692
  ENST ID: ENST00000260113
  CDS Start-End: 180-956
agcattcaaaccttgcagagctttgctctcagagagtttgtaaaaagacacactcctcttacaagagttcatgctaccacatagcaaagaaccttaaatttttggaagaacaatatattcattttggcattgtgcagagcaaagtaaactcggtggcctcttcttctccacccctcaaaatgatagcaatctctgccgtcagcagtgcactcctgttctcccttctctgtgaagcaagtaccgtcgtcctactcaattccactgactcatccccgccaaccaataatttcactgatattgaagcagctctgaaagcacaattagattcagcggatatccccaaagccaggcggaagcgctacatttcgcagaatgacatgatcgccattcttgattatcataatcaagttcggggcaaagtgttcccaccggcagcaaatatggaatatatggtttgggatgaaaatcttgcaaaatcggcagaggcttgggcggctacttgcatttgggaccatggaccttcttacttactgagatttttgggccaaaatctatctgtacgcactggaagatatcgctctattctccagttggtcaagccatggtatgatgaagtgaaagattatgcttttccatatccccaggattgcaaccccagatgtcctatgagatgttttggtcccatgtgcacacattatacgcagatggtttgggccacttccaatcggataggatgcgcaattcatacttgccaaaacatgaatgtttggggatctgtgtggcgacgtgcagtttacttggtatgcaactatgccccaaagggcaattggattggagaagcaccatataaagtaggggtaccatgttcatcttgtcctccaagttatgggggatcttgtactgacaatctgtgttttccaggagttacgtcaaactacctgtactggtttaaataagtttaccttttcctccaggaaatataatgatttctgggaacatgggcatgtatatatatatatggagagagaattttgcacatattatacatattttgtgctaatcttgttttcctcttagtattcctttgtataaattagtgtttgtctagcatgtttgtttaatcctttgaaatatttgaaacatcaatttctattttctgacctctaagcctaaattaagatattgtatatgtaatgatgacatagttgatgcatccaatcctaaaacttacattccaaaggaattatatcattatgttcctaaggagtaaatatatatttgacctgtaagtgtgtgtatgtatacatatacatatgtatgtgtatggatttatatatgcacacaaacatataatatgtgatgtaacatgtagatgataatatgattcagtagtcaacttgagggaaatttttaaaaaactattctcaattatatacgaggtgatgggacttcttaacacacatttctataatacccatgaaatgataatttgtaaaataacacttagtgatatctggaaataataattcaattaagcaaccacgaatttcaccctggagatattttttcttatttgagtccaccaaaggataatgccaacttatataagttctcaaatcatgccttccgcttagtctcattttattcattcagtcgtcatgagttgagtgcttactacatgcaaggcactctgctagttatattctaataatgcagagataattagacatggttcccgccctcaagaagctcacaaaagtattcaggaaataatgcagactagtgattttgctataaaattatttttgaaggaagcagacacagcagtatttacctgtaggtggagcaagtaataagccatgctgtgcaatatatacataaagcttctgcttctcatgggaatttagttacagtgcttggaatgagaaggggaaggaaagaattaacaaatgccaagatttctggagcagattgtacagctgtgactttggaaaacagaaagtaagaccctcagaaaaccaatgaagtctaagagaaataaaatttagtggacaggtatgaaaagtgtaattgcgcctaactaccagatggagagcttcagaatgggctatccttagagtctagtacatcttgaggcctctcagcaggagacaaaggattccaaaaagagatgtggaggtgctgagggcacctctatctctttgttgtttagtctgtcattgaatcaatctacttatcatcttgggtctttgagtattgtatgaaagatccttcgtgcacaccacacacagtcatgattttgttaaagtagccttcttcagatgcttttctaagggctagttaccaactttatttctgtgtttctgtagaagaaacattttcagttcttcattgagtttgattatggaaatccattcaaagtcactatgaaaattttactcatgtagtttggaaatgcaacattttcctatcatgaaatctctttcagagaggagaatacaacatcttagtccagacatttaacatactgcatttcaagtacatgtgtgtgtgttttattcaggttgtgtaatgctcccgtagaattatagaacaattaaatatggttagttccagagtgcaaattacagaaggaagctacttgtttaaaattccatacacgtttgcagtttcttgtacacatttggatactttgaaagatgacagattgttaaatccattcaatggtaaagaaactcaccatctggagattgagtctacttgttaatgaatgactagcccaattatccttataaattgaatatggtgaccaaatgctttgatatcatactactctgcctttgtgggcacatatgtagacactactaaaaataaatatttttggagattaaaatggagaatagaagtaattacattatttaggtcttaatccaacttttttctaatatatctaaacaattgaaagggaagcttattcatggaatattggcttgatttatctagaaagtttttccttcttcaattttactatattcattctacaggaacagcaataagtactattaaacagaagatggctacactaagttccaattttgttgctgaattgcttctgtgagttcacttttcagttctaaggaagaataatatttgctacatatttcacaggggttcttatgaaggtaaatttaccagattaataaaaatttatgaatattaaaattatcattaataatataaaacacttatttgagattaaattaaatttttcatgagcccctctttggcaggaactctgtttaattctttgtatttatcccagcttcttaaatggtggctgtaacataataaatgtttaataaatgcttatatgaatggatttttagaattaactaagaagccaaaaatggcaacaatttacagaaatcccacctttccatgcttaagacaaaaatgtcttaaatataaagctgtgattatatcaaaaatccagataaatcatcaaatatatcagattaagaccagggtttacacacttaggcaatagtcctttccaaaccatgacaaaaactacaagtttatttataatttaacaactcagctgaaaatataacgggtatatttgttattctaactctattttttaaagttaataatataaagtggccatgtaaaatattttattttccaggctaaagcaaatgaaagtttgctggtatcaacacagcctgccatatttttcacagcatgcaacaatggtgctaggatagctatttcttactgtaattgccagaggcagaaatggtctgggtataagctatttcataaaagcagctttaaattgtcagtattaaggttttcatgtggaaaggtgtcattcaaaaaaaaagtaattggcatacatattccacatcatcgatcctctctgtggtgttaatttttttatatgaccagtagaaaaattttaatattctcacaatataggttttggggcttccatatcatcaaaagactgaaaaattataattttagaattaaactgatggatttcattatagaattatctgtgagttgtgtagacacagtcttaatgtttctggttatgacagataagtttgctcaaaaaatgtggatgaagccattattgttattattgttattgcttctgttcagttgtctaagtatcatcccttctgtggcccatcacgcagcagagttgccctacaaatttcatttggcagcgccataacattcatttaaaaagtttatgaaaacattcatttgaaagttccatgcagctttagcacagagttgaccaaacactggcgtaagttcaatttacacagaatatttgaattgaaacaatagaaatttttctcataatatatacctatgtgaaaccaacttatctgcataattaaatctaatacatatttaagccagtttaagtgctttgtgttgatgccatgcttatcaaatacatgcacaagctaaacataatttgaatgggtctatgaaggaaaaataatgcttagactttggtgtaggttcttcctgtgtagccatatacccaggctctgcagtatcgaaggatgcaaatgttgacatagatggaagctcttacctaccaaagtgtttaggaaggataaagttacatttgtcttaatttctaacattatctttgcttttatgtttcataaaaatttgtcattatttatgctggtgaaacgtataatcacatccaattatttgaacacatgcaaaataattttttaaattatgttattgtttaaatttgacttatgggagatcagtcaaaaacttagaaggtttaacacttcactgattaatggtgctgaaaacacgttacaattaccacatatccttgctataagttttgaagtttcttagcaattaaagtttttttattcagtgtgaactgtcagtatctattctggtgctaaatgtatggtgctaaatgaattgttagtgttgatggctttagtaatgctccttttattcattgctaaatttagtgttatccatttgattcctgattcagaaatatcaataaaatcctatgttaaattaatctttaccaaaaacaggcaagttaactctgttgttttaattcaacagtccaacattatttaggtgttacagagtgtaaatatatttctttgggagttattttctttttaaaatctttttatagcttggcaatgtccaaagtcaaatatcacctaaactggttagattacttctacagctaataatattgcaggcactggcgccctctggtggttatgaagacaaattcttaatggctacttgacctacagcaaaagccatttctgtaccataaaaatttgttgtgcaatattagaattatcatatgtttcctacatctgacagcacctaaaatgtttgataatattaacatgtatctaagaggaaaaaagagttaatatattctggcacccactttcctagtaatgttttccatgattttccagttctgaggcacttattaaagtgcttttttttttctgaattaattaggtattggtaaaatatatttttaaatttagttagctttataaacacaattagaattacaattaattaacagaggtataattgtctcactttcagaagtgatcatttatttttatttagcacaggtcataagaaaaatatatagaaaaataatcaatttcatatataaaaggattatttctccacctttaattattggcctatcatttgttagtgttatttggtcatattattgaactaatgtattattccattcaaagtctttctagatttaaaaatgtatgcaaaagcttaggattatatcatgtgtaactattatagataacatcctaaaccttcagtttagatatataattgactgggtgtaatctcttttgtaatctgttttgacagatttcttaaattatgttagcataatcaaggaagatttaccttgaagcactttccaaattgatactttcaaacttattttaaagcagtagaaccttttctatgaactaaatcacatgcaaaactccaacctgtagtatacataaaatggacttacttattcctctcaccttctccagtgcctaggaatattcttctctgagccctaggattgattctatcacacagagcaacattaatctaaatggtttagctccctcttttttctctaaaaacaatcagctaataaaaaaaaaatttgagggcctaaattatttcaatggttgtttgaaatattcagttcagtttgtacctgttagcagtctttcagtttgggggagaattaaatactgtgctaagctggtgcttggatacatattacagcatcttgtgttttatttgacaaacagaattttggtgccataatattttgagaattagagaagattgtgatgcatatatataaacactatttttaaaaaatatctaaatatgtctcacatatttatataatcctcaaatatactgtaccattttagatattttttaaacagattaatttggagaagttttattcattacctaattctgtggcaaaaatggtgcctctgatgttgtgatatagtattgtcagtgtgtacatatataaaacctgtgtaaacctctgtccttatgaaccataacaaatgtagctttttaaagtccattgtattgttttttctttcaataaaagagtataattaa

SEQ ID NO: 164226 - DNA, 1413 bp, Homo sapiens
  Payload ID: 12336
  Gene Symbol: PI15
  Gene Name: peptidase inhibitor 15
  Uniprot ID: O43692
  ENST ID: ENST00000523773
  CDS Start-End: 465-1241
tcacttggtgtgtctatatgtctggcagacattatcagcacattctctgttgttacctgtgattcattttttcttcactctccaggtgaatttcaattgctgaaaatttcccactgaaaatatgcagtaatatattttgtggttcagacatttggggcaaatggttcacattcattttagggttagtggtcatgctgtttatttttctctgctatacaaagttcctcttaggggtctgcctcatgacactaaaaaatgaatagagattctactgtaggttatctcctaggcttgagttcaacatttgtttggatttttgaagaaagtcaaatcaagcaatgctcccaaatgatgtctttgtaaattcataccctctggccctattttttttcatagaccctaactctacctttctgctttaaagcaaagtaaactcggtggcctcttcttctccacccctcaaaatgatagcaatctctgccgtcagcagtgcactcctgttctcccttctctgtgaagcaagtaccgtcgtcctactcaattccactgactcatccccgccaaccaataatttcactgatattgaagcagctctgaaagcacaattagattcagcggatatccccaaagccaggcggaagcgctacatttcgcagaatgacatgatcgccattcttgattatcataatcaagttcggggcaaagtgttcccaccggcagcaaatatggaatatatggtttgggatgaaaatcttgcaaaatcggcagaggcttgggcggctacttgcatttgggaccatggaccttcttacttactgagatttttgggccaaaatctatctgtacgcactggaagatatcgctctattctccagttggtcaagccatggtatgatgaagtgaaagattatgcttttccatatccccaggattgcaaccccagatgtcctatgagatgttttggtcccatgtgcacacattatacgcagatggtttgggccacttccaatcggataggatgcgcaattcatacttgccaaaacatgaatgtttggggatctgtgtggcgacgtgcagtttacttggtatgcaactatgccccaaagggcaattggattggagaagcaccatataaagtaggggtaccatgttcatcttgtcctccaagttatgggggatcttgtactgacaatctgtgttttccaggagttacgtcaaactacctgtactggtttaaataagtttaccttttcctccaggaaatataatgatttctgggaacatgggcatgtatatatatatatggagagagaattttgcacatattatacatattttgtgctaatcttgttttcctcttagtattcctttgtataaattagtgtttgtctagcatgtttgtttaatcctttg

SEQ ID NO: 164227 - DNA, 2190 bp, Homo sapiens
  Payload ID: 12337
  Gene Symbol: PI16
  Gene Name: peptidase inhibitor 16
  Uniprot ID: Q6UXB8
  ENST ID: ENST00000373674
  CDS Start-End: 329-1720
cctgggtgcaaccagtcacagctctgcagaggttactgtgattttgcccctgaaggatctgtccacaacttaggaactcacacagcttttggcctgagcccccgttaccaagagaaaggaggtttttgccaaggactccaaggggagtgcacttgatgctggtcgggacccaaagcgcccagccctccctgagacattgtgtgagtcgggctgggcctcaaacacggcccccactgccccaccccagccagggtggtgcttgtgtgggaaggactttaaatccagctgccagacccctggacgggagaaggagagacggctggccaccatgcacggctcctgcagtttcctgatgcttctgctgccgctactgctactgctggtggccaccacaggccccgttggagccctcacagatgaggagaaacgtttgatggtggagctgcacaacctctaccgggcccaggtatccccgacggcctcagacatgctgcacatgagatgggacgaggagctggccgccttcgccaaggcctacgcacggcagtgcgtgtggggccacaacaaggagcgcgggcgccgcggcgagaatctgttcgccatcacagacgagggcatggacgtgccgctggccatggaggagtggcaccacgagcgtgagcactacaacctcagcgccgccacctgcagcccaggccagatgtgcggccactacacgcaggtggtatgggccaagacagagaggatcggctgtggttcccacttctgtgagaagctccagggtgttgaggagaccaacatcgaattactggtgtgcaactatgagcctccggggaacgtgaaggggaaacggccctaccaggaggggactccgtgctcccaatgtccctctggctaccactgcaagaactccctctgtgaacccatcggaagcccggaagatgctcaggatttgccttacctggtaactgaggccccatccttccgggcgactgaagcatcagactctaggaaaatgggtactccttcttccctagcaacggggattccggctttcttggtaacagaggtctcaggctccctggcaaccaaggctctgcctgctgtggaaacccaggccccaacttccttagcaacgaaagacccgccctccatggcaacagaggctccaccttgcgtaacaactgaggtcccttccattttggcagctcacagcctgccctccttggatgaggagccagttaccttccccaaatcgacccatgttcctatcccaaaatcagcagacaaagtgacagacaaaacaaaagtgccctctaggagcccagagaactctctggaccccaagatgtccctgacaggggcaagggaactcctaccccatgcccaggaggaggctgaggctgaggctgagttgcctccttccagtgaggtcttggcctcagtttttccagcccaggacaagccaggtgagctgcaggccacactggaccacacggggcacacctcctccaagtccctgcccaatttccccaatacctctgccaccgctaatgccacgggtgggcgtgccctggctctgcagtcgtccttgccaggtgcagagggccctgacaagcctagcgtcgtgtcagggctgaactcgggccctggtcatgtgtggggccctctcctgggactactgctcctgcctcctctggtgttggctggaatcttctgaaggggataccactcaaagggtgaagaggtcagctgtcctcctgtcatcttccccaccctgtccccagcccctaaacaagatacttcttggttaaggccctccggaagggaaaggctacggggcatgtgcctcatcacaccatccatcctggaggcacaaggcctggctggctgcgagctcaggaggccgcctgaggactgcacaccgggcccacacctctcctgcccctccctcctgagtcctgggggtgggaggatttgagggagctcactgcctacctggcctggggctgtctgcccacacagcatgtgcgctctccctgagtgcctgtgtagctggggatggggattcctaggggcagatgaaggacaagccccactggagtggggttctttgagtgggggaggcagggacgagggaaggaaagtaactcctgactctccaataaaaacctgtccaacctgtggcaa

SEQ ID NO: 164228 - DNA, 2083 bp, Homo sapiens
  Payload ID: 12337
  Gene Symbol: PI16
  Gene Name: peptidase inhibitor 16
  Uniprot ID: Q6UXB8
  ENST ID: ENST00000611814
  CDS Start-End: 224-1615
gctattgaaggggcatgactggaggcagaggccacagagatgaccacaccagggcaacctgtagtgccagtgcctggttccacccggggggcatctgagaactgtgtccttccattcctgagtccagcacttcccaggccagccagggtggtgcttgtgtgggaaggactttaaatccagctgccagacccctggacgggagaaggagagacggctggccaccatgcacggctcctgcagtttcctgatgcttctgctgccgctactgctactgctggtggccaccacaggccccgttggagccctcacagatgaggagaaacgtttgatggtggagctgcacaacctctaccgggcccaggtatccccgacggcctcagacatgctgcacatgagatgggacgaggagctggccgccttcgccaaggcctacgcacggcagtgcgtgtggggccacaacaaggagcgcgggcgccgcggcgagaatctgttcgccatcacagacgagggcatggacgtgccgctggccatggaggagtggcaccacgagcgtgagcactacaacctcagcgccgccacctgcagcccaggccagatgtgcggccactacacgcaggtggtatgggccaagacagagaggatcggctgtggttcccacttctgtgagaagctccagggtgttgaggagaccaacatcgaattactggtgtgcaactatgagcctccggggaacgtgaaggggaaacggccctaccaggaggggactccgtgctcccaatgtccctctggctaccactgcaagaactccctctgtgaacccatcggaagcccggaagatgctcaggatttgccttacctggtaactgaggccccatccttccgggcgactgaagcatcagactctaggaaaatgggtactccttcttccctagcaacggggattccggctttcttggtaacagaggtctcaggctccctggcaaccaaggctctgcctgctgtggaaacccaggccccaacttccttagcaacgaaagacccgccctccatggcaacagaggctccaccttgcgtaacaactgaggtcccttccattttggcagctcacagcctgccctccttggatgaggagccagttaccttccccaaatcgacccatgttcctatcccaaaatcagcagacaaagtgacagacaaaacaaaagtgccctctaggagcccagagaactctctggaccccaagatgtccctgacaggggcaagggaactcctaccccatgcccaggaggaggctgaggctgaggctgagttgcctccttccagtgaggtcttggcctcagtttttccagcccaggacaagccaggtgagctgcaggccacactggaccacacggggcacacctcctccaagtccctgcccaatttccccaatacctctgccaccgctaatgccacgggtgggcgtgccctggctctgcagtcgtccttgccaggtgcagagggccctgacaagcctagcgtcgtgtcagggctgaactcgggccctggtcatgtgtggggccctctcctgggactactgctcctgcctcctctggtgttggctggaatcttctgaaggggataccactcaaagggtgaagaggtcagctgtcctcctgtcatcttccccaccctgtccccagcccctaaacaagatacttcttggttaaggccctccggaagggaaaggctacggggcatgtgcctcatcacaccatccatcctggaggcacaaggcctggctggctgcgagctcaggaggccgcctgaggactgcacaccgggcccacacctctcctgcccctccctcctgagtcctgggggtgggaggatttgagggagctcactgcctacctggcctggggctgtctgcccacacagcatgtgcgctctccctgagtgcctgtgtagctggggatggggattcctaggggcagatgaaggacaagccccactggagtggggttctttgagtgggggaggcagggacgagggaaggaaagtaactcctgactctccaataaaaacctgtccaacctgtggc

SEQ ID NO: 164229 - DNA, 577 bp, Homo sapiens
  Payload ID: 12338
  Gene Symbol: PI3
  Gene Name: peptidase inhibitor 3, skin-derived
  Uniprot ID: P19957
  ENST ID: ENST00000243924
  CDS Start-End: 48-401
aaagattggtatggccttagctcttagccaaacaccttcctgacaccatgagggccagcagcttcttgatcgtggtggtgttcctcatcgctgggacgctggttctagaggcagctgtcacgggagttcctgttaaaggtcaagacactgtcaaaggccgtgttccattcaatggacaagatcccgttaaaggacaagtttcagttaaaggtcaagataaagtcaaagcgcaagagccagtcaaaggtccagtctccactaagcctggctcctgccccattatcttgatccggtgcgccatgttgaatccccctaaccgctgcttgaaagatactgactgcccaggaatcaagaagtgctgtgaaggctcttgcgggatggcctgtttcgttccccagtgagagggagccggtccttgctgcacctgtgccgtccccagagctacaggccccatctggtcctaagtccctgctgcccttccccttcccacactgtccattcttcctcccattcaggatgcccacggctggagctgcctctctcatccactttccaataaagagttccttctgctcca

SEQ ID NO: 164230 - DNA, 2152 bp, Homo sapiens
  Payload ID: 12339
  Gene Symbol: PM20D1
  Gene Name: peptidase M20 domain containing 1
  Uniprot ID: Q6GTS8
  ENST ID: ENST00000367136
  CDS Start-End: 46-1554
gtcagaactaccccggtagcctgacagcaggagctcgagagaagcatggctcagcggtgcgtttgcgtgctggccctggtggctatgctgctcctagttttccctaccgtctccagatcgatgggcccgaggagcggggagcatcaaagggcgtcgcgaatcccttctcagttcagcaaagaggaacgcgtcgcgatgaaagaggcgctgaaaggtgccatccagattccaacagtgacttttagctctgagaagtccaatactacagccctggctgagttcggaaaatacattcataaagtctttcctacagtggtcagcaccagctttatccagcatgaagtcgtggaagagtatagccacctgttcactatccaaggctcggaccccagcttgcagccctacctgctgatggctcactttgatgtggtgcctgcccctgaagaaggctgggaggtgcccccattctctgggttggagcgtgatggcatcatctatggtcggggcacactggacgacaagaactctgtgatggcattactgcaggccttggagctcctgctgatcaggaagtacatcccccgaagatctttcttcatttctctgggccatgatgaggagtcatcagggacaggggctcagaggatctcagccctgctacagtcaaggggcgtccagctagccttcattgtggacgaggggggcttcatcttggatgatttcattcctaacttcaagaagcccatcgccttgattgcagtctcagagaagggttccatgaacctcatgctgcaagtaaacatgacttcaggccactcttcagctcctccaaaggagacaagcattggcatccttgcagctgctgtcagccgattggagcagacaccaatgcctatcatatttggaagcgggacagtggtgactgtattgcagcaactggcaaatgagtttcccttccctgtcaatataatcctgagcaacccatggctatttgaaccacttataagcaggtttatggagagaaatcccttaaccaatgcaataatcaggaccaccacggcactcaccatattcaaagcaggggtcaagttcaatgtcatccccccagtggcccaggccacagtcaacttccggattcaccctggacagacagtccaagaggtcctagaactcacgaagaacattgtggctgataacagagtccagttccatgtgttgagtgcctttgaccccctccccgtcagcccttctgatgacaaggccttgggctaccagctgctccgccagaccgtacagtccgtcttcccggaagtcaatattactgccccagttacttctattggcaacacagacagccgattctttacaaacctcaccactggcatctacaggttctaccccatctacatacagcctgaagacttcaaacgcatccatggagtcaacgagaaaatctcagtccaagcctatgagacccaagtgaaattcatctttgagttgattcagaatgctgacacagaccaggagccagtttctcacctgcacaaactgtgaggtcaaggggcctgctgggttaggcatgcccgaccccgggacaggactaacccaagggggaaagctagtgttgatgaaacttttgatcaaaaccacattgtaaaacattgcccatctgtcttgctcactcttaaactctcccaagaacaaggccggggtaaggtaaagtcagcagaaatctggcttctcccttcctcccgacatctgcatcccttgatccactggcatttgctgccctcttgtcccttatctgtcttatgctggttatttcactgcttcaccttccaggcttgacttaacaaatgtagatttgagaaatctcaaccagttgttacctgataggagtctttaatttagggcactcttgctgggatgctttctccagagcttatatatttcttcttactagaactttcttcccccttttattcccctctcttcttggactcatgagctgtctcttcatctctcctctctctcctgcatctctccccttactcttcaatttattctacttctggacctggacttacccaaactgtgatactaccataattgtcaccataatcagtcaaataaagtgatctgtgcatcacca

SEQ ID NO: 164231 - DNA, 4708 bp, Homo sapiens
  Payload ID: 12340
  Gene Symbol: PM20D2
  Gene Name: peptidase M20 domain containing 2
  Uniprot ID: Q8IYS1
  ENST ID: ENST00000275072
  CDS Start-End: 96-1406
gggtcctggaggcctctgggcgcgtgcgcgggcggtcgctacctgcggccgagccagggagcgagagggcgcagagggcagcgggcttgggcagcatgaggcccggaggggagcggcccgtggaagggggcgcgtgcaatggccgctccgagctggagctactgaagctgcgctcggcggagtgcatcgacgaggcggccgagcggctgggggccctgagccgcgcgatctggagccagcccgagctggcctacgaggagcaccatgcccaccgcgtgctgacgcacttcttcgagcgggagccgcccgcggcctcctgggcagtgcagccgcactaccagctgcccacggccttccgcgccgagtgggagccgccggaggcccgggcaccgagcgccacgccacgcccgctgcacctgggcttcctctgcgagtacgacgcgctgcccggcatcggccacgcctgcggccacaacctcatcgctgaggtcggggcggcggccgcgctgggcgtgaggggggccttagagggcctccccaggccgcctccgcccgtgaaggtagttgtcctgggaacccctgcagaagaagatggtggtggcaaaattgatttaattgaagcaggggcttttacaaatcttgatgttgtttttatggcccacccatcacaagagaatgctgcttatctaccagatatggctgaacatgatgtgactgtgaaatactatggaaaagcatctcattctgcttcttatccctgggaaggattaaatgcattagatgctgctgtgctggcctataacaatctgtctgtgttcagacagcaaatgaaaccaacctggagagttcatggtataataaaaaatggtggtgtaaaacccaatatcattccctcttattctgaattaatctattacttccgtgcaccctcaatgaaagaacttcaagttttgaccaaaaaggcagaagattgcttcagagctgcagctttggcttcagggtgcacagtggaaattaaaggtggagcacatgattattacaatgttcttcccaataagagcctatggaaagcctatatggaaaatggaagaaagctaggaatagagttcatttcagaagatacaatgttgaatggcccttcaggatctacggattttggaaatgttagttttgtggttcctggaattcatccatattttcacattggatctaatgccttgaatcatactgaacagtacactgaagctgctgggtcacaggaagctcagttctacactctgcggacggccaaagctctggcaatgacggcactggatgttatttttaaaccagagttactggaaggaatcagagaggactttaaactgaaacttcaagaagaacagtttgtaaatgcagtagaataaaagacttaggggccacttataaatcaagaagacgtgatgatttttttcttttaatctcttttaatgaaggcatgcttgttttttaatcttaaaggagtaaaattctttttacctgataagtgaggacagggtgtggagaaaacatattaattacctcatatctaaagtgaaaatttttgcaaatccgtacttgataggattatgatattacaggagctggtatgtgatgccattctttctttttttttaccccgcaaccactcaccttcacagtagtgataccatttcttaacctggaggatacatggcatcatttttataaaatatgttagtaaacctttttgtaagccttaaatgttatgtgtatttttaaaagcttaagagatttcaaaccttatattcagaattgacacccatgagagtgttttgtggtatagggtggtaaacttgttctctaatcgtatattaattcctctaccagattgtatatttgaagccagtgtctttcctttttttgttttaagatagagcctcgctctgttgcccaggctgaagtgtagtggcacaatctcggctcactgcaacctctgcctcccaggttcaagtgattctcctgcctcagcctaccaagtagctgggattacaggtgtgtggcaccatgcccagctaatttttgtatttttagtagagacggcatttcaccatgttggccaggctggtctcgaactcctgacctcaggtgatgcacctgcctcggcctcctaaagtgctgggattacaggcatgagccaccgcacccggcctgccagtgtctttttaatacacatgtgtgttggtatttttaaattgttacagtatctagcatattgcttactctgaatattcagtactttttgaataagcaaatattgcttccttgcttggaatcatcagagtttaaagtagcttcgtggatggaccatgatcctaagatgagttttaattttgtgtttacagtcatctcttgtacaacgtggagaagaaaagatatacttactactttgcttcaggtacacataagaaaacctcttttttaaaaaaatttttatttttttacataatagagacaggggctcgctgtagcttccaggctggcctcaaactcctgggctcaagcaatcctcctgtcttggcctcccaaagtgttgggatttcaggtatgagacaccacacctgcccatttttgtttggttttttaatgggcaggttcttgctctcccaggctggagtgcagtggtgtaatcacagctcactgcagtctcgaactcctggactcaagcagtcctcccacctcagcctcctaaagcactgggattacaggcttgaggcactgcacctggccctgaccattttttaaaaaggttaggcttagtgcaaagtttaaaattatatgattcttaaaatactgaattagtttctaaactaaactagaggtataggtggacctgcttgaggtatctttgtttttatggaacatttttattacatgcctttataatttttcattgttcacaccctgtactgaaacctttttctcaaataccaactcttggctatgttaaatttgtagactttaaaagatgttatctaaattaatggtttaaatatacaaattgaaaatattttctttttagtggcaattttaaaagcaggccttaatatgggacctgcttttaaagtaaaatatgtggtactatgaattactaaattgctatataccatgtaatagtgagtatagctaatatttagtatgccttttaaaaattttggactgcttttcggttttaacaaattctccacatgtgaactactcaagaaattttccctttttaattgcctctatagcactcataagagctagggcattaggataaactagaatattttatgtttatgaatacttgtataaacttaaaagtgttttgatttcccacaatttcccaaaggaatgtttatttattaagagttgtgttgataatttaactgttacaatttcagcagttgaattcagtgaacactggttgaggagtgcctatttctaagcactgggtgtaagaagaaaagacacttgcaaaggaagagctaagattaacataatttctttggtttttctattgcttgttattattatgtaaaaactgggtggcagttcacaaggaagattgttgtaacagaagagtgacaaccaatagttttttgatcattaaatcaaattttgtaaacagtggcaggagcgtggacttaaaacaaggcttgcttatttggttttgtcaaagttttacgaaaatatatgatatatatttatactaaaactatataatccttagatttaggaaagcaatcagttaatgtctttagcacactaaagcagtattaaacacaggtacaagttggaaattgtagaaaactgaaagaaaacaagacaaaatgtctatggtagggaataaaagagtttaagatattatgtaaaattatgtgtattttcttctcttttacataaattgtttgtgaaaagtgtgctcaacttttttacaagagtgatattaacttggatttatttttcaatataatttggagaccctttgttatccaaataaaattgatgagtttctgtgcctgtaaaaaaaaaaaaaaaaaaaagaaaagaaaagacactgttgcatgccccagaaagcttgtggtgggtggtaagttctcacgagatttatttatctgagcaacattgggactgagggaacatctgaaagctaccatcttgaaaatttttgaggaagtgtttctgaaatatttaaaaatacttaagtcagtcattttgaacaaaagaaattgatacaataagtttttttttttaaggatgattgtctaattttgtaatatgttgttttttaaaaacctgtctgatggtgttttatacatttctaactttttacctgagttatctctttagtcttttggaaaataccctacacaatactaacctttaaaactatcaaatttttgttataagataaatgttatctttgtactagatagcaaccctttataaggttgtaaggtataataaactgcttatttttttacatacttcatatcaagcattttgcagtccaattatatagttgaggatggtgtattttgatatgtatgaagttaatattttcaagtaagcaatcagtctactaccatcagattataagcttttttgtaataataggtacataaaatgtgtatgaaaaatctacaataaacatgtttatctgata

SEQ ID NO: 164232 - DNA, 1158 bp, Homo sapiens
  Payload ID: 12341
  Gene Symbol: PDF
  Gene Name: peptide deformylase (mitochondrial)
  Uniprot ID: Q9HBH1
  ENST ID: ENST00000288022
  CDS Start-End: 26-757
ccgggtcactgttaagggggccgccatggcccggctgtggggcgcgctgagtctttggccactgtgggcggccgtgccgtggggcggggcggcagccgtcggtgtccgggcttgcagctccacggccgccccggacggcgtcgagggcccggcgctgcggcgctcctattggcgccacctgaggcgtctggtgctgggtcctcccgaaccgccgttctcgcacgtgtgccaagtcggggacccggtgctgcgcggcgtggcggccccggtggagcgggcgcagctaggcgggcccgagctgcagcggctgacgcaacggctggtccaggtgatgcggcggcggcgctgcgtgggcctaagcgcgccgcagctgggggtgccgcggcaggtgctggcgctggagctccccgaggcgctgtgtcgggagtgcccgccccgccagcgcgcgctccgccaaatggagcccttccccctgcgcgtgttcgtgaaccccagcctgcgagtgcttgacagccgcctggtcacctttcccgagggctgcgagagcgtcgccggcttcctggcctgcgtgccccgcttccaggcggtgcagatctcagggctggaccccaatggagaacaggtggtgtggcaggcgagcgggtgggcagcccgcatcatccagcacgagatggaccacctgcagggctgcctgtttattgacaaaatggacagcaggacgttcacaaacgtctattggatgaaggtgaatgactaaagctttgctactggggctgaggattccggataccaagacgcaaacactttcactttgagctgggcaaatcttacttggcatcaacttggatggctcgcatatgacaggaaactggattgccaaggcatggcagactgagctggaggaagatgtcagaaatgtttgccctgaaatcagttacggacaaaatgttggctacaacttgaggagaaaaatcacccccaaaggagtggacatttcctaacaattctgtatggaggaaggtggggtaattgcattcgtctgcagtagacacgagttcctcggacctgtataatctcccaaagccaaggtttggtaataatgtagtccccaaatacctgaaagctgtctttaaaaatgcaggtaagcatgtgactggc

SEQ ID NO: 164233 - DNA, 1053 bp, Homo sapiens
  Payload ID: 12342
  Gene Symbol: PYY
  Gene Name: peptide YY
  Uniprot ID: P10082
  ENST ID: ENST00000360085
  CDS Start-End: 542-835
gcccctggaggaactgaacccactatcggtcatggggccgagactaaatgtggcgggttgtctttaatctgctgccaagaggaaactcattcaggcaagttcagccctttatgaggaattcccctgtggtcacattccaattcctggacctgctgccaccctcagaactgcatgctccttcttcagactttctaagaatgactcaggtcattggtggagtgaagtcaagatttccaactcagtcacctgaagagatggagataccattcatggagctggaggtccctggagatttgggaattcagataacaagctaagataaggagtttgcctacctctgtcctagagcgaagcctgagccttgggcgcgcagcacaccacaagtatctgttactgtgttttgcagaagcttcaggcggggatataagccccacaaggaaagcgctgagcagaggaggcctcagcttgacctgcggcagtgcagcccttgggacttccctcgccttccacctcctgctcgtctgcttcacaagctatcgctatggtgttcgtgcgcaggccgtggcccgccttgaccacagtgcttctggccctgctcgtctgcctaggggcgctggtcgacgcctaccccatcaaacccgaggctccccgcgaagacgcctcgccggaggagctgaaccgctactacgcctccctgcgccactacctcaacctggtcacccggcagcggtatgggaaaagagacggcccggacacgcttctttccaaaacgttcttccccgacggcgaggaccgccccgtcaggtcgcggtcggagggcccagacctgtggtgaggacccctgaggcctcctgggagatctgccaaccacgcccacgtcatttgcatacgcactcccgaccccagaaacccggattctgcctcccgacggcggcgtctgggcagggttcgggtgcggccctccgcccgcgtctcggtgcccccgccccctgggctggagggctgtgtgtggtccttccctggtcccaaaataaagagcaaattccacagaaa

SEQ ID NO: 164234 - DNA, 580 bp, Homo sapiens
  Payload ID: 12342
  Gene Symbol: PYY
  Gene Name: peptide YY
  Uniprot ID: P10082
  ENST ID: ENST00000592796
  CDS Start-End: 92-364
agaggaggcctcagcttgacctgcggcagtgcagcccttgggacttccctcgccttccacctcctgctcgtctgcttcacaagctatcgctatggtgttcgtgcgcaggccgtggcccgccttgaccacagtgcttctggccctgctcgtctgcctaggggcgctggtcgacgcctaccccatcaaacccgaggctccccgcgaagacgcctcgccggaggagctgaaccgctactacgcctccctgcgccactacctcaacctggtcacccggcagcggtatgggaaaagagacggcccggacacgcttctttccaaaacgttcttccccgacggcgaggaccgccccgtcaggtcgcggtaaaagcgcccgttaccacacatcctgcatccgagagcgcggcctggccctaccctggcaacatcacttaacgacgtctcccaggctcgcctccccagatccaattccttccccttcgcttccgcaggtcggagggcccagacctgtggtgaggacccctgaggcctcctgggagatctgccaaccacgcccacgtcatttgcatacgcactcccgacc

SEQ ID NO: 164235 - DNA, 720 bp, Homo sapiens
  Payload ID: 12343
  Gene Symbol: PGLYRP1
  Gene Name: peptidoglycan recognition protein 1
  Uniprot ID: O75594
  ENST ID: ENST00000008938
  CDS Start-End: 45-635
ccgggcgctcctagcggtctcccggaccctgccgccctgccactatgtcccgccgctctatgctgcttgcctgggctctccccagcctccttcgactcggagcggctcaggagacagaagacccggcctgctgcagccccatagtgccccggaacgagtggaaggccctggcatcagagtgcgcccagcacctgagcctgcccttacgctatgtggtggtatcgcacacggcgggcagcagctgcaacacccccgcctcgtgccagcagcaggcccggaatgtgcagcactaccacatgaagacactgggctggtgcgacgtgggctacaacttcctgattggagaagacgggctcgtatacgagggccgtggctggaacttcacgggtgcccactcaggtcacttatggaaccccatgtccattggcatcagcttcatgggcaactacatggatcgggtgcccacaccccaggccatccgggcagcccagggtctactggcctgcggtgtggctcagggagccctgaggtccaactatgtgctcaaaggacaccgggatgtgcagcgtacactctctccaggcaaccagctctaccacctcatccagaattggccacactaccgctccccctgaggccctgctgatccgcaccccattcctcccctcccatggccaaaaaccccactgtctccttctccaataaagatgtagctcaaaa

SEQ ID NO: 164236 - DNA, 2758 bp, Homo sapiens
  Payload ID: 12344
  Gene Symbol: PGLYRP2
  Gene Name: peptidoglycan recognition protein 2
  Uniprot ID: Q96PD5
  ENST ID: ENST00000292609
  CDS Start-End: 131-2035
attcgccgctggactttgacagtggtcaaaggctctgctcagttctctgtgcctgtctccctccagcactgccgaggttctctgccgaggccaaccagaaataccccttggaagctggaatcctgcaacaatggcccagggtgtcctctggatcctactcggattgctactgtggtcagacccagggacagcctccctgcccctgctcatggactctgtcatccaggccctggctgagctggagcagaaagtgccagctgccaagaccagacacacagcttctgcgtggctgatgtcagctccaaactctggcccccacaatcgcctctaccacttcctgctgggggcatggagcctcaatgctacagagttggatccctgcccactaagcccagagctgttaggcctgaccaaggaggtggcccgacatgacgtacgagaagggaaggaatatggggtggtgctggcacctgatggctcgaccgtggctgtggagcctctgctggcggggctggaggcagggctgcaagggcgcagggtcataaatttgcccttggacagcatggctgccccttgggagactggagatacctttccagatgttgtggccattgctccagatgtaagagccacctcctccccaggactcagggatggctctccagatgtcaccactgcagatattggagccaacactccagatgctacaaaaggctgtccagatgtccaagcttccttgccagatgccaaagccaagtccccaccgaccatggtggacagcctcctggcagtcaccctggctggaaacctgggcctgaccttcctccgaggttcccagacccagagccatccagacctgggaactgagggctgctgggaccagctctctgcccctcggacctttacgcttttggaccccaaggcatctctgttaaccatggccttcctcaatggcgccctggatggggtcatccttggagactacctgagccggactcctgagccccggccatccctcagccacttgctgagccagtactatggggctggggtggccagagacccagggttccgcagcaacttccgacggcagaacggtgctgctctgacttcagcctccatcctggcccagcaggtgtggggaacccttgtccttctacagaggctggagccagtacacctccagcttcagtgcatgagccaagaacagctggcccaggtggctgccaatgctaccaaggaattcactgaggccttcctgggatgcccggccatccacccccgctgccgctggggagcggcgccttatcggggccgcccgaagctgctgcagctgccgctgggattcttgtacgtgcatcacacctacgtgcctgcaccaccctgcacggacttcacgcgctgcgcagccaacatgcgctccatgcagcgctaccaccaggacacgcaaggctggggagacatcggctacagtttcgtggtgggctcggacggctacgtgtacgagggacgcggctggcactgggtgggcgcccacacgctcggccacaactcccggggcttcggcgtggccatagtgggcaactacaccgcggcgctgcccaccgaggccgctctgcgcacggtgcgcgacacgctcccgagttgtgcggtgcgcgccggcctcctgcggccagactacgcgctgctgggccaccgccagctggtgcgcaccgactgccccggcgacgcgctcttcgacctgctgcgcacctggccgcacttcaccgcggtgagtcttcgcagcctgcactacacggcccgccgcccctccgtctacacaagctccacgaggcccctgccccctgcctgtaacagctgtgcccgcacagcctcagccaggcccccaacttcccggcggcacgtctattcaggaaacctaggcccagcctttgcgggtcactctgcgggcaacatccctgatcctgtgacttctgcctatgcagcctcagctcagccccagacccagccagcctgtcctttccccagctcctaatacctctacctttccagccaaggcatggaccctgacacctgccaacagcccctctgccctcacaacctcagcctggccttcatgacttctctacccaagtcacaacctgtcaggctgcaccacctcatcctggcccgccgaaccttgacctcacccctgcccctacccgaaggccctctgtccacacaacatgaacctaggctgtgaccttttgccttcacaacctctgtccagtccttaatcctgtgttgcaattctctgtccagacaatctcaactctgaggttgcttgtttcgtccctgactccttaacccctgatgacaactcttatgccagcacaactttgacctgatgacctcatcccagcccttgatcgccatcactaaaacaattttagaatcacacctggacaatctcgtgctacctacatactgccactccatttcattaagctattgactagcacatccatctcggcctatagttggctttgtcctcactctctcactttgggccactgtcccctccctgatccagggttccaccaccaggagggcagacccagccacataccacaaccacccccaagcctcacactcccttgtctttttccagactgttaagccaagacctgccaggagtgtctctaagagatccaggagggagccacccccaaggaccctgccagccacagacctccaataaagacagcatggaaacaaa

SEQ ID NO: 164237 - DNA, 2230 bp, Homo sapiens
  Payload ID: 12344
  Gene Symbol: PGLYRP2
  Gene Name: peptidoglycan recognition protein 2
  Uniprot ID: Q96PD5
  ENST ID: ENST00000340880
  CDS Start-End: 482-2212
gcttctctcctctccctcaacacagccggtcttaccagtacagcaggcggcagctgagagtcccctctggtggccagcagcggctacagagccgtcactatggggagggacaggacttgaggggttgcctcggtccacctcactggagaatgggcagagtttatggagtctgaaccacctggtctccaggcccctctggggatgggcctggcttactgaccactgacctcagcctaggagggacagaagagactgggggagaccaggatgcccagatgaccttgacccagggtacgctgccccatgtccctgctgcctcccgcccacagctctacgagaggcaggtctgtcattcgccgctggactttgacagtggtcaaaggctctgctcagttctctgtgcctgtctccctccagcactgccgaggttctctgccgaggccaaccagaaataccccttggaagctggaatcctgcaacaatggcccagggtgtcctctggatcctactcggattgctactgtggtcagacccagggacagcctccctgcccctgctcatggactctgtcatccaggccctggctgagctggagcagaaagtgccagctgccaagaccagacacacagcttctgcgtggctgatgtcagctccaaactctggcccccacaatcgcctctaccacttcctgctgggggcatggagcctcaatgctacagagttggatccctgcccactaagcccagagctgttaggcctgaccaaggaggtggcccgacatgacgtacgagaagggaaggaatatggggtggtgctggcacctgatggctcgaccgtggctgtggagcctctgctggcggggctggaggcagggctgcaagggcgcagggtcataaatttgcccttggacagcatggctgccccttgggagactggagatacctttccagatgttgtggccattgctccagatgtaagagccacctcctccccaggactcagggatggctctccagatgtcaccactgcagatattggagccaacactccagatgctacaaaaggctgtccagatgtccaagcttccttgccagatgccaaagccaagtccccaccgaccatggtggacagcctcctggcagtcaccctggctggaaacctgggcctgaccttcctccgaggttcccagacccagagccatccagacctgggaactgagggctgctgggaccagctctctgcccctcggacctttacgcttttggaccccaaggcatctctgttaaccatggccttcctcaatggcgccctggatggggtcatccttggagactacctgagccggactcctgagccccggccatccctcagccacttgctgagccagtactatggggctggggtggccagagacccagggttccgcagcaacttccgacggcagaacggtgctgctctgacttcagcctccatcctggcccagcaggtgtggggaacccttgtccttctacagaggctggagccagtacacctccagcttcagtgcatgagccaagaacagctggcccaggtggctgccaatgctaccaaggaattcactgaggccttcctgggatgcccggccatccacccccgctgccgctggggagcggcgccttatcggggccgcccgaagctgctgcagctgccgctgggattcttgtacgtgcatcacacctacgtgcctgcaccaccctgcacggacttcacgcgctgcgcagccaacatgcgctccatgcagcgctaccaccaggacacgcaaggctggggagacatcggctacagtttcgtggtgggctcggacggctacgtgtacgagggacgcggctggcactgggtgggcgcccacacgctcggccacaactcccggggcttcggcgtggccatagtgggcaactacaccgcggcgctgcccaccgaggccgctctgcgcacggtgcgcgacacgctcccgagttgtgcggtgcgcgccggcctcctgcggccagactacgcgctgctgggccaccgccagctggtgcgcaccgactgccccggcgacgcgctcttcgacctgctgcgcacctggccgcacttcaccgcgactgttaagccaagacctgccaggagtgtctctaagagatccaggagggagccacccccaaggaccctgccagccacagacctccaataaagacagcatggaaacaaa

SEQ ID NO: 164238 - DNA, 651 bp, Homo sapiens
  Payload ID: 12344
  Gene Symbol: PGLYRP2
  Gene Name: peptidoglycan recognition protein 2
  ENST ID: ENST00000594637
  CDS Start-End: 335-651
acagccggtcttaccagtacagcaggcggcagctgagagtcccctctggtggccagcagcggctacagagccgtcactatggggagggacaggacttgaggggttgcctcggtccacctcactggagaatgggcagagtttatggagtctgaaccacctggtctccaggcccctctggggatgggcctggcttactgaccactgacctcagcctaggagggacagaagagactgggggagaccaggatgcccagatgaccttgacccaggcactgccgaggttctctgccgaggccaaccagaaataccccttggaagctggaatcctgcaacaatggcccagggtgtcctctggatcctactcggattgctactgtggtcagacccagggacagcctccctgcccctgctcatggactctgtcatccaggccctggctgagctggagcagaaagtgccagctgccaagaccagacacacagcttctgcgtggctgatgtcagctccaaactctggcccccacaatcgcctctaccacttcctgctgggggcatggagcctcaatgctacagagttggatccctgcccactaagcccagagctgttaggcctgaccaaggaggtggcccgacatgacgtacgagaagggaa

SEQ ID NO: 164239 - DNA, 578 bp, Homo sapiens
  Payload ID: 12344
  Gene Symbol: PGLYRP2
  Gene Name: peptidoglycan recognition protein 2
  ENST ID: ENST00000601792
  CDS Start-End: 36-578
aattccccttcaggaaaagcaggcaggtctcagtcatgggcacccggagaagaggaaggacatttcactgtcagcccagcactgccgaggttctctgccgaggccaaccagaaataccccttggaagctggaatcctgcaacaatggcccagggtgtcctctggatcctactcggattgctactgtggtcagacccagggacagcctccctgcccctgctcatggactctgtcatccaggccctggctgagctggagcagaaagtgccagctgccaagaccagacacacagcttctgcgtggctgatgtcagctccaaactctggcccccacaatcgcctctaccacttcctgctgggggcatggagcctcaatgctacagagttggatccctgcccactaagcccagagctgttaggcctgaccaaggaggtggcccgacatgacgtacgagaagggaaggaatatggggtggtgctggcacctgatggctcgaccgtggctgtggagcctctgctggcggggctggaggcagggctgcaagggcgcagggtcataaatttgcccttggacagcatg

SEQ ID NO: 164240 - DNA, 1173 bp, Homo sapiens
  Payload ID: 12345
  Gene Symbol: PGLYRP3
  Gene Name: peptidoglycan recognition protein 3
  Uniprot ID: Q96LB9
  ENST ID: ENST00000290722
  CDS Start-End: 54-1079
cctctcttccagggctgccgtccacactctcccggtcagagtcctgggaccacatggggacgctgccatggcttcttgccttcttcattctgggtctccaggcttgggatactcccaccatcgtctcccgcaaggagtggggggcaagaccgctcgcctgcagggccctgctgaccctgcctgtggcctacatcatcacagaccagctcccagggatgcagtgccagcagcagagcgtttgcagccagatgctgcgggggttgcagtcccattccgtctacaccataggctggtgcgacgtggcgtacaacttcctggttggggatgatggcagggtgtatgaaggtgttggctggaacatccaaggcttgcacacccagggctacaacaacatttccctgggcatcgccttctttggcaataagataggcagcagtcccagccctgctgccttatcagctgcagagggtctgatctcctatgccatccagaagggtcacctgtcgcccaggtatattcagccacttcttctgaaagaagagacctgcctggaccctcaacatccagtgatgcccaggaaggtttgccccaacatcatcaaacgatctgcttgggaagccagagagacacactgccctaaaatgaacctcccagccaaatatgtcatcatcatccacaccgctggcacaagctgcactgtatccacagactgccagactgtcgtccgaaacatacagtcctttcacatggacacacggaacttttgtgacattggatatcacttcctggtgggccaggatggtggcgtgtatgaaggggttggatggcacatccaaggctctcacacttatggattcaacgatattgccctaggaattgccttcatcggctactttgtagaaaagcctccaaatgctgcagcgctggaggcggcccaggacctgatccagtgtgccgtggttgaggggtacctgactccaaactacctgctgatgggccacagtgacgtggtcaacatcctgtcccctgggcaggctttgtataacatcatcagcacctggcctcatttcaagcactgaaggaggccccactccctttgagactgccctccctcccctgctgggtctctccaaccctcaccagccaaggtggctcagcaccttgtgtccccct

SEQ ID NO: 164241 - DNA, 1834 bp, Homo sapiens
  Payload ID: 12346
  Gene Symbol: PGLYRP4
  Gene Name: peptidoglycan recognition protein 4
  Uniprot ID: Q96LB8
  ENST ID: ENST00000359650
  CDS Start-End: 66-1187
acaggacccacagatatctgctgccatccacactctccagattggtgtcctgggaccacgtggggatgctgccgtggcttcttgtcttctctgctctgggtatccaggcctggggtgattcctcctggaacaaaacacaagctaaacaggtatcagaggggctccagtacctatttgagaacatctcccagctcactgaaaaaggccttcccacagatgtctccaccacggtctctcgcaaggcatggggggcagaagctgttggctgcagtattcagctgaccacgccagtgaatgtccttgttatacaccatgtccctggactggagtgtcacgaccagacagtctgcagccagagactgcgggaactgcaggcccatcatgtccacaacaacagtgggtgtgatgtggcctacaacttcctggttggggatgatggcagggtgtatgaaggtgttggctggaatatccaaggagtgcacacccaaggctacaacaacatctccctgggctttgccttctttggcactaagaaaggccacagtcccagccctgctgccctgtcggccatggaaaacctaatcacctatgctgtccagaagggccacctgtcatccagttatgttcagccacttcttgggaaaggcgagaactgcctggcccctcggcagaagacaagcctgaagaaggcttgccccggcgttgtcccacggtctgtgtggggagccagggagacccactgtcccaggatgactctcccagcgaagtatggcatcattatccacactgccgggaggacctgcaacatttctgatgagtgccgcctgctggtccgggacatccagtctttctacatagacaggctcaagtcatgcgacattggttataacttcctggtgggccaggatggcgccatttatgaaggggtgggctggaatgtccaaggctcctccacccctggctacgatgacattgccctgggcattaccttcatgggcaccttcacaggtataccacccaatgctgcagcactagaggcagcccaagacctgatccagtgtgccatggtcaaagggtacctgactcccaactacctgctggtgggccacagtgatgtggcccgaaccttgtctcctgggcaggctttgtacaacatcatcagcacctggcctcatttcaaacactgagagaagccccaggtccttctgagactgctttccctcccctgtcaggtctctcctgtcctaaccatccagcttggctcaacaccttttgccctcctcccctgccacacagtcctgtgcctcctttttcaggttgggatgatcatgccctctcctgccaacatcctccaagggcctccaaacctcatagctggacattcacagccctctgagtctgagtccagatttcttctctccttaccttcctctcccttggaaacccaactcctcagccaggtgagacaatgggctggttcttgtttcatttctctctctctctccattcccctctgcctggtgagccttcccctggtgtctgcctggcagcccccacctcccacctatcacccctcacccataactcaggtcaacgtgaccaaccttccttgcttacacataaacttgtatatatttggatgtagcccttatttaatggctgtcattatttatagatatgtctatccttgctacttggttgtgagtttctccaggggaggaactgtgttttattcatctctatgtcctctgtttctcagcagtgtctgaaatttaatgggttctactgatgtttattagagaaatggatgaataaatgaatgaagagatccaaa

SEQ ID NO: 164242 - DNA, 2116 bp, Homo sapiens
  Payload ID: 12346
  Gene Symbol: PGLYRP4
  Gene Name: peptidoglycan recognition protein 4
  Uniprot ID: Q96LB8
  ENST ID: ENST00000368739
  CDS Start-End: 360-1469
cttgcatttctccaggtgctgtgaaaggagctggctcagagccttgccctctgtcttcccttctccccatcttttgttagggatcctgggctctcttctctctgggaagctagagcccgagtgctccattcccagggagggagtgccctctagggctagggagagtgaaggctggaggagaaggcgccagttggtgaagaagggcagggcctggaggccaagtctggaagggaaggagctgctggccaatcaggggcaagctgactgcaccctgacctgctgggctgggacagcacaggacccacagatatctgctgccatccacactctccagattggtgtcctgggaccacgtggggatgctgccgtggcttcttgtcttctctgctctgggtatccaggcctggggtgattcctcctggaacaaaacacaagctaaacaggtatcagaggggctccagtacctatttgagaacatctcccagctcactgaaaaagatgtctccaccacggtctctcgcaaggcatggggggcagaagctgttggctgcagtattcagctgaccacgccagtgaatgtccttgttatacaccatgtccctggactggagtgtcacgaccagacagtctgcagccagagactgcgggaactgcaggcccatcatgtccacaacaacagtgggtgtgatgtggcctacaacttcctggttggggatgatggcagggtgtatgaaggtgttggctggaatatccaaggagtgcacacccaaggctacaacaacatctccctgggctttgccttctttggcactaagaaaggccacagtcccagccctgctgccctgtcggccatggaaaacctaatcacctatgctgtccagaagggccacctgtcatccagttatgttcagccacttcttgggaaaggcgagaactgcctggcccctcggcagaagacaagcctgaagaaggcttgccccggcgttgtcccacggtctgtgtggggagccagggagacccactgtcccaggatgactctcccagcgaagtatggcatcattatccacactgccgggaggacctgcaacatttctgatgagtgccgcctgctggtccgggacatccagtctttctacatagacaggctcaagtcatgcgacattggttataacttcctggtgggccaggatggcgccatttatgaaggggtgggctggaatgtccaaggctcctccacccctggctacgatgacattgccctgggcattaccttcatgggcaccttcacaggtataccacccaatgctgcagcactagaggcagcccaagacctgatccagtgtgccatggtcaaagggtacctgactcccaactacctgctggtgggccacagtgatgtggcccgaaccttgtctcctgggcaggctttgtacaacatcatcagcacctggcctcatttcaaacactgagagaagccccaggtccttctgagactgctttccctcccctgtcaggtctctcctgtcctaaccatccagcttggctcaacaccttttgccctcctcccctgccacacagtcctgtgcctcctttttcaggttgggatgatcatgccctctcctgccaacatcctccaagggcctccaaacctcatagctggacattcacagccctctgagtctgagtccagatttcttctctccttaccttcctctcccttggaaacccaactcctcagccaggtgagacaatgggctggttcttgtttcatttctctctctctctccattcccctctgcctggtgagccttcccctggtgtctgcctggcagcccccacctcccacctatcacccctcacccataactcaggtcaacgtgaccaaccttccttgcttacacataaacttgtatatatttggatgtagcccttatttaatggctgtcattatttatagatatgtctatccttgctacttggttgtgagtttctccaggggaggaactgtgttttattcatctctatgtcctctgtttctcagcagtgtctgaaatttaatgggttctactgatgtttattagagaaatggatgaataaatgaatgaagagatccaaa

SEQ ID NO: 164243 - DNA, 3846 bp, Homo sapiens
  Payload ID: 12347
  Gene Symbol: PADI1
  Gene Name: peptidyl arginine deiminase, type I
  Uniprot ID: Q9ULC6
  ENST ID: ENST00000375471
  CDS Start-End: 93-2084
tcagaactcacacttcttcctggcaaagaagtgcccaggacgggagctggggagccagggctgatctaggaggctgggagccaggtgacaggatggccccaaagagagttgtgcagctgtccctgaagatgcctacccatgccgtgtgtgtggtgggagtcgaggcacatgtggacattcacagtgatgtgcccaagggtgccaacagcttcagggtctctggaagctccggggtggaggtcttcatggtctacaaccgcacacgtgtgaaagagcccataggcaaggcccgttggccgctagacactgatgcagacatggtcgtatctgtgggcacagccagtaaggaattaaaggacttcaaggtgagggtctcctactttggggagcaggaagaccaagctctgggccgcagcgtgctttacctcactggcgtcgatatttcccttgaggttgacacaggccgcacaggcaaggtgaagaggagccaaggggacaagaaaacctggcgctggggccctgagggctatggggctatcttgctggtgaactgtgaccgggacaatcacaggtccgcagagcctgacctcacccacagctggctgatgtcgctggctgacctgcaggacatgtccccaatgctgctgagctgcaatggccccgacaagctcttcgacagccacaagcttgtcttgaacgtgcccttttctgattccaaaagagtgagggtcttctgtgccaggggtgggaattctctctcggactacaaacaggtgctggggccccagtgtctgtcctatgaagttgagcgacagccaggggagcaggagatcaagttctatgtggaggggctgaccttccccgatgccgatttcctagggctggtttccctcagtgtcagcctggtggacccggggaccctgcccgaggtgaccctcttcacagacactgtgggcttccgcatggccccctggatcatgacgcccaacactcagcctcctgaggagctgtatgtgtgcagagtgatggacactcatggctccaatgagaaattcctggaggacatgtcttatctgacattgaaagccaactgcaagctgaccatctgccctcaagttgaaaatcgaaatgaccgctggatccaggacgagatggagtttggctacatcgaggcccctcacaaatccttccccgtggtctttgactcccccaggaacaggggcctgaaagatttcccctataagaggatcctgggtcctgactttggatatgttacccgggagatcccgctccctggtccctccagccttgactccttcggcaacctggacgtcagcccgcccgtcacggtgggcggcacggaataccccctgggccggatcctcatcgggagcagcttccccaagtccggtgggcggcagatggccagggcagtgcggaacttcctgaaggcacagcaggtgcaggcacccgtggagctctactcggactggctctctgtgggccatgtggacgagtttctgacctttgtgcctacctctgaccaaaagggcttccggctgctcctggctagccccagcgcttgcctcaaactcttccaagagaagaaagaagagggttatggggaggcagcccagtttgatgggttaaaacaccaggcaaaaagaagcattaatgagatgctggcagacagacacctccagagagacaatcttcatgcacagaaatgcattgactggaaccgtaatgtgctgaagcgggagctgggcctggcagagagtgacatcgtggacattccccagctcttcttcctgaaaaacttctacgcggaagccttcttcccagacatggttaacatggtggtcttaggcaagtacctgggcatccccaagccctacgggcccatcatcaatggccgctgctgcctggaggagaaggtgcagtccctgctggagcctctgggcctgcactgcatcttcattgatgactacttgtcctaccacgagctgcagggggagatccactgtggcaccaacgtgcgcaggaagccctttcccttcaaatggtggaacatggtgccctgagcctgcccccacccgccatcctctctgccctcttgctagggaaccctgccagggtgaaggcaaggaacaaccacctggcctccattctcttgggggagtcttggcactttgcaaacatcctggccaccatgggcaccaggacacagggatggataccacctaccctcgcctctggaatggcctacccaacccgagaagaatgcacctcattcttccctggcctctttcccacccacagcccccagaggctctagatcaacaatgttagcatgttccagaatggctgtgggaggcctagggagatgggccccacttagaattgctcccccttcattctgatgcctccctggggaacaaggataatgactttgcatctgcacctggaacggggcctgggggacctggggtctggtgtgccaggcaccaggctgcctctgctcttggaaaactaggaaaggggatcagaaacatcctctccccgctctaggtttcttctcccaaaggggacccaaggctgtgacacttacctccacccccatccagcacccttcagctgtgtgtggacaaacaaggacagaaaaacccagtgtccaagggccaatttaaatagaaaaaaagacaacaaaattttaatagctgactccgacctcagaagagtgattgctacctttctggaaagactttaattaccagagctggcttctcccagctcagaaatgctgagaagccaacgtgaggcctgaggacacacaaaggatgacggggcaggaggggatgaggtcagggtagcagagtgtgtgacgacggatttgggggcctagaggtgtccgtggttcctgggctgggattttggactctggatttgaagggagctggagcttccagatgtagcaggggtagggggccagatgttagaagagggtgtgtgtgttgggaggaaattaggttatctctgaaggtggagtttaatttcctttaatagtctttaattattccccttcattctgcaggcagtgggaggggaaggcttgcccggtctctctcagcaacccagggaccctgcacatagcttaggtttcatccctgaataaaccgctgtgcaggcccatgtcccctcccacagtagggaagacagctgccacgggaggttaatagcccggagtgaggtcactgagacatgcacaggcaggctggttcagctgggctgcagggcacgggcaggaggaagccagcctaccctcttcccccactgccagtgaggccattgtagggcagttggccctagggcttcggtccatctaggttttcagtggcccctgctgagacctcacactgagccaactactgtcactgttttaaccaacaaaagctagcctggaactgctatggttaaagtgggtgagcgggaacctgaaaatccccttctggaaggttctacagaactctatttgcaagctcctgctttaacctgagcgtcctctgctcaggatcataccccagcctgcactgagtcaagaaggagaaggaggctctgaaggggccgggggtgtgagctggggttgggactcccctgagaaagagctgtgggtaggaagggagtgagcattgcagagatagggctgggggtcggggccacactgagtgtgggaagctctggagttgctgctgggccatcgaggggccctggtgttggctctgagaatgttctgggtgaccagtcacctactttctgatcaataaaaatgtcgacatgcatttctta

SEQ ID NO: 164244 - DNA, 3846 bp, Homo sapiens; identical to SEQ ID NO: 164243
  Payload ID: 12347
  Gene Symbol: PADI1
  Gene Name: peptidyl arginine deiminase, type I
  Uniprot ID: Q9ULC6
  ENST ID: ENST00000631074
  CDS Start-End: 93-2084

SEQ ID NO: 164245 - DNA, 1607 bp, Homo sapiens
  Payload ID: 12348
  Gene Symbol: PADI2
  Gene Name: peptidyl arginine deiminase, type II
  Uniprot ID: Q9Y2J8
  ENST ID: ENST00000375481
  CDS Start-End: 65-1378
cgcacctgctgcaggtgctcccggccgccccggaccagcgagcgcgggcactgcggcggggaggatgctgcgcgagcggaccgtgcggctgcagtacgggagccgcgtggaggcggtgtacgtgctgggcacctacctctggaccgatgtctacagcgcggccccagccggggcccaaaccttcagcctgaagcactcggaacacgtgtgggtggaggtggtgcgtgatggggaggctgaggaggtggccaccaatggcaagcagcgctggcttctctcgcccagcaccaccctgcgggtcaccatgagccaggcgagcaccgaggccagcagtgacaaggtcaccgtcaactactatgacgaggaagggagcattcccatcgaccaggcggggctcttcctcacagccattgagatctccctggatgtggacgcagaccgggatggtgtggtggagaagaacaacccaaagaaggcatcctggacctggggccccgagggccagggggccatcctgctggtgaactgtgaccgagagacaccctggttgcccaaggaggactgccgtgatgagaaggtctacagcaaggaagatctcaaggacatgtcccagatgatcctgcggaccaaaggccccgaccgcctccccgccggatacgagatagttctgtacatttccatgtcagactcagacaaagtgggcgtgttctacgtggagaacccgttcttcggccaacgctatatccacatcctgggccggcggaagctctaccatgtggtcaagtacacgggtggctccgcggagctgctgttcttcgtggaaggcctctgtttccccgacgagggcttctcaggcctggtctccatccatgtcagcctgctggagtacatggcccaggacattcccctgactcccatcttcacggacaccgtgatattccggattgctccgtggatcatgacccccaacatcctgcctcccgtgtcggtgtttgtgtgctgcatgaaggataattacctgttcctgaaagaggtgaagaaccttgtggagaaaaccaactgtgagctgaaggtctgcttccagtacctaaaccgaggcgatcgctggatccaggatgaaattgagtttggctacatcgaggccccccataaaggcttccccgtggtgctggactctccccgagatggaaacctaaaggacttccctgtgaaggagctcctgggcccagattttggctacgtgacccgggagcccctctttgagtctgtcaccagccttgactcatttggaaacctggaggtcagtcccccagtgaccgtgaacggcaagacatacccgcttggccgcatcctcatcgggagcagctttcctctgtaagagaagccaggctggggctaggggctgtgggagtggggaagtcactgtttctcttttggggtggcctgggttgctcacacatggagcaagtggctgggggaattattccctcccacgacttcctgttaagaggccgacactcttggaaagaaaatcaagctagcctttatatctttgtgtgatttaggatctaatatataactaaataaacaactcttttccccaagtg

SEQ ID NO: 164246 - DNA, 4345 bp, Homo sapiens
  Payload ID: 12348
  Gene Symbol: PADI2
  Gene Name: peptidyl arginine deiminase, type II
  Uniprot ID: Q9Y2J8
  ENST ID: ENST00000375486
  CDS Start-End: 65-2062
cgcacctgctgcaggtgctcccggccgccccggaccagcgagcgcgggcactgcggcggggaggatgctgcgcgagcggaccgtgcggctgcagtacgggagccgcgtggaggcggtgtacgtgctgggcacctacctctggaccgatgtctacagcgcggccccagccggggcccaaaccttcagcctgaagcactcggaacacgtgtgggtggaggtggtgcgtgatggggaggctgaggaggtggccaccaatggcaagcagcgctggcttctctcgcccagcaccaccctgcgggtcaccatgagccaggcgagcaccgaggccagcagtgacaaggtcaccgtcaactactatgacgaggaagggagcattcccatcgaccaggcggggctcttcctcacagccattgagatctccctggatgtggacgcagaccgggatggtgtggtggagaagaacaacccaaagaaggcatcctggacctggggccccgagggccagggggccatcctgctggtgaactgtgaccgagagacaccctggttgcccaaggaggactgccgtgatgagaaggtctacagcaaggaagatctcaaggacatgtcccagatgatcctgcggaccaaaggccccgaccgcctccccgccggatacgagatagttctgtacatttccatgtcagactcagacaaagtgggcgtgttctacgtggagaacccgttcttcggccaacgctatatccacatcctgggccggcggaagctctaccatgtggtcaagtacacgggtggctccgcggagctgctgttcttcgtggaaggcctctgtttccccgacgagggcttctcaggcctggtctccatccatgtcagcctgctggagtacatggcccaggacattcccctgactcccatcttcacggacaccgtgatattccggattgctccgtggatcatgacccccaacatcctgcctcccgtgtcggtgtttgtgtgctgcatgaaggataattacctgttcctgaaagaggtgaagaaccttgtggagaaaaccaactgtgagctgaaggtctgcttccagtacctaaaccgaggcgatcgctggatccaggatgaaattgagtttggctacatcgaggccccccataaaggcttccccgtggtgctggactctccccgagatggaaacctaaaggacttccctgtgaaggagctcctgggcccagattttggctacgtgacccgggagcccctctttgagtctgtcaccagccttgactcatttggaaacctggaggtcagtcccccagtgaccgtgaacggcaagacatacccgcttggccgcatcctcatcgggagcagctttcctctgtctggtggtcggaggatgaccaaggtggtgcgtgacttcctgaaggcccagcaggtgcaggcgcccgtggagctctactcagactggctgactgtgggccacgtggatgagttcatgtcctttgtccccatccccggcacaaagaaattcctgctactcatggccagcacctcggcctgctacaagctcttccgagagaagcagaaggacggccatggagaggccatcatgttcaaaggcttgggtgggatgagcagcaagcgaatcaccatcaacaagattctgtccaacgagagccttgtgcaggagaacctgtacttccagcgctgcctagactggaaccgtgacatcctcaagaaggagctgggactgacagagcaggacatcattgacctgcccgctctgttcaagatggacgaggaccaccgtgccagagccttcttcccaaacatggtgaacatgatcgtgctggacaaggacctgggcatccccaagccattcgggccacaggttgaggaggaatgctgcctggagatgcacgtgcgtggcctcctggagcccctgggcctcgaatgcaccttcatcgacgacatttctgcctaccacaaatttctgggggaagtccactgtggcaccaacgtccgcaggaagcccttcaccttcaagtggtggcacatggtgccctgacctgccaggggccctggcgtttgcctccttcgcttagttctccagaccctccctcacacgcccagagccttctgctgacatggactggacagccccgctgggagacctttgggacgtggggtggaatttggggtatctgtgccttgccctccctgagaggggcctcagtgtcctctgaagccatccccagtgagcctcgactctgtccctgctgaaaatagctgggccagtgtctctgtagccctgacataaggaacagaacacaacaaaacacagcaaaccatgtgcccaaactgctccccaaagaattttgagtctctaatctgacactgaatgaggggagaagggaaggagattctgggattgccagttcttccagcagccatgctctgaaaatcaaggtagaatccatggaaagggaccccaggaccccgggaccctagacgtatcttgaactgccatcgtcatttcaaatacatctccctcagggtttccaggtggccacccccaattattcattccttaccaacctctcaaatcctcttggctttctctctgcagtgtggacactgttggctagtcctccccactccctgagggtccagtaagttagcttagaaccttcctggaaacatttcatctgagcaggtttccccacgtgtgggatgctccttttgcctcatctgtctcagggatgcaggctcccccgcatgcatggggatttctccccagaccagcatacttgtgacctgagagttcaatgcgtaaagatgcccctggtcagccatatccatcttctcttgcctggtccttgattctctggccgctccctgaccttcctccttccactgccttgactttcttcctttttattcctggtgccatctgtccaggcagctagacaagaacttgttcgccagcagccagattcaggccttcccaggggcataataagtgaccagcccctcctctccggacatcagatccaacacataaggaccctggcctaccctccagcccaacagccagttctgggtcagctgccaacttaggggtggtttgattatcccattgaaattcaccagtgcctttgccaaagaccctctcatttggacatacccagattcattccctggctccaactgaaaagactcagtttcaatcgttaaaagttcctttagggccagaagaataaatgaattataatcccattttgaagaaccgatttataaccaatgaaaaggttataatgtaatttatattcttggaggaacaagattttcatttgggattatttccttcaaccattcaacaaacatttgttgtatgccactaagcgccaggcacggcgttgggctctgcaaacacagtggttagtagcagtctggacctggtccctactggcatggaacccatcactccccaacatgcaaagcccacatttaaaggccagcctctgccccttcagtgatgcgctctttagaaatgccagtccactatattcagaaatccgcagggcacaaaacttccagcaagtcactgttgtggtgaaatgggcagtgggggtggggggtcttctttaaacaggcccccttcccatctacctagccagtacccatccaatgagtccccagagcctccagaagctgttgtctcctctctggggacagcagctcctgcctttggaggccaaagccccagatctctccagccccagagctgaaaacaccaagtgcctatttgagggtgtctgtctggagacttagagtttgtcatgtgtgtgtgtgtgtttggttaatgtgggtttatgggttttctttcttttttttctttttttttttagtctacattagggggaagtgagcgcctcccatgtgcagacagtgtgtctttatagatttttctaaggctttccccaatgatgtcggtaatttctgatgtttctgaagttcccaggactcacacacccgttcccatctcacttgcccacccagtgtgacaaccctcggtgtggatatacccccgtggactcatggctcttccccacccccactttctataaatgtaggcctagaatacgcttctctgttgcaaaactcagctaagttcctgcttccaccttgatgttgaaatatcttatgtaagagggcaggggatgtcgtgaagatggcaagaagaacacagtttcaaatttctggaaaagagcctgtggtggagatctaaagatgtttagggaagagctcgactaaagaacaatgaaataaatggtccaaggggaagtca

SEQ ID NO: 164247 - DNA, 3189 bp, Homo sapiens
  Payload ID: 12349
  Gene Symbol: PADI3
  Gene Name: peptidyl arginine deiminase, type III
  Uniprot ID: Q9ULW8
  ENST ID: ENST00000375460
  CDS Start-End: 41-2035
agtgttggggttggcggccacagctaagtccaacaccagcatgtcgctgcagagaatcgtgcgtgtgtccctggagcatcccaccagcgcggtgtgtgtggctggcgtggagaccctcgtggacatttatgggtcagtgcctgagggcacagaaatgtttgaggtctatgggacgcctggcgtggacatctacatctctcccaacatggagaggggccgggagcgtgcagacaccaggcggtggcgctttgacgcgactttggagatcatcgtggtcatgaactcccccagcaatgacctcaacgacagccatgttcagatttcctaccactccagccatgagcctctgcccctggcctatgcggtgctctacctcacctgtgttgacatctctctggattgcgacctgaactgtgagggaaggcaggacaggaactttgtagacaagcggcagtgggtctgggggcccagtgggtatggcggcatcttgctggtgaactgtgaccgtgatgatccgagctgtgatgtccaggacaattgtgaccagcacgtgcactgcctgcaagacctggaagacatgtctgtcatggtcctgcggacgcagggccctgcagccctctttgatgaccacaaacttgtcctccatacctccagctatgatgccaaacgggcacaggtcttccacatctgcggtcctgaggatgtgtgtgaggcctataggcatgtgctgggccaagataaggtgtcctatgaggtaccccgcttgcatggggatgaggagcgcttcttcgtggaaggcctgtccttccctgatgccggcttcacaggactcatctccttccatgtcactctgctggacgactccaacgaggatttctcggcatcccctatcttcactgacactgtggtgttccgagtggcaccctggatcatgacgcccagcactctgccacccctagaggtgtatgtgtgccgtgtgaggaacaacacgtgttttgtggatgcggtggcagagctggccaggaaggccggctgcaagctgaccatctgcccacaggccgagaaccgcaacgaccgctggatccaggatgagatggagctgggctacgttcaggcgccgcacaagaccctcccggtggtctttgactccccaaggaatggggaactgcaggatttcccttacaaaagaatcctgggtccagattttggttacgtgactcgggaaccacgcgacaggtctgtgagtggcctggactcctttgggaacctggaggtcagccctccagtggtggccaatgggaaagagtaccccctggggaggatcctcattgggggcaacctgcctgggtcaagtggccgcagggtcacccaggtggtgcgggacttcctccatgcccagaaggtgcagccccccgtggagctctttgtggactggttggccgtgggccatgtggatgagtttctgagctttgtccctgcccccgatgggaagggcttccggatgctcctggccagccctggggcctgcttcaagctcttccaggaaaagcagaagtgtggccacgggagggccctcctgttccagggggttgttgatgatgagcaggtcaagaccatctccatcaaccaggtgctctccaataaagacctcatcaactacaataagtttgtgcagagctgcatcgactggaaccgtgaggtgctgaagcgggagctgggcctggcagagtgtgacatcattgacatcccacagctcttcaagaccgagaggaaaaaagcaacggccttcttccctgacttggtgaacatgctggtgctggggaagcacctgggcatccccaagccctttgggcccatcatcaatggctgctgctgcctggaggagaaggtgcggtccctgctggagccgctgggcctccactgcaccttcattgatgacttcactccataccacatgctgcatggggaggtgcactgtggcaccaatgtgtgcagaaagcccttctctttcaagtggtggaacatggtgccctgagacagctcccacccaccatcctgtccccctggggcgggcattggcccaggtggtggagacagagacaggcccctgaacgataagcaccaagagaccccaaggctccagatggaacactgagggtgaccgtccctctcagaagccttttccctggaagtgtccatgcctcacctgcaacccatgtggttctcagacttgaatcttctcggccccccaaaaagaaggacctcatttcttatagcctctcctgtgattcaacacaacccatggagatgtccccttctcactctgaaatcatccatttggggacaaatccacattggggtctagaaacatccacgtatctcatcagccatcttgtcctgtgcatcctaacagaggaaggatccatgattctgctttggtccaattgcttcctctctgcagaggaacaaccctaaaaccagaccactccacgcaggacaggcaggagagattcttcctaaagcctcccccataaaaagggagctgtggatccacttagatcagggcggaaccatctttcacccggccaagctcctgcccagatgttgaccctcacccagcgtgagctgtcacatagtaggagcttctagatgcatgtggaagcaatgagagttgtcccttagccttataaactccccatgatctgacatgcagaaatccagccttgtccagaatcctcctggaatttcttggagacgaaagtatctgggggattgttgggtactagggagactgggtacaagggtgaaaagtagttcccataatacacatggttgactatggtgatccaccttgtgatggttaatattaggtgtctggagaaggttgcttcattggccctgggacttctctctgcaggaggagagaacgctgcctctcctctggattggtctcaggctctctgttggcctttggtcagcgtttccacatcctgctctgctgcaggagagggggctaaggggctggatccaccaaggcagctcacagcgggaaaactctgggaatgaaccactgaattcaggggatgggggtgggggggcggttctcgaggtgtgtgccagctacacgtgtgttctgtatgggtccagctgcgtttccatcactcgctaataaatcaacagaaacacaaa

SEQ ID NO: 164248 - DNA, 3189 bp, Homo sapiens; identical to SEQ ID NO: 164247
  Payload ID: 12349
  Gene Symbol: PADI3
  Gene Name: peptidyl arginine deiminase, type III
  Uniprot ID: Q9ULW8
  ENST ID: ENST00000625769
  CDS Start-End: 41-2035

SEQ ID NO: 164249 - DNA, 2267 bp, Homo sapiens
  Payload ID: 12350
  Gene Symbol: PADI4
  Gene Name: peptidyl arginine deiminase, type IV
  Uniprot ID: Q9UM07
  ENST ID: ENST00000375448
  CDS Start-End: 27-2018
agccagagggacgagctagcccgacgatggcccaggggacattgatccgtgtgaccccagagcagcccacccatgccgtgtgtgtgctgggcaccttgactcagcttgacatctgcagctctgcccctgaggactgcacgtccttcagcatcaacgcctccccaggggtggtcgtggatattgcccacggccctccagccaagaagaaatccacaggttcctccacatggcccctggaccctggggtagaggtgaccctgacgatgaaagtggccagtggtagcacaggcgaccagaaggttcagatttcatactacggacccaagactccaccagtcaaagctctactctacctcaccggggtggaaatctccttgtgcgcagacatcacccgcaccggcaaagtgaagccaaccagagctgtgaaagatcagaggacctggacctggggcccttgtggacagggtgccatcctgctggtgaactgtgacagagacaatctcgaatcttctgccatggactgcgaggatgatgaagtgcttgacagcgaagacctgcaggacatgtcgctgatgaccctgagcacgaagacccccaaggacttcttcacaaaccatacactggtgctccacgtggccaggtctgagatggacaaagtgagggtgtttcaggccacacggggcaaactgtcctccaagtgcagcgtagtcttgggtcccaagtggccctctcactacctgatggtccccggtggaaagcacaacatggacttctacgtggaggccctcgctttcccggacaccgacttcccggggctcattaccctcaccatctccctgctggacacgtccaacctggagctccccgaggctgtggtgttccaagacagcgtggtcttccgcgtggcgccctggatcatgacccccaacacccagcccccgcaggaggtgtacgcgtgcagtatttttgaaaatgaggacttcctgaagtcagtgactactctggccatgaaagccaagtgcaagctgaccatctgccctgaggaggagaacatggatgaccagtggatgcaggatgaaatggagatcggctacatccaagccccacacaaaacgctgcccgtggtcttcgactctccaaggaacagaggcctgaaggagtttcccatcaaacgcgtgatgggtccagattttggctatgtaactcgagggccccaaacagggggtatcagtggactggactcctttgggaacctggaagtgagccccccagtcacagtcaggggcaaggaatacccgctgggcaggattctcttcggggacagctgttatcccagcaatgacagccggcagatgcaccaggccctgcaggacttcctcagtgcccagcaggtgcaggcccctgtgaagctctattctgactggctgtccgtgggccacgtggacgagttcctgagctttgtgccagcacccgacaggaagggcttccggctgctcctggccagccccaggtcctgctacaaactgttccaggagcagcagaatgagggccacggggaggccctgctgttcgaagggatcaagaaaaaaaaacagcagaaaataaagaacattctgtcaaacaagacattgagagaacataattcatttgtggagagatgcatcgactggaaccgcgagctgctgaagcgggagctgggcctggccgagagtgacatcattgacatcccgcagctcttcaagctcaaagagttctctaaggcggaagcttttttccccaacatggtgaacatgctggtgctagggaagcacctgggcatccccaagcccttcgggcccgtcatcaacggccgctgctgcctggaggagaaggtgtgttccctgctggagccactgggcctccagtgcaccttcatcaacgacttcttcacctaccacatcaggcatggggaggtgcactgcggcaccaacgtgcgcagaaagcccttctccttcaagtggtggaacatggtgccctgagcccatcttccctggcgtcctctccctcctggccagatgtcgctgggtcctctgcagtgtggcaagcaagagctcttgtgaatattgtggctccctgggggcggccagccctcccagcagtggcttgctttcttctcctgtgatgtcccagtttcccactctgaagatcccaacatggtcctagcactgcacactcagttctgctctaagaagctgcaataaagtttttttaagtcactttgtacatga

SEQ ID NO: 164250 - DNA, 841 bp, Homo sapiens
  Payload ID: 12350
  Gene Symbol: PADI4
  Gene Name: peptidyl arginine deiminase, type IV
  ENST ID: ENST00000375453
  CDS Start-End: 29-412
acagccagagggacgagctagcccgacgatggcccaggggacattgatccgtgtgaccccagagcagcccacccatgccgtgtgtgtgctgggcaccttgactcagcttgacatctgcagctctgcccctgaggactgcacgtccttcagcatcaacgcctccccaggggtggtcgtggatattgcccacggccctccagccaagaagaaatccacaggttcctccacatggcccctggaccctggggtagaggtgaccctgacgatgaaagtggccagtggtagcacaggcgaccagaaggttcagatttcatactacggacccaagactccaccagtcaaagctctactctacctcaccggggtggatggagtctcaccctgtcacccaggctggagtgcaatggcatgatctcggctcactgcaacctgcgtctcccaggttcaagcgatcctcctgcttcagcgtccctagtagctgggactacaggcgcttgccaccacgcctggctaatttttgtatttttagtagagatggagtttcaccatgttggccaggctggtctcgaacttctgacctcaggtgatctgcctgcctcaggctcccaaagtgctcggattactggcatgaaccactgcgccaggccctctattcctttttgatacctcaaatatctataacaaaaagtagataatgacactgtcttatacaagaatatagatagtgttcctcaaattccattatttatatctcatcttcaccatttctgccatatcaatgatccacctatactcatatttatgtaatgttcttctttaaataaaatccattcttaaactt

SEQ ID NO: 164251 - DNA, 2396 bp, Homo sapiens
  Payload ID: 12351
  Gene Symbol: PADI6
  Gene Name: peptidyl arginine deiminase, type VI
  Uniprot ID: Q6TGC4
  ENST ID: ENST00000619609
  CDS Start-End: 51-2135
gggcgtctgaggctgctgtgctgagtgagggctgcggtgcaggcctgaggatggtcagcgtggagggccgagccatgtccttccagagtatcatccacctgtccctggacagccctgtccatgccgtttgtgtgttgggcacagaaatctgcttggatctcagcgggtgtgccccccagaagtgccagtgcttcaccatccatggctctgggagggtcttgatcgatgtggccaacacggtgatttctgagaaggaggacgccaccatctggtggcccctgtctgatcccacgtacgccacagtgaagatgacatcgcccagcccttccgtggatgcggataaggtctcggtcacatactatgggcccaacgaggatgcccccgtgggcacagctgtgctgtacctcactggcattgaggtctctctagaggtagacatctaccgcaatgggcaagttgagatgtcaagtgacaaacaggctaagaaaaaatggatctggggtcccagcggttggggtgccatcctgcttgtgaattgcaaccctgctgatgtgggccagcaacttgaggacaagaaaaccaagaaagtgatcttttcagaggaaataacgaatctgtcccagatgactctgaatgtccaaggccccagctgtatcttaaagaaatatcggctagtcctccatacctccaaggaagagtcgaagaaggcgagagtctactggccccaaaaagacaactccagtacctttgagttggtgctggggcccgaccagcacgcctataccttggccctcctcgggaaccacttgaaggagactttctacgttgaagctatagcattcccatctgccgaattctcaggcctcatctcctactctgtgtccctggtggaggagtctcaagacccgtcaattccagagactgtgctgtacaaagacacggtggtgttccgggtggctccctgtgtcttcattccctgtacccaggtgcctctggaggtttacctgtgcagggagctgcagctgcagggttttgtggacacagtgacgaagctgagtgagaagagcaacagccaggtggcatctgtctatgaggaccccaaccgcctgggcaggtggctccaggatgagatggccttctgctacacccaggctccccacaagacaacgtccttgatcctcgacacacctcaggccgccgatctcgatgagttccccatgaagtactcactgagccctggtattggctacatgatccaggacactgaggaccataaagtggccagcatggattccattgggaacctgatggtgtccccacctgtcaaggtccaagggaaagagtacccgctgggcagagtcctcattggcagcagcttttaccccagcgcagagggccgggccatgagtaagaccctccgagacttcctctatgcccagcaggtccaagcgccggtggagctctactcagattggctaatgactggccacgtggatgagttcatgtgcttcatccccacagatgacaagaatgagggcaaaaagggcttcctgctgctcctggccagccccagtgcctgctataaactgttccgagagaaacagaaggaaggctatggcgacgctcttctgtttgatgagcttagagcagatcagctcctgtctaatggaagggaagccaaaaccatcgaccaacttctggctgatgaaagcctgaagaagcagaatgaatacgtggagaagtgcattcacctgaaccgtgacatcctgaagacggagctgggcctggtggaacaggacatcatcgagattccccagctgttctgcttggagaagctgactaacatcccctctgaccagcagcccaagaggtcctttgcgaggccatacttccctgacctgttgcggatgattgtgatgggcaagaacctggggatccccaagccttttgggccccaaatcaaggggacctgctgcctggaagaaaagatttgctgcttgctggagcccctgggcttcaagtgcaccttcatcaatgactttgactgttacctgacagaggtcggagacatctgtgcctgtgccaacatccgccgggtgccctttgccttcaaatggtggaagatggtaccttagacccaggccctggagctgccagctctgccccagcgtggatggcccactgtcaccatgcaacagcatgattctttgcccagtagaggaggctggagagtccaggcaacagaaccctttcttccctgtctgccccgaccgaccctcggacccagtaggatggcaaatgccgccagcttgaacccctatggggaaaagatgcaaaagtgttcagccaagtgacgtttactaaatagccaataaagggctggtgggtgtgaatgc

SEQ ID NO: 164252 - DNA, 3302 bp, Homo sapiens
  Payload ID: 12352
  Gene Symbol: PAM
  Gene Name: peptidylglycine alpha-amidating monooxygenase
  Uniprot ID: P19021
  ENST ID: ENST00000346918
  CDS Start-End: 460-3123
aatgtattaaagaacctcagctgggatttgctgaggacaaatgctgtaacgtgttagtcatccattatctgcttctatttttgcaggttctgaatgatgactgacgcgggtttgggtgatacccctcacagcccctgtcattccggagtcataaggcacccgcgcgtctagccccagcgccagggcacgcgagcggcgctggagggaggaaagcttccgcctgcgggccggacaaaagtcccgcctgcccacggctttttgcccgccgctcgtgaccgagacgcctcgccgcggccagctcgctgctctcgctggcggatggtgtgtggccgccgcaggacgcccgccgtgcccgggccatgaagtagcggctgctggcggcgccgctgcccaaccgccagccccagccccgcgctgcgctgcccggtcctctcccggcggggtcgtatcggcgtggacatggctggccgcgtccctagcctgctagttctccttgtttttccaagcagctgtttggctttccgaagcccactttctgtctttaagaggtttaaagaaactaccagaccattttccaatgaatgtcttggtaccaccagacccgtagttcctattgattcatcagattttgcattggatattcgcatgcctggggttacacctaaacagtccgatacatacttctgcatgtctatgcgaataccagtggatgaggaagccttcgtgattgacttcaagcctcgagccagcatggatactgtccatcacatgttactttttggatgcaatatgccttcatccactggaagttactggttttgtgatgaaggaacctgtacagataaagccaatattctgtatgcctgggcgagaaatgctccccctacccggctccccaaaggtgttggattcagagttggaggagagactggaagtaaatactttgtactacaggtacactatggggatattagtgcttttagagataataacaaggactgttctggtgtgtccttacacctcacacgtctgccacagcctttaattgctggcatgtaccttatgatgtctgttgacactgttatcccagcaggagaaaaagtggtgaattctgacatttcatgccattataaaaattatccaatgcatgtctttgcctatagagttcacactcaccatttaggtaaggtagtaagtggatacagagtaagaaatggacagtggacactgattggacggcagagccctcagctgccacaggctttctaccctgtggggcatccagttgatgtaagttttggtgacctactggctgcaagatgtgtattcactggtgaaggaaggacagaagccacacacattggtggcacgtctagtgatgaaatgtgcaacttatacattatgtattacatggaagccaagcatgcagtttctttcatgacctgtacccagaatgtagctccagatatgttcagaaccataccaccagaggccaacattccaattcccgtgaagtctgatatggttatgatgcatgaacatcataaagaaacagaatataaagataagattcctttactacagcagccaaaacgagaagaagaagaagtgttagaccagggtgatttctattcactactttccaagctgctaggagaaagggaagatgttgttcatgtgcacaaatataatcctacagaaaaggcagaatcagagtcagacctggtagctgagattgcaaatgtagtccaaaaaaaggatcttggtcgatctgatgccagagagggtgcagaacatgagaggggtaatgctattcttgtcagagacagaattcacaaattccacagactagtatctaccttgaggccaccagagagcagagttttctcattacagcagcccccacctggtgaaggcacctgggaaccagaacacacaggagatttccacatggaagaggcactggattggcctggagtatacttgttaccaggccaggtttctggggtggctctagaccctaagaataacctggtgattttccacagaggtgaccatgtctgggatggaaactcgtttgacagcaagtttgtttaccagcaaataggactcggaccaattgaagaagacactattcttgtcatagatccaaataatgctgcagtactccagtccagtggaaaaaatctgttttacttgccacatggcttgagtatagataaagatgggaattattgggtcacagacgtggctctccatcaggtgttcaaactggatccaaacaataaagaaggccctgtattaatcctgggaaggagcatgcaaccaggcagtgaccagaatcacttctgtcaacccactgatgtggctgtggatccaggcactggagccatttatgtatcagatggttactgcaacagcaggattgtgcagttttcaccaagtggaaagttcatcacacagtggggagaagagtcttcagggagcagtcctctgccaggccagttcactgttcctcacagcttggctcttgtgcctcttttgggccaattatgtgtggcagaccgggaaaatggtcggatccagtgttttaaaactgacaccaaagaatttgtgagagagattaagcattcatcatttggaagaaatgtatttgcaatttcatatataccaggcttgctctttgcagtgaatgggaagcctcattttggggaccaagaacctgtacaaggatttgtgatgaacttttccaatggggaaattatagacatcttcaagccagtgcgcaagcactttgatatgcctcatgatattgttgcatctgaagatgggactgtgtacattggagatgctcataccaacaccgtgtggaagttcaccttgactgagaaattggaacatcgatcagttaaaaaggctggcattgaggtccaggaaatcaaaggaaagggaagtggaggcttaaaccttggtaatttctttgcaagccgtaagggctacagtcgaaaagggtttgaccggcttagcactgagggcagtgaccaagagaaagaggatgatggaagtgaatcagaagaggagtattcagcacctctgcctgcgctcgcaccttcctcctcctgaaaaccaagctttgatttagattgagtaagatttacccagaatgtcagattcctttccctttagcacgtttaaagttctgtgtatttaattgtaaactgtactagtctgtgtgggactgtacacactttatttacttcgttttggttaagttggcttctgtttctagttgaggagtttcc

SEQ ID NO: 164253 - DNA, 3684 bp, Homo sapiens
  Payload ID: 12352
  Gene Symbol: PAM
  Gene Name: peptidylglycine alpha-amidating monooxygenase
  ENST ID: ENST00000345721
  CDS Start-End: 378-905
gcaggttctgaatgatgactgacgcgggtttgggtgatacccctcacagcccctgtcattccggagtcataaggcacccgcgcgtctagccccagcgccagggcacgcgagcggcgctggagggaggaaagcttccgcctgcgggccggacaaaagtcccgcctgcccacggctttttgcccgccgctcgtgaccgagacgcctcgccgcggccagctcgctgctctcgctggcggatggtgtgtggccgccgcaggacgcccgccgtgcccgggccatgaagtagcggctgctggcggcgccgctgcccaaccgccagccccagccccgcgctgcgctgcccggtcctctcccggcggggtcgtatcggcgtggacatggctggccgcgtccctagcctgctagttctccttgtttttccaagcagctgtttggctttccgaagcccactttctgtctttaagaggtttaaagaaactaccagaccattttccaatgaatgtcttggtaccaccagacccgtagttcctattgattcatcagattttgcattggatattcgcatgcctggggttacacctaaacagttgacttcaagcctcgagccagcatggatactgtccatcacatgttactttttggatgcaatatgccttcatccactggaagttactggttttgtgatgaaggaacctgtacagataaagccaatattctgtatgcctgggcgagaaatgctccccctacccggctccccaaaggtgttggattcagagttggaggagagactggaagtaaatactttgtactacaggtacactatggggatattagtgcttttagagataataacaaggactgttctggtgtgtccttacacctcacacgtctgccacagcctttaattgctggcatgtaccttatgatgtctgttgacactgttatcccagcaggagaaaaagtggtgaattctgacatttcatgccattataaaaattatccaatgcatgtctttgcctatagagttcacactcaccatttaggtaaggtagtaagtggatacagagtaagaaatggacagtggacactgattggacggcagagccctcagctgccacaggctttctaccctgtggggcatccagttgatgtaagttttggtgacctactggctgcaagatgtgtattcactggtgaaggaaggacagaagccacacacattggtggcacgtctagtgatgaaatgtgcaacttatacattatgtattacatggaagccaagcatgcagtttctttcatgacctgtacccagaatgtagctccagatatgttcagaaccataccaccagaggccaacattccaattcccgtgaagtctgatatggttatgatgcatgaacatcataaagaaacagaatataaagataagattcctttactacagcagccaaaacgagaagaagaagaagtgttagaccagggtgatttctattcactactttccaagctgctaggagaaagggaagatgttgttcatgtgcacaaatataatcctacagaaaaggcagaatcagagtcagacctggtagctgagattgcaaatgtagtccaaaaaaaggatcttggtcgatctgatgccagagagggtgcagaacatgagaggggtaatgctattcttgtcagagacagaattcacaaattccacagactagtatctaccttgaggccaccagagagcagagttttctcattacagcagcccccacctggtgaaggcacctgggaaccagaacacacaggagatttccacatggaagaggcactggattggcctggagtatacttgttaccaggccaggtttctggggtggctctagaccctaagaataacctggtgattttccacagaggtgaccatgtctgggatggaaactcgtttgacagcaagtttgtttaccagcaaataggactcggaccaattgaagaagacactattcttgtcatagatccaaataatgctgcagtactccagtccagtggaaaaaatctgttttacttgccacatggcttgagtatagataaagatgggaattattgggtcacagacgtggctctccatcaggtgttcaaactggatccaaacaataaagaaggccctgtattaatcctgggaaggagcatgcaaccaggcagtgaccagaatcacttctgtcaacccactgatgtggctgtggatccaggcactggagccatttatgtatcagatggttactgcaacagcaggattgtgcagttttcaccaagtggaaagttcatcacacagtggggagaagagtcttcagggagcagtcctctgccaggccagttcactgttcctcacagcttggctcttgtgcctcttttgggccaattatgtgtggcagaccgggaaaatggtcggatccagtgttttaaaactgacaccaaagaatttgtgagagagattaagcattcatcatttggaagaaatgtatttgcaatttcatatataccaggcttgctctttgcagtgaatgggaagcctcattttggggaccaagaacctgtacaaggatttgtgatgaacttttccaatggggaaattatagacatcttcaagccagtgcgcaagcactttgatatgcctcatgatattgttgcatctgaagatgggactgtgtacattggagatgctcataccaacaccgtgtggaagttcaccttgactgagaaattggaacatcgatcagttaaaaaggctggcattgaggtccaggaaatcaaagccgaggcagttgttgaaaccaaaatggagaacaaacccacctcctcagaattgcagaagatgcaagagaaacagaaactgatcaaagagccaggctcgggagtgcctgttgttctcattacaacccttctggttattccggtggttgtcctgctggccattgccatatttattcggtggaaaaaatcaagggcctttggagattctgaacacaaactcgagacgagttcaggaagagtactgggaagatttagaggaaagggaagtggaggcttaaaccttggtaatttctttgcaagccgtaagggctacagtcgaaaagggtttgaccggcttagcactgagggcagtgaccaagagaaagaggatgatggaagtgaatcagaagaggagtattcagcacctctgcctgcgctcgcaccttcctcctcctgaaaaccaagctttgatttagattgagtaagatttacccagaatgtcagattcctttccctttagcacgtttaaagttctgtgtatttaattgtaaactgtactagtctgtgtgggactgtacacactttatttacttcgttttggttaagttggcttctgtttctagttgaggagtttcctaaaagttcataacagtgccattgtctttatatgaacatagactagagaaaccgtcctctttttccatcataattctaatctaacaatggaagatttgcccatttacacttttgagactttttggtggatgtaaataaccccattctttgcttgaacacagtattttcccaatagcactttcattgccagtgtctttctttggtgcctttcctgttcagcattcttagcctgtggcagtaaagagaaactttgtgctacatgacgac

SEQ ID NO: 164254 - DNA, 3156 bp, Homo sapiens
  Payload ID: 12352
  Gene Symbol: PAM
  Gene Name: peptidylglycine alpha-amidating monooxygenase
  Uniprot ID: P19021
  ENST ID: ENST00000304400
  CDS Start-End: 187-3111
gaccgagacgcctcgccgcggccagctcgctgctctcgctggcggatggtgtgtggccgccgcaggacgcccgccgtgcccgggccatgaagtagcggctgctggcggcgccgctgcccaaccgccagccccagccccgcgctgcgctgcccggtcctctcccggcggggtcgtatcggcgtggacatggctggccgcgtccctagcctgctagttctccttgtttttccaagcagctgtttggctttccgaagcccactttctgtctttaagaggtttaaagaaactaccagaccattttccaatgaatgtcttggtaccaccagacccgtagttcctattgattcatcagattttgcattggatattcgcatgcctggggttacacctaaacagtccgatacatacttctgcatgtctatgcgaataccagtggatgaggaagccttcgtgattgacttcaagcctcgagccagcatggatactgtccatcacatgttactttttggatgcaatatgccttcatccactggaagttactggttttgtgatgaaggaacctgtacagataaagccaatattctgtatgcctgggcgagaaatgctccccctacccggctccccaaaggtgttggattcagagttggaggagagactggaagtaaatactttgtactacaggtacactatggggatattagtgcttttagagataataacaaggactgttctggtgtgtccttacacctcacacgtctgccacagcctttaattgctggcatgtaccttatgatgtctgttgacactgttatcccagcaggagaaaaagtggtgaattctgacatttcatgccattataaaaattatccaatgcatgtctttgcctatagagttcacactcaccatttaggtaaggtagtaagtggatacagagtaagaaatggacagtggacactgattggacggcagagccctcagctgccacaggctttctaccctgtggggcatccagttgatgtaagttttggtgacctactggctgcaagatgtgtattcactggtgaaggaaggacagaagccacacacattggtggcacgtctagtgatgaaatgtgcaacttatacattatgtattacatggaagccaagcatgcagtttctttcatgacctgtacccagaatgtagctccagatatgttcagaaccataccaccagaggccaacattccaattcccgtgaagtctgatatggttatgatgcatgaacatcataaagaaacagaatataaagataagattcctttactacagcagccaaaacgagaagaagaagaagtgttagaccagggtgatttctattcactactttccaagctgctaggagaaagggaagatgttgttcatgtgcacaaatataatcctacagaaaaggcagaatcagagtcagacctggtagctgagattgcaaatgtagtccaaaaaaaggatcttggtcgatctgatgccagagagggtgcagaacatgagaggggtaatgctattcttgtcagagacagaattcacaaattccacagactagtatctaccttgaggccaccagagagcagagttttctcattacagcagcccccacctggtgaaggcacctgggaaccagaacacacaggagatttccacatggaagaggcactggattggcctggagtatacttgttaccaggccaggtttctggggtggctctagaccctaagaataacctggtgattttccacagaggtgaccatgtctgggatggaaactcgtttgacagcaagtttgtttaccagcaaataggactcggaccaattgaagaagacactattcttgtcatagatccaaataatgctgcagtactccagtccagtggaaaaaatctgttttacttgccacatggcttgagtatagataaagatgggaattattgggtcacagacgtggctctccatcaggtgttcaaactggatccaaacaataaagaaggccctgtattaatcctgggaaggagcatgcaaccaggcagtgaccagaatcacttctgtcaacccactgatgtggctgtggatccaggcactggagccatttatgtatcagatggttactgcaacagcaggattgtgcagttttcaccaagtggaaagttcatcacacagtggggagaagagtcttcagggagcagtcctctgccaggccagttcactgttcctcacagcttggctcttgtgcctcttttgggccaattatgtgtggcagaccgggaaaatggtcggatccagtgttttaaaactgacaccaaagaatttgtgagagagattaagcattcatcatttggaagaaatgtatttgcaatttcatatataccaggcttgctctttgcagtgaatgggaagcctcattttggggaccaagaacctgtacaaggatttgtgatgaacttttccaatggggaaattatagacatcttcaagccagtgcgcaagcactttgatatgcctcatgatattgttgcatctgaagatgggactgtgtacattggagatgctcataccaacaccgtgtggaagttcaccttgactgagaaattggaacatcgatcagttaaaaaggctggcattgaggtccaggaaatcaaagaagccgaggcagttgttgaaaccaaaatggagaacaaacccacctcctcagaattgcagaagatgcaagagaaacagaaactgatcaaagagccaggctcgggagtgcctgttgttctcattacaacccttctggttattccggtggttgtcctgctggccattgccatatttattcggtggaaaaaatcaagggcctttggagcagattctgaacacaaactcgagacgagttcaggaagagtactgggaagatttagaggaaagggaagtggaggcttaaaccttggtaatttctttgcaagccgtaagggctacagtcgaaaagggtttgaccggcttagcactgagggcagtgaccaagagaaagaggatgatggaagtgaatcagaagaggagtattcagcacctctgcctgcgctcgcaccttcctcctcctgaaaaccaagctttgatttagattgagtaagatttacccagaatgtc

SEQ ID NO: 164255 - DNA, 3622 bp, Homo sapiens
  Payload ID: 12352
  Gene Symbol: PAM
  Gene Name: peptidylglycine alpha-amidating monooxygenase
  Uniprot ID: P19021
  ENST ID: ENST00000348126
  CDS Start-End: 374-2974
gttctgaatgatgactgacgcgggtttgggtgatacccctcacagcccctgtcattccggagtcataaggcacccgcgcgtctagccccagcgccagggcacgcgagcggcgctggagggaggaaagcttccgcctgcgggccggacaaaagtcccgcctgcccacggctttttgcccgccgctcgtgaccgagacgcctcgccgcggccagctcgctgctctcgctggcggatggtgtgtggccgccgcaggacgcccgccgtgcccgggccatgaagtagcggctgctggcggcgccgctgcccaaccgccagccccagccccgcgctgcgctgcccggtcctctcccggcggggtcgtatcggcgtggacatggctggccgcgtccctagcctgctagttctccttgtttttccaagcagctgtttggctttccgaagcccactttctgtctttaagaggtttaaagaaactaccagaccattttccaatgaatgtcttggtaccaccagacccgtagttcctattgattcatcagattttgcattggatattcgcatgcctggggttacacctaaacagtccgatacatacttctgcatgtctatgcgaataccagtggatgaggaagccttcgtgattgacttcaagcctcgagccagcatggatactgtccatcacatgttactttttggatgcaatatgccttcatccactggaagttactggttttgtgatgaaggaacctgtacagataaagccaatattctgtatgcctgggcgagaaatgctccccctacccggctccccaaaggtgttggattcagagttggaggagagactggaagtaaatactttgtactacaggtacactatggggatattagtgcttttagagataataacaaggactgttctggtgtgtccttacacctcacacgtctgccacagcctttaattgctggcatgtaccttatgatgtctgttgacactgttatcccagcaggagaaaaagtggtgaattctgacatttcatgccattataaaaattatccaatgcatgtctttgcctatagagttcacactcaccatttaggtaaggtagtaagtggatacagagtaagaaatggacagtggacactgattggacggcagagccctcagctgccacaggctttctaccctgtggggcatccagttgatgtaagttttggtgacctactggctgcaagatgtgtattcactggtgaaggaaggacagaagccacacacattggtggcacgtctagtgatgaaatgtgcaacttatacattatgtattacatggaagccaagcatgcagtttctttcatgacctgtacccagaatgtagctccagatatgttcagaaccataccaccagaggccaacattccaattcccgtgaagtctgatatggttatgatgcatgaacatcataaagaaacagaatataaagataagattcctttactacagcagccaaaacgagaagaagaagaagtgttagaccaggatttccacatggaagaggcactggattggcctggagtatacttgttaccaggccaggtttctggggtggctctagaccctaagaataacctggtgattttccacagaggtgaccatgtctgggatggaaactcgtttgacagcaagtttgtttaccagcaaataggactcggaccaattgaagaagacactattcttgtcatagatccaaataatgctgcagtactccagtccagtggaaaaaatctgttttacttgccacatggcttgagtatagataaagatgggaattattgggtcacagacgtggctctccatcaggtgttcaaactggatccaaacaataaagaaggccctgtattaatcctgggaaggagcatgcaaccaggcagtgaccagaatcacttctgtcaacccactgatgtggctgtggatccaggcactggagccatttatgtatcagatggttactgcaacagcaggattgtgcagttttcaccaagtggaaagttcatcacacagtggggagaagagtcttcagggagcagtcctctgccaggccagttcactgttcctcacagcttggctcttgtgcctcttttgggccaattatgtgtggcagaccgggaaaatggtcggatccagtgttttaaaactgacaccaaagaatttgtgagagagattaagcattcatcatttggaagaaatgtatttgcaatttcatatataccaggcttgctctttgcagtgaatgggaagcctcattttggggaccaagaacctgtacaaggatttgtgatgaacttttccaatggggaaattatagacatcttcaagccagtgcgcaagcactttgatatgcctcatgatattgttgcatctgaagatgggactgtgtacattggagatgctcataccaacaccgtgtggaagttcaccttgactgagaaattggaacatcgatcagttaaaaaggctggcattgaggtccaggaaatcaaagaagccgaggcagttgttgaaaccaaaatggagaacaaacccacctcctcagaattgcagaagatgcaagagaaacagaaactgatcaaagagccaggctcgggagtgcctgttgttctcattacaacccttctggttattccggtggttgtcctgctggccattgccatatttattcggtggaaaaaatcaagggcctttggagattctgaacacaaactcgagacgagttcaggaagagtactgggaagatttagaggaaagggaagtggaggcttaaaccttggtaatttctttgcaagccgtaagggctacagtcgaaaagggtttgaccggcttagcactgagggcagtgaccaagagaaagaggatgatggaagtgaatcagaagaggagtattcagcacctctgcctgcgctcgcaccttcctcctcctgaaaaccaagctttgatttagattgagtaagatttacccagaatgtcagattcctttccctttagcacgtttaaagttctgtgtatttaattgtaaactgtactagtctgtgtgggactgtacacactttatttacttcgttttggttaagttggcttctgtttctagttgaggagtttcctaaaagttcataacagtgccattgtctttatatgaacatagactagagaaaccgtcctctttttccatcataattctaatctaacaatggaagatttgcccatttacacttttgagactttttggtggatgtaaataaccccattctttgcttgaacacagtattttcccaatagcactttcattgccagtgtctttctttggtgcctttcctgttcagcattcttagcctgtggcagtaaagagaaactttgtgctacatgacgacaaagctgctaaatctcctatttttttaaaatcactaacattatattgcaatgaaggaaataaaaaagtctctatttaaattcttttttaaattttcttcagttggtgtgtttttgggatgtcttatttttagatggttacactgttagaacactattttcagaatctgaatgtaatttgtgtaataaagtgttttcagagca

SEQ ID NO: 164256 - DNA, 2567 bp, Homo sapiens
  Payload ID: 12352
  Gene Symbol: PAM
  Gene Name: peptidylglycine alpha-amidating monooxygenase
  ENST ID: ENST00000379799
  CDS Start-End: 1-2038
aatgcatgtctttgcctatagagttcacactcaccatttaggtaaggtagtaagtggatacagagtaagaaatggacagtggacactgattggacggcagagccctcagctgccacaggctttctaccctgtggggcatccagttgatgtaagttttggtgacctactggctgcaagatgtgtattcactggtgaaggaaggacagaagccacacacattggtggcacgtctagtgatgaaatgtgcaacttatacattatgtattacatggaagccaagcatgcagtttctttcatgacctgtacccagaatgtagctccagatatgttcagaaccataccaccagaggccaacattccaattcccgtgaagtctgatatggttatgatgcatgaacatcataaagaaacagaatataaagataagattcctttactacagcagccaaaacgagaagaagaagaagtgttagaccagggtgatttctattcactactttccaagctgctaggagaaagggaagatgttgttcatgtgcacaaatataatcctacagaaaaggcagaatcagagtcagacctggtagctgagattgcaaatgtagtccaaaaaaaggatcttggtcgatctgatgccagagagggtgcagaacatgagaggggtaatgctattcttgtcagagacagaattcacaaattccacagactagtatctaccttgaggccaccagagagcagagttttctcattacagcagcccccacctggtgaaggcacctgggaaccagaacacacaggagatttccacatggaagaggcactggattggcctggagtatacttgttaccaggccaggtttctggggtggctctagaccctaagaataacctggtgattttccacagaggtgaccatgtctgggatggaaactcgtttgacagcaagtttgtttaccagcaaataggactcggaccaattgaagaagacactattcttgtcatagatccaaataatgctgcagtactccagtccagtggaaaaaatctgttttacttgccacatggcttgagtatagataaagatgggaattattgggtcacagacgtggctctccatcaggtgttcaaactggatccaaacaataaagaaggccctgtattaatcctgggaaggagcatgcaaccaggcagtgaccagaatcacttctgtcaacccactgatgtggctgtggatccaggcactggagccatttatgtatcagatggttactgcaacagcaggattgtgcagttttcaccaagtggaaagttcatcacacagtggggagaagagtcttcagggagcagtcctctgccaggccagttcactgttcctcacagcttggctcttgtgcctcttttgggccaattatgtgtggcagaccgggaaaatggtcggatccagtgttttaaaactgacaccaaagaatttgtgagagagattaagcattcatcatttggaagaaatgtatttgcaatttcatatataccaggcttgctctttgcagtgaatgggaagcctcattttggggaccaagaacctgtacaaggatttgtgatgaacttttccaatggggaaattatagacatcttcaagccagtgcgcaagcactttgatatgcctcatgatattgttgcatctgaagatgggactgtgtacattggagatgctcataccaacaccgtgtggaagttcaccttgactgagaaattggaacatcgatcagttaaaaaggctggcattgaggtccaggaaatcaaagcagattctgaacacaaactcgagacgagttcaggaagagtactgggaagatttagaggaaagggaagtggaggcttaaaccttggtaatttctttgcaagccgtaagggctacagtcgaaaagggtttgaccggcttagcactgagggcagtgaccaagagaaagaggatgatggaagtgaatcagaagaggagtattcagcacctctgcctgcgctcgcaccttcctcctcctgaaaaccaagctttgatttagattgagtaagatttacccagaatgtcagattcctttccctttagcacgtttaaagttctgtgtatttaattgtaaactgtactagtctgtgtgggactgtacacactttatttacttcgttttggttaagttggcttctgtttctagttgaggagtttcctaaaagttcataacagtgccattgtctttatatgaacatagactagagaaaccgtcctctttttccatcataattctaatctaacaatggaagatttgcccatttacacttttgagactttttggtggatgtaaataaccccattctttgcttgaacacagtattttcccaatagcactttcattgccagtgtctttctttggtgcctttcctgttcagcattcttagcctgtggcagtaaagagaaactttgtgctacatgacgacaaagctgctaaatctcctatttttttaaaatcactaacattatattgcaatgaaggaaataaaaaagtctctatttaaattct

SEQ ID NO: 164257 - DNA, 5432 bp, Homo sapiens
  Payload ID: 12352
  Gene Symbol: PAM
  Gene Name: peptidylglycine alpha-amidating monooxygenase
  Uniprot ID: P19021
  ENST ID: ENST00000438793
  CDS Start-End: 471-3392
gtgaaactactaatgtattaaagaacctcagctgggatttgctgaggacaaatgctgtaacgtgttagtcatccattatctgcttctatttttgcaggttctgaatgatgactgacgcgggtttgggtgatacccctcacagcccctgtcattccggagtcataaggcacccgcgcgtctagccccagcgccagggcacgcgagcggcgctggagggaggaaagcttccgcctgcgggccggacaaaagtcccgcctgcccacggctttttgcccgccgctcgtgaccgagacgcctcgccgcggccagctcgctgctctcgctggcggatggtgtgtggccgccgcaggacgcccgccgtgcccgggccatgaagtagcggctgctggcggcgccgctgcccaaccgccagccccagccccgcgctgcgctgcccggtcctctcccggcggggtcgtatcggcgtggacatggctggccgcgtccctagcctgctagttctccttgtttttccaagcagctgtttggctttccgaagcccactttctgtctttaagaggtttaaagaaactaccagaccattttccaatgaatgtcttggtaccaccagacccgtagttcctattgattcatcagattttgcattggatattcgcatgcctggggttacacctaaacagtccgatacatacttctgcatgtctatgcgaataccagtggatgaggaagccttcgtgattgacttcaagcctcgagccagcatggatactgtccatcacatgttactttttggatgcaatatgccttcatccactggaagttactggttttgtgatgaaggaacctgtacagataaagccaatattctgtatgcctgggcgagaaatgctccccctacccggctccccaaaggtgttggattcagagttggaggagagactggaagtaaatactttgtactacaggtacactatggggatattagtgcttttagagataataacaaggactgttctggtgtgtccttacacctcacacgtctgccacagcctttaattgctggcatgtaccttatgatgtctgttgacactgttatcccagcaggagaaaaagtggtgaattctgacatttcatgccattataaaaattatccaatgcatgtctttgcctatagagttcacactcaccatttaggtaaggtagtaagtggatacagagtaagaaatggacagtggacactgattggacggcagagccctcagctgccacaggctttctaccctgtggggcatccagttgatgtaagttttggtgacctactggctgcaagatgtgtattcactggtgaaggaaggacagaagccacacacattggtggcacgtctagtgatgaaatgtgcaacttatacattatgtattacatggaagccaagcatgcagtttctttcatgacctgtacccagaatgtagctccagatatgttcagaaccataccaccagaggccaacattccaattcccgtgaagtctgatatggttatgatgcatgaacatcataaagaaacagaatataaagataagattcctttactacagcagccaaaacgagaagaagaagaagtgttagaccagggtgatttctattcactactttccaagctgctaggagaaagggaagatgttgttcatgtgcacaaatataatcctacagaaaaggcagaatcagagtcagacctggtagctgagattgcaaatgtagtccaaaaaaaggatcttggtcgatctgatgccagagagggtgcagaacatgagaggggtaatgctattcttgtcagagacagaattcacaaattccacagactagtatctaccttgaggccaccagagagcagagttttctcattacagcagcccccacctggtgaaggcacctgggaaccagaacacacaggagatttccacatggaagaggcactggattggcctggagtatacttgttaccaggccaggtttctggggtggctctagaccctaagaataacctggtgattttccacagaggtgaccatgtctgggatggaaactcgtttgacagcaagtttgtttaccagcaaataggactcggaccaattgaagaagacactattcttgtcatagatccaaataatgctgcagtactccagtccagtggaaaaaatctgttttacttgccacatggcttgagtatagataaagatgggaattattgggtcacagacgtggctctccatcaggtgttcaaactggatccaaacaataaagaaggccctgtattaatcctgggaaggagcatgcaaccaggcagtgaccagaatcacttctgtcaacccactgatgtggctgtggatccaggcactggagccatttatgtatcagatggttactgcaacagcaggattgtgcagttttcaccaagtggaaagttcatcacacagtggggagaagagtcttcagggagcagtcctctgccaggccagttcactgttcctcacagcttggctcttgtgcctcttttgggccaattatgtgtggcagaccgggaaaatggtcggatccagtgttttaaaactgacaccaaagaatttgtgagagagattaagcattcatcatttggaagaaatgtatttgcaatttcatatataccaggcttgctctttgcagtgaatgggaagcctcattttggggaccaagaacctgtacaaggatttgtgatgaacttttccaatggggaaattatagacatcttcaagccagtgcgcaagcactttgatatgcctcatgatattgttgcatctgaagatgggactgtgtacattggagatgctcataccaacaccgtgtggaagttcaccttgactgagaaattggaacatcgatcagttaaaaaggctggcattgaggtccaggaaatcaaagaagccgaggcagttgttgaaaccaaaatggagaacaaacccacctcctcagaattgcagaagatgcaagagaaacagaaactgatcaaagagccaggctcgggagtgcctgttgttctcattacaacccttctggttattccggtggttgtcctgctggccattgccatatttattcggtggaaaaaatcaagggcctttggagattctgaacacaaactcgagacgagttcaggaagagtactgggaagatttagaggaaagggaagtggaggcttaaaccttggtaatttctttgcaagccgtaagggctacagtcgaaaagggtttgaccggcttagcactgagggcagtgaccaagagaaagaggatgatggaagtgaatcagaagaggagtattcagcacctctgcctgcgctcgcaccttcctcctcctgaaaaccaagctttgatttagattgagtaagatttacccagaatgtcagattcctttccctttagcacgtttaaagttctgtgtatttaattgtaaactgtactagtctgtgtgggactgtacacactttatttacttcgttttggttaagttggcttctgtttctagttgaggagtttcctaaaagttcataacagtgccattgtctttatatgaacatagactagagaaaccgtcctctttttccatcataattctaatctaacaatggaagatttgcccatttacacttttgagactttttggtggatgtaaataaccccattctttgcttgaacacagtattttcccaatagcactttcattgccagtgtctttctttggtgcctttcctgttcagcattcttagcctgtggcagtaaagagaaactttgtgctacatgacgacaaagctgctaaatctcctatttttttaaaatcactaacattatattgcaatgaaggaaataaaaaagtctctatttaaattcttttttaaattttcttcagttggtgtgtttttgggatgtcttatttttagatggttacactgttagaacactattttcagaatctgaatgtaatttgtgtaataaagtgttttcagagcattagctgtcagtgtattttccagtttttgcgtatttgcagattttacatacaacttttataataattacacaaacccacaaatattagtgaaacttactcgatgtcttcaactaaaagaaatgtgtgtattgtacaaaatttagaagatactttagccaatataaattaaaaaccagcctgagtttacataaatttgtaaagtcaggctcttctaaaatccaaagagggtttttgcctatatatcaatcagaggataaatactttaataaaaggtaatcacagctaagtggatacctgtgtctcaaattacatatgcaaatgatccatcagtagggatcactaataatagttttccttttaaaaaataatttcagggcaggtacagtggctcaagcctatacttccaggactttgggaggccaagcagaaggattgtgggaggccaagcagaaggattgtttgagcccagaaattcaaggctgcagtgagctatgatcaatccactgtactccagcctaggctacagagtgagatcctttctctaaaataaaatacaatttccatgtatccataggaatatattcatcttttacagtgattgcagattagttttaaaacgtctttttcgtaattcgtcaatgcaagttagtaagaaccagataattttccattttaaaatgataggaatctaaaactctttttcaaaaatgccaacctgtttttccggcatcatagtagttggaataatacagatataattgactaatcataaagtacatgagagtacagaagggaaatttggaaacggtaagtctgctagggcattacaatcctgtcctagcactccacctttattctgccaacctgggttaattaaagatggtagcctggaaagtaatgaatgacattgacttcaggcaatctttccactgattattcttggctgaacttcatttatcgagtcagagaatgcactgcctgagaaatgtcccagaggagtgaatcctaggcctggccacagtagaatcgcctggagaatttaagaaaaaaattgttgggcactcactctttccagtgatctttatttagttggcttacaatggaatacaggtatggttcatgtttttaaatttgtccaggtgtttctattgtgcagtcacagttgaaaaccattgtcttcgagaatagctattctatcttgccagttacaataagtggatagctatattttcacataaattatagtttacagatgtttggagggggaagacaggatctgaggtgttttgatatgactgttagcaccaaaatctgaatgccttaattgttgaatgtgttaaattggataattaaaatgggcataaatgacttattaaaaaagcaaagggaaa

SEQ ID NO: 164258 - DNA, 2898 bp, Homo sapiens
  Payload ID: 12352
  Gene Symbol: PAM
  Gene Name: peptidylglycine alpha-amidating monooxygenase
  Uniprot ID: P19021
  ENST ID: ENST00000455264
  CDS Start-End: 81-2798
ggcgccgctgcccaaccgccagccccagccccgcgctgcgctgcccggtcctctcccggcggggtcgtatcggcgtggacatggctggccgcgtccctagcctgctagttctccttgtttttccaagcagctgtttggctttccgaagcccactttctgtctttaagaggtttaaagaaactaccagaccattttccaatgaatgtcttggtaccaccagacccgtagttcctattgattcatcagattttgcattggatattcgcatgcctggggttacacctaaacagtccgatacatacttctgcatgtctatgcgaataccagtggatgaggaagccttcgtgattgacttcaagcctcgagccagcatggatactgtccatcacatgttactttttggatgcaatatgccttcatccactggaagttactggttttgtgatgaaggaacctgtacagataaagccaatattctgtatgcctgggcgagaaatgctccccctacccggctccccaaaggtgttggattcagagttggaggagagactggaagtaaatactttgtactacaggtacactatggggatattagtgcttttagagataataacaaggactgttctggtgtgtccttacacctcacacgtctgccacagcctttaattgctggcatgtaccttatgatgtctgttgacactgttatcccagcaggagaaaaagtggtgaattctgacatttcatgccattataaaaattatccaatgcatgtctttgcctatagagttcacactcaccatttaggtaaggtagtaagtggatacagagtaagaaatggacagtggacactgattggacggcagagccctcagctgccacaggctttctaccctgtggggcatccagttgatgtaagttttggtgacctactggctgcaagatgtgtattcactggtgaaggaaggacagaagccacacacattggtggcacgtctagtgatgaaatgtgcaacttatacattatgtattacatggaagccaagcatgcagtttctttcatgacctgtacccagaatgtagctccagatatgttcagaaccataccaccagaggccaacattccaattcccgtgaagtctgatatggttatgatgcatgaacatcataaagaaacagaatataaagataagattcctttactacagcagccaaaacgagaagaagaagaagtgttagaccagggtgatttctattcactactttccaagctgctaggagaaagggaagatgttgttcatgtgcacaaatataatcctacagaaaaggcagaatcagagtcagacctggtagctgagattgcaaatgtagtccaaaaaaaggatcttggtcgatctgatgccagagagggtgcagaacatgagaggggtaatgctattcttgtcagagacagaattcacaaattccacagactagtatctaccttgaggccaccagagagcagagttttctcattacagcagcccccacctggtgaaggcacctgggaaccagaacacacaggagatttccacatggaagaggcactggattggcctggagtatacttgttaccaggccaggtttctggggtggctctagaccctaagaataacctggtgattttccacagaggtgaccatgtctgggatggaaactcgtttgacagcaagtttgtttaccagcaaataggactcggaccaattgaagaagacactattcttgtcatagatccaaataatgctgcagtactccagtccagtggaaaaaatctgttttacttgccacatggcttgagtatagataaagatgggaattattgggtcacagacgtggctctccatcaggtgttcaaactggatccaaacaataaagaaggccctgtattaatcctgggaaggagcatgcaaccaggcagtgaccagaatcacttctgtcaacccactgatgtggctgtggatccaggcactggagccatttatgtatcagatggttactgcaacagcaggattgtgcagttttcaccaagtggaaagttcatcacacagtggggagaagagtcttcagggagcagtcctctgccaggccagttcactgttcctcacagcttggctcttgtgcctcttttgggccaattatgtgtggcagaccgggaaaatggtcggatccagtgttttaaaactgacaccaaagaatttgtgagagagattaagcattcatcatttggaagaaatgtatttgcaatttcatatataccaggcttgctctttgcagtgaatgggaagcctcattttggggaccaagaacctgtacaaggatttgtgatgaacttttccaatggggaaattatagacatcttcaagccagtgcgcaagcactttgatatgcctcatgatattgttgcatctgaagatgggactgtgtacattggagatgctcataccaacaccgtgtggaagttcaccttgactgagaaattggaacatcgatcagttaaaaaggctggcattgaggtccaggaaatcaaagattctgaacacaaactcgagacgagttcaggaagagtactgggaagatttagaggaaagggaagtggaggcttaaaccttggtaatttctttgcaagccgtaagggctacagtcgaaaagggtttgaccggcttagcactgagggcagtgaccaagagaaagaggatgatggaagtgaatcagaagaggagtattcagcacctctgcctgcgctcgcaccttcctcctcctgaaaaccaagctttgatttagattgagtaagatttacccagaatgtcagattcctttccctttagcacgtttaaagttctgtgtatttaattgtaaactgta

SEQ ID NO: 164259 - DNA, 575 bp, Homo sapiens
  Payload ID: 12352
  Gene Symbol: PAM
  Gene Name: peptidylglycine alpha-amidating monooxygenase
  ENST ID: ENST00000512073
  CDS Start-End: 501-575
gcgcaggttggtgttgttgccgctgctgccgccactgcgaggcggtcagggcaagggtgagggtgggggcgcggaagggggcctgggctcgggatcctgctgccaccaattcctggtgccccaggaggttctgaatgatgactgacgcgggtttgggtgatacccctcacagcccctgtcattccggagtcataaggcacccgcgcgtctagccccagcgccagggcacgcgagcggcgctggagggaggaaagcttccgcctgcgggccggacaaaagtcccgcctgcccacggctttttgcccgccgctcgtgaccgagacgcctcgccgcggccagctcgctgctctcgctggcggatggtgtgtggccgccgcaggacgcccgccgtgcccgggccatgaagtagcggctgctggcggcgccgctgcccaaccgccagccccagccccgcgctgcgctgcccggtcctctcccggcggggtcgtatcggcgtggacatggctggccgcgtccctagcctgctagttctccttgtttttccaagcagctgtttggctttccgaagcccactt

SEQ ID NO: 164260 - DNA, 570 bp, Homo sapiens
  Payload ID: 12352
  Gene Symbol: PAM
  Gene Name: peptidylglycine alpha-amidating monooxygenase
  ENST ID: ENST00000505654
  CDS Start-End: 484-570
gctaccacaccagattctgaaggggaggagttgtctggaaagaccagagctgggtgctggggatctggagcagctcgggacccgcgctgcagggagctgggatgggagaggttctgaatgatgactgacgcgggtttgggtgatacccctcacagcccctgtcattccggagtcataaggcacccgcgcgtctagccccagcgccagggcacgcgagcggcgctggagggaggaaagcttccgcctgcgggccggacaaaagtcccgcctgcccacggctttttgcccgccgctcgtgaccgagacgcctcgccgcggccagctcgctgctctcgctggcggatggtgtgtggccgccgcaggacgcccgccgtgcccgggccatgaagtagcggctgctggcggcgccgctgcccaaccgccagccccagccccgcgctgcgctgcccggtcctctcccggcggggtcgtatcggcgtggacatggctggccgcgtccctagcctgctagttctccttgtttttccaagcagctgtttggctttccgaagcccactttctgtctttaag

SEQ ID NO: 164261 - DNA, 528 bp, Homo sapiens
  Payload ID: 12352
  Gene Symbol: PAM
  Gene Name: peptidylglycine alpha-amidating monooxygenase
  ENST ID: ENST00000511477
  CDS Start-End: 403-528
aattctgtgatgatccttgggagctcttggttctgaatgatgactgacgcgggtttgggtgatacccctcacagcccctgtcattccggagtcataaggcacccgcgcgtctagccccagcgccagggcacgcgagcggcgctggagggaggaaagcttccgcctgcgggccggacaaaagtcccgcctgcccacggctttttgcccgccgctcgtgaccgagacgcctcgccgcggccagctcgctgctctcgctggcggatggtgtgtggccgccgcaggacgcccgccgtgcccgggccatgaagtagcggctgctggcggcgccgctgcccaaccgccagccccagccccgcgctgcgctgcccggtcctctcccggcggggtcgtatcggcgtggacatggctggccgcgtccctagcctgctagttctccttgtttttccaagcagctgtttggctttccgaagcccactttctgtctttaagaggtttaaagaaactaccagaccattttccaatgaatgt

SEQ ID NO: 164262 - DNA, 616 bp, Homo sapiens
  Payload ID: 12352
  Gene Symbol: PAM
  Gene Name: peptidylglycine alpha-amidating monooxygenase
  ENST ID: ENST00000506006
  CDS Start-End: 532-616
gatgcatgtatataagcatgcctttgttctcaaaagtctttttctatctgattactgtggtatccagtgctttgtctttgcctctcttcgttttttgttttgtttttttccttgcgccttagccggtcatttgtgtgatgtttacattcagcagagaggttctgaatgatgactgacgcgggtttgggtgatacccctcacagcccctgtcattccggagtcataaggcacccgcgcgtctagccccagcgccagggcacgcgagcggcgctggagggaggaaagcttccgcctgcgggccggacaaaagtcccgcctgcccacggctttttgcccgccgctcgtgaccgagacgcctcgccgcggccagctcgctgctctcgctggcggatggtgtgtggccgccgcaggacgcccgccgtgcccgggccatgaagtagcggctgctggcggcgccgctgcccaaccgccagccccagccccgcgctgcgctgcccggtcctctcccggcggggtcgtatcggcgtggacatggctggccgcgtccctagcctgctagttctccttgtttttccaagcagctgtttggctttccgaagcccactttctgtcttta

SEQ ID NO: 164263 - DNA, 564 bp, Homo sapiens
  Payload ID: 12352
  Gene Symbol: PAM
  Gene Name: peptidylglycine alpha-amidating monooxygenase
  ENST ID: ENST00000509832
  CDS Start-End: 406-564
atttttggtgagagaaaggagtgatagaggaagttctgaatgatgactgacgcgggtttgggtgatacccctcacagcccctgtcattccggagtcataaggcacccgcgcgtctagccccagcgccagggcacgcgagcggcgctggagggaggaaagcttccgcctgcgggccggacaaaagtcccgcctgcccacggctttttgcccgccgctcgtgaccgagacgcctcgccgcggccagctcgctgctctcgctggcggatggtgtgtggccgccgcaggacgcccgccgtgcccgggccatgaagtagcggctgctggcggcgccgctgcccaaccgccagccccagccccgcgctgcgctgcccggtcctctcccggcggggtcgtatcggcgtggacatggctggccgcgtccctagcctgctagttctccttgtttttccaagcagctgtttggctttccgaagcccactttctgtctttaagaggtttaaagaaactaccagaccattttccaatgaatgtcttggtaccaccagacccgtagttcctattgat

SEQ ID NO: 164264 - DNA, 1417 bp, Homo sapiens
  Payload ID: 12352
  Gene Symbol: PAM
  Gene Name: peptidylglycine alpha-amidating monooxygenase
  ENST ID: ENST00000504691
  CDS Start-End: 1-752
gtcggatccagtgttttaaaactgacaccaaagaatttgtgagagagattaagcattcatcatttggaagaaatgtatttgcaatttcatatataccaggcttgctctttgcagtgaatgggaagcctcattttggggaccaagaacctgtacaaggatttgtgatgaacttttccaatggggaaattatagacatcttcaagccagtgcgcaagcactttgatatgcctcatgatattgttgcatctgaagatgggactgtgtacattggagatgctcataccaacaccgtgtggaagttcaccttgactgagaaattggaacatcgatcagttaaaaaggctggcattgaggtccaggaaatcaaagaagccgaggcagttgttgaaaccaaaatggagaacaaacccacctcctcagaattgcagaagatgcaagagaaacagaaactgatcaaagagccaggctcgggagtgcctgttgttctcattacaacccttctggttattccggtggttgtcctgctggccattgccatatttattcggtggaaaaaatcaagggcctttggaggaaagggaagtggaggcttaaaccttggtaatttctttgcaagccgtaagggctacagtcgaaaagggtttgaccggcttagcactgagggcagtgaccaagagaaagaggatgatggaagtgaatcagaagaggagtattcagcacctctgcctgcgctcgcaccttcctcctcctgaaaaccaagctttgatttagattgagtaagatttacccagaatgtcagattcctttccctttagcacgtttaaagttctgtgtatttaattgtaaactgtactagtctgtgtgggactgtacacactttatttacttcgttttggttaagttggcttctgtttctagttgaggagtttcctaaaagttcataacagtgccattgtctttatatgaacatagactagagaaaccgtcctctttttccatcataattctaatctaacaatggaagatttgcccatttacacttttgagactttttggtggatgtaaataaccccattctttgcttgaacacagtattttcccaatagcactttcattgccagtgtctttctttggtgcctttcctgttcagcattcttagcctgtggcagtaaagagaaactttgtgctacatgacgacaaagctgctaaatctcctatttttttaaaatcactaacattatattgcaatgaaggaaataaaaaagtctctatttaaattcttttttaaattttcttcagttggtgtgtttttgggatgtcttatttttagatggttacactgttagaacactattttcagaatctgaatgtaatttgtgtaataaagtgttttcagagcattagctgtcagtgtatt

SEQ ID NO: 164265 - DNA, 609 bp, Homo sapiens
  Payload ID: 12352
  Gene Symbol: PAM
  Gene Name: peptidylglycine alpha-amidating monooxygenase
  ENST ID: ENST00000511839
  CDS Start-End: 405-609
acttatcatgaagaatctcacttcatttaaggttctgaatgatgactgacgcgggtttgggtgatacccctcacagcccctgtcattccggagtcataaggcacccgcgcgtctagccccagcgccagggcacgcgagcggcgctggagggaggaaagcttccgcctgcgggccggacaaaagtcccgcctgcccacggctttttgcccgccgctcgtgaccgagacgcctcgccgcggccagctcgctgctctcgctggcggatggtgtgtggccgccgcaggacgcccgccgtgcccgggccatgaagtagcggctgctggcggcgccgctgcccaaccgccagccccagccccgcgctgcgctgcccggtcctctcccggcggggtcgtatcggcgtggacatggctggccgcgtccctagcctgctagttctccttgtttttccaagcagctgtttggctttccgaagcccactttctgtctttaagaggtttaaagaaactaccagaccattttccaatgaatgtcttggtaccaccagacccgtagttcctattgattcatcagattttgcattggatattcgcatgcctggggttacaccta

SEQ ID NO: 164266 - DNA, 997 bp, Homo sapiens
  Payload ID: 12353
  Gene Symbol: PIN1
  Gene Name: peptidylprolyl cis/trans isomerase, NIMA-interacting 1
  Uniprot ID: Q13526
  ENST ID: ENST00000247970
  CDS Start-End: 23-514
aggcgctgcggcaggagggaagatggcggacgaggagaagctgccgcccggctgggagaagcgcatgagccgcagctcaggccgagtgtactacttcaaccacatcactaacgccagccagtgggagcggcccagcggcaacagcagcagtggtggcaaaaacgggcagggggagcctgccagggtccgctgctcgcacctgctggtgaagcacagccagtcacggcggccctcgtcctggcggcaggagaagatcacccggaccaaggaggaggccctggagctgatcaacggctacatccagaagatcaagtcgggagaggaggactttgagtctctggcctcacagttcagcgactgcagctcagccaaggccaggggagacctgggtgccttcagcagaggtcagatgcagaagccatttgaagacgcctcgtttgcgctgcggacgggggagatgagcgggcccgtgttcacggattccggcatccacatcatcctccgcactgagtgagggtggggagcccaggcctggcctcggggcagggcagggcggctaggccggccagctcccccttgcccgccagccagtggccgaaccccccactccctgccaccgtcacacagtatttattgttcccacaatggctgggagggggcccttccagattgggggccctggggtccccactccctgtccatccccagttggggctgcgaccgccagattctcccttaaggaattgacttcagcaggggtgggaggctcccagacccagggcagtgtggtgggaggggtgttccaaagagaaggcctggtcagcagagccgccccgtgtccccccaggtgctggaggcagactcgagggccgaattgtttctagttaggccacgctcctctgttcagtcgcaaaggtgaacactcatgcggcccagccatgggccctctgagcaactgtgcagcaccctttcacccccaattaaacccagaaccact

SEQ ID NO: 164267 - DNA, 878 bp, Homo sapiens
  Payload ID: 12353
  Gene Symbol: PIN1
  Gene Name: peptidylprolyl cis/trans isomerase, NIMA-interacting 1
  ENST ID: ENST00000587625
  CDS Start-End: 23-460
aggcgctgcggcaggagggaagatggcggacgaggagaagctgccgcccggctgggagaagcgcatgagccgcagctcaggccgagtgtactacttcaaccacatcactaacgccagccagtgggagcggcccagcggcaacagcagcagtggtggcaaaaacgggcagggggagcctgccagggtccgctgctcgcacctgctggtgaagcacagccagtcacggcggccctcgtcctggcggcaggagaagatcacccggaccaaggaggaggccctggagctgatcaacggctacatccagaagatcaagtcgggagaggaggactttgagtctctggcctcacagttcagcgactgcagctcagccaaggccaggggagacctgggtgccttcagcagaggtgcgcaaggaatgggcctcaccaggttgggggacccttaccaccctgaggggtagaggccaggagggtctgggcattgggctcccaggtgccacaccggccttcggggtccagcaggtggcagcacagccccttcctcaggcttcagaggctgctctgctgggcagggccagggccacacagggaggggggctgcagcactttcttcctggcatcatctctaccctggggggcatggtctcttgtgtgtctgtgcacagatgtcctcatcccaggcccaccaaggtgggtacatcctgtcctctgcctcttcctttttgtggtttaaggttgagggccctgagagtcccagggcctgtcccccagaatccctctcaaaggtggggaaaccaggggtgagaggaggtggccctgagtttaggcctgtctggccaggacagtggaaatcagggacagaggggactaggcctcctc

SEQ ID NO: 164268 - DNA, 533 bp, Homo sapiens
  Payload ID: 12353
  Gene Symbol: PIN1
  Gene Name: peptidylprolyl cis/trans isomerase, NIMA-interacting 1
  ENST ID: ENST00000591777
  CDS Start-End: 1-271
gcaggagaagatcacccggaccaaggaggaggccctggagctgatcaacggctacatccagaagatcaagtcgggagaggaggactttgagtctctggcctcacagttcagcgactgcagctcagccaaggccaggggagacctgggtgccttcagcagaggtcagatgcagaagccatttgaagacgcctcgtttgcgctgcggacgggggagatgagcgggcccgtgttcacggattccggcatccacatcatcctccgcactgagtgagggtggggagcccaggcctggcctcggggcagggcagggcggctaggccggccagctcccccttgcccgccagccagtggccgaaccccccactccctgccaccgtcacacagtgctggaggcagactcgagggccgaattgtttctagttaggccacgctcctctgttcagtcgcaaaggtgaacactcatgcggcccagccatgggccctctgagcaactgtgcagcaccctttcacccccaattaaacccagaaccact

SEQ ID NO: 164269 - DNA, 648 bp, Homo sapiens
  Payload ID: 12353
  Gene Symbol: PIN1
  Gene Name: peptidylprolyl cis/trans isomerase, NIMA-interacting 1
  Uniprot ID: Q13526
  ENST ID: ENST00000588695
  CDS Start-End: 5-496
gaagatggcggacgaggagaagctgccgcccggctgggagaagcgcatgagccgcagctcaggccgagtgtactacttcaaccacatcactaacgccagccagtgggagcggcccagcggcaacagcagcagtggtggcaaaaacgggcagggggagcctgccagggtccgctgctcgcacctgctggtgaagcacagccagtcacggcggccctcgtcctggcggcaggagaagatcacccggaccaaggaggaggccctggagctgatcaacggctacatccagaagatcaagtcgggagaggaggactttgagtctctggcctcacagttcagcgactgcagctcagccaaggccaggggagacctgggtgccttcagcagaggtcagatgcagaagccatttgaagacgcctcgtttgcgctgcggacgggggagatgagcgggcccgtgttcacggattccggcatccacatcatcctccgcactgagtgagggtgctggaggcagactcgagggccgaattgtttctagttaggccacgctcctctgttcagtcgcaaaggtgaacactcatgcggcccagccatgggccctctgagcaactgtgcagcaccctttcacccccaattaaacccagaaccact

SEQ ID NO: 164270 - DNA, 755 bp, Homo sapiens
  Payload ID: 12353
  Gene Symbol: PIN1
  Gene Name: peptidylprolyl cis/trans isomerase, NIMA-interacting 1
  ENST ID: ENST00000586352
  CDS Start-End: 1-152
tggcggacgaggagaagctgccgcccggctgggagaagcgcatgagccgcagctcaggtgagaacaccaaggcccagggaagatatatcacatttgaacccagattcagatttgaatccaggccgagtgtactacttcaaccacatcactaacgccagccagtgggagcggcccagcggcaacagcagcagtggtggcaaaaacgggcagggggagcctgccagggtccgctgctcgcacctgctggtgaagcacagccagtcacggcggccctcgtcctggcggcaggagaagatcacccggaccaaggaggaggccctggagctgatcaacggctacatccagaagatcaagtcgggagaggaggactttgagtctctggcctcacagttcagcgactgcagctcagccaaggccaggggagacctgggtgccttcagcagaggtcagatgcagaagccatttgaagacgcctcgtttgcgctgcggacgggggagatgagcgggcccgtgttcacggattccggcatccacatcatcctccgcactgagtgagggtggggagcccaggcctggcctcggggcagggcagggcggctaggccggccagctcccccttgcccgccagccagtggccgaaccccccactccctgccaccgtcacacagtatttattgttcccacaatggctgggagggggcccttccagattgggggccctggggtccccactccctgtccatccccagttgggg

SEQ ID NO: 164271 - DNA, 1780 bp, Homo sapiens
  Payload ID: 12354
  Gene Symbol: PIN4
  Gene Name: peptidylprolyl cis/trans isomerase, NIMA-interacting 4
  ENST ID: ENST00000218432
  CDS Start-End: 36-371
aattgagatgcggctttcaggcatttgtttaggacatgcccatggcggggcttctaaaggggcttgtacggcaactggagcggttcagcgttcaacaacaagcttccaagatgccgcccaaaggaaaaagtggttctggaaaagcggggaaagggggagcagcctctgggagtgacagtgctgacaagaaggctcaaggtcccaaaggtggtggcaatgcagtaaaggtcagacacattctatgtgaaaaacatggcaaaatcatggaagccatggaaaagttaaagtctgggatgagattcaatgaagtggccgcacagtatagtgaagataaagccaggcaaggggtatgttgctcttattatttataattttctctcaaggtaagaaagcaaagtaaaaatgacaaataataaaataagataaaaattctccatcctccacagaagaaacacagaagtagggatcattcctttgttcaaccattggttgtagcgatattttggtttaaagatctcaaaagcagaaatgtccaacttgtaaatagtagaataagggtcatctatgtcaaaacctatgcatgaccaaacttgcacggctaacttcaaagtccagcagtgttgagagtacttatgtgttcagtctagttagacttcttctacctatttgtccttattgagcctattcctgtattgctcttaggaatatacctcgtaaccttagcaaaatgttgggaaattctctcaagctacagtagaactgttccctcttctgggccacttgatatcacttatcttttgggtttttcagggtgacttgggttggatgaccagagggtccatggtgggaccatttcaagaagcagcatttgccttgcctgtaagtgggatggataagcctgtgtttacagacccaccggttaagacaaaatttggatatcatattattatggtcgaaggaagaaaataaaatcatatgaaagactgaataagttttatacattttgtttctttaaaaggtattacatattcttttgagctggagctgcaaggaaatacaaaaatttttaaaaagaaaagatattggatgctccttgtattctgtgaaagctctaagtatgggtttgtaggtgtaagagagggtggggctaagtgaatgtcaactgtagtaggtattcagtcagtctttctcaaagagaagtcaagcagactccctttaacctgtattctctttcctcccagaactatatctgactctcagtctgtcccataaattaattcagaaaccatcttcaggggaagcagatatcaactcacactattcacacaactgaaaatattgggcatcaaatagattagtgtgtgagaatcataaaataagttcctagacaacatttgttttacatgttagtcaactctgatcttccaggacaggtggtattagctccactgtcttaacatagtacgtggcacgttatgcctttcagtgttaactcctttctttttaaataaatgtttattggaggaaaaaagcactcagttgttccatgagttgttttgtactagactaaccgagtgctggttaaagggagggatgtcagcataaaaatgtcattccctcatcttcagtgtatgggttacattaagactgtcctttccagggccaatgttctgtgcatctaaatttttaaaatttaaaatgccatatttatgacatataaaaaagtataaagattactaatataaatactatactgcttcaaaaataaaactttgccaac

SEQ ID NO: 164272 - DNA, 1321 bp, Homo sapiens
  Payload ID: 12354
  Gene Symbol: PIN4
  Gene Name: peptidylprolyl cis/trans isomerase, NIMA-interacting 4
  Uniprot ID: Q9Y237
  ENST ID: ENST00000373669
  CDS Start-End: 33-503
tgagatgcggctttcaggcatttgtttaggacatgcccatggcggggcttctaaaggggcttgtacggcaactggagcggttcagcgttcaacaacaagcttccaagatgccgcccaaaggaaaaagtggttctggaaaagcggggaaagggggagcagcctctgggagtgacagtgctgacaagaaggctcaaggtcccaaaggtggtggcaatgcagtaaaggtcagacacattctatgtgaaaaacatggcaaaatcatggaagccatggaaaagttaaagtctgggatgagattcaatgaagtggccgcacagtatagtgaagataaagccaggcaagggggtgacttgggttggatgaccagagggtccatggtgggaccatttcaagaagcagcatttgccttgcctgtaagtgggatggataagcctgtgtttacagacccaccggttaagacaaaatttggatatcatattattatggtcgaaggaagaaaataaaatcatatgaaagactgaataagttttatacattttgtttctttaaaaggtattacatattcttttgagctggagctgcaaggaaatacaaaaatttttaaaaagaaaagatattggatgctccttgtattctgtgaaagctctaagtatgggtttgtaggtgtaagagagggtggggctaagtgaatgtcaactgtagtaggtattcagtcagtctttctcaaagagaagtcaagcagactccctttaacctgtattctctttcctcccagaactatatctgactctcagtctgtcccataaattaattcagaaaccatcttcaggggaagcagatatcaactcacactattcacacaactgaaaatattgggcatcaaatagattagtgtgtgagaatcataaaataagttcctagacaacatttgttttacatgttagtcaactctgatcttccaggacaggtggtattagctccactgtcttaacatagtacgtggcacgttatgcctttcagtgttaactcctttctttttaaataaatgtttattggaggaaaaaagcactcagttgttccatgagttgttttgtactagactaaccgagtgctggttaaagggagggatgtcagcataaaaatgtcattccctcatcttcagtgtatgggttacattaagactgtcctttccagggccaatgttctgtgcatctaaatttttaaaatttaaaatgccatatttatgacatataaaaaagtataaagattactaatataaatactatactgcttcaaaaataaaactttgccaacacagcta

SEQ ID NO: 164273 - DNA, 577 bp, Homo sapiens
  Payload ID: 12354
  Gene Symbol: PIN4
  Gene Name: peptidylprolyl cis/trans isomerase, NIMA-interacting 4
  ENST ID: ENST00000439980
  CDS Start-End: 1-276
gttcaacaacaagcttccaagatgccgcccaaaggaaaaagtggttctggaaaagcggggaaagggggagcagcctctgggagtgacagtgctgacaagaaggctcaaggtcccaaaggtggtggcaatgcagtaaaggtcagacacattctatgtgaaaaacatggcaaaatcatggaagccatggaaaagttaaagtctgggatgagattcaatgaagtggccgcacagtatagtgaagataaagccaggcaaggggccttcagactccgatgaattacaccactggcttgcctggttctccagcttgcagacagaagactgtgggacttctcagcctctataatcttctccttcccagctagccactcacaaccccgccatgggcctcagaattgctaaagggacatcagaccatactacacatcattagatctcaatgaagaacacctctagttggcccgtctctttgtgaggtgccacccttgacatcaagtgcaggcctcgacgttgttggcatttcagagccttggcagaagttggataaattggcgggaagtgatgctgccagctggag

SEQ ID NO: 164274 - DNA, 776 bp, Homo sapiens
  Payload ID: 12354
  Gene Symbol: PIN4
  Gene Name: peptidylprolyl cis/trans isomerase, NIMA-interacting 4
  ENST ID: ENST00000446576
  CDS Start-End: 1-350
caaaggaaaaagtggttctggaaaagcggggaaaggtagagcggccagagcgatcaaggagaatgggggcgggtgaggagcgaagggagggaacagacagtccatctccggagtccgggacggacgcagcagggggagcagcctctgggagtgacagtgctgacaagaaggctcaaggtcccaaaggtggtggcaatgcagtaaaggtcagacacattctatgtgaaaaacatggcaaaatcatggaagccatggaaaagttaaagtctgggatgagattcaatgaagtggccgcacagtatagtgaagataaagccaggcaaggggtatgttgctcttattatttataattttctctcaaggtaagaaagcaaagtaaaaatgacaaataataaaataagataaaaattctccatcctccacagaagaaacacagaagtagggatcattcctttgttcaaccattggttgtagcgatattttggtttaaagatctcaaaagcagaaatgtccaacttgtaaatagtagaataagggtcatctatgtcaaaacctatgcatgaccaaacttgcacggctaacttcaaagtccagcagtgttgagagtacttatgtgttcagtctagttagacttcttctacctatttgtccttattgagcctattcctgtattgctcttaggaatatacctcgtaaccttagcaaaatgttgggaaattctctcaagctacagtagaactgttccctcttctgggccacttgatatcacttatctt

SEQ ID NO: 164275 - DNA, 1605 bp, Homo sapiens
  Payload ID: 12354
  Gene Symbol: PIN4
  Gene Name: peptidylprolyl cis/trans isomerase, NIMA-interacting 4
  Uniprot ID: Q9Y237
  ENST ID: ENST00000423432
  CDS Start-End: 36-437
aattgagatgcggctttcaggcatttgtttaggacatgcccatggcggggcttctaaaggggcttgtacggcaactggagcggttcagcgttcaacaacaagcttccaagatgccgcccaaaggaaaaagtggttctggaaaagcggggaaagggggagcagcctctgggagtgacagtgctgacaagaaggctcaaggtcccaaaggtggtggcaatgcagtaaaggtcagacacattctatgtgaaaaacatggcaaaatcatggaagccatggaaaagttaaagtctgggatgagattcaatgaagtggccgcacagtatagtgaagataaagccaggcaagggattcccagcctgcagcaacatgctggtcaccatagagacctgagaagcaccctcatctcattggtatcatatttacaaaccaccccttaaagtggattattttgcagatggctgatctcatctattcaatgttgattctattagttccaatttcagaaggtgacattttctgactttgtccccttaagcacaaacaaaaactatggatttttgtttttgttttcagaaaagagaaagtacaaggtgtgcttggggaacagcaaggaaaccagacagatgtgggggcgggtttgtaggggaactgctggatgtacctcattaatttgttcatttgttcagcacccacagggtgccagtgaacgggctaggtgctggggatagagtggtgaacaagatgagccttatgcacctcacagtctcctgggggagacagccaaatagacaattttaatacaatgtggcaaattctatgatgggaagaagagagaaatggtgtgtgtgagtccctcaccttcccagaggtttcccaggggaagcaacgtttcagctgagacctgaaggatggatgacagtccaccagaaaaaagttagtggagcggggacaagcagggttgcagagtggaagaaaaatgttcctgtgagaagaaactgtccaaagagtctgaagagaaaagggaacagggtgaatttgaggccctacaagaaaaacaggagaccattcaacaggagacgcccagggagcaggtggctttgtgggcctgatgtccaagaaagaagtcgtggtggtaaacagagacttgggattgcaagctactgttgtctttctattgaaaaaatagctgagcaccacactagggaggccttgcaaggacagcccaaagaatttgaacttgattctacaggcagtgattttgaacaagaggttttgaagagaacgtgacacacgtcaagctgagctctagggagtgggcagcagcctgcagaagagggactaggctaggagcacagaaagtagcccacggcagaggtagcagaaggaatggaggagtgcccatgtgaggggtactgaggtggcacacttgccagaatcagggcagcctgcttggtctcataccagctggaaccagttcctaccagctcccaagggctaattgttaaactttcaggaattttctcagcattcattaaaaatgaaaaaaagtatcaatattaaaaatatttttgctggacatggtgtctcaggcctgtaatcccagct

SEQ ID NO: 164276 - DNA, 1094 bp, Homo sapiens
  Payload ID: 12354
  Gene Symbol: PIN4
  Gene Name: peptidylprolyl cis/trans isomerase, NIMA-interacting 4
  ENST ID: ENST00000373662
  CDS Start-End: 359-679
cgccgagggactgcagagccacccacccccgtggctcctactgcgcacgcgtgaaaaaagccaggttgaggggaacgggggagcttcgggcgtagagtgtggggagtgggggatctggtgcaaattagggtgcgtgaaagaagtcacaaaaagcgcagaggccaggcttcccgccctaatccggcctttgtctccgcccctctgcctttgtttcggcccaagcgtcttattggtcagacatcttcagccccattggtccaagagccaaaggacggggtctgccccaagctgtgcctgcttccggagccgcaataagaacggtcaattgagatgcggctttcaggcatttgtttaggacatgcccatggcggggcttctaaaggggcttgtacggcaactggagcggttcagcgttcaacaacaagcttccaagatgccgcccaaaggaaaaagtggttctggaaaagcggggaaagcttgtcaactatcattagtgttagcgtattttgtgtggcccaagataattcttccattgtggcccagggaagctgaaaggttggatacccttgttgtaaagtgtctggccgagttcccttttgaagtgtggcgttatgatggaaatatccactccggttgtgtgttggacctttctgtaaacatggaggtgcagtttaaatgagtacctgtcatctcttctctaaagggggagcagcctctgggagtgacagtgctgacaagaaggctcaaggtcccaaaggtggtggcaatgcagtaaaggtcagacacattctatgtgaaaaacatggcaaaatcatggaagccatggaaaagttaaagtctgggatgagattcaatgaagtggccgcacagtatagtgaagataaagccaggcaaggggtatgttgctcttattatttataattttctctcaaggtaagaaagcaaagtaaaaatgacaaataataaaataagataaaaattctccatcctccacagaagaaacacagaagtagggatcattcctttgttcaaccattggttgtagcgatattttggtttaaagatctcaaaagcagaaatgtccaacttgtaaa

SEQ ID NO: 164277 - DNA, 678 bp, Homo sapiens
  Payload ID: 12354
  Gene Symbol: PIN4
  Gene Name: peptidylprolyl cis/trans isomerase, NIMA-interacting 4
  ENST ID: ENST00000496835
  CDS Start-End: 1-348
gttcaacaacaagcttccaagatgccgcccaaaggaaaaagtggttctggaaaagcggggaaagggggagcagcctctgggagtgacagtgctgacaagaaggctcaaggtcccaaaggtggtggcaatgcagtaaaggtcagacacattctatgtgaaaaacatggcaaaatcatggaagccatggaaaagttaaagtctgggatgagattcaatgaagtggccgcacagtatagtgaagataaagccaggcaagggattcccagcctgcagcaacatgctggtcaccatagagacctgagaagcaccctcatctcattggtatcatatttacaaaccaccccttaaagtggattattttgcagatggctgatctcatctattcaatgttgattctattagttccaatttcagaaggtgacattttctgactttgtccccttaagcacaaacaaaaactatggatttttgtttttgttttcagaaaagagaaagtacaaggtgtgcttggggaacagcaaggaaaccagacagatgtgggggcgggtttgtaggggaactgctggatgtacctcattaatttgttcatttgttcagcacccacagggtgccagtgaacgggctaggtgctggggatagagtggtgaacaagatgagccttatgcacctcacagtctc

SEQ ID NO: 164278 - DNA, 1739 bp, Homo sapiens
  Payload ID: 12355
  Gene Symbol: PPIL1
  Gene Name: peptidylprolyl isomerase (cyclophilin)-like 1
  Uniprot ID: Q9Y3C6
  ENST ID: ENST00000373699
  CDS Start-End: 253-753
cggtatcgccacttggagaccaccgcgaatgaagtttgcattttcctctgttcttgagcccagcttcttctcgtctcccaccccagcttcccggcattggaagaagggaccgtcctcttccttgtcttggccacccaaatcctggtatcgaaagggttgaacggaccggaagtgtgcagcagcgacgggtccccagctaatcgacgccggaagtagcaattactagacaagcattccgccgccggcttcgctatggcggcaattcccccagattcctggcagccacccaacgtttacttggagaccagcatgggaatcattgtgctggagctgtactggaagcatgctccaaagacctgtaagaactttgctgagttggctcgtcgaggttactacaatggcacaaaattccacagaattatcaaagacttcatgatccaaggaggtgacccaacagggacaggtcgaggtggtgcatctatctatggcaaacagtttgaagatgaacttcatccagacttgaaattcacgggggctggaattctcgcaatggccaatgcggggccagataccaatggcagccagttctttgtgaccctcgcccccacccagtggcttgacggcaaacacaccatttttggccgagtgtgtcagggcataggaatggtgaatcgcgtgggaatggtagaaacaaactcccaggaccgccctgtggacgacgtgaagatcattaaggcatacccttctgggtagacttgctaccctcttgagcagctcttctgagatggccccagtgaaccagcttctagatgacatagaatgacatgtaatgctaaattcattttggctttgcaagtcatgaagcttaggaggcctggcatcttgggtgagttagagatggaagtacattttaataggatgcttcttttctcttcccccagtgcctaggttgccagagcatttgcacaaatgcccctgtttatcaataggtgactacttactacacatgaaccataatgctgcttcttgtgcatgtctgctctgatatacgtcgaacaatgtagcagccactgtcatttctcagtggttttgcctaaccaaacttcttcctaaggagatttatattctggcctacacagcagtccttgatggctgacagccacagaattccaaaccaagtagtgtctgtcagccctcttaactctgtgcacgccctatttcagtcttttacatttgttcttctagggaatgtatgcatctctatatatattttccctctcaaaaccagaacatcaacagtgctgtttctgacacttcagacatcccacgcaaagccacattgaatttttgccaaatgaaaaacacatccaacaatcaagtttctaagaaggtgtcaagtggggaataataataatgtataataatcaagaaattagtttattaaaaggaagcagaagcattgaccattttttcccagagaagaggagaaatctgtagtgagcaaaggacagaccatgaatcctccttgagaagtagtactctcagaaaggagaagcgccactcaagttcttttaacccaagactttagagaaattaggtccaagatttttatatgttcagttgtttatgtataaaaataactttctggattttgtggggaggagcaggagaggaaggaagttaatacctatgtaatacatagaaacttccacaataaaatgccattgatggttgaaatt

SEQ ID NO: 164279 - DNA, 4929 bp, Homo sapiens
  Payload ID: 12356
  Gene Symbol: PPIL2
  Gene Name: peptidylprolyl isomerase (cyclophilin)-like 2
  Uniprot ID: Q13356
  ENST ID: ENST00000335025
  CDS Start-End: 92-1654
ggaagtggtcacggaactcggctgcggctccatggtctgagttgtcagccgttgttttttcgtgctcgctagtcgccgccgccgctccgccatggggaagcgacagcaccaaaaggacaaaatgtacattacctgtgctgaatacactcacttttatggtggcaagaagccagatctcccacaaacaaattttcgtcgtttaccttttgaccactgcagtctctctctgcagccctttgtctacccagtctgcactcccgatggcatcgtctttgacttactgaacattgttccatggcttaagaagtacgggaccaaccccagcaatggagagaagctggacgggaggtccctgatcaagctgaacttttccaagaacagtgaggggaagtaccactgcccagtgctgtttaccgtgttcaccaacaacacccacatcgtggctgtgaggacgaccggcaacgtctacgcctatgaggcagtggaacagctaaatatcaaggccaagaacttccgggacctgctgaccgacgagcccttctcccggcaggacatcatcaccctccaggaccccaccaatttggacaagttcaatgtctctaacttctatcatgtgaagaataacatgaaaataatagacccagatgaagagaaggccaaacaggacccgtcttattatctgaaaaatacaaatgccgagacccgagagaccctgcaggagctctacaaggagttcaaaggggacgagattctggcagccaccatgaaggccccggagaagaagaaagtggacaagctgaacgctgcccactattccacagggaaggtcagcgcttccttcacctccaccgcgatggtcccggagaccacacatgaagcagctgccatcgacgaggatgtgctgcgctaccagtttgtgaagaagaagggctacgtgcggctgcacaccaacaagggcgacctcaacctggagctgcactgcgacctgacaccaaaaacctgcgaaaacttcatcaggctttgcaagaagcattattacgatggcaccatcttccacagatccatccggaactttgtgatccaagggggcgaccccacaggcacaggcacgggtggggagtcatactgggggaagcccttcaaagacgagttccggcccaacctctcgcacacgggccgcggcatcctcagcatggccaactccgggcccaacagcaacaggtctcaattcttcatcacgtttcgctcctgtgcctacctggacaagaagcataccatctttggacgggttgttgggggctttgacgtactgacagccatggagaatgtggagagtgaccccaaaactgaccgccctaaggaggagatccgcattgatgccactacagtgttcgtggacccctatgaggaggccgatgcccagattgcgcaggagcggaagacacagctcaaggtagccccggagaccaaagtgaagagcagccagccccaggcagggagccagggcccccagaccttccgccagggcgtgggcaagtacatcaacccagcagccacgaagcgagcagcagaggaagagccctcaaccagtgccactgtccccatgtccaagaagaagcccagtcggggttttggggacttcagctcctggtagcagcagcaacttgcaggctgtacctctgcccttccttttctcatcaatcactgatgctgaagctgcaggcctgagccctttgtctccctggatgctgggtggcgcctcatctgcatctctgcctcaccccatccactgccacaggctgcctgatgaccactagaggtatgtctgcccctcgtcaccctgctgcacaccaatctgtggcccttcatcatgctaagaacaagaactgcgccatggctggctccttctcttctccagcccatccctctgcagcctgtcatccctgtctgtgaccattggtcgggcccctgggctctagagtgacttttgacgccctccatccctcccgccaggcactgtcctccgcaaggcctggtgcagccctggcagtaactggcttgtaagaggctcagacaccaagctgggcctgcagaggaggggcacagtaggacacagtgactgcccaggtgtccacacacctgtaggcctctgagccagcgtccagggtacaggtgcgggtggtggggatgaaggcctgaccagggagggagaagcaggtttggagaggaccctgtgcccaccctgacagacaccctggctggccctgactgactgtattctctggccacattcaagtcccccattggtgggggcagagaagtaggaccaggccatccttggctccagagctcgaagaccccaagacagccctctgctctcagcggcgccacagagagcctgggctcagccttctgcatcaggacatggcctcgtccactgagggcacgatttaaacatttgacatcagaagctttatttgtaaacctcacacagataaggaccaagggctggcggtgtggccagaggacaggggaagctgaaggccccgtgcttgagctcggcagtcctgctccttgcagtgaagccaccatgggtgaccgtccagcctcacccggtggcctgcacagtgagggaagggcttcagggccatctgctcccagggcaggggacaggccaccaaggacctttggcaaatgaaggtttacatttctgtagtttgtttgttttagagcttaatttgtagttttttagctattaaaaccatttgaatttttaacgacctgatgagggcatcaggtaaattaaaggattttgggaagattcttattttcaattctaatatctgacagatgccatcaagaataagcattaaggtataaaaaatactgtgtgtataaaacaatgccaaaccacattcctacagcaaatgcactgtgccatttataaccctgacatcacctcccaaggctctcaaggaagatttattttaaataacttaaatagaagtcctagatgatattgtttaggaatttaagagggtggtggatatggtcctgtgaatagcacttcccctgaagccagctcatggtctgttcatttggtttaaaaatgagcttgtattttgcagaagcccaacaaaaaaaaagtgataaaagtgttgttggtataaattacaaaaaaaaaaaaaaatacaaaagtcataagactactagtaaaaaatgttcaatcaatgccgtcacaaaagacagtacaaaaaccaaagtgcccaaatagaaggagcagcgaacttgcccaaaacagaaaagctctaaatagaactttagtatatacaaaaaccactcggtagagttttagaagtttcttccatgtaagtgaagcatcttgagtcactcaggacttggctgtcctcgcacccgtggcaggctggggacggcacgaacctccaactgtttcccctagtccccggggcatcggaggctgggttcccacatgggagaggaatgaagactcactcaaagggaagggtcagtttaagataagttttcagtgaactccttcttccacccgggaaggtgtctttcagcctcttcacagtctcaagacaattgactgaagccacaggcattgctaacttcatgggccagcttgtgggcggagcctcttcaggcttgagaccatggcagcaagagccctgcagcgtgcagtgacccctgcgctctgggtggctgcacgcgagctcaggaggacaggatgtgctgggccagcctaaaccctcgggggagactagcgcagggataaagcagcttgcagggccatagccggatgtggaggcttccaagacagtacaaagatttccttcctttcctaagtggaagatgtgctttaaaggaacttctgcctctgtcactcctgctgagtggatgcatctcagtgccatgcccaccagggcagcggcatttcccacctgccaaggcttccaggcttgggcaaagagatggcacccaaaggcatgctgtgtgtgggcagtgagctcgagtgggcacagcccagtgcctgcctggaccgcaggtctgggtttaggaagggctgaagtcgggggaggtgtgaagctgggcaggtggccacgttcttattgtcagccagctcgcactcttgcccctagactagccttgtctgaaggcagcttcagagccacttgccaggctgagaactatccgggctcagtgctctcctatctgctgcccctcggtccccctgcctgccctctgccctgagacaagttactaaatgttgaaaaccaaacttatctgggagtggtttttgacctccatcctctgcaaagtggcctaaacccttatggggtgcccactcctggtggagggcaggtggatgagtggattgtaatttataataaaatatatggcagaaacacaggccttaggagattgcacaggcccctctatcagttcaagtgacatgggacagcaccacgcagggacgggcaacgcgtctagcaggccaggcgtcttcatgcacaaaggctaaacttgttgctttaaccttttctgaacaaattttaaacattctggcaaatgtcaagttttgaagtttttcctgtgggttctggcctctttcatatgcaaaaataattctttttcttcaagtacatccagggtagaaaatgaaatctgacttttcctcggtccagtgtgttactctatagacatggaccagccactcagcaactgcctgacacctaagctgctgtcactgctgagggcacaacccctggtaccagaccctgtgaggctgtcacctcagtaagggcacctctgcgggccccgggacagccttctctaagggctagctcacctgctttctagataaggaatctactggcttaaataaacatgttccactagacacca

SEQ ID NO: 164280 - DNA, 2574 bp, Homo sapiens
  Payload ID: 12356
  Gene Symbol: PPIL2
  Gene Name: peptidylprolyl isomerase (cyclophilin)-like 2
  Uniprot ID: Q13356
  ENST ID: ENST00000398831
  CDS Start-End: 79-1641
gaactcggctgcggctccatggtctgagttgtcagccgttgttttttcgtgctcgctagtcgccgccgccgctccgccatggggaagcgacagcaccaaaaggacaaaatgtacattacctgtgctgaatacactcacttttatggtggcaagaagccagatctcccacaaacaaattttcgtcgtttaccttttgaccactgcagtctctctctgcagccctttgtctacccagtctgcactcccgatggcatcgtctttgacttactgaacattgttccatggcttaagaagtacgggaccaaccccagcaatggagagaagctggacgggaggtccctgatcaagctgaacttttccaagaacagtgaggggaagtaccactgcccagtgctgtttaccgtgttcaccaacaacacccacatcgtggctgtgaggacgaccggcaacgtctacgcctatgaggcagtggaacagctaaatatcaaggccaagaacttccgggacctgctgaccgacgagcccttctcccggcaggacatcatcaccctccaggaccccaccaatttggacaagttcaatgtctctaacttctatcatgtgaagaataacatgaaaataatagacccagatgaagagaaggccaaacaggacccgtcttattatctgaaaaatacaaatgccgagacccgagagaccctgcaggagctctacaaggagttcaaaggggacgagattctggcagccaccatgaaggccccggagaagaagaaagtggacaagctgaacgctgcccactattccacagggaaggtcagcgcttccttcacctccaccgcgatggtcccggagaccacacatgaagcagctgccatcgacgaggatgtgctgcgctaccagtttgtgaagaagaagggctacgtgcggctgcacaccaacaagggcgacctcaacctggagctgcactgcgacctgacaccaaaaacctgcgaaaacttcatcaggctttgcaagaagcattattacgatggcaccatcttccacagatccatccggaactttgtgatccaagggggcgaccccacaggcacaggcacgggtggggagtcatactgggggaagcccttcaaagacgagttccggcccaacctctcgcacacgggccgcggcatcctcagcatggccaactccgggcccaacagcaacaggtctcaattcttcatcacgtttcgctcctgtgcctacctggacaagaagcataccatctttggacgggttgttgggggctttgacgtactgacagccatggagaatgtggagagtgaccccaaaactgaccgccctaaggaggagatccgcattgatgccactacagtgttcgtggacccctatgaggaggccgatgcccagattgcgcaggagcggaagacacagctcaaggtagccccggagaccaaagtgaagagcagccagccccaggcagggagccagggcccccagaccttccgccagggcgtgggcaagtacatcaacccagcagccacgaagcgagcagcagaggaagagccctcaaccagtgccactgtccccatgtccaagaagaagcccagtcggggttttggggacttcagctcctggtagcagcaggttggccgctgtggaccttggtggggttgcagggctgggggcccatgtccacatctccatttccagcctttctagcctgccctctgctgccagccaataaattgcttgcctgctgcctgcatcccctttcctggcccctgggagcccacagccttcccatcccttaacctgttgccaagggccttggccctgtttccaggacctggcccagccagagcccactgctgggaccttcaagcacaaggcctgccctacacccaggctggtgcctcaggcctcccctctagtaggcaggccaggttagtgaggaaggactgtgtctccagattgtggtttcctctttaagacagggtcttgctctgttgcccaggctccagtgcagtggtgtgatcatggctcactgcagcctcgacctcctgggctcaagcaatcctcctgcctcagcctcgcaagtagctgggactacagccgtgcaccactacatccagctgtatatgtctggttttcttacccctacttctgtcatcttctcagggacagcctatttatacaaccagtgtggtcccctgaccaacgccattacctgggacaagttttcagaccccagacttactgagcctaagcctctgcagggtgggcttctcggtctgttttgacaaaacttcaggggcttctgaaggctggtgttggacggcagcattgagtttcctgccgtgccctgcctgagctctcagggccctgctcacctgctctggctgtgaaccacctgggcttcatctcaagcctgcctggcgtctctgtgcccctgtgagaatcttgaggggacccacactgggttgaggccagtgtctcctgctgtgagaacaagtggatgtccctctccccgccctcctgctgaagtggccttgctgctctcaggcccggcca

SEQ ID NO: 164281 - DNA, 3875 bp, Homo sapiens
  Payload ID: 12356
  Gene Symbol: PPIL2
  Gene Name: peptidylprolyl isomerase (cyclophilin)-like 2
  Uniprot ID: Q13356
  ENST ID: ENST00000406385
  CDS Start-End: 61-1623
atggtctgagttgtcagccgttgttttttcgtgctcgctagtcgccgccgccgctccgccatggggaagcgacagcaccaaaaggacaaaatgtacattacctgtgctgaatacactcacttttatggtggcaagaagccagatctcccacaaacaaattttcgtcgtttaccttttgaccactgcagtctctctctgcagccctttgtctacccagtctgcactcccgatggcatcgtctttgacttactgaacattgttccatggcttaagaagtacgggaccaaccccagcaatggagagaagctggacgggaggtccctgatcaagctgaacttttccaagaacagtgaggggaagtaccactgcccagtgctgtttaccgtgttcaccaacaacacccacatcgtggctgtgaggacgaccggcaacgtctacgcctatgaggcagtggaacagctaaatatcaaggccaagaacttccgggacctgctgaccgacgagcccttctcccggcaggacatcatcaccctccaggaccccaccaatttggacaagttcaatgtctctaacttctatcatgtgaagaataacatgaaaataatagacccagatgaagagaaggccaaacaggacccgtcttattatctgaaaaatacaaatgccgagacccgagagaccctgcaggagctctacaaggagttcaaaggggacgagattctggcagccaccatgaaggccccggagaagaagaaagtggacaagctgaacgctgcccactattccacagggaaggtcagcgcttccttcacctccaccgcgatggtcccggagaccacacatgaagcagctgccatcgacgaggatgtgctgcgctaccagtttgtgaagaagaagggctacgtgcggctgcacaccaacaagggcgacctcaacctggagctgcactgcgacctgacaccaaaaacctgcgaaaacttcatcaggctttgcaagaagcattattacgatggcaccatcttccacagatccatccggaactttgtgatccaagggggcgaccccacaggcacaggcacgggtggggagtcatactgggggaagcccttcaaagacgagttccggcccaacctctcgcacacgggccgcggcatcctcagcatggccaactccgggcccaacagcaacaggtctcaattcttcatcacgtttcgctcctgtgcctacctggacaagaagcataccatctttggacgggttgttgggggctttgacgtactgacagccatggagaatgtggagagtgaccccaaaactgaccgccctaaggaggagatccgcattgatgccactacagtgttcgtggacccctatgaggaggccgatgcccagattgcgcaggagcggaagacacagctcaaggtagccccggagaccaaagtgaagagcagccagccccaggcagggagccagggcccccagaccttccgccagggcgtgggcaagtacatcaacccagcagccacgaagcgagcagcagaggaagagccctcaaccagtgccactgtccccatgtccaagaagaagcccagtcggggttttggggacttcagctcctggtagcagcagggacagcctatttatacaaccagtgtggtcccctgaccaacgccattacctgggacaagttttcagaccccagacttactgagcctaagcctctgcagggtgggcttctcggtctgttttgacaaaacttcaggggcttctgaaggctggtgttggacggcagcattgagtttcctgccgtgccctgcctgagctctcagggccctgctcacctgctctggctgtgaaccacctgggcttcatctcaagcctgcctggcgtctctgtgcccctgtgagaatcttgaggggacccacactgggttgaggccagtgtctcctgctgtgagaacaagtggatgtccctctccccgccctcctgctgaagtggccttgctgctctcaggcccggccactgggctccaagactctgctcctcctgtcagtcactgactctgatggccttgggccagctgcatcagcagcccttaaagaaagacccctccctcaacccccatttttctgttaaatgtgcccctggctggctttttcttcgtcttcagcccaggccagtggtcagtgttctcatgtcatggactctccttgcctgacacttgcctcttgggctccctgttgccctcaggccaccccccacttctagttcttcacactaagccctaacttaggccttgttcttggttttctcatttttgttgccccaaatcttgaacctgtcagcaacttgcaggctgtacctctgcccttccttttctcatcaatcactgatgctgaagctgcaggcctgagccctttgtctccctggatgctgggtggcgcctcatctgcatctctgcctcaccccatccactgccacaggctgcctgatgaccactagaggtatgtctgcccctcgtcaccctgctgcacaccaatctgtggcccttcatcatgctaagaacaagaactgcgccatggctggctccttctcttctccagcccatccctctgcagcctgtcatccctgtctgtgaccattggtcgggcccctgggctctagagtgacttttgacgccctccatccctcccgccaggcactgtcctccgcaaggcctggtgcagccctggcagtaactggcttgtaagaggctcagacaccaagctgggcctgcagaggaggggcacagtaggacacagtgactgcccaggtgtccacacacctgtaggcctctgagccagcgtccagggtacaggtgcgggtggtggggatgaaggcctgaccagggagggagaagcaggtttggagaggaccctgtgcccaccctgacagacaccctggctggccctgactgactgtattctctggccacattcaagtcccccattggtgggggcagagaagtaggaccaggccatccttggctccagagctcgaagaccccaagacagccctctgctctcagcggcgccacagagagcctgggctcagccttctgcatcaggacatggcctcgtccactgagggcacgatttaaacatttgacatcagaagctttatttgtaaacctcacacagataaggaccaagggctggcggtgtggccagaggacaggggaagctgaaggccccgtgcttgagctcggcagtcctgctccttgcagtgaagccaccatgggtgaccgtccagcctcacccggtggcctgcacagtgagggaagggcttcagggccatctgctcccagggcaggggacaggccaccaaggacctttggcaaatgaaggtttacatttctgtagtttgtttgttttagagcttaatttgtagttttttagctattaaaaccatttgaatttttaacgacctgatgagggcatcaggtaaattaaaggattttgggaagattcttattttcaattctaatatctgacagatgccatcaagaataagcattaaggtataaaaaatactgtgtgtataaaacaatgccaaaccacattcctacagcaaatgcactgtgccatttataaccctgacatcacctcccaaggctctcaaggaagatttattttaaataacttaaatagaagtcctagatgatattgtttaggaatttaagagggtggtggatatggtcctgtgaatagcacttcccctgaagccagctcatggtctgttcatttggtttaaaaatgagcttgtattttgcagaagcccaacaaaaaaaaagtgataaaagtgttgttggtataaattacaaaaaaaaaaaaaaa

SEQ ID NO: 164282 - DNA, 557 bp, Homo sapiens
  Payload ID: 12356
  Gene Symbol: PPIL2
  Gene Name: peptidylprolyl isomerase (cyclophilin)-like 2
  ENST ID: ENST00000458567
  CDS Start-End: 78-557
aactcggctgcggctccatggtctgagttgtcagccgttgttttttcgtgctcgctagtcgccgccgccgctccgccatggggaagcgacagcaccaaaaggacaaaatagacagattctcgctttgttgccccagctgttctccaacgcctggactcaagcaatcttcctgccttggcctcccaaactgttgggattataggtacattacctgtgctgaatacactcacttttatggtggcaagaagccagatctcccacaaacaaattttcgtcgtttaccttttgaccactgcagtctctctctgcagccctttgtctacccagtctgcactcccgatggcatcgtctttgacttactgaacattgttccatggcttaagaagtacgggaccaaccccagcaatggagagaagctggacgggaggtccctgatcaagctgaacttttccaagaacagtgaggggaagtaccactgcccagtgctgtttaccgtgttcaccaacaacacccacatcgtggctgtgaggacgaccggcaacgtctacgcctatgag

SEQ ID NO: 164283 - DNA, 4213 bp, Homo sapiens
  Payload ID: 12356
  Gene Symbol: PPIL2
  Gene Name: peptidylprolyl isomerase (cyclophilin)-like 2
  ENST ID: ENST00000417788
  CDS Start-End: 78-203
aactcggctgcggctccatggtctgagttgtcagccgttgttttttcgtgctcgctagtcgccgccgccgctccgccatggggaagcgacagcaccaaaaggacaaaatgtacattacctgtgctgaatacactcacttttatggtggcaagaagccagctgtcaaaactatcaagactacaataacaagagcactgtcataattttaatggaagtaaaaaatctcccacaaacaaattttcgtcgtttaccttttgaccactgcagtctctctctgcagccctttgtctacccagtctgcactcccgatggcatcgtctttgacttactgaacattgttccatggcttaagaagtacgggaccaaccccagcaatggagagaagctggacgggaggtccctgatcaagctgaacttttccaagaacagtgaggggaagtaccactgcccagtgctgtttaccgtgttcaccaacaacacccacatcgtggctgtgaggacgaccggcaacgtctacgcctatgaggcagtggaacagctaaatatcaaggccaagaacttccgggacctgctgaccgacgagcccttctcccggcaggacatcatcaccctccaggaccccaccaatttggacaagttcaatgtctctaacttctatcatgtgaagaataacatgaaaataatagacccagatgaagagaaggccaaacaggacccgtcttattatctgaaaaatacaaatgccgagacccgagagaccctgcaggagctctacaaggagttcaaaggggacgagattctggcagccaccatgaaggccccggagaagaagaaagtggacaagctgaacgctgatcttgctatgttgtctaagctggtcttgaattcctggcttcaagtgagagcctcctgccttggcctccgaaagtgctggaattacaggcccactattccacagggaaggtcagcgcttccttcacctccaccgcgatggtcccggagaccacacatgaagcagctgccatcgacgaggatgtgctgcgctaccagtttgtgaagaagaagggctacgtgcggctgcacaccaacaagggcgacctcaacctggagctgcactgcgacctgacaccaaaaacctgcgaaaacttcatcaggctttgcaagaagcattattacgatggcaccatcttccacagatccatccggaactttgtgatccaagggggcgaccccacaggcacaggcacgggtggggagtcatactgggggaagcccttcaaagacgagttccggcccaacctctcgcacacgggccgcggcatcctcagcatggccaactccgggcccaacagcaacaggtctcaattcttcatcacgtttcgctcctgtgcctacctggacaagaagcataccatctttggacgggttgttgggggctttgacgtactgacagccatggagaatgtggagagtgaccccaaaactgaccgccctaaggaggagatccgcattgatgccactacagtgttcgtggacccctatgaggaggccgatgcccagattgcgcaggagcggaagacacagctcaaggtagccccggagaccaaagtgaagagcagccagccccaggcagggagccagggcccccagaccttccgccagggcgtgggcaagtacatcaacccagcagccacgaagcgagcagcagaggaagagccctcaaccagtgccactgtccccatgtccaagaagaagcccagtcggggttttggggacttcagctcctggtagcagcaggttggccgctgtggaccttggtggggttgcagggctgggggcccatgtccacatctccatttccagcctttctagcctgccctctgctgccagccaataaattgcttgcctgctgcctgcatcccctttcctggcccctgggagcccacagccttcccatcccttaacctgttgccaagggccttggccctgtttccaggacctggcccagccagagcccactgctgggaccttcaagcacaaggcctgccctacacccaggctggtgcctcaggcctcccctctagtaggcaggccaggttagtgaggaaggactgtgtctccagattgtggtttcctctttaagacagggtcttgctctgttgcccaggctccagtgcagtggtgtgatcatggctcactgcagcctcgacctcctgggctcaagcaatcctcctgcctcagcctcgcaagtagctgggactacagccgtgcaccactacatccagctgtatatgtctggttttcttacccctacttctgtcatcttctcagggacagcctatttatacaaccagtgtggtcccctgaccaacgccattacctgggacaagttttcagaccccagacttactgagcctaagcctctgcagggtgggcttctcggtctgttttgacaaaacttcaggggcttctgaaggctggtgttggacggcagcattgagtttcctgccgtgccctgcctgagctctcagggccctgctcacctgctctggctgtgaaccacctgggcttcatctcaagcctgcctggcgtctctgtgcccctgtgagaatcttgaggggacccacactgggttgaggccagtgtctcctgctgtgagaacaagtggatgtccctctccccgccctcctgctgaagtggccttgctgctctcaggcccggccactgggctccaagactctgctcctcctgtcagtcactgactctgatggccttgggccagctgcatcagcagcccttaaagaaagacccctccctcaacccccatttttctgttaaatgtgcccctggctggctttttcttcgtcttcagcccaggccagtggtcagtgttctcatgtcatggactctccttgcctgacacttgcctcttgggctccctgttgccctcaggccaccccccacttctagttcttcacactaagccctaacttaggccttgttcttggttttctcatttttgttgccccaaatcttgaacctgtcagcaacttgcaggctgtacctctgcccttccttttctcatcaatcactgatgctgaagctgcaggcctgagccctttgtctccctggatgctgggtggcgcctcatctgcatctctgcctcaccccatccactgccacaggctgcctgatgaccactagaggtatgtctgcccctcgtcaccctgctgcacaccaatctgtggcccttcatcatgctaagaacaagaactgcgccatggctggctccttctcttctccagcccatccctctgcagcctgtcatccctgtctgtgaccattggtcgggcccctgggctctagagtgacttttgacgccctccatccctcccgccaggcactgtcctccgcaaggcctggtgcagccctggcagtaactggcttgtaagaggctcagacaccaagctgggcctgcagaggaggggcacagtaggacacagtgactgcccaggtgtccacacacctgtaggcctctgagccagcgtccagggtacaggtgcgggtggtggggatgaaggcctgaccagggagggagaagcaggtttggagaggaccctgtgcccaccctgacagacaccctggctggccctgactgactgtattctctggccacattcaagtcccccattggtgggggcagagaagtaggaccaggccatccttggctccagagctcgaagaccccaagacagccctctgctctcagcggcgccacagagagcctgggctcagccttctgcatcaggacatggcctcgtccactgagggcacgatttaaacatttgacatcagaagctttatttgtaaacctcacacagataaggaccaagggctggcggtgtggccagaggacaggggaagctgaaggccccgtgcttgagctcggcagtcctgctccttgcagtgaagccaccatgggtgaccgtccagcctcacccggtggcctgcacagtgagggaagggcttcagggccatctgctcccagggcaggggacaggccaccaaggacctttggcaaatgaaggtttacatttctgtagtttgtttgttttagagcttaatttgtagttttttagctattaaaaccatttgaatttttaacgacctgatgagggcatcaggtaaattaaaggattttgggaagattctt

SEQ ID NO: 164284 - DNA, 2625 bp, Homo sapiens
  Payload ID: 12356
  Gene Symbol: PPIL2
  Gene Name: peptidylprolyl isomerase (cyclophilin)-like 2
  Uniprot ID: Q13356
  ENST ID: ENST00000626352
  CDS Start-End: 79-1662
gaactcggctgcggctccatggtctgagttgtcagccgttgttttttcgtgctcgctagtcgccgccgccgctccgccatggggaagcgacagcaccaaaaggacaaaatgtacattacctgtgctgaatacactcacttttatggtggcaagaagccagatctcccacaaacaaattttcgtcgtttaccttttgaccactgcagtctctctctgcagccctttgtctacccagtctgcactcccgatggcatcgtctttgacttactgaacattgttccatggcttaagaagtacgggaccaaccccagcaatggagagaagctggacgggaggtccctgatcaagctgaacttttccaagaacagtgaggggaagtaccactgcccagtgctgtttaccgtgttcaccaacaacacccacatcgtggctgtgaggacgaccggcaacgtctacgcctatgaggcagtggaacagctaaatatcaaggccaagaacttccgggacctgctgaccgacgagcccttctcccggcaggacatcatcaccctccaggaccccaccaatttggacaagttcaatgtctctaacttctatcatgtgaagaataacatgaaaataatagacccagatgaagagaaggccaaacaggacccgtcttattatctgaaaaatacaaatgccgagacccgagagaccctgcaggagctctacaaggagttcaaaggggacgagattctggcagccaccatgaaggccccggagaagaagaaagtggacaagctgaacgctgcccactattccacagggaaggtcagcgcttccttcacctccaccgcgatggtcccggagaccacacatgaagcagctgccatcgacgaggatgtgctgcgctaccagtttgtgaagaagaagggctacgtgcggctgcacaccaacaagggcgacctcaacctggagctgcactgcgacctgacaccaaaaacctgcgaaaacttcatcaggctttgcaagaagcattattacgatggcaccatcttccacagatccatccggaactttgtgatccaagggggcgaccccacaggcacaggcacgggtggggagtcatactgggggaagcccttcaaagacgagttccggcccaacctctcgcacacgggccgcggcatcctcagcatggccaactccgggcccaacagcaacaggtctcaattcttcatcacgtttcgctcctgtgcctacctggacaagaagcataccatctttggacgggttgttgggggctttgacgtactgacagccatggagaatgtggagagtgaccccaaaactgaccgccctaaggaggagatccgcattgatgccactacagtgttcgtggacccctatgaggaggccgatgcccagattgcgcaggagcggaagacacagctcaaggtagccccggagaccaaagtgaagagcagccagccccaggcagggagccagggcccccagaccttccgccagggcgtgggcaagtacatcaacccagcagccaccgagcagcagaggaagagccctcaaccagtgccactgtccccatgtccaagaagaagcccagtcggggttttggggacttcagctcctggtagcagcaggctgcctgatgaccactagaggtatgtctgcccctcgtcaccctgctgcacaccaatctgtggcccttcatcatgctaagaacaagaactgcgccatggctggctccttctcttctccagcccatccctctgcagcctgtcatccctgtctgtgaccattggtcgggcccctgggctctagagtgacttttgacgccctccatccctcccgccaggcactgtcctccgcaaggcctggtgcagccctggcagtaactggcttgtaagaggctcagacaccaagctgggcctgcagaggaggggcacagtaggacacagtgactgcccaggtgtccacacacctgtaggcctctgagccagcgtccagggtacaggtgcgggtggtggggatgaaggcctgaccagggagggagaagcaggtttggagaggaccctgtgcccaccctgacagacaccctggctggccctgactgactgtattctctggccacattcaagtcccccattggtgggggcagagaagtaggaccaggccatccttggctccagagctcgaagaccccaagacagccctctgctctcagcggcgccacagagagcctgggctcagccttctgcatcaggacatggcctcgtccactgagggcacgatttaaacatttgacatcagaagctttatttgtaaacctcacacagataaggaccaagggctggcggtgtggccagaggacaggggaagctgaaggccccgtgcttgagctcggcagtcctgctccttgcagtgaagccaccatgggtgaccgtccagcctcacccggtggcctgcacagtgagggaagggcttcagggccatctgctcccagggcaggggacaggccaccaaggacctttggcaaatgaaggtttacatttctgtagtttgtttgttttagagcttaatttgtagttttttagctattaaaaccatttgaatttttaacga

SEQ ID NO: 164285 - DNA, 1370 bp, Homo sapiens
  Payload ID: 12357
  Gene Symbol: PPIL3
  Gene Name: peptidylprolyl isomerase (cyclophilin)-like 3
  Uniprot ID: Q9H2H8
  ENST ID: ENST00000286175
  CDS Start-End: 385-882
gtaaagcattgcttgaggttgcccaggtagtttcgccttacacttcttgtcccagtgcaattattagtagagctccctttcactgtcaaatttccggttggggataaattgcattgtcgttttggtttgagataggaagatgaggggaggaaggaggtgaggcggtaaggggcgttctctctcttgggtcccgcgcccaacttccgctggcccaaagaaactataattttgaaccaacagacctctgctggcatctgcgattgcatttttcctgttttaacaacggctgtgctagacgaagtggtgaagcccaaagacttatttttgagctcgctgtaagactgagaaatcacgtagtccttcctgaaaccactaagaggaaaaatgtctgtgacactgcatacagatgtaggtgatattaaaattgaagtcttctgtgagaggacacccaaaacatgtgagatggagtctcgctgtgtcccccaggctggagtacaatggcgcgatctcggctcactgcaacctccgcctcctgggttcaagcaagtcttctgcctcagcctcccgagaactggaagaggaggcaacagtatttggggcaagaagtttgaggatgaatacagtgaatatcttaagcacaatgttagaggtgttgtatctatggctaataatggcccgaacaccaatggatctcagttcttcatcacctatggcaaacagccacatttggacatgaaatacaccgtatttggaaaggtaatagatggtctggaaactctagatgagttggagaagttgccagtaaatgagaagacataccgacctcttaatgatgtacacattaaggacataactattcatgccaacccatttgctcagtagctatgatagacctggacaaataacttgacaaattgctggaacacacttattgtggtttacccggttttaattatgtcagagattgcatcatccttctgcttgtttacaactatgatcttctatgaaatggtggtaccaaggggcgcccaacagcttttatccccattcttagagcatattctttattataatgattatccaacatatttctttaattttaatacaaaaaatacatcatttaatttttgttacatatgaacattcatttttaaatgctcagcctcaagtgcaggcatttttgagtggcctgattacatattcctcccacagcaagtccgtatcctggaagtgttattttataataaaatttaaaaagttttaaagaattaaatcgtaggacaaattaattaaaatattgtgtaaaattaccttcaggctatgtgtataaggtatatatgaaacgtaaatgaacttcatgtttaaatttg

SEQ ID NO: 164286 - DNA, 1194 bp, Homo sapiens
  Payload ID: 12357
  Gene Symbol: PPIL3
  Gene Name: peptidylprolyl isomerase (cyclophilin)-like 3
  Uniprot ID: Q9H2H8
  ENST ID: ENST00000392283
  CDS Start-End: 270-755
gtcgttttggtttgagataggaagatgaggggaggaaggaggtgaggcggtaaggggcgttctctctcttgggtcccgcgcccaacttccgctggcccaaagaaactataattttgaaccaacagacctctgctggcatctgcgattgcatttttcctgttttaacaacggctgtgctagacgaagtggtgaagcccaaagacttatttttgagctcgctgtaagactgagaaatcacgtagtccttcctgaaaccactaagaggaaaaatgtctgtgacactgcatacagatgtaggtgatattaaaattgaagtcttctgtgagaggacacccaaaacatgtgagaatttcttggctctttgtgccagtaattactacaatggctgtatatttcataggaatatcaagggtttcatggttcaaacaggagatccaacaggaactggaagaggaggcaacagtatttggggcaagaagtttgaggatgaatacagtgaatatcttaagcacaatgttagaggtgttgtatctatggctaataatggcccgaacaccaatggatctcagttcttcatcacctatggcaaacagccacatttggacatgaaatacaccgtatttggaaaggtaatagatggtctggaaactctagatgagttggagaagttgccagtaaatgagaagacataccgacctcttaatgatgtacacattaaggacataactattcatgccaacccatttgctcagtagctatgatagacctggacaaataacttgacaaattgctggaacacacttattgtggtttacccggttttaattatgtcagagattgcatcatccttctgcttgtttacaactatgatcttctatgaaatggtggtaccaaggggcgcccaacagcttttatccccattcttagagcatattctttattataatgattatccaacatatttctttaattttaatacaaaaaatacatcatttaatttttgttacatatgaacattcatttttaaatgctcagcctcaagtgcaggcatttttgagtggcctgattacatattcctcccacagcaagtccgtatcctggaagtgttattttataataaaatttaaaaagttttaaagaattaaatcgtaggacaaattaattaaaatattgtgtaaaattaccttcaggcta

SEQ ID NO: 164287 - DNA, 897 bp, Homo sapiens
  Payload ID: 12357
  Gene Symbol: PPIL3
  Gene Name: peptidylprolyl isomerase (cyclophilin)-like 3
  ENST ID: ENST00000409361
  CDS Start-End: 259-732
aggaagatgaggggaggaaggaggtgaggcggtaaggggcgttctctctcttgggtcccgcgcccaacttccgctggcccaaagaaactataattttgaaccaacagacctctgctggcatctgcgattgcatttttcctgttttaacaacggctgtgctagacgaagtggtgaagcccaagtatggaagacttatttttgagctcgctgtaagactgagaaatcacgtagtccttcctgaaaccactaagaggaaaaatgtctgtgacactgcatacagatgtaggtgatattaaaattgaagtcttctgtgagaggacacccaaaacatgtgaggctggagtacaatggcgcgatctcggctcactgcaacctccgcctcctgggttcaagcaagtcttctgcctcagcctcccgagaactggaagaggaggcaacagtatttggggcaagaagtttgaggatgaatacagtgaatatcttaagcacaatgttagaggtgttgtatctatggctaataatggcccgaacaccaatggatctcagttcttcatcacctatggcaaacagccacatttggacatgaaatacaccgtatttggaaaggtaatagatggtctggaaactctagatgagttggagaagttgccagtaaatgagaagacataccgacctcttaatgatgtacacattaaggacataactattcatgccaacccatttgctcagtagctatgatagacctggacaaataacttgacaaattgctggaacacacttattgtggtttacccggttttaattatgtcagagattgcatcatccttctgcttgtttacaactatgatcttctatgaaatggtggtaccaaggggcgcccaacagcttttatcccca

SEQ ID NO: 164288 - DNA, 725 bp, Homo sapiens
  Payload ID: 12357
  Gene Symbol: PPIL3
  Gene Name: peptidylprolyl isomerase (cyclophilin)-like 3
  ENST ID: ENST00000409264
  CDS Start-End: 1-543
ctgcgattgcatttttcctgttttaacaacggctgtgctagacgaagtggtgaagcccaatctgtgacactgcatacagatgtaggtgatattaaaattgaagtcttctgtgagaggacacccaaaacatgtgagaatttcttggctctttgtgccagtaattactacaatggctgtatatttcataggaatatcaagggtttcatggttcaaacaggagatccaacaggaactggaagaggaggcaacagtatttggggcaagaagtttgaggatgaatacagtgaatatcttaagcacaatgttagaggtgttgtatctatggctaataatggcccgaacaccaatggatctcagttcttcatcacctatggcaaacagccacatttggacatgaaatacaccgtatttggaaaggtaatagatggtctggaaactctagatgagttggagaagttgccagtaaatgagaagacataccgacctcttaatgatgtacacattaaggacataactattcatgccaacccatttgctcagtagctatgatagacctggacaaataacttgacaaattgctggaacacacttattgtggtttacccggttttaattatgtcagagattgcatcatccttctgcttgtttacaactatgatcttctatgaaatggtggtaccaaggggcgcccaacagcttttatccccattcttagagcatattct

SEQ ID NO: 164289 - DNA, 756 bp, Homo sapiens
  Payload ID: 12357
  Gene Symbol: PPIL3
  Gene Name: peptidylprolyl isomerase (cyclophilin)-like 3
  Uniprot ID: Q9H2H8
  ENST ID: ENST00000409449
  CDS Start-End: 131-628
ggcggaagtggtcctttccgtttggcagccgagtgtaaagcattgcttgaggttgcccagagacttatttttgagctcgctgtaagactgagaaatcacgtagtccttcctgaaaccactaagaggaaaaatgtctgtgacactgcatacagatgtaggtgatattaaaattgaagtcttctgtgagaggacacccaaaacatgtgagatggagtctcgctgtgtcccccaggctggagtacaatggcgcgatctcggctcactgcaacctccgcctcctgggttcaagcaagtcttctgcctcagcctcccgagaactggaagaggaggcaacagtatttggggcaagaagtttgaggatgaatacagtgaatatcttaagcacaatgttagaggtgttgtatctatggctaataatggcccgaacaccaatggatctcagttcttcatcacctatggcaaacagccacatttggacatgaaatacaccgtatttggaaaggtaatagatggtctggaaactctagatgagttggagaagttgccagtaaatgagaagacataccgacctcttaatgatgtacacattaaggacataactattcatgccaacccatttgctcagtagctatgatagacctggacaaataacttgacaaattgctggaacacacttattgtggtttacccggttttaattatgtcagagattgcatcatccttctgcttgtttacaactatgatcttctatgaaat

SEQ ID NO: 164290 - DNA, 313 bp, Homo sapiens
  Payload ID: 12357
  Gene Symbol: PPIL3
  Gene Name: peptidylprolyl isomerase (cyclophilin)-like 3
  ENST ID: ENST00000443398
  CDS Start-End: 94-313
aagcattgcttgaggttgcccagagacttatttttgagctcgctgtaagactgagaaatcacgtagtccttcctgaaaccactaagaggaaaaatgtctgtgacactgcatacagatgtaggtgatattaaaattgaagtcttctgtgagaggacacccaaaacatgtgaggaactggaagaggaggcaacagtatttggggcaagaagtttgaggatgaatacagtgaatatcttaagcacaatgttagaggtgttgtatctatggctaataatggcccgaacaccaatggatctcagttcttcatcaccta

SEQ ID NO: 164291 - DNA, 748 bp, Homo sapiens
  Payload ID: 12357
  Gene Symbol: PPIL3
  Gene Name: peptidylprolyl isomerase (cyclophilin)-like 3
  ENST ID: ENST00000415562
  CDS Start-End: 73-234
agagacttatttttgagctcgctgtaagactgagaaatcacgtagtccttcctgaaaccactaagaggaaaaatgtctgtgacactgcatacagatgtaggtgatattaaaattgaagtcttctgtgagaggacacccaaaacatgtgaggaatatcaagggtttcatggttcaaacaggagatccaacaggaactggaagaggaggcaacagtatttggggcaagaagtttgaggatgaatacagtgaatatcttaagcacaatgttagaggtgttgtatctatggctaataatggcccgaacaccaatggatctcagttcttcatcacctatggcaaacagccacatttggacatgaaatacaccgtatttggaaaggtaatagatggtctggaaactctagatgagttggagaagttgccagtaaatgagaagacataccgacctcttaatgatgtacacattaaggacataactattcatgccaacccatttgctcagtagctatgatagacctggacaaataacttgacaaattgctggaacacacttattgtggtttacccggttttaattatgtcagagattgcatcatccttctgcttgtttacaactatgatcttctatgaaatggtggtaccaaggggcgcccaacagcttttatccccattcttagagcatattctttattataatgattatccaacatatttctttaattttaatacaaaaaatacatcatttaat

SEQ ID NO: 164292 - DNA, 596 bp, Homo sapiens
  Payload ID: 12357
  Gene Symbol: PPIL3
  Gene Name: peptidylprolyl isomerase (cyclophilin)-like 3
  ENST ID: ENST00000457063
  CDS Start-End: 357-596
ccgcactgcactccagcctggcgacatagcgagactccgtctcaaaatgaaaaaaaaagagaagttcatagtatattagtgataagtgctgtggtggaaaaaaaaaagttcatagtatattagtataagtgctgtggtgaaaaaaaaaaaaagcgaatttcatagtatattagtgataagtgctgtgggagaaggaaataggaatgtcctagggctgaagggctaaagcagttctgtgtaggattgtcaggtcagttaaacttgacatttaagcagaaatttggagagacttatttttgagctcgctgtaagactgagaaatcacgtagtccttcctgaaaccactaagaggaaaaatgtctgtgacactgcatacagatgtaggtgatattaaaattgaagtcttctgtgagaggacacccaaaacatgtgagaatttcttggctctttgtgccagtaattactacaatggctgtatatttcataggaatatcaagggtttcatggttcaaacaggagatccaacaggaactggaagaggaggcaacagtatttggggcaagaagtttgaggatgaatacagtgaatatcttaag

SEQ ID NO: 164293 - DNA, 2232 bp, Homo sapiens
  Payload ID: 12358
  Gene Symbol: PPIL4
  Gene Name: peptidylprolyl isomerase (cyclophilin)-like 4
  Uniprot ID: Q8WUA2
  ENST ID: ENST00000253329
  CDS Start-End: 34-1512
cccggggtttgtagcggaggaggagcgggcgccatggcggttctactggagaccactttaggcgacgtcgtcatcgacttgtacaccgaagaacggccgcgtgcctgcttgaatttcttgaaactgtgcaaaataaaatattacaattattgccttattcacaatgtacagagggattttatcatacaaactggcgatcctacagggactggccgtggaggagagtctatctttggccaactgtatggtgatcaagcaagcttttttgaggcagaaaaagtcccaagaattaagcacaagaagaaaggcacagtgtccatggtgaataatggcagtgatcaacatggatctcagtttcttatcaccacaggagaaaatctagattatcttgatggtgtccatacggtgtttggtgaggtgacagaaggcatggacataattaagaaaattaatgagacctttgttgacaaggactttgtaccatatcaggatatcaggataaatcatacggtgattttagatgatccatttgatgaccctcctgatttattaatccctgatcgatcaccagaacctacaagggaacaattagatagtggtcgaataggagcagatgaagaaattgatgatttcaaaggaagatcagctgaggaagtagaagaaataaaggcagaaaaagaggctaaaactcaggctatacttttggagatggtgggagacctacctgatgcagatattaaacctccagaaaatgtactgtttgtgtgtaaattgaacccagtgaccacagatgaggatctggaaataatattctctagatttgggccaataagaagttgtgaagttatccgagactggaagacaggagagtccctctgttacgcttttattgaatttgaaaaggaagaagattgtgagaaagcattcttcaaaatggacaatgtgcttatagatgacagaagaatacatgtggattttagccagtcggttgcaaaggttaaatggaaaggaaaaggtgggaaatacaccaagagtgatttcaaggagtatgaaaaagaacaggataaaccacctaatttggttctgaaagataaagtaaagcccaaacaggatacaaaatacgatcttatattagatgagcaggccgaagactcaaaatcaagtcactcacacacaagtaaaaaacacaagaagaaaacccatcactgttctgaagagaaagaagatgaggactacatgccaatcaaaaatactaatcaggatatctatagagaaatggggtttggtcactatgaagaagaagaaagctgttgggagaaacaaaagagtgaaaagagagaccgaactcagaaccgaagtcgtagccgatctcgagagagggatggccattatagtaatagtcataaatcaaaataccaaacagatctttatgaaagagaaaggagtaaaaagagagaccgaagcagaagtccaaagaagtccaaagataaagaaaaatctaagtatagatgaaagatgaagaggcagaattgagaggctaacatatttactcttgtctaacttaagagtgccaggaaagcagatgcttagattttgtgtcaaagcttgttatttttttcatactaggattatggtctttagattaatactgattatatagagcacggaaagataaagaattgaacattttctttgtatacttttttacactaattttattgttatacataaatggtagtcttcatttttgaagtcttacattttcactctttttttaatgaagtatttcatactacaaaaatacataaacgtatatataaagggataataaatgtaaatatctgtgtactcatcagccagcttaagatacagatgttgtcgacattttagaagttccctaaggccctctccctctcaaataattatttggaattttgtgtttgtcatttgtctattatagttttacaacatacgtatgtatctgtaagtgaaatgttaattttgtatgtttctgaattttatataaatggcaaaatgtttacttctgtgactttctttcatttttattgctatatagtattatataaatatactacaacttattcattcttgatggacatttgagttttgtttatttgtttttgctgttgaaacaatgctgctgtgaacattgtatctagcagttatattgcttgatatattgataaaataatgccaaatttgtgttctgaa

SEQ ID NO: 164294 - DNA, 1089 bp, Homo sapiens
  Payload ID: 12358
  Gene Symbol: PPIL4
  Gene Name: peptidylprolyl isomerase (cyclophilin)-like 4
  ENST ID: ENST00000340881
  CDS Start-End: 535-918
acacactatctcgttagatctttaaaaggtctcttaaagtctcacttctctcaaacttaggtctttcagatcttaaactcaggtcccaaatcctcagttttccactggacttaatgttctcatgggctcaatggctctacttgaacacggcatttgtgtgtaatttatttgaaagtttgatgttgtaatattcacatatatcgttaggtggcagcatgtggctacctagcaaaaatggatgtctgatttcaaattagtaatggagatggaattactatgattcttttgttccctttctctgtctctcgatatatgccatttataaaatagctcttatgctttttataaaataattattgttcttggttaggtggtttttttactaagctctttttttcttttcttaataaataggtgggaaatacaccaagagtgatttcaaggagtatgaaaaagaacaggataaaccacctaatttggttctgaaagataaagtaaagcccaaacaggatacaaaatacgatcttatattagatgagcaggccgaagactcaaaatcaagtcactcacacacaagtaaaaaacacaagaagaaaacccatcactgttctgaagagaaagaagatgaggactacatgccaatcaaaaatactaatcaggatatctatagagaaatggggtttggtcactatgaagaagaagaaagctgttgggagaaacaaaagagtgaaaagagagaccgaactcagaaccgaagtcgtagccgatctcgagagagggatggccattatagtaatagtcataaatcaaaataccaaacagatctttatgaaagagaaaggagtaaaaagagagaccgaagcagaagtccaaagaagtccaaagataaagaaaaatctaagtatagatgaaagatgaagaggcagaattgagaggctaacatatttactcttgtctaacttaagagtgccaggaaagcagatgcttagattttgtgtcaaagcttgttatttttttcatactaggattatggtctttagattaatactgattatatagagcacggaaagataaagaattgaacatttt

SEQ ID NO: 164295 - DNA, 1445 bp, Homo sapiens
  Payload ID: 12359
  Gene Symbol: PPIL6
  Gene Name: peptidylprolyl isomerase (cyclophilin)-like 6
  ENST ID: ENST00000447468
  CDS Start-End: 34-825
gtttggggtcaccgggcgtccccgggcgcggccatggcaaggccgcagccgtgcgggcccccgcacgctaggtgcggctcgccgtcgctgccggagcggccgctgcaggtgaaggtggtggggctcttcagctgccccaactttcagattgcgaagagcgccgctgagaatctgaagaataatcatccatccaaatttgaagatcctatattagttcctcttcaagaatttgcatggcatcaatatctacaggagaaaaaaagggaactcaaaaatgaaacctgggaatattcttcctctgtgatttcttttgttaatggtcagtttctgggtgatgcattggatctgcagaaatgggcccacgaggtgtgggatatagttgacattaaaccctctgcactttatgacgcactcactgaggatttttccgctaagttcttaagagacaccaagcatgatttcgtgtttttggacatttgtattgattcttctccaattggaagattgatttttgagctatactgtgatgtgtgtcccaaaacatgtaaaaattttcaggtcttgtgcacaggaaaagcagggttttctcaacgtggcataagactacattacaaaaattccatttttcatcgaatagtacagaatggctggatacaaggaggggatatagtgtatggaaaaggagataatggagagtcgatttatggtccaacatttgaagacggagtctctctgtcacccatgctggagtgcaatggcgtgatctcggctcactgcaacctccacctcccaggttcaagtgattctcctgcctcagcctcctgagcagctgggattacagatgaaaacttttcagttcctcataataaaagaggagtacttggaatggccaacaaaggccgtcacagcaacgggtcacaattctatatcacactgcaagcaactccttatctagatagaaaatttgtggcttttgggcaactgattgaaggaacagaagtgcttaaacaactagaattagttccaacacagaatgaaagaccaatacatatgtgtagaattactgacagtggagatccttatgcttgattttcatatcaatattttctgtgataatttattactttgtatctgatcagctgtttgtggatttaattaaaaagtacttgataaattgtaatttgaaagccgtggcagacactgtaggttgcctcatctacacccaatccctccccatcttcctttcctgtctctgtcatagagactgtgaaagggtggtactcaatttcctagactcctttgcagccacgggtggccatgagagatggttctggccagtgggacaggaatagaacgccagtggtcctgccccttccccttcatccagtctggaatgtggagaggctggagctacagctgtcatcttgtggccataaagaaaaggc

SEQ ID NO: 164296 - DNA, 1693 bp, Homo sapiens
  Payload ID: 12359
  Gene Symbol: PPIL6
  Gene Name: peptidylprolyl isomerase (cyclophilin)-like 6
  Uniprot ID: Q8IXY8
  ENST ID: ENST00000440797
  CDS Start-End: 582-1595
cagcagttgaggttgaagatccgcagtcgcagggagaagttgggcttcatggttggggagctccaggggcgctaggcggctcgaactctccagcgacggccgcggtggggacgggggcggccggcggcgccttctccccagaccgttccttcttcgcaggcggcgcgcacaggtgggcaccaagcccgcgtggctcaggtcgggcccgactcccgcgttcccccggcaaccggccggctgttcccaatcaggcgggccgccaacccggaaaggcgatccgctgccgaaatccgggcgcccaggctcggtaagggccgcgcgctaggaccctgggggtccggagagcgcccccgggtgggcggctcccggttccttttcctccaagctcgtccccggcggtcgcggccgcccgcgcgccggcggcccagcaacaggcgcaaagttgaggaaaggcccagccgccacgggccgccctcgacccgcccctgggccccgcctcctgcgagcggcggaggcggggccgcgcggttgccggagcgacgcgcagtgtttggggtcaccgggcgtccccgggcgcggccatggcaaggccgcagccgtgcgggcccccgcacgctaggtgcggctcgccgtcgctgccggagcggccgctgcaggtgaaggtggtggggctcttcagctgccccaactttcagattgcgaagagcgccgctgagaatctgaagaataatcatccatccaaatttgaagatcctatattagttcctcttcaagaatttgcatggcatcaatatctacaggagaaaaaaagggaactcaaaaatgaaacctgggaatattcttcctctgtgatttcttttgttaatggtcagtttctgggtgatgcattggatctgcagaaatgggcccacgaggtgtgggatatagttgacattaaaccctctgcactttatgacgcactcactgaggatttttccgctaagttcttaagagacaccaagcatgatttcgtgtttttggacatttgtattgattcttctccaattggaagattgatttttgagctatactgtgatgtgtgtcccaaaacatgtaaaaattttcaggtcttgtgcacaggaaaagcagggttttctcaacgtggcataagactacattacaaaaattccatttttcatcgaatagtacagaatggctggatacaaggaggggatatagtgtatggaaaaggagataatggagagtcgatttatggtccaacatttgaagagctttatggaagcttgaaaagaagtgtaaagaggcagaaggaaagcagaggggttggaaagatcgagaaataccgagatgaaaacttttcagttcctcataataaaagaggagtacttggaatggccaacaaaggccgtcacagcaacgggtcacaattctatatcacactgcaagcaactccttatctagatagaaaatttgtggcttttgggcaactgattgaaggaacagaagtgcttaaacaactagaattagttccaacacagaatgaaagaccaatacatatgtgtagaattactgacagtggagatccttatgcttgattttcatatcaatattttctgtgataatttattactttgtatctgatcagctgtttgtggatttaattaaaaagtacttgataaattgtaatttgaaa

SEQ ID NO: 164297 - DNA, 4031 bp, Homo sapiens
  Payload ID: 12359
  Gene Symbol: PPIL6
  Gene Name: peptidylprolyl isomerase (cyclophilin)-like 6
  Uniprot ID: Q8IXY8
  ENST ID: ENST00000424445
  CDS Start-End: 582-1421
cagcagttgaggttgaagatccgcagtcgcagggagaagttgggcttcatggttggggagctccaggggcgctaggcggctcgaactctccagcgacggccgcggtggggacgggggcggccggcggcgccttctccccagaccgttccttcttcgcaggcggcgcgcacaggtgggcaccaagcccgcgtggctcaggtcgggcccgactcccgcgttcccccggcaaccggccggctgttcccaatcaggcgggccgccaacccggaaaggcgatccgctgccgaaatccgggcgcccaggctcggtaagggccgcgcgctaggaccctgggggtccggagagcgcccccgggtgggcggctcccggttccttttcctccaagctcgtccccggcggtcgcggccgcccgcgcgccggcggcccagcaacaggcgcaaagttgaggaaaggcccagccgccacgggccgccctcgacccgcccctgggccccgcctcctgcgagcggcggaggcggggccgcgcggttgccggagcgacgcgcagtgtttggggtcaccgggcgtccccgggcgcggccatggcaaggccgcagccgtgcgggcccccgcacgctaggtgcggctcgccgtcgctgccggagcggccgctgcaggtgaaggtggtggggctcttcagctgccccaactttcagattgcgaagagcgccgctgaggaactcaaaaatgaaacctgggaatattcttcctctgtgatttcttttgttaatggtcagtttctgggtgatgcattggatctgcagaaatgggcccacgaggtgtgggatatagttgacattaaaccctctgcactttatgacgcactcactgaggatttttccgctaagttcttaagagacaccaagcatgatttcgtgtttttggacatttgtattgattcttctccaattggaagattgatttttgagctatactgtgatgtgtgtcccaaaacatgtaaaaattttcaggtcttgtgcacaggaaaagcagggttttctcaacgtggcataagactacattacaaaaattccatttttcatcgaatagtacagaatggctggatacaaggaggggatatagtgtatggaaaaggagataatggagagtcgatttatggtccaacatttgaagatgaaaacttttcagttcctcataataaaagaggagtacttggaatggccaacaaaggccgtcacagcaacgggtcacaattctatatcacactgcaagcaactccttatctagatagaaaatttgtggcttttgggcaactgattgaaggaacagaagtgcttaaacaactagaattagttccaacacagaatgaaagaccaatacatatgtgtagaattactgacagtggagatccttatgcttgattttcatatcaatattttctgtgataatttattactttgtatctgatcagctgtttgtggatttaattaaaaagtacttgataaattgtaatttgaaagccgtggcagacactgtaggttgcctcatctacacccaatccctccccatcttcctttcctgtctctgtcatagagactgtgaaagggtggtactcaatttcctagactcctttgcagccacgggtggccatgagagatggttctggccagtgggacaggaatagaacgccagtggtcctgccccttccccttcatccagtctggaatgtggagaggctggagctacagctgtcatcttgtggccataaagaaaaggctgaggccaggtgtggtagctcacgcctgtaatcccagcacttgggaggccgaggcaggtggatcacaagatcaagagattgagaccatcctggccaacatggtgaaaccctgtctctactaaaactacagaaattagctgggcatggtggcatgcacttgtagtcccagctacttgggaagctgaggcagaagaatctcttgaacccgggaggcggaggttgcagtgagccgagatgccgccactgcactccagcctggcgacagagagagactgtctcaaaaaaaaagaaaggccaagtactgcagagatgtcagccccagtctcttgagctgcgggaccaataccagcaaccacctactctggacttcttattataggagactaacagagccctgtgttgtgttgtttatgttactgttggttgagaattttgttacttgtggacaaaaaattcttaatttagcaacacacctgatagcctaagacatttgtaatagaattatgttcttgtttgtaactacatgtactcctaggagaaacttggtaagtaaccaaataggaatgatgcagaagaaaaagcaattcattgtaatatttcattgtttataccagcattcagaaagagtatctacactttggatgttttcatatatgacatgaacatcatccttatctctctgagccataccaaccctatgaaaaccaagggcttgttttacagtgtccgtggtggctgactcatgtgatgttattggagattcagctttatcactactctgtaatctaaagttctcaagctcatatcacctggggagcttttaaaatgtaacctaacagaccttgtccttgacctactgaggcagagttcccaggcgtggggcagagattctgtgttcatttggttctttccccagggttcccaggcgtggggcacagattctgtgttcatttagctctttccccagggttcccatttagacagctgggcactagtcatctgggaatcactgcaagacataaggaactggttccagtccccatggtgtaatgtagtcagcagagtgcttgactctgctattggtgaccttgctcagctcctgttaccaccactaccctgtgcccctgctctgcccagactaagagtgcttttctttttttttttttttttttttttttttttgagacggaatctcactctgtcgcccaggctggagtgcagtggcacaatctcggctcactgcaagctctgcctccctgattcatgccattctcctgcctcagcctcccgagtagctgggactacaggcgcctgccaccacgcctggctaattttttgtatttttagtagagatgggatttcaccatgttagccaggatggtcccgatcttgtgacctcgtgatccgcccgcctcggcctcccaaagtgctgagattacaaaggcgtgagccaccgcacccggctgagagtgcttttcttaccctaagcagaatgaggtttgtcttccaagaacaatctctatttacatcagtcttaaagaggcaggcttctaatggatatgaggcttgccaaaagtaggcgtaggcttttttaactttttattttgaaatatagattcacaggaagttgcaaaaatagtacagagcagtcctgtgtacctttcacccattttccccagtggctacgcttacaaaacggtagtacaatatcaaaccaggcagctgacattggtacaatgtgtgtgatgccattttatcatgagtatattcatgtaaccaacactatagagaaaatatagaacctttccagcacctcaaagacccccttccagtacccctttacagtcaacccactcccctgccctctgccatccctaactcctgacaactggcatttgcttttccttttaatgacagctttattgctatatgacatatgctttatgctaagacctgaggtggatgggaggaagcagaccgcctatgttacattctcaactgacccagagcaacatagtgttaagaatgtgtgttctagggccagaatcctggctctgccattccctagctgcacaaactcaggcaagaacttttctgtgcctcaattccttcatctgagaaacagtggtacctaccacataagattgctgtgagggttccatgaatcaataatttctataaagaacctataagagacctggtctgctgtaagcactcgataaatttaataataaattactaatgtgtaaccttc

SEQ ID NO: 164298 - DNA, 617 bp, Homo sapiens
  Payload ID: 12359
  Gene Symbol: PPIL6
  Gene Name: peptidylprolyl isomerase (cyclophilin)-like 6
  ENST ID: ENST00000417394
  CDS Start-End: 1-617
gctaggtgcggctcgccgtcgctgccggagcggccgctgcaggtgaaggtggtggggctcttcagctgccccaactttcagattgcgaagagcgccgctgaggaactcaaaaatgaaacctgggaatattcttcctctgtgatttcttttgttaatggtcagtttctgggtgatgcattggatctgcagaaatgggcccacgaggtgtgggatatagttgacattaaaccctctgcactttatgacgcactcactgaggatttttccgctaagttcttaagagacaccaagcatgatttcgtgtttttggacatttgtattgattcttctccaattggaagattgatttttgagctatactgtgatgtgtgtcccaaaacatgtaaaaattttcaggtcttgtgcacaggaaaagcagggttttctcaacgtggcataagactacattacaaaaattccatttttcatcgaatagtacagaatggctggatacaaggaggggatatagtgtatggaaaaggagataatggagagtcgatttatggtccaacatttgaagatgaaaacttttcagttcctcataataaaagaggagtacttggaatggccaacaaagg

SEQ ID NO: 164299 - DNA, 607 bp, Homo sapiens
  Payload ID: 12359
  Gene Symbol: PPIL6
  Gene Name: peptidylprolyl isomerase (cyclophilin)-like 6
  ENST ID: ENST00000520723
  CDS Start-End: 1-514
ggggctcttcagctgccccaactttcagattgcgaagagcgccgctgaggaactcaaaaatgaaacctgggaatattcttcctctgtgatttcttttgttaatggtcagtttctgggtgatgcattggatctgcagaaatgggcccacgaggtgtgggatatagttgacattaaaccctctgcactttatgacgcactcactgaggatttttccgctaagttcttaagagacaccaagcatgatttcgtgtttttggacatttgtattgattcttctccaattggaagattgatttttgagctatactgtgatgtgtgtcccaaaacatgtaaaaattttcaggtcttgtgcacaggaaaagcagggttttctcaacgtggcataagactacattacaaaaattccatttttcatcgaatagtacagaatggctggatacaaggaggggatatagtgtatggaaaaggagataatggagagtcgatttatggtccaacatttgaaggcaactgattgaaggaacagaagtgcttaaacaactagaattagttccaacacagaatgaaagaccaatacatatgtgtagaattactgacagtggagatc

SEQ ID NO: 164300 - DNA, 4128 bp, Homo sapiens
  Payload ID: 12359
  Gene Symbol: PPIL6
  Gene Name: peptidylprolyl isomerase (cyclophilin)-like 6
  Uniprot ID: Q8IXY8
  ENST ID: ENST00000521072
  CDS Start-End: 582-1517
cagcagttgaggttgaagatccgcagtcgcagggagaagttgggcttcatggttggggagctccaggggcgctaggcggctcgaactctccagcgacggccgcggtggggacgggggcggccggcggcgccttctccccagaccgttccttcttcgcaggcggcgcgcacaggtgggcaccaagcccgcgtggctcaggtcgggcccgactcccgcgttcccccggcaaccggccggctgttcccaatcaggcgggccgccaacccggaaaggcgatccgctgccgaaatccgggcgcccaggctcggtaagggccgcgcgctaggaccctgggggtccggagagcgcccccgggtgggcggctcccggttccttttcctccaagctcgtccccggcggtcgcggccgcccgcgcgccggcggcccagcaacaggcgcaaagttgaggaaaggcccagccgccacgggccgccctcgacccgcccctgggccccgcctcctgcgagcggcggaggcggggccgcgcggttgccggagcgacgcgcagtgtttggggtcaccgggcgtccccgggcgcggccatggcaaggccgcagccgtgcgggcccccgcacgctaggtgcggctcgccgtcgctgccggagcggccgctgcaggtgaaggtggtggggctcttcagctgccccaactttcagattgcgaagagcgccgctgagaatctgaagaataatcatccatccaaatttgaagatcctatattagttcctcttcaagaatttgcatggcatcaatatctacaggagaaaaaaagggaactcaaaaatgaaacctgggaatattcttcctctgtgatttcttttgttaatggtcagtttctgggtgatgcattggatctgcagaaatgggcccacgaggtgtgggatatagttgacattaaaccctctgcactttatgacgcactcactgaggatttttccgctaagttcttaagagacaccaagcatgatttcgtgtttttggacatttgtattgattcttctccaattggaagattgatttttgagctatactgtgatgtgtgtcccaaaacatgtaaaaattttcaggtcttgtgcacaggaaaagcagggttttctcaacgtggcataagactacattacaaaaattccatttttcatcgaatagtacagaatggctggatacaaggaggggatatagtgtatggaaaaggagataatggagagtcgatttatggtccaacatttgaagatgaaaacttttcagttcctcataataaaagaggagtacttggaatggccaacaaaggccgtcacagcaacgggtcacaattctatatcacactgcaagcaactccttatctagatagaaaatttgtggcttttgggcaactgattgaaggaacagaagtgcttaaacaactagaattagttccaacacagaatgaaagaccaatacatatgtgtagaattactgacagtggagatccttatgcttgattttcatatcaatattttctgtgataatttattactttgtatctgatcagctgtttgtggatttaattaaaaagtacttgataaattgtaatttgaaagccgtggcagacactgtaggttgcctcatctacacccaatccctccccatcttcctttcctgtctctgtcatagagactgtgaaagggtggtactcaatttcctagactcctttgcagccacgggtggccatgagagatggttctggccagtgggacaggaatagaacgccagtggtcctgccccttccccttcatccagtctggaatgtggagaggctggagctacagctgtcatcttgtggccataaagaaaaggctgaggccaggtgtggtagctcacgcctgtaatcccagcacttgggaggccgaggcaggtggatcacaagatcaagagattgagaccatcctggccaacatggtgaaaccctgtctctactaaaactacagaaattagctgggcatggtggcatgcacttgtagtcccagctacttgggaagctgaggcagaagaatctcttgaacccgggaggcggaggttgcagtgagccgagatgccgccactgcactccagcctggcgacagagagagactgtctcaaaaaaaaagaaaggccaagtactgcagagatgtcagccccagtctcttgagctgcgggaccaataccagcaaccacctactctggacttcttattataggagactaacagagccctgtgttgtgttgtttatgttactgttggttgagaattttgttacttgtggacaaaaaattcttaatttagcaacacacctgatagcctaagacatttgtaatagaattatgttcttgtttgtaactacatgtactcctaggagaaacttggtaagtaaccaaataggaatgatgcagaagaaaaagcaattcattgtaatatttcattgtttataccagcattcagaaagagtatctacactttggatgttttcatatatgacatgaacatcatccttatctctctgagccataccaaccctatgaaaaccaagggcttgttttacagtgtccgtggtggctgactcatgtgatgttattggagattcagctttatcactactctgtaatctaaagttctcaagctcatatcacctggggagcttttaaaatgtaacctaacagaccttgtccttgacctactgaggcagagttcccaggcgtggggcagagattctgtgttcatttggttctttccccagggttcccaggcgtggggcacagattctgtgttcatttagctctttccccagggttcccatttagacagctgggcactagtcatctgggaatcactgcaagacataaggaactggttccagtccccatggtgtaatgtagtcagcagagtgcttgactctgctattggtgaccttgctcagctcctgttaccaccactaccctgtgcccctgctctgcccagactaagagtgcttttctttttttttttttttttttttttttttttgagacggaatctcactctgtcgcccaggctggagtgcagtggcacaatctcggctcactgcaagctctgcctccctgattcatgccattctcctgcctcagcctcccgagtagctgggactacaggcgcctgccaccacgcctggctaattttttgtatttttagtagagatgggatttcaccatgttagccaggatggtcccgatcttgtgacctcgtgatccgcccgcctcggcctcccaaagtgctgagattacaaaggcgtgagccaccgcacccggctgagagtgcttttcttaccctaagcagaatgaggtttgtcttccaagaacaatctctatttacatcagtcttaaagaggcaggcttctaatggatatgaggcttgccaaaagtaggcgtaggcttttttaactttttattttgaaatatagattcacaggaagttgcaaaaatagtacagagcagtcctgtgtacctttcacccattttccccagtggctacgcttacaaaacggtagtacaatatcaaaccaggcagctgacattggtacaatgtgtgtgatgccattttatcatgagtatattcatgtaaccaacactatagagaaaatatagaacctttccagcacctcaaagacccccttccagtacccctttacagtcaacccactcccctgccctctgccatccctaactcctgacaactggcatttgcttttccttttaatgacagctttattgctatatgacatatgctttatgctaagacctgaggtggatgggaggaagcagaccgcctatgttacattctcaactgacccagagcaacatagtgttaagaatgtgtgttctagggccagaatcctggctctgccattccctagctgcacaaactcaggcaagaacttttctgtgcctcaattccttcatctgagaaacagtggtacctaccacataagattgctgtgagggttccatgaatcaataatttctataaagaacctataagagacctggtctgctgtaagcactcgataaatttaataataaattactaatgtgtaaccttca

SEQ ID NO: 164301 - DNA, 436 bp, Homo sapiens
  Payload ID: 12359
  Gene Symbol: PPIL6
  Gene Name: peptidylprolyl isomerase (cyclophilin)-like 6
  ENST ID: ENST00000518648
  CDS Start-End: 1-436
gcggccgctgcaggtgaaggtggtggggctcttcagctgccccaactttcagattgcgaagagcgccgctgaggaactcaaaaatgaaacctgggaatattcttcctctgtgatttcttttgttaatggtcagtttctgggtgatgcattggatctgcagaaatgggcccacgaggtgtgggatatagttgacattaaaccctctgcactttatgacgcactcactgaggatttttccgctaagttcttaagagacaccaaggtcttgtgcacaggaaaagcagggttttctcaacgtggcataagactacattacaaaaattccatttttcatcgaatagtacagaatggctggatacaaggaggggatatagtgtatggaaaaggagataatggagagtcgatttatggtccaacatttgaagatgaaaacttt

SEQ ID NO: 164302 - DNA, 863 bp, Homo sapiens
  Payload ID: 12360
  Gene Symbol: PPIA
  Gene Name: peptidylprolyl isomerase A (cyclophilin A)
  ENST ID: ENST00000415933
  CDS Start-End: 44-406
ttttgcagacgccaccgccgaggaaaaccgtgtactattagccatggtcaaccccaccgtgttcttcgacattgccgtcgacggcgagcccttgggccgcgtctcctttgagctgtttgcagacaaggtcccaaagacagcagaaaattttcgtgctctgagcactggagagaaaggatttggttataagggttcctgctttcacagaattattccagggtttatgtgtcagggtggtgacttcacacgccataatggcactggtggcaagtccatctatggggagaaatttgaagatgagaacttcatcctaaagcatacgggtcctggcatcttgtccatggcaaatgctggacccaacacaaatggttcccagtttttcatctgcactgccaagactgagtgactggatctcgctcttatctcccaggttggagtgcagtggtgccatctcagctcactgcaacctcctcccgggttcaagcaattcttctgcctcagcctctcaagtagctggaactacaggttggatggcaagcatgtggtgtttggcaaagtgaaagaaggcatgaatattgtggaggccatggagcgctttgggtccaggaatggcaagaccagcaagaagatcaccattgctgactgtggacaactcgaataagtttgacttgtgttttatcttaaccaccagatcattccttctgtagctcaggagagcacccctccaccccatttgctcgcagtatcctagaatctttgtgctctcgctgcagttccctttgggttccatgttttccttgttccctcccatgcctagctggattgcagagttaagtttatgattatgaaataaaaactaaata

SEQ ID NO: 164303 - DNA, 544 bp, Homo sapiens
  Payload ID: 12360
  Gene Symbol: PPIA
  Gene Name: peptidylprolyl isomerase A (cyclophilin A)
  ENST ID: ENST00000451562
  CDS Start-End: 46-411
cgttttgcagacgccaccgccgaggaaaaccgtgtactattagccatggtcaaccccaccgtgttcttcgacattgccgtcgacggcgagcccttgggccgcgtctcctttgagctgtttgcagacaaggtcccaaagacagcagaaaattttcgtgctctgagcactggagagaaaggatttggttataagggttcctgctttcacagaattattccagggtttatgtgtcagggtggtgacttcacacgccataatggcactggtggcaagtccatctatggggagaaatttgaagatgagaacttcatcctaaagcatacgggtcctggcatcttgtccatggcaaatgctggacccaacacaaatggttcccagtttttcatctgcactgccaagactgagtggtaagggtacaacatggcacactaaccacctgactaaatgaaaagttgccctggggggaacggaacaaacactacttttcttcaacctttgcttccacagactttttcatccctaagatactagaagaagagcatac

SEQ ID NO: 164304 - DNA, 2238 bp, Homo sapiens
  Payload ID: 12360
  Gene Symbol: PPIA
  Gene Name: peptidylprolyl isomerase A (cyclophilin A)
  Uniprot ID: P62937
  ENST ID: ENST00000468812
  CDS Start-End: 46-543
cgttttgcagacgccaccgccgaggaaaaccgtgtactattagccatggtcaaccccaccgtgttcttcgacattgccgtcgacggcgagcccttgggccgcgtctcctttgagctgtttgcagacaaggtcccaaagacagcagaaaattttcgtgctctgagcactggagagaaaggatttggttataagggttcctgctttcacagaattattccagggtttatgtgtcagggtggtgacttcacacgccataatggcactggtggcaagtccatctatggggagaaatttgaagatgagaacttcatcctaaagcatacgggtcctggcatcttgtccatggcaaatgctggacccaacacaaatggttcccagtttttcatctgcactgccaagactgagtggttggatggcaagcatgtggtgtttggcaaagtgaaagaaggcatgaatattgtggaggccatggagcgctttgggtccaggaatggcaagaccagcaagaagatcaccattgctgactgtggacaactcgaataagtttgacttgtgttttatcttaaccaccagatcattccttctgtagctcaggagagcacccctccaccccatttgctcgcagtatcctagaatctttgtgctctcgctgcagttccctttgggttccatgttttccttgttccctcccatgcctagctggattgcagagttaagtttatgattatgaaataaaaactaaataacaattgtcctcgtttgagttaagagtgttgatgtaggctttattttaagcagtaatgggttacttctgaaacatcacttgtttgcttaattctacacagtacttagattttttttactttccagtcccaggaagtgtcaatgtttgttgagtggaatattgaaaatgtaggcagcaactgggcatggtggctcactgtctgtaatgtattacctgaggcagaagaccacctgagggtaggagtcaagatcagcctgggcaacatagtgagacgctgtctctacaaaaaataattagcctggcctggtggtgcatgcctagtcctagctgatctggaggctgacgtgggaggattgcttgagcctagagtgagctattatcatgccactgtacagcctgggtgttcacagatcttgtgtctcaaaggtaggcagaggcaggaaaagcaaggagccagaattaagaggttgggtcagtctgcagtgagttcatgcatttagaggtgttcttcaagatgactaatgtcaaaaattgagacatctgttgcggttttttttttttttttttcccctggaatgcagtggcgtgatctcagctcactgcagcctccgcctcctgggttcaagtgattctagtgcctcagcctcctgagtagctgggataatgggcgtgtgccaccatgcccagctaatttttgtatttttagtatagatggggtttcatcattttgaccaggctggtctcaaactcttgacctcagctgatgcgcctgccttggcctcccaaactgctgagattacagatgtgagccaccgcaccctacctcattttctgtaacaaagctaagcttgaacactgttgatgttcttgagggaagcatattgggctttaggctgtaggtcaagtttatacatcttaattatggtggaattcctatgtagagtctaaaaagccaggtacttggtgctacagtcagtctccctgcagagggttaaggcgcagactacctgcagtgaggaggtactgcttgtagcatatagagcctctccctagctttggttatggaggctttgaggttttgcaaacctgaccaatttaagccataagatctggtcaaagggatacccttcccactaaggacttggtttctcaggaaattatatgtacagtgcttgctggcagttagatgtcaggacaatctaagctgagaaaaccccttctctgcccaccttaacagacctctagggttcttaacccagcaatcaagtttgcctatcctagaggtggcggatttgatcatttggtgtgttgggcaatttttgttttactgtctggttccttctgcgtgaattaccaccaccaccacttgtgcatctcagtcttgtgtgttgtctggttacgtattccctgggtgataccattcaatgtcttaatgtacttgtggctcagacctgagtgcaaggtggaaataaacatcaaacatcttttcatta

SEQ ID NO: 164305 - DNA, 907 bp, Homo sapiens
  Payload ID: 12360
  Gene Symbol: PPIA
  Gene Name: peptidylprolyl isomerase A (cyclophilin A)
  Uniprot ID: P62937
  ENST ID: ENST00000489459
  CDS Start-End: 382-699
gttttgcagacgccaccgccgaggaaaaccgtgtactattagccatggtcaaccccaccgtgttcttcgacattgccgtcgacggcgagcccttgggccgcgtctcctttgaggtaaggggcctggataccaagaagtgactgctcatctaatccataaagctatgttaacagattggaggtagtagcattttcattacaagtgactaaaagaacagctgtttacccctgatcgtgcagcagtgcttgctgttccttagaattttgccttctgtttgcagacaaggtcccaaagacagcagaaaattttcgtgctctgagcactggagagaaaggatttggttataagggttcctgctttcacagaattattccagggtttatgtgtcagggtggtgacttcacacgccataatggcactggtggcaagtccatctatggggagaaatttgaagatgagaacttcatcctaaagcatacgggtcctggcatcttgtccatggcaaatgctggacccaacacaaatggttcccagtttttcatctgcactgccaagactgagtggttggatggcaagcatgtggtgtttggcaaagtgaaagaaggcatgaatattgtggaggccatggagcgctttgggtccaggaatggcaagaccagcaagaagatcaccattgctgactgtggacaactcgaataagtttgacttgtgttttatcttaaccaccagatcattccttctgtagctcaggagagcacccctccaccccatttgctcgcagtatcctagaatctttgtgctctcgctgcagttccctttgggttccatgttttccttgttccctcccatgcctagctggattgcagagttaagtttatgattatgaaataaaaactaaataacaatt

SEQ ID NO: 164306 - DNA, 552 bp, Homo sapiens
  Payload ID: 12360
  Gene Symbol: PPIA
  Gene Name: peptidylprolyl isomerase A (cyclophilin A)
  ENST ID: ENST00000479021
  CDS Start-End: 45-221
gttttgcagacgccaccgccgaggaaaaccgtgtactattagccatggtcaaccccaccgtgttcttcgacattgccgtcgacggcgagcccttgggccgcgtctcctttgagtgtgtctctatgcatggagtaagaaagaaaccatcctacaatagcaccaaatccagcatggatggctgtgttggtgcaggactttcacatgtctttggagtagaataagatgtgccaatccagactcaaccccatctcatcaagatccagtgatcttcgttttccgattgtctagcccaagctctcttcctccccagactcatcctccaccctgctactggacttgtctttgtactctcaaagcagtgtgaggagattcatcaaccggtggtgtggacatgtgaacagcgtgaggcagagagttataagcttcttgagggtggcagccagacagtagcagtttgtgtgcaaagcccctgcagtggcatatggaagactttcaatacatcaggaccagaggatgagctggaaatgaaatcacactcactggtgggagaaa

SEQ ID NO: 164307 - DNA, 818 bp, Homo sapiens
  Payload ID: 12360
  Gene Symbol: PPIA
  Gene Name: peptidylprolyl isomerase A (cyclophilin A)
  Uniprot ID: P62937
  ENST ID: ENST00000355968
  CDS Start-End: 292-609
gttttgcagacgccaccgccgaggaaaaccgtgtactattagccatggtcaaccccaccgtgttcttcgacattgccgtcgacggcgagcccttgggccgcgtctcctttgaggtaaggggcctggataccaagaagtgactgctcatctaatccataaagctatgttaacagattggagctgtttgcagacaaggtcccaaagacagcagaaaattttcgtgctctgagcactggagagaaaggatttggttataagggttcctgctttcacagaattattccagggtttatgtgtcagggtggtgacttcacacgccataatggcactggtggcaagtccatctatggggagaaatttgaagatgagaacttcatcctaaagcatacgggtcctggcatcttgtccatggcaaatgctggacccaacacaaatggttcccagtttttcatctgcactgccaagactgagtggttggatggcaagcatgtggtgtttggcaaagtgaaagaaggcatgaatattgtggaggccatggagcgctttgggtccaggaatggcaagaccagcaagaagatcaccattgctgactgtggacaactcgaataagtttgacttgtgttttatcttaaccaccagatcattccttctgtagctcaggagagcacccctccaccccatttgctcgcagtatcctagaatctttgtgctctcgctgcagttccctttgggttccatgttttccttgttccctcccatgcctagctggattgcagagttaagtttatgattatgaaataaaaactaaataacaattg

SEQ ID NO: 164308 - DNA, 827 bp, Homo sapiens
  Payload ID: 12360
  Gene Symbol: PPIA
  Gene Name: peptidylprolyl isomerase A (cyclophilin A)
  Uniprot ID: P62937
  ENST ID: ENST00000620047
  CDS Start-End: 301-618
gttttgcagacgccaccgccgaggaaaaccgtgtactattagccatggtcaaccccaccgtgttcttcgacattgccgtcgacggcgagcccttgggccgcgtctcctttgaggtaaggggcctggataccaagaagtgactgctcatctaatccataaagctatgttaacagattggaggtagtagcattttcattacaagtgactaaaagaacagcagaaaattttcgtgctctgagcactggagagaaaggatttggttataagggttcctgctttcacagaattattccagggtttatgtgtcagggtggtgacttcacacgccataatggcactggtggcaagtccatctatggggagaaatttgaagatgagaacttcatcctaaagcatacgggtcctggcatcttgtccatggcaaatgctggacccaacacaaatggttcccagtttttcatctgcactgccaagactgagtggttggatggcaagcatgtggtgtttggcaaagtgaaagaaggcatgaatattgtggaggccatggagcgctttgggtccaggaatggcaagaccagcaagaagatcaccattgctgactgtggacaactcgaataagtttgacttgtgttttatcttaaccaccagatcattccttctgtagctcaggagagcacccctccaccccatttgctcgcagtatcctagaatctttgtgctctcgctgcagttccctttgggttccatgttttccttgttccctcccatgcctagctggattgcagagttaagtttatgattatgaaataaaaactaaataacaattg

SEQ ID NO: 164309 - DNA, 660 bp, Homo sapiens
  Payload ID: 12361
  Gene Symbol: PPIAL4A
  Gene Name: peptidylprolyl isomerase A (cyclophilin A)-like 4A
  Uniprot ID: Q9Y536
  ENST ID: ENST00000577856
  CDS Start-End: 76-570
actataaagacagtaaaaagatcagtggttatctttgcagacgccaccatcactgtgagccctgtactatcagccatggtcaactccgtcgtcttttttgacatcaccgtcgacggcaagcccttgggccgcatctccatcaaactgtttgcagacaagattctaaagacagcggaaaactttcgtgctctgagcactggagagaaaggatttcgttataagggttcctgctttcacagaattattccagggtttatgtgtcagggtggtgacttcacacgccataatggcactggtgacaagtccatctatggggagaaatttgatgatgagaacctcatccgaaagcatacaggttctggcatcttgtccatggcaaatgctggacccaacacaaatggttcccagtttttcatctgtgctgccaagactgagtggttggatggcaagcatgtggcctttggcaaggtgaaagaacgtgtgaatattgtggaagccatggagcactttgggtacaggaatagcaagaccagcaagaagatcaccattgctgactgtggacaattctaatgagtttgacttgtgttttattttcaccaccagacccattccttctgtagctcaggagagcacccctccaccacatttgcttgcaatatc

SEQ ID NO: 164310 - DNA, 600 bp, Homo sapiens
  Payload ID: 12362
  Gene Symbol: PPIAL4C
  Gene Name: peptidylprolyl isomerase A (cyclophilin A)-like 4C
  Uniprot ID: A0A0B4J2A2
  ENST ID: ENST00000585245
  CDS Start-End: 34-528
gccaccatcgctgtgagccctgtactatcagccatggtcaactccgtcgtcttttttgacatcaccgtcgacggcaagcccttgggccgcatctccatcaaactgtttgcagacaagattccaaagacagcagaaaactttcgtgctctgagcactggagagaaaggatttcgttataagggttcctgctttcacagaattattccagggtttatgtgtcagggtggtgacttcacacgccctaatggcaccggtgacaagtccatctatggggagaaatttgatgatgagaacctcatccgaaagcatacaggttctggcatcttgtccatggcaaatgctggacccaacacaaatggttcccagtttttcatctgcactgccaagactgagtggttggatggcaagcatgtggcctttggcaaggtgaaagaacgtgtgaatattgtggaagccatggagcactttgggtacaggaatagcaagaccagcaagaagatcaccattgctgactgtggacaattctaatgagtttgacttgtgttttattttcaccaccagacccattccttctgtagctcaggagagcacccctccacc

SEQ ID NO: 164311 - DNA, 495 bp, Homo sapiens
  Payload ID: 12363
  Gene Symbol: PPIAL4D
  Gene Name: peptidylprolyl isomerase A (cyclophilin A)-like 4D
  Uniprot ID: F5H284
  ENST ID: ENST00000544708
  CDS Start-End: 1-495
atggtcaactccgtcgtcttttttgaaatcaccagggatggcaagcccttgggccgcatctccatcaaactgtttgcagacaagattccaaagacagcagaaaactttcgtgctctgagcactggagagaaaggatttcgttataagggttcctgctttcacagaattattccagggtttatgtgtcagggtggtgacttcacacgccctaatggcaccggtgacaagtccatctatggggagaaatttgatgatgagaacctcatccgaaagcatacaggttctggcatcttgtccatggcaaatgctggacccaacacaaatggttcccagtttttcatctgcgctgccaagactgagtggttggatggcaagcatgtggcgtttggcaaggtgaaagaacgtgtgaatattgtggaagccacggagcactttgggtacaggaatagcaagaccagcaagaagatcaccattgctgactgtggacaattctaa

SEQ ID NO: 164312 - DNA, 785 bp, Homo sapiens
  Payload ID: 12364
  Gene Symbol: PPIAL4E
  Gene Name: peptidylprolyl isomerase A (cyclophilin A)-like 4E
  Uniprot ID: A0A075B759
  ENST ID: ENST00000581164
  CDS Start-End: 76-570
actataaagacagtgaaaagatcagtggttatctttgcagacgccaccatcgctgtgagccctgtactatcagccatggtcaactccgtcgtcttttttgaaatcaccagggatggcaagcccttgggccgcatctccatcaaactgtttgcagacaagattccaaagacagcagaaaactttcgtgctctgagcactggagagaaaggatttcgttataagggttcctgctttcacagaattattccagggtttatgtgtcagggtggtgacttcacacgccctaatggcaccggtgacaagtccatctatggggagaaatttgatgatgagaacctcatccgaaagcatacaggttctggcatcttgtccatggcaaatgctggacccaacacaaatggttcccagtttttcatctgcgctgccaagactgagtggttggatggcaagcatgtggcgtttggcaaggtgaaagaacgtgtgaatattgtggaagccatggagcactttgggtacaggaatagcaagaccagcaagaagatcaccattgctgactgtggacaattctaatgagtttgacttgtgttttattttcaccaccagacccattccttctgtagctcaggagagcacccctccaccacatttgcttgcaatatcctagaatctttgtgctcttgctgcagttccctttgggttccatgttttccttgttcccttccatgcctagctggattgcagagttgagttaagtttatgattatgaaataaaaactaagtaacaa

SEQ ID NO: 164313 - DNA, 660 bp, Homo sapiens
  Payload ID: 12365
  Gene Symbol: PPIAL4F
  Gene Name: peptidylprolyl isomerase A (cyclophilin A)-like 4F
  ENST ID: ENST00000369222
  CDS Start-End: 76-570
actataaagacagtgaaaagatcagtggttatctttgcagacgccaccatcgctgtgagccctgtactatcagccatggtcaactccgtcgtcttttttgaaatcaccagggatggcaagcccttgggccgcatctccatcaaactgtttgcagacaagattccaaagacagcagaaaactttcgtgctctgagcactggagagaaaggatttcgttataagggttcctgctttcacagaattattccagggtttatgtgtcagggtggtgacttcacacgccctaatggcaccggtgacaagtccatctatggggagaaatttgatgatgagaacctcatccgaaagcatacaggttctggcatcttgtccatggcaaatgctggacccaacacaagtggttcccagtttttcatctgtgctgccaagactgagtggttggatggcaagcatgtggcgtttggcaaggtgaaagaacgtgtgaatattgtggaagccacggagcactttgggtacaggaatagcaagaccagcaagaagatcaccattgctgactgtggacaattctaatgagtttgacttgtgttttattttcaccaccagacccattccttctgtagctcaggagagcacccctccaccacatttgcttgcaatatc

SEQ ID NO: 164314 - DNA, 660 bp, Homo sapiens
  Payload ID: 12365
  Gene Symbol: PPIAL4F
  Gene Name: peptidylprolyl isomerase A (cyclophilin A)-like 4F
  Uniprot ID: P0DN26
  ENST ID: ENST00000581138
  CDS Start-End: 76-570
actataaagacagtgaaaagatcagtggttatctttgcagacgccaccatcgctgtgagccctgtactatcagccatggtcaactccgtcgtcttttttgaaatcaccagggatggcaagcccttgggccgcatctccatcaaactgtttgcagacaagattccaaagacagcagaaaactttcgtgctctgagcactggagagaaaggatttcgttataagggttcctgctttcacagaattattccagggtttatgtgtcagggtggtgacttcacacgccctaatggcaccggtgacaagtccatctatggggagaaatttgatgatgagaacctcatccgaaagcatacaggttctggcatcttgtccatggcaaatgctggacccaacacaaatggttcccagtttttcatctgcgctgccaagactgagtggttggatggcaagcatgtggcgtttggcaaggtgaaagaacgtgtgaatattgtggaagccatggagcactttgggtacaggaatagcaagaccagcaagaagatcaccattgctgactgtggacaattctaatgagtttgacttgtgttttattttcaccaccagacccattccttctgtagctcaggagagcacccctccaccacatttgcttgcaatatc

SEQ ID NO: 164315 - DNA, 3856 bp, Homo sapiens
  Payload ID: 12366
  Gene Symbol: PPIAL4G
  Gene Name: peptidylprolyl isomerase A (cyclophilin A)-like 4G
  Uniprot ID: P0DN37
  ENST ID: ENST00000419275
  CDS Start-End: 428-922
tgccacttcactccagcctgggtgacagagcaagactctgtctcaaaaaaaaaaaaaaaaaaaaagaagaaagaaagaaagaaagaaagaaagaaagaaagaaagaaagaaagaaagaaagaaatgaagactgccacaacttggaagcaaccaagatgtccttcaatgagtgactgcataagcaaactgtggtatattcctacagtggaatattattcagtgctaaaaggaaaaaactatcaagccacaaaaagatacagaaaaaacaaagacattttgctaagtgaaagaagccagtctgaaaagggtacatactgtgatttcaactatacgacattctagaaaaggccaaactataaagacagtaaaaagatcagtggttatctttgcagacgccgccatcgctgtgagccctgtactatcagccatggtcaactccgtcatcttttttgacatcaccgtcgacggcaagcccttgggccgcatctccatcaaacagtttgcagacaagattccaaagacagcagaaaactttcgtgctctgagcactggagagaaaggatttcgttataagggttcctgctttcacagaattattccagggtttatgtgtcagggtggtgacttcacacaccctaatggcaccggtgacaagtccatctatggggagaaatttgatgatgagaacctcatccgaaagcatacaggttctggcatcttgtccatggcaaatgctggacccaacacaaatggttcccagtttttcatctgcactgccaagactgagtggttggatggcaagcatgtggcctttggcaaggtgaaagaacgtgtgaatattgtggaagccatggagcactttgggtacaggaatagcaagaccagcaagaagatcaccattgctgactgtggacaattctaatgagtttgacttgtgttttattttcaccaccagacccattccttctgtagctcaggagagcacccctccaccacatttgcttgcaatatcctagaatctttgtgctcttgctgcagttccctttgggttccatgttttccttgttcccttccatgcctagctggattgcagagttaagtttatgattatgaaataaaaactaagtaacaacaacaacaacaaaaaagctcagtggttgccaggagtttggggatgggtagggagataaatagttctgaaacaggcgatttttaggggattgaaaatacgttggtaataatgtaatgatgggtacatgacattatgcgttttgcaaaactcctagacctgtaccacacaaagagtgaaccctaatgtaaactgggggtgggataaaggtgacagtatgtgagaactctgtactttctgctcgatctttccataaagctaaaactgctcaaaaaataaagtctattattttgttaaatgaaagaaattaacaatgaccatggcacgctcacacaaaaagattatcaaggacatttctctgtcaggaatgaatatttggtcatctcacaaggcaaaaccctgactagcagaggtgttagctgagggcacatggccatagatgccaatagtgacctgctggccacttgcagaaaggagagccttgacatccaaacacattgtttctcttgtattgtcctgtgcatacttatgtatcttaacaactttccttctttcctctccatttatccctctttttaaaacagggcttattgagggtgattaacttaatttttaaatgatatatggcagaatgtcaagagagtatagtgaagaacttcgtagaggaatggacataacccagaattcttagacttagagtacatgctgtgattgagaattttttattgtttcattgttcaagagattgtaggtacatgttcaattattagagaaatagttgcactctgttagaaggaagcttgggtctttcatgtttactttcaaaagggaaagtttatattgatattgagcaagtgaaagcatgaatatttattatttgatgtttgtttctgtgtttgaggaattcctcagcctctcagttttgacgaaaacaagaaaccacctcctgctttagaagctaaaatgccaaatgcttgctttctcagcctcctttgcagctagggtacaagcatatgacttaggttttgccaatctgtttgccagtgctgaatttcgacttcggaattaataaaaaaagaagcagattcagttatgctttctcttgtttctggtggaggccatgtagcagctgctacaatatctgttgcaaagcgaacaagtgggagtggtgctggtggctttgcagttagcctaggattgagcaattgctgcaattgttgctgtctgcatcttcggtgttacttcttactggtggtgacagtggtttcctccctggatgagttctacagcatggtttggggtacatttcctggctgcctagctttgatctggctctctagccttctcaacagttctacaagttccccactatttctgtgataaacctatttattgttaatgtcagccataattggcttctgtggtttatattttttaaaattccaagatataccaacgtaacagatagctcaacaaacatatgtctttttaaattaagatatattctgtgtcacatgaagtacaatggacaaaatgcaacaaattgaattgagctaaagaccaaatatatattaagcctggctggtcttaaaaatgtaactggatacagccaggcatggtggctcacgcctataatcccagcactttgggatcctgaggtgggcagatcacctgaagtcaggagtttgagaccaggctggccagcatggtgaaaccccatctctactaaaaatgcaaaaattagctgggtgtggtggtatgcccctgtaatcccagctactcgggaggttgaggcaggagaatcacttgaacctgggaggcagaggttgcagtgagccgagatcatgccaatgcactccagctttgtcaacagagcgagactttgtttcaaagtaaaaaaataaaaataaaaaaataaaaacgtaactggatagacctaaggttcttgaataagcagaaaataatttaggtaaaaaccaaataataaactaacattctgaaaggtttaggatttggaggcccaaatgtcttagctaaaagtgttcattctaacctcacaggaaaattgaaatatgaaaatatacagaaaaatcttaggcagtatttatcaattttaagaaacaactatttacaggtttttcaataggcattacattaaaaatgaaatatatagttaataaatatgaaaactgtggatataatcaacacatttattttacttcttgaagtgttaacatgtgctgtctcaaatatcaacagtgtacacgtgagaaaaaacattttacatagattttctgcgacagaaaacagcatctcattagacatcccaagttttttcatttggaacacacacccattccccagtatattaggggtaataataatttaaagagtttaattactttttactactagaaaactaattttatgtttggcacaaatttctgaaatgctattccactgcaaagaataatacctatatatggccagaattactttttttctataacattaagataatacttgtcagcctgagcaacaaagtgagacctcatctttacaaaaaataaataaattagacgggtgttgtggtgatgagggtctgtagtcccagatactcaagaggctgaggtgggaggatcccttgagcctaggaggtcgcggttgcagtgaactatgattgcaccactgcactccagcctgggtaacagagcaagatcctgtctc

SEQ ID NO: 164316 - DNA, 1081 bp, Homo sapiens
  Payload ID: 12367
  Gene Symbol: PPIB
  Gene Name: peptidylprolyl isomerase B (cyclophilin B)
  Uniprot ID: P23284
  ENST ID: ENST00000300026
  CDS Start-End: 220-870
gtggcaaccacccacgagcccgcgtcggtgcccgccccgcagggggacctactatccggcgccgagccggaggggggaaacggcgcccgccgcccgcccggagcccgcgagcaaccccagtcccccccacccgcgcgtggcggcgccggctccctagccaccgcggccccaccctcttccggcctcagctgtccgggctgctttcgcctccgcctgtggatgctgcgcctctccgaacgcaacatgaaggtgctccttgccgccgccctcatcgcggggtccgtcttcttcctgctgctgccgggaccttctgcggccgatgagaagaagaaggggcccaaagtcaccgtcaaggtgtattttgacctacgaattggagatgaagatgtaggccgggtgatctttggtctcttcggaaagactgttccaaaaacagtggataattttgtggccttagctacaggagagaaaggatttggctacaaaaacagcaaattccatcgtgtaatcaaggacttcatgatccagggcggagacttcaccaggggagatggcacaggaggaaagagcatctacggtgagcgcttccccgatgagaacttcaaactgaagcactacgggcctggctgggtgagcatggccaacgcaggcaaagacaccaacggctcccagttcttcatcacgacagtcaagacagcctggctagatggcaagcatgtggtgtttggcaaagttctagagggcatggaggtggtgcggaaggtggagagcaccaagacagacagccgggataaacccctgaaggatgtgatcatcgcagactgcggcaagatcgaggtggagaagccctttgccatcgccaaggagtagggcacagggacatctttctttgagtgaccgtctgtgcaggccctgtagtccgccacagggctctgagctgcactggccccggtgctggcatctggtggagcggacccactcccctcacattccacaggcccatggactcacttttgtaacaaactcctaccaacactgaccaataaaaaaaaatgtgggtttttttttttttaatatataa

SEQ ID NO: 164317 - DNA, 1380 bp, Homo sapiens
  Payload ID: 12368
  Gene Symbol: PPIC
  Gene Name: peptidylprolyl isomerase C (cyclophilin C)
  Uniprot ID: P45877
  ENST ID: ENST00000306442
  CDS Start-End: 117-755
ccgcaaccgggagcgcgcaggcgcagccggccggcagtcccgtcagctgtcccagagcctgtgtcgcgcccgtgccggtagcgcccgtgccggtagcgccgctgccaccgctcaccatgggcccgggtcctcggctgctgctacctctcgtgctttgcgtggggctcggcgcacttgtgttttcttcgggggccgagggcttccgcaagcgaggcccctcggtgacggccaaggtcttctttgatgtgaggattggagacaaagatgttggcagaattgtgattggcctctttggaaaagttgtgcccaagacagtggaaaattttgttgctctagcaacaggagagaaaggatatggatataaaggaagcaagtttcatcgtgtcatcaaggatttcatgattcaaggaggtgacatcaccactggagatggcactgggggtgtgagcatctatggtgagacatttccagatgagaacttcaagctgaagcactatggcattgggtgggtcagcatggccaacgctgggcctgacaccaatggctctcagttctttatcaccttgaccaagcccacctggttggacggcaaacatgtggtgtttggaaaagtcattgatgggatgacagtggtgcactccatagagctccaagcaactgatgggcatgaccgtccactcaccaactgctcgatcatcaacagtggcaagatagacgtgaaaacgccttttgtggttgagatcgctgattggtgacacaactggcagaaaacaaggatatgctttggcaggggtgtgtgtgtgtgtgtgtgtgtgtgtgtgttgtgttgtctttcaattatttgcttttttttttttactttctttttgtattctatcccagatcacaggaaagttataaaaatcaaaccgtcaccctttagtttgcttgaactttagtaaaccacctgcttagggactttgaacttaaatatatccccttcctcaagtggtgctattttaaaactaaaaaaaactttgaattggctatttttttaatgcaatattttttttctgaattcattatgatccccatattgggtaatgctgaacatttatctgaaacagatgaggatattattattttgtatccaaacagaaattcagataaagggaaatttgactagtgtaatctgagatatgtcatagggatttctttctgacaaaagggtgctttgctgttctttatattaaatacttttagatcaactctttttgcaagactttttaaaaatgtaaagttctttaagaaatatacaaaaatacacacactctagcattaacagtgaacagattagaaagattttataaatcaaactacaaacataattagataactcag

SEQ ID NO: 164318 - DNA, 1823 bp, Homo sapiens
  Payload ID: 12369
  Gene Symbol: PPID
  Gene Name: peptidylprolyl isomerase D
  Uniprot ID: Q08752
  ENST ID: ENST00000307720
  CDS Start-End: 109-1221
ggtcagcgtcgctgccggtctccggcggagacggactctggagtttgggcggcccgggcggccactaggtactctgatattccgtactaaacacgtctgcaagtcaagatgtcgcacccgtccccccaagccaagccctccaaccccagtaaccctcgagtcttctttgacgtggacatcggaggggagcgagttggtcgaattgtcttagaattgtttgcagatatcgtacccaaaactgcggaaaattttcgtgcactgtgtacaggagaaaaaggcattggacacacgactgggaaacctctccatttcaaaggatgcccttttcatcgaattattaagaaatttatgattcagggtggagacttctcaaatcagaatgggacaggtggagaaagtatttatggtgaaaaatttgaagatgaaaatttccattacaagcatgatcgggagggtttactgagcatggcaaatgcaggccgcaacacaaacggttctcagttttttatcacaacagttccaactcctcatttggatgggaaacatgtggtgtttggccaagtaattaaaggaataggagtggcaaggatattggaaaatgtggaagtgaaaggtgaaaaacctgctaaattgtgcgttattgcagaatgtggagaattgaaggaaggagatgacgggggaatattcccaaaagatggctctggcgacagtcatccagatttccctgaggatgcggatatagatttaaaagatgtagataaaattttattaataacagaagacttaaaaaacattggaaatacttttttcaaatcccagaactgggagatggctattaaaaaatatgcagaagttttaagatacgtggacagttcaaaggctgttattgagacagcagatagagccaagctgcaacctatagctttaagctgtgtactgaatattggtgcttgtaaactgaagatgtcaaattggcagggagcaattgacagttgtttagaggctcttgaactagacccatcaaataccaaagcattgtaccgcagagctcaaggatggcaaggattaaaagaatatgatcaagcattggctgatcttaagaaagctcaggggatagcaccagaagataaagctatccaggcagaattgctgaaagtcaaacaaaagataaaggcacagaaagataaagagaaggcagtatatgcaaaaatgtttgcttagaaaggattcagttttgcttattgtgtgttgattgtataaatgcaataagaaaatgtaaaggtttttgtctatgaatatgatccctaatgtgtttcttttgacaccttagttccttactgtttacagtttaggagtactgataggggttcatgcttaataaacatgtcacaatacagtaagtaaagtggttttgtttgtttctttgagatggagtcttgctctgtcacccaggctggagtgcggtggcgcaatctcggctcactgcatcctctgcctcccgggttcaagcaattctcctgcctcagcttcccaagtagctgggattacaggcacgtgccaccacgcccagctaatttttgtatttttagtagagatggggtttcaccatattggtcacgtcacgttggtcttgaactcctgaccttgtgatccaccccgccttggcctcccaaagtgctgggattacaggtgtgagccaccgtgcccggccaagtaaaatgttttttaaaatggttatgtgcattattcataaaaaataatggtgtccagtctttttaaacttgtaaagacacatcttattgaataaagagatgagagcttaa

SEQ ID NO: 164319 - DNA, 789 bp, Homo sapiens
  Payload ID: 12369
  Gene Symbol: PPID
  Gene Name: peptidylprolyl isomerase D
  ENST ID: ENST00000507213
  CDS Start-End: 1-147
aaagcattgtaccgcagagctcaaggatggcaaggattaaaagaatatgatcaagcattggctgatcttaagaaagctcaggggatagcaccagaagataaaggtaagttggcagcttttgtagtgaaagttaattttgttatttaaatacttatcctcaggaaccattgttcactttgccagattttagatgtttgttcaacagacactacagaatgcctgctgttgggccaggcattatcatatagcaatgaacaagacagtcaaagtccctgccctcaaagagcttacattctactcccattcaagaatatagtagtttttcacgttatttattcttcaagttatcatctctgtagttttttatatgtctaaatactgtttgtcttatggtatcctttgagactgtgttcctattctggttagtctagtcgagagctcagcattgtaagacacagtattcatggtaaatttaacatttgggaccattcaagttgaatgtggctataaccttagtattgatgtactggttatatgttttaggaaactatgacaaaaataagcttgtttttcaaataaaccaactatgaatagtgacactagatctgggtattacaaaatgtctttggtctcttattactaaaatgaaacaagggaagcaattactgttctctaatgtagaggcagaaggcaaatcttgatgtacttgagttctctcagttgacatcctctaaaattacgtttcatttctgtgtttgtgtgattgctcagattttctgttactagggc

SEQ ID NO: 164320 - DNA, 594 bp, Homo sapiens
  Payload ID: 12369
  Gene Symbol: PPID
  Gene Name: peptidylprolyl isomerase D
  ENST ID: ENST00000512699
  CDS Start-End: 1-59
ggatattggaaaatgtggaagtgaaaggtgaaaaacctgctaaaaatgtggagaattgaaggaaggagatgacgggggaatattcccaaaagatggctctggcgacagtcatccagatttccctgaggatgcggatatagatttaaaagatgtagataaaattttattaataacagaagacttaaaaaacattggaaatacttttttcaaatcccagaactgggagatggctattaaaaaatatgcagaagttttaagatacgtggacagttcaaaggctgttattgagacagcagatagagccaagctgcaacctatagctttaagctgtgtactgaatattggtgcttgtaaactgaagatgtcaaattggcagggagcaattgacagttgtttagaggctcttgaactagacccatcaaataccaaagcattgtaccgcagagctcaaggatggcaaggattaaaagaatatgatcaagcattggctgatcttaagaaagctcaggggatagcaccagaagataaagctatccaggcagaattgctgaaagtcaaacaaaagataaaggcacagaaagataaagagaaggc

SEQ ID NO: 164321 - DNA, 2166 bp, Homo sapiens
  Payload ID: 12370
  Gene Symbol: PPWD1
  Gene Name: peptidylprolyl isomerase domain and WD repeat containing 1
  Uniprot ID: Q96BP3
  ENST ID: ENST00000261308
  CDS Start-End: 73-2013
agaagactgcgccgctgctttgggattggtagctgagttttgtgtcgcgccttttctgacgatgcgaacaacatggcggcggaaagtggtagcgattttcagcagagacgtagaaggcgccgggacccggaggaaccggaaaaaacagaactcagcgaaagagagctggcagtagcagtggcggtgtcccaggagaacgatgaggagaacgaagagcgctgggttggacctttacctgtggaggcaacactggccaagaagaggaaagtcttagagtttgaaagagtctatcttgataatctccccagtgcatccatgtatgagcgcagttacatgcatagagatgttatcacccatgtggtatgcaccaaaacagattttattattactgccagtcatgatggacatgtcaagttctggaaaaaaatagaagagggaattgaatttgttaaacattttcgtagtcacctgggagttattgagagtattgcagttagctctgagggagcattgttctgttctgtgggtgatgataaagcaatgaaggtgtttgatgtagtgaactttgacatgatcaacatgctgaaacttggctattttcctggacagtgtgagtggatctattgcccaggggatgcaatttcttcagttgctgcttccgaaaagagtacaggaaaaattttcatttatgatggccgaggagataaccagccacttcatatttttgacaaactccatacatcacctcttactcagatacggctaaacccagtttacaaagcagtagtgtcttctgacaaatctgggatgattgaatactggactgggcctcctcatgaatataaattccccaaaaatgtgaactgggaatataaaactgacactgatttatatgaatttgccaagtgtaaggcttatccaaccagcgtatgtttttcaccagatgggaagaaaatagctactattggttctgatagaaaagttagaattttcagatttgtaactggaaaactcatgagagtctttgatgaatcactaagcatgtttactgaactgcaacagatgaggcaacagttaccagacatggaatttggccgacgaatggctgtagaacgtgagttggagaaggttgatgctgtaagattaattaatatagtttttgatgaaactggacacttcgtgctgtatggaacaatgctgggcattaaagttataaatgtagagacaaaccggtgtgtgcggattttaggcaaacaagaaaatattagagtgatgcaattggctttgttccaggggatagccaaaaagcatcgtgctgcaactactatagaaatgaaagcttctgaaaatcctgttcttcagaatattcaagctgacccaacaatagtctgtacatcattcaaaaagaatagattttatatgtttaccaaacgagaaccagaagatacgaaaagtgcagattctgatcgagatgtttttaatgagaaaccttctaaagaagaagtcatggcagctactcaagctgaaggacctaaacgagtttcggacagtgccattatccacaccagcatgggagacattcacaccaaactttttcctgttgagtgccctaagacagtggaaaacttctgtgttcacagcagaaatggttattataatgggcatacatttcaccgtataattaagggctttatgattcagactggagatccaacaggtactggtatgggaggagaaagcatatggggaggagaatttgaagatgaatttcattcaacattacgacatgacaggccatacacactcagcatggctaacgcgggatcaaatactaatggatcccagtttttcataacggtagtaccaacgccttggcttgataataagcatacagtatttggacgagtgactaaaggaatggaagttgtacagaggatctccaacgtcaaagtcaatcccaaaacagataagccctatgaggatgtcagcatcataaatattactgtcaagtaaaataagatttgttttaatgtacttgcaaataaaaatacaatattaaacagattattttacattaggaagcttaggacttgctgaatatacagatcatgtttcaaagatacagtatttttgtattttttattaaaggctattttttaaaaatta

SEQ ID NO: 164322 - DNA, 596 bp, Homo sapiens
  Payload ID: 12370
  Gene Symbol: PPWD1
  Gene Name: peptidylprolyl isomerase domain and WD repeat containing 1
  ENST ID: ENST00000514172
  CDS Start-End: 1-399
tataaattccccaaaaatgtgaactgggaatataaaactgacactgatttatatgaatttgccaagtgtaaggcttatccaaccagcgtatgtttttcaccagatgggaagaaaatagctactattggttctgatagaaaagttagaattttcagatttgtaactggaaaactcatgagagtctttgatgaatcactaagcatgtttactgaactgcaacagatgaggcaacagttaccagacatggaatttggccgacgaatggctgtagaacgtgagttggagaaggttgatgctgtaagattaattaatatagtttttgatgaaactggacacttcgtgctgtatggaacaatgctgggcattaaagttataaatgtagagacaaaccggggatagccaaaaagcatcgtgctgcaactactatagaaatgaaagcttctgaaaatcctgttcttcagaatattcaagctgacccaacaatagtctgtacatcattcaaaaagaatagattttatatgtttaccaaacgagaaccagaagatacgaaaagtgcagattctgatcgagatgtttttaatgagaaaccttctaaa

SEQ ID NO: 164323 - DNA, 829 bp, Homo sapiens
  Payload ID: 12370
  Gene Symbol: PPWD1
  Gene Name: peptidylprolyl isomerase domain and WD repeat containing 1
  ENST ID: ENST00000505380
  CDS Start-End: 106-829
tgttaatgtattaatgtgttggggcgcgagaggaaggcggtgcttatttcgaatcatgtcttagagtttgaaagagtctatcttgataatctccccagtgcatccatgtatgagcgcagttacatgcatagagatgttatcacccatgtggtatgcaccaaaacagattttattattactgccagtcatgatggacatgtcaagttctggaaaaaaatagaagagggaattgaatttgttaaacattttcgtagtcacctgggagttattgagagtattgcagttagctctgagggagcattgttctgttctgtgggtgatgataaagcaatgaaggtgtttgatgtagtgaactttgacatgatcaacatgctgaaacttggctattttcctggacagtgtgagtggatctattgcccaggggatgcaatttcttcagttgctgcttccgaaaagagtacaggaaaaattttcatttatgatggccgaggagataaccagccacttcatatttttgacaaactccatacatcacctcttactcagatacggctaaacccagtttacaaagcagtagtgtcttctgacaaatctgggatgattgaatactggactgggcctcctcatgaatataaattccccaaaaatgtgaactgggaatataaaactgacactgatttatatgaatttgccaagtgtaaggcttatccaaccagcgtatgtttttcaccagatgggaagaaaatagctactattggttctgatagaaaagttagaattttcagatttgtaactggaaaactcatgagagtctttgatgaatcactaa

SEQ ID NO: 164324 - DNA, 2019 bp, Homo sapiens
  Payload ID: 12370
  Gene Symbol: PPWD1
  Gene Name: peptidylprolyl isomerase domain and WD repeat containing 1
  ENST ID: ENST00000510930
  CDS Start-End: 16-222
gacgatgcgaacaacatggcggcggaaagtggtagcgattttcagcagagacgtagaaggcgccgggacccggaggaaccggaaaaaacagaactcagcgaaagagagctggcagtagcagtggcggtgtcccaggagaacgatgaggagaacgaagagcgctgggttggacctttacctgtggaggcaacactggccaagaagaggaaagcagccacatgaagttggaatttcgaactcttatttagtcttagagtttgaaagagtctatcttgataatctccccagtgcatccatgtatgagcgcagttacatgcatagagatgttatcacccatgtggtatgcaccaaaacagattttattattactgccagtcatgatggacatgtcaagttctggaaaaaaatagaagagggaattgaatttgttaaacattttcgtagtcacctgggagttattgagagtattgcagttagctctgagggagcattgttctgttctgtgggtgatgataaagcaatgaaggtgtttgatgtagtgaactttgacatgatcaacatgctgaaacttggctattttcctggacagtgtgagtggatctattgcccaggggatgcaatttcttcagttgctgcttccgaaaagagtacaggaaaaattttcatttatgatggccgaggagataaccagccacttcatatttttgacaaactccatacatcacctcttactcagatacggctaaacccagtttacaaagcagtagtgtcttctgacaaatctgggatgattgaatactggactgggcctcctcatgaatataaattccccaaaaatgtgaactgggaatataaaactgacactgatttatatgaatttgccaagtgtaaggcttatccaaccagcgtatgtttttcaccagatgggaagaaaatagctactattggttctgatagaaaagttagaattttcagatttgtaactggaaaactcatgagagtctttgatgaatcactaagcatgtttactgaactgcaacagatgaggcaacagttaccagacatggaatttggccgacgaatggctgtagaacgtgagttggagaaggttgatgctgtaagattaattaatatagtttttgatgaaactggacacttcgtgctgtatggaacaatgctgggcattaaagttataaatgtagagacaaaccggtgtgtgcggattttaggcaaacaagaaaatattagagtgatgcaattggctttgttccaggggatagccaaaaagcatcgtgctgcaactactatagaaatgaaagcttctgaaaatcctgttcttcagaatattcaagctgacccaacaatagtctgtacatcattcaaaaagaatagattttatatgtttaccaaacgagaaccagaagatacgaaaagtgcagattctgatcgagatgtttttaatgagaaaccttctaaagaagaagtcatggcagctactcaagctgaaggacctaaacgagtttcggacagtgccattatccacaccagcatgggagacattcacaccaaactttttcctgttgagtgccctaagacagtggaaaacttctgtgttcacagcagaaatggttattataatgggcatacatttcaccgtataattaagggctttatgattcagactggagatccaacaggtactggtatgggaggagaaagcatatggggaggagaatttgaagatgaatttcattcaacattacgacatgacaggccatacacactcagcatggctaacgcgggatcaaatactaatggatcccagtttttcataacggtagtaccaacgccttggcttgataataagcatacagtatttggacgagtgactaaaggaatggaagttgtacagaggatctccaacgtcaaagtcaatcccaaaacagataagccctatgaggatgtcagcatcataaatattactgtcaagtaaaataagatttgttttaatgtacttgc

SEQ ID NO: 164325 - DNA, 580 bp, Homo sapiens
  Payload ID: 12370
  Gene Symbol: PPWD1
  Gene Name: peptidylprolyl isomerase domain and WD repeat containing 1
  ENST ID: ENST00000515447
  CDS Start-End: 19-342
tctgacgatgcgaacaacatggcggcggaaagtggtagcgattttcagcagagacgtagaaggcgccgggacccggaggaaccggaaaaaacagaactcagcgaaagagagctggcagtagcagtggcggtgtcccaggagaacgatgaggagaacgaagagcgctgggttggacctttacctgtggaggcaacactggccaagaagaggaaagtcttagagtttgaaagagtctatcttgataatctccccagtgcatccatgtatgagcgcagttacatgcatagagatgttatcacccatgtggtatgcaccaaattttattattactgccagtcatgatggacatgtcaagttctggaaaaaaatagaagagggaattgaatttgttaaacattttcgtagtcacctgggagttattgagagtattgcagttagctctgagggagcattgttctgttctgtgggtgatgataaagcaatgaaggtgtttgatgtagtgaactttgacatgatcaacatgctgaaacttggctattttcctggacagtgtgagtggatctattgcccaggggatgca

SEQ ID NO: 164326 - DNA, 1981 bp, Homo sapiens
  Payload ID: 12370
  Gene Symbol: PPWD1
  Gene Name: peptidylprolyl isomerase domain and WD repeat containing 1
  ENST ID: ENST00000511908
  CDS Start-End: 13-267
gatgcgaacaacatggcggcggaaagtggtagcgattttcagcagagacgtagaaggcgccgggacccggaggaaccggaaaaaacagaactcagcgaaagagagctggcagtagcagtggcggtgtcccaggagaacgatgaggagaacgaagagcgctgggttggacctttacctgtggaggcaacactggccaagaagaggaaagaacagattttattattactgccagtcatgatggacatgtcaagttctggaaaaaaatagaagagggaattgaatttgttaaacattttcgtagtcacctgggagttattgagagtattgcagttagctctgagggagcattgttctgttctgtgggtgatgataaagcaatgaaggtgtttgatgtagtgaactttgacatgatcaacatgctgaaacttggctattttcctggacagtgtgagtggatctattgcccaggggatgcaatttcttcagttgctgcttccgaaaagagtacaggaaaaattttcatttatgatggccgaggagataaccagccacttcatatttttgacaaactccatacatcacctcttactcagatacggctaaacccagtttacaaagcagtagtgtcttctgacaaatctgggatgattgaatactggactgggcctcctcatgaatataaattccccaaaaatgtgaactgggaatataaaactgacactgatttatatgaatttgccaagtgtaaggcttatccaaccagcgtatgtttttcaccagatgggaagaaaatagctactattggttctgatagaaaagttagaattttcagatttgtaactggaaaactcatgagagtctttgatgaatcactaagcatgtttactgaactgcaacagatgaggcaacagttaccagacatggaatttggccgacgaatggctgtagaacgtgagttggagaaggttgatgctgtaagattaattaatatagtttttgatgaaactggacacttcgtgctgtatggaacaatgctgggcattaaagttataaatgtagagacaaaccggtgtgtgcggattttaggcaaacaagaaaatattagagtgatgcaattggctttgttccaggggatagccaaaaagcatcgtgctgcaactactatagaaatgaaagcttctgaaaatcctgttcttcagaatattcaagctgacccaacaatagtctgtacatcattcaaaaagaatagattttatatgtttaccaaacgagaaccagaagatacgaaaagtgcagattctgatcgagatgtttttaatgagaaaccttctaaagaagaagtcatggcagctactcaagctgaaggacctaaacgagtttcggacagtgccattatccacaccagcatgggagacattcacaccaaactttttcctgttgagtgccctaagacagtggaaaacttctgtgttcacagcagaaatggttattataatgggcatacatttcaccgtataattaagggctttatgattcagactggagatccaacaggtactggtatgggaggagaaagcatatggggaggagaatttgaagatgaatttcattcaacattacgacatgacaggccatacacactcagcatggctaacgcgggatcaaatactaatggatcccagtttttcataacggtagtaccaacgccttggcttgataataagcatacagtatttggacgagtgactaaaggaatggaagttgtacagaggatctccaacgtcaaagtcaatcccaaaacagataagccctatgaggatgtcagcatcataaatattactgtcaagtaaaataagatttgttttaatgtacttgcaaataaaaatacaatattaaacagattattttacattaggaagcttaggacttgctgaatatacagatcatgtttcaaagatacagtatttttgtattttttatt

SEQ ID NO: 164327 - DNA, 570 bp, Homo sapiens
  Payload ID: 12370
  Gene Symbol: PPWD1
  Gene Name: peptidylprolyl isomerase domain and WD repeat containing 1
  ENST ID: ENST00000502703
  CDS Start-End: 249-570
aaggctttagttcaggagtggtgttaatgtattaatgtgttggggcgcgagaggaaggcggtgcttatttcgaatcatgtcttagagtttgaaagagtctatcttgataatctccccagtgcatccatgtatgagcgcagttacatgcatagagatgttatcacccatgtggtatgcaccaaacaatggaaggtaatacagagaatataggttttgtggtgtggtagattgaaagccactctagctatatggacctgagaacagattttattattactgccagtcatgatggacatgtcaagttctggaaaaaaatagaagagggaattgaatttgttaaacattttcgtagtcacctgggagttattgagagtattgcagttagctctgagggagcattgttctgttctgtgggtgatgataaagcaatgaaggtgtttgatgtagtgaactttgacatgatcaacatgctgaaacttggctattttcctggacagtgtgagtggatctattgcccaggggatgcaatttcttcagttgctgcttccgaaaagagtacaggaaaaattt

SEQ ID NO: 164328 - DNA, 592 bp, Homo sapiens
  Payload ID: 12370
  Gene Symbol: PPWD1
  Gene Name: peptidylprolyl isomerase domain and WD repeat containing 1
  ENST ID: ENST00000503435
  CDS Start-End: 22-348
ttttctgacgatgcgaacaacatggcggcggaaagtggtagcgattttcagcagagacgtagaaggcgccgggacccggaggaaccggaaaaaacagaactcagcgaaagagagctggcagtagcagtggcggtgtcccaggagaacgatgaggagaacgaagagcgctgggttggacctttacctgtggaggcaacactggccaagaagaggaaagtcttagagtttgaaagagtctatcttgataatctccccagtgcatccatgtatgagcgcagttacatgcatagagatgttatcacccatgtggtatgcaccaaacaatggaaggtaatacagagaatataggttttgtggtgtggtagattgaaagccactctagctatatggacctgagaacagattttattattactgccagtcatgatggacatgtcaagttctggaaaaaaatagaagagggaattgaatttgttaaacattttcgtagtcacctgggagttattgagagtattgcagttagctctgagggagcattgttctgttctgtgggtgatgataaagcaatgaaggtgtttgatgtagtgaactt

SEQ ID NO: 164329 - DNA, 2195 bp, Homo sapiens
  Payload ID: 12370
  Gene Symbol: PPWD1
  Gene Name: peptidylprolyl isomerase domain and WD repeat containing 1
  ENST ID: ENST00000535264
  CDS Start-End: 200-2050
agaagactgcgccgctgctttgggattggtagctgagttttgtgtcgcgccttttctgacgatgcgaacaacatggcggcggaaagtggtagcgattttcagcagagacgtagaaggcgccgggacccggaggaaccggaaaaaacagaactcagcgaaagagagctggcagtagcagtggcggtgtcccaggagaacgatgaggagaacgaagagcgctgggttggacctttacctgtggaggcaacactggccaagaagaggaaagcagccacatgaagttggaatttcgaactcttatttagtcttagagtttgaaagagtctatcttgataatctccccagtgcatccatgtatgagcgcagttacatgcatagagatgttatcacccatgtggtatgcaccaaaacagattttattattactgccagtcatgatggacatgtcaagttctggaaaaaaatagaagagggaattgaatttgttaaacattttcgtagtcacctgggagttattgagagtattgcagttagctctgagggagcattgttctgttctgtgggtgatgataaagcaatgaaggtgtttgatgtagtgaactttgacatgatcaacatgctgaaacttggctattttcctggacagtgtgagtggatctattgcccaggggatgcaatttcttcagttgctgcttccgaaaagagtacaggaaaaattttcatttatgatggccgaggagataaccagccacttcatatttttgacaaactccatacatcacctcttactcagatacggctaaacccagtttacaaagcagtagtgtcttctgacaaatctgggatgattgaatactggactgggcctcctcatgaatataaattccccaaaaatgtgaactgggaatataaaactgacactgatttatatgaatttgccaagtgtaaggcttatccaaccagcgtatgtttttcaccagatgggaagaaaatagctactattggttctgatagaaaagttagaattttcagatttgtaactggaaaactcatgagagtctttgatgaatcactaagcatgtttactgaactgcaacagatgaggcaacagttaccagacatggaatttggccgacgaatggctgtagaacgtgagttggagaaggttgatgctgtaagattaattaatatagtttttgatgaaactggacacttcgtgctgtatggaacaatgctgggcattaaagttataaatgtagagacaaaccggtgtgtgcggattttaggcaaacaagaaaatattagagtgatgcaattggctttgttccaggggatagccaaaaagcatcgtgctgcaactactatagaaatgaaagcttctgaaaatcctgttcttcagaatattcaagctgacccaacaatagtctgtacatcattcaaaaagaatagattttatatgtttaccaaacgagaaccagaagatacgaaaagtgcagattctgatcgagatgtttttaatgagaaaccttctaaagaagaagtcatggcagctactcaagctgaaggacctaaacgagtttcggacagtgccattatccacaccagcatgggagacattcacaccaaactttttcctgttgagtgccctaagacagtggaaaacttctgtgttcacagcagaaatggttattataatgggcatacatttcaccgtataattaagggctttatgattcagactggagatccaacaggtactggtatgggaggagaaagcatatggggaggagaatttgaagatgaatttcattcaacattacgacatgacaggccatacacactcagcatggctaacgcgggatcaaatactaatggatcccagtttttcataacggtagtaccaacgccttggcttgataataagcatacagtatttggacgagtgactaaaggaatggaagttgtacagaggatctccaacgtcaaagtcaatcccaaaacagataagccctatgaggatgtcagcatcataaatattactgtcaagtaaaataagatttgttttaatgtacttgcaaataaaaatacaatattaaacagattattttacattaggaagcttaggacttgctgaatatacagatcatgtttcaaagatacagtatttttgtattttttattaaaggctatttttt

SEQ ID NO: 164330 - DNA, 2055 bp, Homo sapiens
  Payload ID: 12370
  Gene Symbol: PPWD1
  Gene Name: peptidylprolyl isomerase domain and WD repeat containing 1
  Uniprot ID: Q96BP3
  ENST ID: ENST00000538977
  CDS Start-End: 438-1910
agaagactgcgccgctgctttgggattggtagctgagttttgtgtcgcgccttttctgacgatgcgaacaacatggcggcggaaagtggtagcgattttcagcagagacgtagaaggcgccgggacccggaggaaccggaaaaaacagaactcagcgaaagagagctggcagtagcagtggcggtgtcccaggagaacgatgaggagaacgaagagcgctgggttggacctttacctgtggaggcaacactggccaagaagaggaaagaacagattttattattactgccagtcatgatggacatgtcaagttctggaaaaaaatagaagagggaattgaatttgttaaacattttcgtagtcacctgggagttattgagagtattgcagttagctctgagggagcattgttctgttctgtgggtgatgataaagcaatgaaggtgtttgatgtagtgaactttgacatgatcaacatgctgaaacttggctattttcctggacagtgtgagtggatctattgcccaggggatgcaatttcttcagttgctgcttccgaaaagagtacaggaaaaattttcatttatgatggccgaggagataaccagccacttcatatttttgacaaactccatacatcacctcttactcagatacggctaaacccagtttacaaagcagtagtgtcttctgacaaatctgggatgattgaatactggactgggcctcctcatgaatataaattccccaaaaatgtgaactgggaatataaaactgacactgatttatatgaatttgccaagtgtaaggcttatccaaccagcgtatgtttttcaccagatgggaagaaaatagctactattggttctgatagaaaagttagaattttcagatttgtaactggaaaactcatgagagtctttgatgaatcactaagcatgtttactgaactgcaacagatgaggcaacagttaccagacatggaatttggccgacgaatggctgtagaacgtgagttggagaaggttgatgctgtaagattaattaatatagtttttgatgaaactggacacttcgtgctgtatggaacaatgctgggcattaaagttataaatgtagagacaaaccggtgtgtgcggattttaggcaaacaagaaaatattagagtgatgcaattggctttgttccaggggatagccaaaaagcatcgtgctgcaactactatagaaatgaaagcttctgaaaatcctgttcttcagaatattcaagctgacccaacaatagtctgtacatcattcaaaaagaatagattttatatgtttaccaaacgagaaccagaagatacgaaaagtgcagattctgatcgagatgtttttaatgagaaaccttctaaagaagaagtcatggcagctactcaagctgaaggacctaaacgagtttcggacagtgccattatccacaccagcatgggagacattcacaccaaactttttcctgttgagtgccctaagacagtggaaaacttctgtgttcacagcagaaatggttattataatgggcatacatttcaccgtataattaagggctttatgattcagactggagatccaacaggtactggtatgggaggagaaagcatatggggaggagaatttgaagatgaatttcattcaacattacgacatgacaggccatacacactcagcatggctaacgcgggatcaaatactaatggatcccagtttttcataacggtagtaccaacgccttggcttgataataagcatacagtatttggacgagtgactaaaggaatggaagttgtacagaggatctccaacgtcaaagtcaatcccaaaacagataagccctatgaggatgtcagcatcataaatattactgtcaagtaaaataagatttgttttaatgtacttgcaaataaaaatacaatattaaacagattattttacattaggaagcttaggacttgctgaatatacagatcatgtttcaaagatacagtatttttgtattttttattaaaggctatttttt

SEQ ID NO: 164331 - DNA, 1277 bp, Homo sapiens
  Payload ID: 12371
  Gene Symbol: PPIE
  Gene Name: peptidylprolyl isomerase E (cyclophilin E)
  Uniprot ID: Q9UNP9
  ENST ID: ENST00000324379
  CDS Start-End: 20-925
ggaaaagcgcgcgagcaagatggccaccaccaagcgcgtcttgtacgtgggtggactggcagaggaagtggacgacaaagttcttcatgctgcgttcattccttttggagacatcacagatattcagattcctctggattatgaaacagaaaagcaccgaggatttgcttttgttgaatttgagttggcagaggatgctgcagcagctatcgacaacatgaatgaatctgagctttttggacgtacaattcgtgtcaatttggccaaaccaatgagaattaaggaaggctcttccaggccagtttggtcagatgatgactggttgaagaagttttctgggaagacgcttgaagagaataaagaggaagaagggtcagagcctcccaaagcagagacccaggagggagagcccattgctaaaaaggcccgctcaaatcctcaggtgtacatggacatcaagattgggaacaagccggctggccgcatccagatgctcctgcgttctgatgtcgtgcccatgacagcagagaatttccgctgcctgtgcactcatgaaaagggctttggctttaagggaagcagcttccaccgcatcatcccccagttcatgtgccagggcggtgatttcacaaaccacaatggcactgggggcaagtccatctatgggaagaagttcgatgatgaaaactttatcctcaagcatacgggaccaggtctactatccatggccaactctggcccaaacaccaatggctctcagttcttcctgacatgtgacaagacagactggctggatggcaagcatgtggtgtttggagaggtcaccgaaggcctagatgtcttgcggcaaattgaggcccagggcagcaaggacgggaagccaaagcagaaggtgatcatcgccgactgtggggagtacgtgtgaggcggcactctctctgcttccccctccgctcttgaccctgcatatccaggaaggaactgccagcctcagaggaggcagcaccgagggtgcctgtttgaagcaagcagcatttgggatatgtgcccttcctcagggtctgcttggagcagctcctctgcaggcacagcctggactattcccaggcacagctgtgggcccaggagccagctcaggtgctcccctccaccatgggcaggctgtgcaaaaagccactggcttttctcagcatttgctgctgggcctctcctgggactaccagtgtggctcttacgtgttttctttgctaaaataaaccctagttcttatattgctc

SEQ ID NO: 164332 - DNA, 1079 bp, Homo sapiens
  Payload ID: 12371
  Gene Symbol: PPIE
  Gene Name: peptidylprolyl isomerase E (cyclophilin E)
  Uniprot ID: Q9UNP9
  ENST ID: ENST00000356511
  CDS Start-End: 17-907
aaagcgcgcgagcaagatggccaccaccaagcgcgtcttgtacgtgggtggactggcagaggaagtggacgacaaagttcttcatgctgcgttcattccttttggagacatcacagatattcagattcctctggattatgaaacagaaaagcaccgaggatttgcttttgttgaatttgagttggcagaggatgctgcagcagctatcgacaacatgaatgaatctgagctttttggacgtacaattcgtgtcaatttggccaaaccaatgagaattaaggaaggctcttccaggccagtttggtcagatgatgactggttgaagaagttttctgggaagacgcttgaagagaataaagaggaagaagggtcagagcctcccaaagcagagacccaggagggagagcccattgctaaaaaggcccgctcaaatcctcaggtgtacatggacatcaagattgggaacaagccggctggccgcatccagatgctcctgcgttctgatgtcgtgcccatgacagcagagaatttccgctgcctgtgcactcatgaaaagggctttggctttaagggaagcagcttccaccgcatcatcccccagttcatgtgccagggcggtgatttcacaaaccacaatggcactgggggcaagtccatctatgggaagaagttcgatgatgaaaactttatcctcaagcatacgggaccaggtctactatccatggccaactctggcccaaacaccaatggctctcagttcttcctgacatgtgacaagacagactggctggatggcaagcatgtggtgtttggagaggtcaccgaaggcctagatgtcttgcggcaaattgagaaacaagaagagtcagcaattaccagccagccgaggtcctggaagctgacgtagagctcgtgccgacggcagacctgccggccgtgggagccgtggacgtcatctgcagggacagaaggggcaaggtcttttctggggttcctactgtgtgcagctactatggggtaccagggtgggggatgccctgatgagcacatttgtcaaataaatgaatgacaggaaacca

SEQ ID NO: 164333 - DNA, 1198 bp, Homo sapiens
  Payload ID: 12371
  Gene Symbol: PPIE
  Gene Name: peptidylprolyl isomerase E (cyclophilin E)
  Uniprot ID: Q9UNP9
  ENST ID: ENST00000372830
  CDS Start-End: 1-945
atggccaccaccaagcgcgtcttgtacgtgggtggactggcagaggaagtggacgacaaagttcttcatgctgcgttcattccttttggagacatcacagatattcagattcctctggattatgaaacagaaaagcaccgaggatttgcttttgttgaatttgagttggcagaggatgctgcagcagctatcgacaacatgaatgaatctgagctttttggacgtacaattcgtgtcaatttggccaaaccaatgagaattaaggaaggctcttccaggccagtttggtcagatgatgactggttgaagaagttttctgggaagacgcttgaagagaataaagaggaagaagggtcagagcctcccaaagcagagacccaggagggagagcccattgctaaaaaggcccgctcaaatcctcaggtgtacatggacatcaagattgggaacaagccggctggccgcatccagatgctcctgcgttctgatgtcgtgcccatgacagcagagaatttccgctgcctgtgcactcatgaaaagggctttggctttaagggaagcagcttccaccgcatcatcccccagttcatgtgccagggcggtgatttcacaaaccacaatggcactgggggcaagtccatctatgggaagaagttcgatgatgaaaactttatcctcaagcatacgggaccaggtctactatccatggccaactctggcccaaacaccaatggctctcagttcttcctgacatgtgacaagacagactggctggatggcaagcatgtggtgtttggagaggtcaccgaaggcctagatgtcttgcggcaaattgaggttgccccagataccaaggcatcaaaagccaggggatccagaaaaaacaaagatggccaagagagaaactgggggaaaagccaaaaggttgagagccacaccatctagaagcttcctgcctgcggtgcggcacagaaacaagaagagtcagcaattaccagccagccgaggtcctggaagctgacgtagagctcgtgccgacggcagacctgccggccgtgggagccgtggacgtcatctgcagggacagaaggggcaaggtcttttctggggttcctactgtgtgcagctactatggggtaccagggtgggggatgccctgatgagcacatttgtcaaataaatgaatgacaggaaacca

SEQ ID NO: 164334 - DNA, 842 bp, Homo sapiens
  Payload ID: 12371
  Gene Symbol: PPIE
  Gene Name: peptidylprolyl isomerase E (cyclophilin E)
  ENST ID: ENST00000372835
  CDS Start-End: 1-753
atggccaccaccaagcgcgtcttgtacgtgggtggactggcagaggaagtggacgacaaagttcttcatgctgcgttcattccttttggagacatcacagatattcagattcctctggattatgaaacagtttggtcagatgatgactggttgaagaagttttctgggaagacgcttgaagagaataaagaggaagaagggtcagagcctcccaaagcagagacccaggagggagagcccattgctaaaaaggcccgctcaaatcctcaggtgtacatggacatcaagattgggaacaagccggctggccgcatccagatgctcctgcgttctgatgtcgtgcccatgacagcagagaatttccgctgcctgtgcactcatgaaaagggctttggctttaagggaagcagcttccaccgcatcatcccccagttcatgtgccagggcggtgatttcacaaaccacaatggcactgggggcaagtccatctatgggaagaagttcgatgatgaaaactttatcctcaagcatacgggaccaggtctactatccatggccaactctggcccaaacaccaatggctctcagttcttcctgacatgtgacaagacagactggctggatggcaagcatgtggtgtttggagaggtcaccgaaggcctagatgtcttgcggcaaattgaggcccagggcagcaaggacgggaagccaaagcagaaggtgatcatcgccgactgtggggagtacgtgtgaggcggcactctctctgcttccccctccgctcttgaccctgcatatccaggaaggaactgccagcctcagaggaggcagcaccgagggtg

SEQ ID NO: 164335 - DNA, 927 bp, Homo sapiens
  Payload ID: 12371
  Gene Symbol: PPIE
  Gene Name: peptidylprolyl isomerase E (cyclophilin E)
  ENST ID: ENST00000470213
  CDS Start-End: 1-627
atggccaccaccaagcgcgtcttgtacgtgggtggactggcagaggaagtggacgacaaagttcttcatgctgcgttcattccttttggagacatcacagatattcagattcctctggattatgaaacagaaaagcaccgaggatttgcttttgttgaatttgagttggcagaggatgctgcagcagctatcgacaacatgaatgaatctgagctttttggacgtacaattcgtgtcaatttggccaaaccaatgagaattaaggaaggctcttccaggccagtttggtcagatgatgactggttgaagaagttttctgggaagacgcttgaagagaataaagaggaagaagggtcagagcctcccaaagcagagacccaggagagaatttccgctgcctgtgcactcatgaaaagggctttggctttaagggaagcagcttccaccgcatcatcccccagttcatgtgccagggcggtgatttcacaaaccacaatggcactgggggcaagtccatctatgggaagaagttcgatgatgaaaactttatcctcaagcatacgggaccaggtctactatccatggccaactctggcccaaacaccaatggctctcagttcttcctgacatgtgacaagacagactggctggatggcaagcatgtggtgtttggagaggtcaccgaaggcctagatgtcttgcggcaaattgaggtatgtggccaggaatgggcctcctccttacccaggccctaggagcacagccctgtgtgagggctggagagtctctgtggcctgagagagatggccaggggctgtgtccagcgggaggggctgctgctgcccaggttccggggtggaagtgggcaaatgggcaggcaggggttggtatccctaaaccactgttagtctccggccttactccctc

SEQ ID NO: 164336 - DNA, 793 bp, Homo sapiens
  Payload ID: 12371
  Gene Symbol: PPIE
  Gene Name: peptidylprolyl isomerase E (cyclophilin E)
  ENST ID: ENST00000474804
  CDS Start-End: 1-114
gccaccaccaagcgcgtcttgtggactggcagaggaagtggacgacaaagttcttcatgctgcgttcattccttttggagacatcacagatattcagattcctctggattatgaaacagaaaagcaccgaggatttgcttttgttgaatttgagttggcagaggatgctgcagcagctatcgacaacatggtatggctgggaatcttaattctaactaaagttgctttttggtggtacagaggctccttattcatatatcagtgttctggacttccaaagttacaaggttgcatggggagaatgaatctgagctttttggacgtacaattcgtgtcaatttggccaaaccaatgagaattaaggaaggctcttccaggccagtttggtcagatgatgactggttgaagaagttttctgggaagacgcttgaagagaataaagaggaagaagggtcagagcctcccaaagcagagacccaggagggagagcccattgctaaaaaggcccgctcaaatcctcaggtgtacatggacatcaagattgggaacaagccggctggccgcatccagatgctcctgcgttctgatgtcgtgcccatgacagcagagaatttccgctgcctgtgcactcatgaaaagggctttggctttaagggaagcagcttccaccgcatcatcccccagttcatgtgccagggcggtgatttcacaaaccacaatggcactgggggcaagtccatctatgggaagaagttcgatgatgaaaactttatcctcaagcatacgggaccag

SEQ ID NO: 164337 - DNA, 913 bp, Homo sapiens
  Payload ID: 12371
  Gene Symbol: PPIE
  Gene Name: peptidylprolyl isomerase E (cyclophilin E)
  ENST ID: ENST00000497370
  CDS Start-End: 275-913
atggccaccaccaagcgcgtcttgtacgtggcatgctaactgggctgcaaggacttctgcaagagtatggagatcagtggctcagaaggcccttggcttatttgcaggtggactggcagaggaagtggacgacaaagttcttcatgctgcgttcattccttttggagacatcacagatattcagattcctctggattatgaaacagaaaagcaccgaggatttgcttttgttgaatttgagttggcagaggatgctgcagcagctatcgacaacatgaatgaatctgagctttttggacgtacaattcgtgtcaatttggccaaaccaatgagaattaaggaaggctcttccaggccagtttggtcagatgatgactggttgaagaagttttctgggaagacgcttgaagagaataaagaggaagaagggtcagagcctcccaaagcagagacccaggagggagagcccattgctaaaaaggcccgctcaaatcctcaggtgtacatggacatcaagattgggaacaagccggctggccgcatccagatgctcctgcgttctgatgtcgtgcccatgacagcagagaatttccgctgcctgtgcactcatgaaaagggctttggctttaagggaagcagcttccaccgcatcatcccccagttcatgtgccagggcggtgatttcacaaaccacaatggcactgggggcaagtccatctatgggaagaagttcgatgatgaaaactttatcctcaagcatacgggaccaggtctactatccatggccaactctggcccaaacaccaatggctctcagttcttcctgacatgtgacaagacagactggctggatggcaagcatgtggtgtttggagaggtcaccgaaggcctagatgtcttgcggcaaattgag

SEQ ID NO: 164338 - DNA, 1213 bp, Homo sapiens
  Payload ID: 12371
  Gene Symbol: PPIE
  Gene Name: peptidylprolyl isomerase E (cyclophilin E)
  ENST ID: ENST00000475350
  CDS Start-End: 1-110
ccaccaagcgcgtcttgtggactggcagaggaagtggacgacaaagttcttcatgctgcgttcattccttttggagacatcacagatattcagattcctctggattatgaaacagaaaagcaccgaggatttgcttttgttgaatttgagttggcagaggatgctgcagcagctatcgacaacatgaatgaatctgagctttttggacgtacaattcgtgtcaatttggccaaaccaatgagaattaaggaaggctcttccaggccagtttggtcagatgatgactggttgaagaagttttctgggaagacgcttgaagagaataaagaggaagaagggtcagagcctcccaaagcagagacccaggaggtgtacatggacatcaagattgggaacaagccggctggccgcatccagatgctcctgcgttctgatgtcgtgcccatgacagcagagaatttccgctgcctgtgcactcatgaaaagggctttggctttaagggaagcagcttccaccgcatcatcccccagttcatgtgccagggcggtgatttcacaaaccacaatggcactgggggcaagtccatctatgggaagaagttcgatgatgaaaactttatcctcaagcatacgggaccaggtctactatccatggccaactctggcccaaacaccaatggctctcagttcttcctgacatgtgacaagacagactggctggatggcaagcatgtggtgtttggagaggtcaccgaaggcctagatgtcttgcggcaaattgaggcccagggcagcaaggacgggaagccaaagcagaaggtgatcatcgccgactgtggggagtacgtgtgaggcggcactctctctgcttccccctccgctcttgaccctgcatatccaggaaggaactgccagcctcagaggaggcagcaccgagggtgcctgtttgaagcaagcagcatttgggatatgtgcccttcctcagggtctgcttggagcagctcctctgcaggcacagcctggactattcccaggcacagctgtgggcccaggagccagctcaggtgctcccctccaccatgggcaggctgtgcaaaaagccactggcttttctcagcatttgctgctgggcctctcctgggactaccagtgtggctcttacgtgttttctttgctaaaataaaccctagttcttatattgctcttcctgcta

SEQ ID NO: 164339 - DNA, 4651 bp, Homo sapiens
  Payload ID: 12371
  Gene Symbol: PPIE
  Gene Name: peptidylprolyl isomerase E (cyclophilin E)
  ENST ID: ENST00000495526
  CDS Start-End: 14-130
gcgcgcgagcaagatggccaccaccaagcgcgtcttgtggactggcagaggaagtggacgacaaagttcttcatgctgcgttcattccttttggagacatcacagatattcagattcctctggattatgaaacagaaaagcaccgaggatttgcttttgttgaatttgagttggcagaggatgctgcagcagctatcgacaacatggtatggctgggaatcttaattctaactaaagttgctttttggtggtacagaggctccttattcatatatcagtgttctggacttccaaagttacaaggttgcatggggagaatgaatctgagctttttggacgtacaattcgtgtcaatttggccaaaccaatgagaattaaggaaggctcttccaggccagtttggtcagatgatgactggttgaagaagttttctgggaagacgcttgaagagaataaagaggaagaagggtcagagcctcccaaagcagagacccaggagggagagcccattgctaaaaaggcccgctcaaatcctcaggtgtacatggacatcaagattgggaacaagccggctggccgcatccagatgctcctgcgttctgatgtcgtgcccatgacagcaggtgagcaggacgctgtggtcagaacggcgggacgctggtggctgagcagtgagcctttcccaggttcttactgcttcacttcttgtgtccttgatattgcttctgacctaagttgatttgaggcatctcagatcctgggatctagtaacagataagtcagagcaggtgtttttgaagctttataagtgctggcttactgttttttaatcgttttttaaaaatacaagtaaataatgtattcttttttttaaagaatagcatatacatatattccaataatatttaagacaataaattgaaaattcattttcccctctctacatccagtcctcaattctagaagtaactagtgcttttattgagtattctttgtaatttattaaatattgacttctattctctttttaatctaaattttattatctagacatataaagagtcaattcagtttcacaaagcttgttttgaaaaaacagtcgtcccctggtgctgtccctgtgccctgctgccaacaccatttgctgctcctcagaggagcggatttcaactcttaggtgttttggtttttatttccatgttgataacagttttatatttctacttcctgttttccattttaaacattatcttctgattttctacttcagagaacaaagaattagttttttaaaatccccttccctgccccctcatcttccctgtataggtaccataattttggttaggtcctaagttattttaacaatgtaagcatcatgtgataacctcctttcatgcacagcattttgttttgcctggaattgataattgccttgtttttgcatagttttctgtgtaatcattcctgattttctcccagaccatcctgctgggggttttgcatccaggtgtctgcatcttgttaaggggagatgagggcaaggctgaattcctcaacattcagtatataaactttcacataatctccatttgtcattatggtacctcagccctcactatgcgtaggatgtcctagtccagagaccctctgctttaacctaccaaagactagacccccagctggctaccaggttggggaggggtggcccccagctgcagagtcagggaaaggatcccaaagattaaccactttcttaaatgggctttcagccaaacttactgtctccaggattacctgcaccctttcctctgagcttttggagtgcaaattgagttgcttcttggcttttaccagcttaagattcagctttctcgggtctgctatatcatttaggactcatctattttgttttctaacttcagaaattttgttgctgttgtctcttcctccctgctttttaagtttattttttggctattttagccactttaaagtgtttgttagcagtaattactctgttcgaaatttttgaatcatcctaaacaaaaccacttattaaaggtacctattaaataataactccccattttctcctccccttagcttctgataacctctaatctttgtgtctatgaattggcctatcctagatttttcatgtaagtggaatcatacaatagctgtccttttccacgccttgttgattttgcatagcataatgctttcaaggttcatccttgtaccatgtatcagtgcctcattcctttttgtggctgaataatattccgttgtatttggataaatatcttgttcattcatttgttgatgggcacttgcacattgttttcaccttttgactattgtaaatgcctgtgtgaatatccacatgtaagtatatgtttaaattcctgttttcaattcttttggatatatatgcctaggaatggaaatgcttagtcatatggtaactctgtatttaactttttgaggaaatgccaaactattttccacagtggctggaccattttacatttctaccagcaatgtatgagtgtttcagtttttccacatcttctctttttttttttttttttttttttttgagacagagtctcgcactgttgcccgggctggagtacagtggcgtgatattggctcactgcaacctccgcctcccaggttcaagtgattcttgtgcctcagcctcccgagtagctgggattacaggcgtctgccaccatgcccagccaattttttgtatttttagtagagacgaggtttcaccatgttggttggccaggctggtctcaaactcctgacctcatgattcgcctgcctcggcctcccatagtgctgggattacaggcgtgagccaccatgcctggcccacatcttctcttaacaggtgtgacatggcatctcattgtggtttttatttttattccctactgactaatgatgttgaacatcttttcatgtgcttgttgaccatttgtatatcttctttggagaaacatcttttcaaatctttggcttatttattaactggattgtttgttttgttttttttaagagacagggtcttgctctgactcccaggctggagtgcagtggtgagaacatggcttactgtagctttgaacccttgacctccagtgatcctcctgccttgacctcccaaagcactgggattacaccgtgcctggccattttgttgttgaattataggagttcattatatattctggatattaaacccatgttaaatatgatttgcaaataagcattctcctgttctgtgggttgctttgccctctattggtacggttctttgatgcacgtcttaaattttgataaaatctaattatttttttctttcacctctgcttttggtgtgacatttaagaaaccatcaccaaatccagagtcatgaagatttgcccctatgttttcttctaagatcctttggtttttcttttaaaaaatcagtttcctaccaatttagtgtggttttaaaagggaacagagctcgaacatgtatattcaatcccccttcaacagaatctcctatagtcctggccaggtgtggtggtttacacctgtaatcccagcactttgggaggccaaggtgggcggatcatctgaggtaggagttctagaccagcttggccaacatagtgaaaccccatctctactaaaaatacaaaattagccaggtgtatggtacatgcctgtagtcccagctactcaagaggctgaggcaggggaatgacttgaacccaagaggtggaagttgcagtgaactgagattgtgccattgcactgcagcatgggcaacaagagtgaaactccgtctcaaggaaaaagaatcccttatagtccttacaagagaatttccgctgcctgtgcactcatgaaaagggctttggctttaagggaagcagcttccaccgcatcatcccccagttcatgtgccagggcggtgatttcacaaaccacaatggcactgggggcaagtccatctatgggaagaagttcgatgatgaaaactttatcctcaagcatacgggaccaggtctactatccatggccaactctggcccaaacaccaatggctctcagttcttcctgacatgtgacaagacagactggctggatggcaagcatgtggtgtttggagaggtcaccgaaggcctagatgtcttgcggcaaattgaggcccagggcagcaaggacgggaagccaaagcagaaggtgatcatcgccgactgtggggagtacgtgtgaggcggcactctctctgcttccccctccgctcttgaccctgcatatccaggaaggaactgccagcctcagaggaggcagcaccgagggtgcctgtttgaagcaagcagcatttgggatatgtgcccttcctcagggtctgcttggagcagctcctctgcaggcacagcctggactattcccaggcacagctgtgggcccaggagccagctcaggtgctcccctccaccatgggcaggctgtgcaaaaagccactggcttttctcagcatttgctgctgggcctctcctgggactaccagtgtggctcttacgtgttttctttgctaaaataaaccctagttcttatattgctcttcctgcta

SEQ ID NO: 164340 - DNA, 947 bp, Homo sapiens
  Payload ID: 12371
  Gene Symbol: PPIE
  Gene Name: peptidylprolyl isomerase E (cyclophilin E)
  ENST ID: ENST00000470018
  CDS Start-End: 733-947
cctatgcctagccatggatcctccattccccaccctcccgttttcccgtcccgcagacggagccggtccccagccgccgccagtctccggcctcggatgttgacacaaacccgaggcggtttacactgagcgggtctggaagctttcagggccccggcaacacctcctccccgcacttgggggtctccccacagcccgggccggccgcctgggctgcactggcgtctgagagctcctgacacaaggctgtgggaaggaacccttttaagccaaactgggggcaaaaggggagccagacatccccgggctgggccacgtgcggggcagggacttctaaggatctgtcgaaagtcggggcggacggctggggattggcctaatcggagcgcggacgctgaagagcagcggcaccccagcctgctgtccatgtgcaggccaggaacccctgactgcctccatgctggcggcagcactttcccaagaacagaagcaggtgctgagtgagtgacccacgcgcctacgaaagaagagagggccagaagctggtgctgacgcagacaccaaggtggactggcagaggaagtggacgacaaagttcttcatgctgcgttcattccttttggagacatcacagatattcagattcctctggattatgaaacagaaaagcaccgaggatttgcttttgttgaatttgagttggcagaggatgctgcagcagctatcgacaacatgaatgaatctgagctttttggacgtacaattcgtgtcaatttggccaaaccaatgagaattaaggaaggctcttccaggccagtttggtcagatgatgactggttgaagaagttttctgggaagacgcttgaagagaataaagaggaagaagggtcagagcctcccaaagcagagacccaggagggagagcccattgctaaaaaggcccgctc

SEQ ID NO: 164341 - DNA, 2190 bp, Homo sapiens
  Payload ID: 12372
  Gene Symbol: PPIF
  Gene Name: peptidylprolyl isomerase F
  Uniprot ID: P30405
  ENST ID: ENST00000225174
  CDS Start-End: 72-695
tctgggcgcgcgcgacgtcagtttgagttctgtgttctccccgcccgtgtcccgcccgacccgcgcccgcgatgctggcgctgcgctgcggctcccgctggctcggcctgctctccgtcccgcgctccgtgccgctgcgcctccccgcggcccgcgcctgcagcaagggctccggcgacccgtcctcttcctcctcctccgggaacccgctcgtgtacctggacgtggacgccaacgggaagccgctcggccgcgtggtgctggagctgaaggcagatgtcgtcccaaagacagctgagaacttcagagccctgtgcactggtgagaagggcttcggctacaaaggctccaccttccacagggtgatcccttccttcatgtgccaggcgggcgacttcaccaaccacaatggcacaggcgggaagtccatctacggaagccgctttcctgacgagaactttacactgaagcacgtggggccaggtgtcctgtccatggctaatgctggtcctaacaccaacggctcccagttcttcatctgcaccataaagacagactggttggatggcaagcatgttgtgttcggtcacgtcaaagagggcatggacgtcgtgaagaaaatagaatctttcggctctaagagtgggaggacatccaagaagattgtcatcacagactgtggccagttgagctaatctgtggccagggtgctggcatggtggcagctgcaaatgtccatgcacccaggtggccgcgttgggctgtcagccaaggtgcctgaaacgatacgtgtgcccactccactgtcacagtgtgcctgaggaaggctgctagggatgttagacctcggccaggacccaccacattgcttcctaatacccacccttcctcacgacctcatttctgggcatctttgtggacatgatgtcacccaccccttgtcaagcattgcctgtgattgcccagcccagattcatctgtgccttggacatggtgatggtgatgggttgccatccaagtgaaagtcttttccttgaccaagggggacagtcagttttgcaaaaggactctaatacctgtttaatattgtcttcctaattgggataatttaattaacaagattgactagaagtgaaactgcaacactaacttccccgtgctgtggtgtgacctgagttggtgacacaggccacagaccccagagcttggcttttgaaacacaactcagggcttttgtgaaggttcccccgctgagatctttcctcctggttactgtgaagcctgttggtttgctgctgtcgtttttgaggagggcccatgggggtaggagcagttgaacctgggaacaaacctcacttgagctgtgcctagacaatgtgaattcctgtgttgctaacagaagtggcctgtaagctcctgtgctccggagggaagcatttcctggtaggctttgatttttctgtgtgttaaagaaattcaatctactcatgatgtgttatgcataaaacatttctggaacatggatttgtgttcaccttaaatgtgaaaataaatcctattttctatggaagactggtacctggtttctggaagaggggtctgtgacttggagctgatctttactgagctcgccgtggcagatgccatgctcaggacgttcatgtggatggtttcatgtcatcgtgctggcaacttgtcctccctgccttagagatgaggctcagacaaacgaccttagcacccatagcctatgccatgagcactggctccaccctgaatcccagctcctccccttagtgaccccaagtctgtttccctcagctgcataaggaggcgatatagtttgaatatttgtccccagccaaatctcatgttgaactgtaatccccagtgctggaggtggggcctgctacgaggtgtttggatcatggggacgggtatttcatggcttggtgctgttttcttgatggtgaattattgcaagatacggtcatttaaaattgtgtggcacctccccctgcccccttcttgctcctgctttcaccatgtgacatgcctgatcccccttcaccttttgccatggtcataagcttcctgaggcctccctggaagctgagcagatgccagcaccatgcttcctgtacatcctgcagaaccataagccaattaaacctttttaataataaatta

SEQ ID NO: 164342 - DNA, 821 bp, Homo sapiens
  Payload ID: 12372
  Gene Symbol: PPIF
  Gene Name: peptidylprolyl isomerase F
  ENST ID: ENST00000448165
  CDS Start-End: 1-497
cgtcctcttcctcctcctccgggaacccgctcgtgtacctggacgtggacgccaacgggaagccgctcggccgcgtggtgctggagctgaaggcagatgtcgtcccaaagacagctgagaacttcagagccctgtgcactggtgagaagggcttcggctacaaaggctccaccttccacagggtgatcccttccttcatgtgccaggcgggcgacttcaccaaccacaatggcacaggcgggaagtccatctacggaagccgctttcctgacgagaactttacactgaagcacgtggggccaggtgtcctgtccatggctaatgctggtcctaacaccaacggctcccagttcttcatctgcaccataaagacagactggtccatggcattggatgacattgcgctacactgttgctcacccgggtcacccgtcctcacaggttggatggcaagcatgttgtgttcggtcacgtcaaagagggcatggacgtcgtgaagaaaatagaatctttcggctctaagagtgggaggacatccaagaagattgtcatcacagactgtggccagttgagctaatctgtggccagggtgctggcatggtggcagctgcaaatgtccatgcacccaggtggccgcgttgggctgtcagccaaggtgcctgaaacgatacgtgtgcccactccactgtcacagtgtgcctgaggaaggctgctagggatgttagacctcggccaggacccaccacattgcttcctaatacccacccttcctcacgacctcatttctgggcatctttgtggacatgatgtcacccacccct

SEQ ID NO: 164343 - DNA, 761 bp, Homo sapiens
  Payload ID: 12372
  Gene Symbol: PPIF
  Gene Name: peptidylprolyl isomerase F
  ENST ID: ENST00000472580
  CDS Start-End: 81-518
actcggccttctgggcgcgcgcgacgtcagtttgagttctgtgttctccccgcccgtgtcccgcccgacccgcgcccgcgatgctggcgctgcgctgcggctcccgctggctcggcctgctctccgtcccgcgctccgtgccgctgcgcctccccgcggcccgcgcctgcagcaagggctccggcgacccgtcctcttcctcctcctccgggaacccgctcgtgtacctggacgtggacgccaacgggaagccgctcggccgcgtggtgctggagctgaaggcagatgtcgtcccaaagacagctgagaacttcagagccctgtgcactggtgagaagggcttcggctacaaaggctccaccttccacagggtgatcccttccttcatgtgccaggcgggcgacttcaccaaccacaatggcacaggcgggaagtccatctacggaagccgctttcctgacgagaactttacactgaagcacgtggggccaggtgagtgggggcctcctctagggtgagtgtccccacagctctgacctggcctggaagccccagcaggccctgagaggccacatgcagtcaccgtccagtatctgatgagtctccttcctccctgcgacactgtgtcctgtccatggctaatgctggtcctaacaccaacggctcccagttcttcatctgcaccataaagacagactggtccatggcattggatgacattgcgctacactgttgctcacccgggtcacccgtcctcacag

SEQ ID NO: 164344 - DNA, 6368 bp, Homo sapiens
  Payload ID: 12373
  Gene Symbol: PPIG
  Gene Name: peptidylprolyl isomerase G (cyclophilin G)
  Uniprot ID: Q13427
  ENST ID: ENST00000260970
  CDS Start-End: 221-2485
gcgcttccggtgcgacgctgtctctccatgccaggactgagttgtgggggagggaggcggttagcgggctttagcgccttttctggcggcggtagatttgaagcgcttcaaaggaccggacccagagaagaggaaaactctaccggtgcaggagcacagggatcagttgtccttgtttttttttggtcttttcttcatttgaagattaagtattggagccatgggaataaaggttcaacgtcctcgatgtttttttgacattgccattaacaatcaacctgctggaagagttgtctttgaattattttctgatgtgtgccccaaaacatgcgagaactttcgttgtctttgtacaggtgaaaaggggaccgggaaatcaactcagaaaccattacattataagagttgtctctttcacagagttgtcaaggattttatggttcaaggtggtgacttcagtgaaggaaatggacgaggaggggaatctatctatggaggattttttgaagacgagagtttcgctgttaaacacaacaaagaatttctcttgtcaatggccaacagagggaaggatacaaatggttcacagttcttcataacaacgaaaccaactcctcatttagatgggcatcatgttgtttttggacaagtaatctctggtcaagaagttgtaagagagattgaaaaccagaaaacagatgcagctagcaaaccgtttgcggaggtacggatactcagttgtggagagctgattcccaaatctaaagttaagaaagaagaaaagaaaaggcataaatcatcatcatcttcctcctcctcatctagtgactcagatagctcaagtgattctcagtcctcttctgattcctctgattccgaaagtgctactgaagagaaatcaaagaaaagaaaaaagaaacatcggaaaaattcccgaaaacacaagaaagaaaagaaaaagcgaaagaaaagcaagaagagtgcatctagtgagagtgaagctgaaaatcttgaagcacaaccccagtctactgtccgtccagaagagatccctcctatacctgaaaatagattcctaatgagaaaaagtcctcctaaagctgatgagaaggaaaggaaaaacagagagagagaaagggaaagagagtgtaatccacctaactcccagcctgcttcataccagagacgacttttagttactagatctggcaggaaaattaaaggaagaggaccaaggcgttatcgaactccttccagatccagatcaagggatcgtttcagacgtagtgagactcctccacattggaggcaagagatgcagagagctcaaagaatgagggtatcaagtggtgaaagatggatcaagggggataagagtgagttgaatgaaataaaagaaaatcagagaagtccagttagagtaaaagagagaaaaataacagatcacaggaatgtatctgagagtccaaacagaaaaaatgaaaaggagaagaaagttaaagaccataaatctaacagcaaagagagagacatcagaagaaattcagaaaaagatgacaagtataaaaacaaagtgaagaaaagggccaaatctaaaagtaggagtaagagcaaagagaaatcaaagagtaaagaaagagattcaaaacataatagaaatgaagaaaagaggatgaggtcaaggagtaaaggaagggatcatgaaaatgttaaagaaaaagaaaagcagtctgattctaaaggaaaagatcaggaaaggagtagaagtaaagagaagtctaaacagttagaatcaaagagtaatgagcatgatcacagtaaaagtaaggaaaaggatagacgcgcacaatccaggagtagagaatgtgatataactaaaggtaaacacagttataatagcagaacaagagaacgaagcagaagtagggacagaagcagaagagtgcgatcaagaacccatgacagagatcgcagcagaagcaaggagtaccatagatacagagaacaggaatacaggagaagaggacggtcacgaagccgagagagaagaacaccaccaggaagatcaagaagtaaagataggaggagaaggaggagagactcacggagctcagagagagaagaaagtcaaagcagaaacaaagacaaatacagaaaccaagagagtaagagctcacacagaaaagaaaattctgagagtgagaaaagaatgtactctaaaagtcgtgatcataatagctcaaataacagcagggaaaaaaaggctgatagagatcaaagtcccttctcaaaaataaaacaaagcagtcaggacaatgaattaaagtcctccatgttgaaaaataaggaggatgagaagatcagatcctcagtggaaaaagaaaaccaaaaatcaaaaggtcaagaaaatgaccatgtacatgaaaaaaataaaaaatttgatcatgaatcaagccctggaacagatgaagacaaaagcggatgagtgagttatataaacttacttccattctgtttcggattttaagtttgagagacttgctaatgaatctcctttatgttgttttccttttcattgtttttggattgttttatgtttgtccttttttttcttaatgtggatttcattgagttgattttttgataatctgcaatctggataatttgtactgctaaagttttaataaactcgacatgagaaaaacactttggtgtagtactgtgtgctgtgtttaactattttatgtatgcattactgtgttgcaacaattagccaatagcatcctaatttgtttagtcagccatttggaatggttgcaatgcattgttgcaaaagcttgtgtttctcatgattaaagtaactttagaagccactagaagacatcttgtatagattttctgattgcgttataaatagaggtttgcagcggtttcttttaattacacagaagcagggtcctaataacctgagatcttaaatcatcacttttgattttatagtaatttgtgctttaaaatagatgtatttatattgcacttcatactctattctttatagttcgagccatagcttgtttcctattaatgcttttcctgtctagttgtgttttacttaactgcctataaaaatcgtaagagtaatttttttcagttgatgtactgattgagcttgagttgctgttatacagcatttgacaggaactataccttggaaaatcagattgtgattctcagttctgtgttgcttttggtttgaagagttttgggaacgttttaattattaattacccttctctaaactttaaaaaaaaaaaagcttttctcattaaaacataccatttgtgcaggtccttaagctatacagattctaaaaattgttagtattgagacattaacttctaagatttctcttttttggcctccaacctatatagaattgagtgttaactctgcatggattttgtttgttttaattgaactgacttctctaactctcatagctgtgagttccaaatggcaagaaaatgcatcttttctatatatgtatcacgataggctatagcatgtttatgactctggtttctttctcttcaggtggttttataccattactgttaatgttattttaacttggcatgtataacattgccatatagagtagagtagaaagttgcaaattttgatagtttacagagttaaacactaaacatatccaaagtccatttagagttttgggtgttgtattttgccatttttgtgatgtgtggccttttattctgtaatctcttctaaataaaacattgaacatccagcaaacataaaacctgcctcatttgaaaaggaatttcaaaattccaattaataggattctctagagagttttgtactttaatatttgtcagtgtagtgtcaactctgttaccaaggtagcttcttggtaaatccagtagctactcaatgctatttgtactgaataaagcaattattaacatgatacttcccactattgattaatgcaatattgatatatttggcgttgtggtagctgttgcagaatgaatagtgtaatgaccataagattgcttggaaaattgtaatacagatatccacaatgaattctttccaaaatttttttttccgatgataaaagtagtagatgtttattataaaatccaaggtgattgattccttagagactgaccacaaacccacattagggataattgagtctgagtgcccaagctatataacgttatgtagtttaagcaagttattgtttgtcttaatttcagttaactgcattttaaaattgttgttataaactatttgagctttaagaaaggtgctatttaagaaaggatttctaataacagttaaatattttttttaagtccatgctaagtaaaaattcttacatgttgtctgatcccagagctttatctactaaaaattatacataaggatttccaaatcttagagtttcaaaaagtaaccatagggaaaaaaattgtagtaatttctataggcaatattctgtttgggttatcaaaagagcaactccatgctccgcattatttatagtccttattttaaagttttattagctctctttacagaacagatgtgaaggagttgagaggacaatcaactagattttatttttagaatataaagaacatttttaaaatgattaaacagcattaactgtacctcaggatctgcgcatgcatctgaatagcacacggctcaaatggtcctttccttttgttacatttagtagttgtgccatctttagtttttgctttgaacattgttttcctaaaagtcaactattactttcccatcaagttggttttatagttatgtctaaatttatggttcatgtcaaagtatttttgacttaatatccttttaaaaatatttaaactgatttattgctcaattggtgatagctgagaaaattttttcaatatgtagaattttcatggttattttgtatgaattatttttctgggtaagccatctgccacagaaattgacactatggtgagattaatgttaatgaaatgagcagtagagaagctactggattgctttaaaacattctttgattaaattactacatagttggtaagttcatagttttaagttacttaattgaagccctcagaagttgcaaagaatttatctgataaatctgcctttgcacaaatgtgatactgatgcatggacggctttgcggaatgacctttgatatttgtgcctagtggaaggtatggagctaaacaattaaagaactcttcattatggataggcacatattggatctctggtattttgggtagtggtattaacttgacaattctaatttattttagttagtatatgtagcaagttagtatgtttgttagtagtttattgtacttcattccagttggtaatatagttttcatcacactaaactttttatactaaatttctgtagaagcttgttgggtttgccttcaccagaaggtactttaaatacctaccatagctgatttgttataaagaaacaaaatgggtgttcttctgtttccttttgattatgtttactgtaattatttcattttggatttatacatttacaattgaataaggattataggttgataagctgtttattgtgaaaagatgtgttttgttacaaatacttgttttaaaaattaataagcccccaggaagtacagcattgactggcacaactgcccatagtgagcttcccaactaactgccttcagtggattcgggcaagtgcaaagtctttggcctattgtgtgacaaagaggtatatattaaaggaaaagaaaaatgacatgaataagaaaattccgtcaacaaggttggagtagggagttgttgaggggtttagtttgttttaaaaggtatgtgagggagtggtggggtggatttgtgtttctgactttttttctttaagcaaattccatatgttaccaaaagcacatgctgtatattttcttccccttttgtgtgtatatagtattttgaaagataaatgaattgggtatttgtatgtgggatgtacaaaattgtggccgctctctttgtggaaggaaaaaacataaatgaagttaatgcacttcttttcctagcccaaaagtcactgtgattatatttttttaatgaagtttagaaaaaaagctgttgtcttctcaattgtaaaattagtttcaaaatgctgcttctcttatcattagtctagtaattgttgaacttttctgcaaactgcattttacaaaattgaaacttggaagctgtattaacttttatagttaaacattgtattaaataaactatactataataaa

SEQ ID NO: 164345 - DNA, 2615 bp, Homo sapiens
  Payload ID: 12373
  Gene Symbol: PPIG
  Gene Name: peptidylprolyl isomerase G (cyclophilin G)
  ENST ID: ENST00000409714
  CDS Start-End: 208-2427
gacgctgtctctccatgccaggactgagttgtgggggagggaggcggttagcgggctttagcgccttttctggcggcggtagatttgaagcgcttcaaaggaccggacccagagaagaggaaaactctaccggtgcaggagcacagggatcagttgtccttgtttttttttggtcttttcttcatttgaagattaagtattggagccatgggaataaaggttcaacgtcctcgatgtttttttgacattgccattaacaatcaacctgctggaagagttgtctttgaattattttctgatgtgtgccccaaaacatgcgagaactttcgttgtctttgtacaggtgaaaaggggaccgggaaatcaactcagaaaccattacattataagagttgtctctttcacagagttgtcaaggattttatggttcaaggtggtgacttcagtgaagacgagagtttcgctgttaaacacaacaaagaatttctcttgtcaatggccaacagagggaaggatacaaatggttcacagttcttcataacaacgaaaccaactcctcatttagatgggcatcatgttgtttttggacaagtaatctctggtcaagaagttgtaagagagattgaaaaccagaaaacagatgcagctagcaaaccgtttgcggaggtacggatactcagttgtggagagctgattcccaaatctaaagttaagaaagaagaaaagaaaaggcataaatcatcatcatcttcctcctcctcatctagtgactcagatagctcaagtgattctcagtcctcttctgattcctctgattccgaaagtgctactgaagagaaatcaaagaaaagaaaaaagaaacatcggaaaaattcccgaaaacacaagaaagaaaagaaaaagcgaaagaaaagcaagaagagtgcatctagtgagagtgaagctgaaaatcttgaagcacaaccccagtctactgtccgtccagaagagatccctcctatacctgaaaatagattcctaatgagaaaaagtcctcctaaagctgatgagaaggaaaggaaaaacagagagagagaaagggaaagagagtgtaatccacctaactcccagcctgcttcataccagagacgacttttagttactagatctggcaggaaaattaaaggaagaggaccaaggcgttatcgaactccttccagatccagatcaagggatcgtttcagacgtagtgagactcctccacattggaggcaagagatgcagagagctcaaagaatgagggtatcaagtggtgaaagatggatcaagggggataagagtgagttgaatgaaataaaagaaaatcagagaagtccagttagagtaaaagagagaaaaataacagatcacaggaatgtatctgagagtccaaacagaaaaaatgaaaaggagaagaaagttaaagaccataaatctaacagcaaagagagagacatcagaagaaattcagaaaaagatgacaagtataaaaacaaagtgaagaaaagggccaaatctaaaagtaggagtaagagcaaagagaaatcaaagagtaaagaaagagattcaaaacataatagaaatgaagaaaagaggatgaggtcaaggagtaaaggaagggatcatgaaaatgttaaagaaaaagaaaagcagtctgattctaaaggaaaagatcaggaaaggagtagaagtaaagagaagtctaaacagttagaatcaaagagtaatgagcatgatcacagtaaaagtaaggaaaaggatagacgcgcacaatccaggagtagagaatgtgatataactaaaggtaaacacagttataatagcagaacaagagaacgaagcagaagtagggacagaagcagaagagtgcgatcaagaacccatgacagagatcgcagcagaagcaaggagtaccatagatacagagaacaggaatacaggagaagaggacggtcacgaagccgagagagaagaacaccaccaggaagatcaagaagtaaagataggaggagaaggaggagagactcacggagctcagagagagaagaaagtcaaagcagaaacaaagacaaatacagaaaccaagagagtaagagctcacacagaaaagaaaattctgagagtgagaaaagaatgtactctaaaagtcgtgatcataatagctcaaataacagcagggaaaaaaaggctgatagagatcaaagtcccttctcaaaaataaaacaaagcagtcaggacaatgaattaaagtcctccatgttgaaaaataaggaggatgagaagatcagatcctcagtggaaaaagaaaaccaaaaatcaaaaggtcaagaaaatgaccatgtacatgaaaaaaataaaaaatttgatcatgaatcaagccctggaacagatgaagacaaaagcggatgagtgagttatataaacttacttccattctgtttcggattttaagtttgagagacttgctaatgaatctcctttatgttgttttccttttcattgtttttggattgttttatgtttgtccttttttttcttaatgtggatttcattgagttgattttttgataatctgcaatctggataatttgtactgc

SEQ ID NO: 164346 - DNA, 525 bp, Homo sapiens
  Payload ID: 12373
  Gene Symbol: PPIG
  Gene Name: peptidylprolyl isomerase G (cyclophilin G)
  ENST ID: ENST00000418888
  CDS Start-End: 349-525
gaagaggggcggagccggcgcggctgaccgggttgggtttaccgtctttccctcgaggtatcggggctgcttgggcccagaggaagtccctgaggaccgcagcagtgcctttgccgctgttgcagaaggagaaggcttgcagtcgagccccggggcctggggacggtccttcctctgccagcccccgccctccccactcaggcgcacacctccctcactgacgcattttgccgcacaagctgtaacatggcggcagcgactgcggcctgaactctagggagccgggttgatttttaaagcttcaaaatcctaagactcagcactgttgcgggattaagtattggagccatgggaataaaggttcaacgtcctcgatgtttttttgacattgccattaacaatcaacctgctggaagagttgtctttgaattattttctgatgtgtgccccaaaacatgcgagaactttcgttgtctttgtacaggtgaaaaggggaccgggaaatcaactcagaaaccattacat

SEQ ID NO: 164347 - DNA, 1062 bp, Homo sapiens
  Payload ID: 12373
  Gene Symbol: PPIG
  Gene Name: peptidylprolyl isomerase G (cyclophilin G)
  ENST ID: ENST00000414307
  CDS Start-End: 323-1062
gaggaagtccctgaggaccgcagcagtgcctttgccgctgttgcagaaggagaaggcttgcagtcgagccccggggcctggggacggtccttcctctgccagcccccgccctccccactcaggcgcacacctccctcactgacgcattttgccgcacaagctgtaacatggcggcagcgactgcggcctgaactctagggagccgggttgatttttaaagcttcaaaatcctaagactcagcactgttgcggggagcacagggatcagttgtccttgtttttttttggtcttttcttcatttgaagattaagtattggagccatgggaataaaggttcaacgtcctcgatgtttttttgacattgccattaacaatcaacctgctggaagagttgtctttgaattattttctgatgtgtgccccaaaacatgcgagaactttcgttgtctttgtacaggtgaaaaggggaccgggaaatcaactcagaaaccattacattataagagttgtctctttcacagagttgtcaaggattttatggttcaaggtggtgacttcagtgaaggaaatggacgaggaggggaatctatctatggaggattttttgaagacgagagtttcgctgttaaacacaacaaagaatttctcttgtcaatggccaacagagggaaggatacaaatggttcacagttcttcataacaacgaaaccaactcctcatttagatgggcatcatgttgtttttggacaagtaatctctggtcaagaagttgtaagagagattgaaaaccagaaaacagatgcagctagcaaaccgtttgcggaggtacggatactcagttgtggagagctgattcccaaatctaaagttaagaaagaagaaaagaaaaggcataaatcatcatcatcttcctcctcctcatctagtgactcagatagctcaagtgattctcagtcctcttctgattcctctgattccgaaagtgctactgaagagaaatcaaagaaaagaaaaaagaaacatcggaaaaattcccgaaaacacaagaaagaaaagaaaaa

SEQ ID NO: 164348 - DNA, 2498 bp, Homo sapiens
  Payload ID: 12373
  Gene Symbol: PPIG
  Gene Name: peptidylprolyl isomerase G (cyclophilin G)
  Uniprot ID: Q13427
  ENST ID: ENST00000448752
  CDS Start-End: 136-2400
tagatttgaagcgcttcaaaggaccggacccagagaagaggaaaactctaccggtgcaggtaagtggagcacagggatcagttgtccttgtttttttttggtcttttcttcatttgaagattaagtattggagccatgggaataaaggttcaacgtcctcgatgtttttttgacattgccattaacaatcaacctgctggaagagttgtctttgaattattttctgatgtgtgccccaaaacatgcgagaactttcgttgtctttgtacaggtgaaaaggggaccgggaaatcaactcagaaaccattacattataagagttgtctctttcacagagttgtcaaggattttatggttcaaggtggtgacttcagtgaaggaaatggacgaggaggggaatctatctatggaggattttttgaagacgagagtttcgctgttaaacacaacaaagaatttctcttgtcaatggccaacagagggaaggatacaaatggttcacagttcttcataacaacgaaaccaactcctcatttagatgggcatcatgttgtttttggacaagtaatctctggtcaagaagttgtaagagagattgaaaaccagaaaacagatgcagctagcaaaccgtttgcggaggtacggatactcagttgtggagagctgattcccaaatctaaagttaagaaagaagaaaagaaaaggcataaatcatcatcatcttcctcctcctcatctagtgactcagatagctcaagtgattctcagtcctcttctgattcctctgattccgaaagtgctactgaagagaaatcaaagaaaagaaaaaagaaacatcggaaaaattcccgaaaacacaagaaagaaaagaaaaagcgaaagaaaagcaagaagagtgcatctagtgagagtgaagctgaaaatcttgaagcacaaccccagtctactgtccgtccagaagagatccctcctatacctgaaaatagattcctaatgagaaaaagtcctcctaaagctgatgagaaggaaaggaaaaacagagagagagaaagggaaagagagtgtaatccacctaactcccagcctgcttcataccagagacgacttttagttactagatctggcaggaaaattaaaggaagaggaccaaggcgttatcgaactccttccagatccagatcaagggatcgtttcagacgtagtgagactcctccacattggaggcaagagatgcagagagctcaaagaatgagggtatcaagtggtgaaagatggatcaagggggataagagtgagttgaatgaaataaaagaaaatcagagaagtccagttagagtaaaagagagaaaaataacagatcacaggaatgtatctgagagtccaaacagaaaaaatgaaaaggagaagaaagttaaagaccataaatctaacagcaaagagagagacatcagaagaaattcagaaaaagatgacaagtataaaaacaaagtgaagaaaagggccaaatctaaaagtaggagtaagagcaaagagaaatcaaagagtaaagaaagagattcaaaacataatagaaatgaagaaaagaggatgaggtcaaggagtaaaggaagggatcatgaaaatgttaaagaaaaagaaaagcagtctgattctaaaggaaaagatcaggaaaggagtagaagtaaagagaagtctaaacagttagaatcaaagagtaatgagcatgatcacagtaaaagtaaggaaaaggatagacgcgcacaatccaggagtagagaatgtgatataactaaaggtaaacacagttataatagcagaacaagagaacgaagcagaagtagggacagaagcagaagagtgcgatcaagaacccatgacagagatcgcagcagaagcaaggagtaccatagatacagagaacaggaatacaggagaagaggacggtcacgaagccgagagagaagaacaccaccaggaagatcaagaagtaaagataggaggagaaggaggagagactcacggagctcagagagagaagaaagtcaaagcagaaacaaagacaaatacagaaaccaagagagtaagagctcacacagaaaagaaaattctgagagtgagaaaagaatgtactctaaaagtcgtgatcataatagctcaaataacagcagggaaaaaaaggctgatagagatcaaagtcccttctcaaaaataaaacaaagcagtcaggacaatgaattaaagtcctccatgttgaaaaataaggaggatgagaagatcagatcctcagtggaaaaagaaaaccaaaaatcaaaaggtcaagaaaatgaccatgtacatgaaaaaaataaaaaatttgatcatgaatcaagccctggaacagatgaagacaaaagcggatgagtgagttatataaacttacttccattctgtttcggattttaagtttgagagacttgctaatgaatctcctttatgttgttttccttttcattgttttt

SEQ ID NO: 164349 - DNA, 1485 bp, Homo sapiens
  Payload ID: 12373
  Gene Symbol: PPIG
  Gene Name: peptidylprolyl isomerase G (cyclophilin G)
  ENST ID: ENST00000433207
  CDS Start-End: 24-1485
ttccggtgcgacgctgtctctccatgccaggactgagttgtgggggagggaggcggttagcgggctttagcgccttttctggcggcggtagatttgaagcgcttcaaaggaccggacccagagaagaggaaaactctaccggtgcaggtgaaaaggggaccgggaaatcaactcagaaaccattacattataagagttgtctctttcacagagttgtcaaggattttatggttcaaggtggtgacttcagtgaaggaaatggacgaggaggggaatctatctatggaggattttttgaagacgagagtttcgctgttaaacacaacaaagaatttctcttgtcaatggccaacagagggaaggatacaaatggttcacagttcttcataacaacgaaaccaactcctcatttagatgggcatcatgttgtttttggacaagtaatctctggtcaagaagttgtaagagagattgaaaaccagaaaacagatgcagctagcaaaccgtttgcggaggtacggatactcagttgtggagagctgattcccaaatctaaagttaagaaagaagaaaagaaaaggcataaatcatcatcatcttcctcctcctcatctagtgactcagatagctcaagtgattctcagtcctcttctgattcctctgattccgaaagtgctactgaagagaaatcaaagaaaagaaaaaagaaacatcggaaaaattcccgaaaacacaagaaagaaaagaaaaagcgaaagaaaagcaagaagagtgagagtgaagctgaaaatcttgaagcacaaccccagtctactgtccgtccagaagagatccctcctatacctgaaaatagattcctaatgagaaaaagtcctcctaaagctgatgagaaggaaaggaaaaacagagagagagaaagggaaagagagtgtaatccacctaactcccagcctgcttcataccagagacgacttttagttactagatctggcaggaaaattaaaggaagaggaccaaggcgttatcgaactccttccagatccagatcaagggatcgtttcagacgtagtgagactcctccacattggaggcaagagatgcagagagctcaaagaatgagggtatcaagtggtgaaagatggatcaagggggataagagtgagttgaatgaaataaaagaaaatcagagaagtccagttagagtaaaagagagaaaaataacagatcacaggaatgtatctgagagtccaaacagaaaaaatgaaaaggagaagaaagttaaagaccataaatctaacagcaaagagagagacatcagaagaaattcagaaaaagatgacaagtataaaaacaaagtgaagaaaagggccaaatctaaaagtaggagtaagagcaaagagaaatcaaagagtaaagaaagagattcaaaacataatagaaatgaagaaaagaggatgaggtcaaggagtaaaggaagggatcatg

SEQ ID NO: 164350 - DNA, 527 bp, Homo sapiens
  Payload ID: 12373
  Gene Symbol: PPIG
  Gene Name: peptidylprolyl isomerase G (cyclophilin G)
  ENST ID: ENST00000417938
  CDS Start-End: 3-317
ccatgggaataaaggttcaacgtcctcgatgtttttttgacattgccattaacaatcaacctgctggaagagttgtctttgaattattttctgatgtgtgccccaaaacatgcgagaactttcgttgtctttgtacagagttgtcaaggattttatggttcaaggtggtgacttcagtgaaggaaatggacgaggaggggaatctatctatggaggattttttgaagacgagagtttcgctgttaaacacaacaaagaatttctcttgtcaatggccaacagagggaaggatacaaatggttcacagttcttcataacaacgaaaccaactcctcatttagatgggcatcatgttgtttttggacaagtaatctctggtcaagaagttgtaagagagattgaaaaccagaaaacagatgcagctagcaaaccgtttgcggaggtacggatactcagttgtggagagctgattcccaaatctaaagttaagaaagaagaaaagaaaaggcataaatcatcatcatctt

SEQ ID NO: 164351 - DNA, 1516 bp, Homo sapiens
  Payload ID: 12373
  Gene Symbol: PPIG
  Gene Name: peptidylprolyl isomerase G (cyclophilin G)
  Uniprot ID: Q13427
  ENST ID: ENST00000462903
  CDS Start-End: 181-1254
gggagggaggcggttagcgggctttagcgccttttctggcggcggtagatttgaagcgcttcaaaggaccggacccagagaagaggaaaactctaccggtgcaggtaagtggagcacagggatcagttgtccttgtttttttttggtcttttcttcatttgaagattaagtattggagccatgggaataaaggttcaacgtcctcgatgtttttttgacattgccattaacaatcaacctgctggaagagttgtctttgaattattttctgatgtgtgccccaaaacatgcgagaactttcgttgtctttgtacaggtgaaaaggggaccgggaaatcaactcagaaaccattacattataagagttgtctctttcacagagttgtcaaggattttatggttcaaggtggtgacttcagtgaaggaaatggacgaggaggggaatctatctatggaggattttttgaagacgagagtttcgctgttaaacacaacaaagaatttctcttgtcaatggccaacagagggaaggatacaaatggttcacagttcttcataacaacgaaaccaactcctcatttagatgggcatcatgttgtttttggacaagtaatctctggtcaagaagttgtaagagagattgaaaaccagaaaacagatgcagctagcaaaccgtttgcggaggtacggatactcagttgtggagagctgattcccaaatctaaagttaagaaagaagaaaagaaaaggcataaatcatcatcatcttcctcctcctcatctagtgactcagatagctcaagtgattctcagtcctcttctgattcctctgattccgaaagtgctactgaagagaaatcaaagaaaagaaaaaagaaacatcggaaaaattcccgaaaacacaagaaagaaaagaaaaagcgaaagaaaagcaagaagagtgcatctagtgagagtgaagctgaaaatcttgaagcacaaccccagtctactgtccgtccagaagagatccctcctatacctgaaaatagattcctaatgagaaaaagtcctcctaaagctgatgagaaggaaaggaaaaacagagagagagaaagggaaagagagtgtaatccacctaactcccagcctgcttcataccagagacgacttttagttactagatctggcaggaaaattaaaggaagaggaccaagggtaggtgattctttccccagagatcttcacaatattgcatttgtcttccttaaataattttagggtgtttcttaaatattattttaatgtgcaagtaactaaaatttaggggagatgcaggcattgaattatatattctctttcttaagcagcttctgtatgttggtacttcccaacagaaaatccatgagatatgaatagattttacatttacatggtataaaatgggatcgaggtctttcttgtctcccgtgtttcttggcaatcactgtatctctattcttgttaaaaataaataaaaattaaccctattcttgta

SEQ ID NO: 164352 - DNA, 752 bp, Homo sapiens
  Payload ID: 12374
  Gene Symbol: PPIH
  Gene Name: peptidylprolyl isomerase H (cyclophilin H)
  Uniprot ID: O43447
  ENST ID: ENST00000304979
  CDS Start-End: 23-556
cttctgcttccgggtcggagccatggcggtggcaaattcaagtcctgttaaccccgtggtgttctttgatgtcagtattggcggtcaggaagttggccgcatgaagatcgagctctttgcagacgttgtgcctaagacggccgagaactttaggcagttctgcaccggagaattcaggaaagatggggttccaataggatacaaaggaagcaccttccacagggtcataaaggatttcatgattcagggtggagattttgttaatggagatggtactggagtcgccagtatttaccgggggccatttgcagatgaaaattttaaacttagacactcagctccaggcctgctttccatggcgaacagtggtccaagtacaaatggctgtcagttctttatcacctgctctaagtgcgattggctggatgggaagcatgtggtgtttggaaaaatcatcgatggacttctagtgatgagaaagattgagaatgttcccacaggccccaacaataagcccaagctacctgtggtgatctcgcagtgtggggagatgtagtccagacaaagactgaatcaggccttcccttcttcttggtggtgttcttgagtaagataatctggactggcccccgtctttgcttccctgcctgctgctgccccatttgatcaagagaccatggaagtgtcagagattcagaatccaagattgtctttaagttttcaactgtaaataaagtttttttgtatgcgta

SEQ ID NO: 164353 - DNA, 327 bp, Homo sapiens
  Payload ID: 12374
  Gene Symbol: PPIH
  Gene Name: peptidylprolyl isomerase H (cyclophilin H)
  ENST ID: ENST00000372549
  CDS Start-End: 137-310
actagggaggcggaggtgggagataccgagcggcagggtggtgggtcagcccatcatgccccctgctccgtgaagccctcatggtcttggactgggccttctgacactctcccgctgattgcaggaagttggccgcatgaagatcgagctctttgcagacgttgtgcctaagacggccgagaactttaggcagttctgcaccggagaattcaggtcagtttcagatgtgtttgacttctttgcctgctccagaggggtgttctggggctgcagtgagggtatcggtgaaccacctgctggccttgaatgattgctggtgacagtgat

SEQ ID NO: 164354 - DNA, 665 bp, Homo sapiens
  Payload ID: 12374
  Gene Symbol: PPIH
  Gene Name: peptidylprolyl isomerase H (cyclophilin H)
  Uniprot ID: O43447
  ENST ID: ENST00000372550
  CDS Start-End: 240-644
gcaaattcaagtcctgttaaccccgtggtgttctttgatgtcagtattggcggtcaggaagttggccgcatgaagatcgagctctttgcagacgttgtgcctaagacggccgagaactttaggcagttctgcaccggagaattcaggtcagtttcagatgtgtttgacttctttgcctgctccagaggggtgttctggggctgcagtgagggtatcggtgaaccacctgctggccttgaatgattgctggtgacagtgatagaaggaaagatggggttccaataggatacaaaggaagcaccttccacagggtcataaaggatttcatgattcagggtggagattttgttaatggagatggtactggagtcgccagtatttaccgggggccatttgcagatgaaaattttaaacttagacactcagctccaggcctgctttccatggcgaacagtggtccaagtacaaatggctgtcagttctttatcacctgctctaagtgcgattggctggatgggaagcatgtggtgtttggaaaaatcatcgatggacttctagtgatgagaaagattgagaatgttcccacaggccccaacaataagcccaagctacctgtggtgatctcgcagtgtggggagatgtagtccagacaaagactgaatcag

SEQ ID NO: 164355 - DNA, 669 bp, Homo sapiens
  Payload ID: 12374
  Gene Symbol: PPIH
  Gene Name: peptidylprolyl isomerase H (cyclophilin H)
  ENST ID: ENST00000440068
  CDS Start-End: 236-669
ggtgagatccaggaggctgcccacacctgcgccgaagggaaactgctcggggctaggcaggcagaactcacccagagagagcggactcgggaagccagccagaaagtgaaattgcacccgaacctaccgacctgccgggcggggggaaaggaggaggaggagtctccccaatcctagcgccccgcttctggaggaactgggcggttagactagggaggcggaggaagttggccgcatgaagatcgagctctttgcagacgttgtgcctaagacggccgagaactttaggcagttctgcaccggagaattcaggaaagatggggttccaataggatacaaaggaagcaccttccacagggtcataaaggatttcatgattcagggtggagattttgttaatggagatggtactggagtcgccagtatttaccgggggccatttgcagatgaaaattttaaacttagacactcagctccaggcctgctttccatggcgaacagtggtccaagtacaaatggctgtcagttctttatcacctgctctaagtgcgattggctggatgggaagcatgtggtgtttggaaaaatcatcgatggacttctagtgatgagaaagattgagaatgttcccacaggccccaacaataagcccaagctacctgtggtgat

SEQ ID NO: 164356 - DNA, 416 bp, Homo sapiens
  Payload ID: 12374
  Gene Symbol: PPIH
  Gene Name: peptidylprolyl isomerase H (cyclophilin H)
  ENST ID: ENST00000436387
  CDS Start-End: 213-416
aattcaggtcagtttcagatgtgtttgacttctttgcctgctccagaggggtgttctggggctgcagtgagggtatcggtgaaccacctgctggccttgaatgattgctggtgacagtgatagaaggtaatgccccaagggtctgtccctagtttatttgccttctttatgtctgtcaaccatctttaggagagtccttttggctccagtgcatggtaaactggaaaggccttgtgctacctgctgtcactccaagtctctttcttttcggttataggaaagatggggttccaataggatacaaaggaagcaccttccacagggtcataaaggatttcatgattcagggtggagattttgttaatgtaagtactattcctttcctatcaaagacccgtagttttagtttttgttgt

SEQ ID NO: 164357 - DNA, 527 bp, Homo sapiens
  Payload ID: 12374
  Gene Symbol: PPIH
  Gene Name: peptidylprolyl isomerase H (cyclophilin H)
  ENST ID: ENST00000461351
  CDS Start-End: 1-291
ggagatggtactggagtcgccagtatttaccgggggccatttgcagatgaaaattttaaacttagacactcagctccaggcctgctttccatggcgaacagtggtccaagtacaaatggctgtcagttctttatcacctgctctaagtgcgattggctggatgggaagcatgtggtgtttggaaaaatcatcgatggacttctagtgatgagaaagattgagaatgttcccacaggccccaacaataagcccaagctacctgtggtgatctcgcagtgtggggagatgtagtccagacaaagactgaatcagcacttcccaggagcctgcccacagctgtggctaacatcaggccttcccttcttcttggtggtgttcttgagtaagataatctggactggcccccgtctttgcttccctgcctgctgctgccccatttgatcaagagaccatggaagtgtcagagattcagaatccaagattgtctttaagttttcaactgtaaataaagtttttttgtatgcgta

SEQ ID NO: 164358 - DNA, 1570 bp, Homo sapiens
  Payload ID: 12375
  Gene Symbol: PTRH1
  Gene Name: peptidyl-tRNA hydrolase 1 homolog
  ENST ID: ENST00000423807
  CDS Start-End: 365-913
gggaggtagaaaacttttattagctggagaggttgaggcctacagcggggaaaggacttgccagattttcgccgcaagtcagggccatagcggggggcataacaaggcctcccaaccgaaggtcaagcaagagctccgagcgtcccacacaagtcccgaagggacactgtgacgccgcgctactgaaggcgcctgggttcccggactcggccaccgcctcgccgcttccgcccctcagaagcatggcggccacgtagcccggcccggattggacgttggcggtggacgccaaacagttggcaacacgattggctgctgcggggtgatgacgtcagggggcggtgtcggagtgaatgggggcagcatgaggccgggcggctttttgggcgccggacagcggctgagtagagccatgagccgatgtgttttggagcctcgccccccggggaagcggtggatggtggctggcctggggaatcccggactgcccggcacgcgacacagcgtgggcatggcggtgctggggcagctggcgcggcggctgggtgtggcggagagttggacgcgcgaccggcactgtgccgccgacctcgccctggccccgctgggggatgcccaactggtcctgctccggccacggcggcttatgaacgccaacgggcgcagcgtggcccgggctgcggagctgtttgggctgactgccgaggaagtctacctggtgcatgatgagctggacaagcccctggggagactggctctgaagctggggggcagtgccaggcaatgccaaggctgcgggtgggtatcgggcgcccggcgcaccctgaggcggttcaggcccatgtgctgggctgcttctcccctgctgagcaggagctgctgcctctgttgctggatcgagccaccgacctgatcttggaccacatccgtgagcgaagccaggggccctcactggggccgtgacactagtggccatggctgcctgcctgactgtagtgcccaccaacccagccactgccacagagctgccacgccagccttggtatctactttttatacaaatctcctctagactgttccaggctgcctgcggattaaagtgggggtgactgtgactggaccagtccatttctggagtaggttcttctctctgtgtcctacttgggacgtaggggaacttcaggaagactaaacttttcaagcctttttagagaaccaggggcacgcatctgtaagattaaagatgctggcttggaggccgggtgcagtggctcacacctataatcccagcactttgggaggccgaggctgggggattgcttgacgtcaggagttcgagaccagcctggccaacatggtgaaaccctgtctctactaaaaatacaaaaagtagccaggcatggtggtgcatgcctgtaatccctgctacttgggagactgaggcaggagaatcacttgaacctgggaggcggaggttgctgtgagctgagattgtggcactgcactccagtctgggtgacagagtgagactctgtctcaaaaaaaaaaaaaaaaaaaaaaaaaaaagaaa

SEQ ID NO: 164359 - DNA, 2692 bp, Homo sapiens
  Payload ID: 12375
  Gene Symbol: PTRH1
  Gene Name: peptidyl-tRNA hydrolase 1 homolog
  Uniprot ID: Q86Y79
  ENST ID: ENST00000419060
  CDS Start-End: 1458-2102
atcttctcctgcagcaggcccatgcgcgtgttggcgccctcgtcctgagggctcagcgccagcgcctgctggtagtccgcctcggcaaaggccaggttgcccagctggaagaagcaatctagggtccggaggcggggatgctttggaacacgtggctggtcccaaagatgtgctgcaggatccctttgggggctggaatcacccatggctttgggatgtcccgtgaggggccctggtcaaccttcagggcatcctagaaccgaaggacagcaagctggagcaggcccccgagacgacccccacccactgacacactccccagcattctgcagggagggaggagaggcggaaatgaggcctggaaggaggcactcccactcggggttccggtggcgctcccagccccattccccttagggacgctccaacctgtccctctgcagtcctgcccttctccctctcctgtggtcaaggtcagggatcagggtcctcatgcttacaacaccgtctgttctcccccagggccttcccagctcccacttccggctactgacaccccaagctttgatgtctccagctcaggcctggtcccaagtctcaggccttgggggtcctacagtcccttgggtaaccttcaggaccctcactccagcaggccacactgagcacctcacctgacttctgccccaggttctcccattttggtgaggtcaccttccccaccagctacccaagccagagacctctgtccaagcagccgccgagccttacaaggatctttcacatgcctggttcttggcatggcggccagggccttccctgagtcggactgctgcccctgcctctcccggccttcaccctttcctgcgaacccagcctcggtctctctgcctggccctctgcctttgcgttagtcttctcccaagcccgcacctcgtccgaatctgtcatgaggccccttccaggaggaccccgaggcctctgccaactacctcgcggccctggccctgacgttgctaggcaccatcaccaggacgcccacaggccccacccctctggccacgcccccgggaaccaagctttttgagccggagggaggtagaaaacttttattagctggagaggttgaggcctacagcggggaaaggacttgccagattttcgccgcaagtcagggccatagcggggggcataacaaggcctcccaaccgaaggtcaagcaagagctccgagcgtcccacacaagtcccgaagggacactgtgacgccgcgctactgaaggcgcctgggttcccggactcggccaccgcctcgccgcttccgcccctcagaagcatggcggccacgtagcccggcccggattggacgttggcggtggacgccaaacagttggcaacacgattggctgctgcggggtgatgacgtcagggggcggtgtcggagtgaatgggggcagcatgaggccgggcggctttttgggcgccggacagcggctgagtagagccatgagccgatgtgttttggagcctcgccccccggggaagcggtggatggtggctggcctggggaatcccggactgcccggcacgcgacacagcgtgggcatggcggtgctggggcagctggcgcggcggctgggtgtggcggagagttggacgcgcgaccggcactgtgccgccgacctcgccctggccccgctgggggatgcccaactggtcctgctccggccacggcggcttatgaacgccaacgggcgcagcgtggcccgggctgcggagctgtttgggctgactgccgaggaagtctacctggtgcatgatgagctggacaagcccctggggagactggctctgaagctggggggcagtgccaggggccacaatggagtccgttcctgcattagctgcctcaactccaatgcaatgccaaggctgcgggtgggtatcgggcgcccggcgcaccctgaggcggttcaggcccatgtgctgggctgcttctcccctgctgagcaggagctgctgcctctgttgctggatcgagccaccgacctgatcttggaccacatccgtgagcgaagccaggggccctcactggggccgtgacactagtggccatggctgcctgcctgactgtagtgcccaccaacccagccactgccacagagctgccacgccagccttggtatctactttttatacaaatctcctctagactgttccaggctgcctgcggattaaagtgggggtgactgtgactggaccagtccatttctggagtaggttcttctctctgtgtcctacttgggacgtaggggaacttcaggaagactaaacttttcaagcctttttagagaaccaggggcacgcatctgtaagattaaagatgctggcttggaggccgggtgcagtggctcacacctataatcccagcactttgggaggccgaggctgggggattgcttgacgtcaggagttcgagaccagcctggccaacatggtgaaaccctgtctctactaaaaatacaaaaagtagccaggcatggtggtgcatgcctgtaatccctgctacttgggagactgaggcaggagaatcacttgaacctgggaggcggaggttgctgtgagctgagattgtggcactgcactccagtctgggtgacagagtgagactctgtctcaaaaaaaaaaaaaaa

SEQ ID NO: 164360 - DNA, 814 bp, Homo sapiens
  Payload ID: 12375
  Gene Symbol: PTRH1
  Gene Name: peptidyl-tRNA hydrolase 1 homolog
  Uniprot ID: Q86Y79
  ENST ID: ENST00000543175
  CDS Start-End: 19-663
ggagtgaatgggggcagcatgaggccgggcggctttttgggcgccggacagcggctgagtagagccatgagccgatgtgttttggagcctcgccccccggggaagcggtggatggtggctggcctggggaatcccggactgcccggcacgcgacacagcgtgggcatggcggtgctggggcagctggcgcggcggctgggtgtggcggagagttggacgcgcgaccggcactgtgccgccgacctcgccctggccccgctgggggatgcccaactggtcctgctccggccacggcggcttatgaacgccaacgggcgcagcgtggcccgggctgcggagctgtttgggctgactgccgaggaagtctacctggtgcatgatgagctggacaagcccctggggagactggctctgaagctggggggcagtgccaggggccacaatggagtccgttcctgcattagctgcctcaactccaatgcaatgccaaggctgcgggtgggtatcgggcgcccggcgcaccctgaggcggttcaggcccatgtgctgggctgcttctcccctgctgagcaggagctgctgcctctgttgctggatcgagccaccgacctgatcttggaccacatccgtgagcgaagccaggggccctcactggggccgtgacactagtggccatggctgcctgcctgactgtagtgcccaccaacccagccactgccacagagctgccacgccagccttggtatctactttttatacaaatctcctctagactgttccaggctgcctgcggattaaagtgggggtgactgtg

SEQ ID NO: 164361 - DNA, 645 bp, Homo sapiens
  Payload ID: 12375
  Gene Symbol: PTRH1
  Gene Name: peptidyl-tRNA hydrolase 1 homolog
  ENST ID: ENST00000456267
  CDS Start-End: 1-517
gctgagtagagccatgagccgatgtgttttggagcctcgccccccggggaagcggtggatggtggctggcctggggaatcccggactgcccggcacgcgacacagcgtgggcatggcggtgctggggcagctggcgcggcggctgggtgtggcggagagttggacgcgcgaccggcactgtgccgccgacctcgccctggccccgctgggggatgcccaactggtcctgctccggccacggcggcttatgaacgccaacgggcgcagcgtggcccgggctgcggagctgtttgggctgactgccgaggaagtctacctggtgcatgatgagctggacaagcccctggggagactggctctgaagctggggggcagtgccaggggccacaatggagtccgttcctgcattagctgcctcaactccaatgagctgctgcctctgttgctggatcgagccaccgacctgatcttggaccacatccgtgagcgaagccaggggccctcactggggccgtgacactagtggccatggctgcctgcctgactgtagtgcccaccaacccagccactgccacagagctgccacgccagccttggtatctactttttatacaaatctcctctagactgttccaggctgcctgc

SEQ ID NO: 164362 - DNA, 424 bp, Homo sapiens
  Payload ID: 12375
  Gene Symbol: PTRH1
  Gene Name: peptidyl-tRNA hydrolase 1 homolog
  ENST ID: ENST00000416214
  CDS Start-End: 13-424
aatgggggcagcatgaggccgggcggctttttgggcgccggacagcggctgagtagagccatgagccgatgtgttttggagcctcgccccccggggaagcggtggatgtttccctggtgccgcccgcaggtggctggcctggggaatcccggactgcccggcacgcgacacagcgtgggcatggcggtgctggggcagctggcgcggcggctgggtgtggcggagagttggacgcgcgaccggcactgtgccgccgacctcgccctggccccgctgggggatgcccaactggtcctgctccggccacggcggcttatgaacgccaacgggcgcagcgtggcccgggctgcggagctgtttgggctgactgccgaggaagtctacctggtgcatgatgagctggacaagcccctggggagactgg

SEQ ID NO: 164363 - DNA, 569 bp, Homo sapiens
  Payload ID: 12375
  Gene Symbol: PTRH1
  Gene Name: peptidyl-tRNA hydrolase 1 homolog
  ENST ID: ENST00000414832
  CDS Start-End: 1-487
gggcggctttttgggcgccggacagcggctgagtagagccatgagccgatgtgttttggagcctcgccccccggggaagcggtggatggtggctggcctggggaatcccggactgcccggcacgcgacacagcgtgggcatggcggtgctggggcagctggcgcggcggctgggtgtggcggagagttggacgcgcgaccggcactgtgccgccgacctcgccctggccccgctgggggatgcccaactggtcctgctccggccacggcggcttatgaacgccaacgggcgcagcgtggcccgggctggggccacaatggagtccgttcctgcattagctgcctcaactccaatgcaatgccaaggctgcgggtgggtatcgggcgcccggcgcaccctgaggcggttcaggcccatgtgctgggctgcttctcccctgctgagcaggagctgctgcctctgttgctggatcgagccaccgacctgatcttggaccacatccgtgagcgaagccaggggccctcactggggccgtgacactagtggccatggctgcctgcctgactgta

SEQ ID NO: 164364 - DNA, 901 bp, Homo sapiens
  Payload ID: 12376
  Gene Symbol: PTRH2
  Gene Name: peptidyl-tRNA hydrolase 2
  Uniprot ID: Q9Y3E5
  ENST ID: ENST00000393038
  CDS Start-End: 229-768
atacgttcctccctcctttcggcgagctcggttgatcctcgcgggatttcagttaggctcttagtgcgggccctgtgggtgtggcaagaggaagaatgactgctcgctttgtgattcttgatccggaacttgtcacccaggaaccccggaagaggtagctcacgcgatagaaacgtgttcgctgcccagaagaagggaaggcgcgagtgaggaaaggaggtactgtagatgccctccaaatccttggttatggaatatttggctcatcccagtacactcggcttggctgttggagttgcttgtggcatgtgcctgggctggagccttcgagtatgctttgggatgctccccaaaagcaagacgagcaagacacacacagatactgaaagtgaagcaagcatcttgggagacagcggggagtacaagatgattcttgtggttcgaaatgacttaaagatgggaaaagggaaagtggctgcccagtgctctcatgctgctgtttcagcctacaagcagattcaaagaagaaatcctgaaatgctcaaacaatgggaatactgtggccagcccaaggtggtggtcaaagctcctgatgaagaaaccctgattgcattattggcccatgcaaaaatgctgggactgactgtaagtttaattcaagatgctggacgtactcagattgcaccaggctctcaaactgtcctagggattgggccaggaccagcagacctaattgacaaagtcactggtcacctaaaactttactaggtggactttgatatgacaacaacccctccatcacaagtgtttgaagcctgtcagattctaacaacaaaagctgaatttcttcacccaacttaaatgttcttgagatgaaaataaaacctattcccatgttcta

SEQ ID NO: 164365 - DNA, 2246 bp, Homo sapiens
  Payload ID: 12376
  Gene Symbol: PTRH2
  Gene Name: peptidyl-tRNA hydrolase 2
  ENST ID: ENST00000409433
  CDS Start-End: 1573-2115
ctgccccctgagacagcctccagaagggatacgttcctccctcctttcggcgagctcggttgatcctcgcgggatttcagttaggctcttagtgcgggccctgtgggtgtggcaagaggaagaatgactgctcgctttgtgattcttgatccggaacttgtcacccaggaaccccggaagaggtagctcacgcgatagaaacgtgttcgctgcccagaagaagggaaggcgcgagtgaggaaaggaggtactgtagctacacttctggaaaattcagtatggacagtctccgacttaggatttttcaactttaggatggtgtgaaagagacacccattcagtagaaactgtacttcgagttttgcattttgatcttttcctggcctagtgataatgtggtacagtacactcttgtgatgctgggcagcggcagcgagccacagctcccagtcacccatgtgatcacgggaatcaacaacccatcctctaccgtgtactgtgttgtcagcttttttggatattgtgttttgtgttttcacattccatcatgtctacaaaatgtccatcagtgtctcctgtttctggtgagatgaagaagaggaaggcaattactcttgaaatgaaactcaagataattgcccagcatgaaggtggcaagccagtaatggccattgcacgtgagttaggactttggcaatccacgatttcaaccatcttaagggataagaagcaaatcagtgatgcagcgaaatcgtcagcatcagttaaatccactgtcatcacaaagaaaagggctggaccaattgatgatatggaaaaattacttgttatgtggatggaagaccagatacagaagcgtataccacttagcctactgatgatccaggctaaggcaagaagtctttttaatatgctaaaagaccgtgccagtgatcctacatatacacaaatgtttaaagcaagtcatggatggttccagcgcttcaaaaggcgtcataattttcacaatgtaaagatcactggtgaggcagcacgtgctggtaatgaaggtgccatagcttttaaggaacagctgcataggataattatggctaaagatctttgcaataaggagctgattgcactggaggaagaaagaggtaaaggcgttgaggcagtggaagaagttacacccacggcacctagaaagttcacagcaaagaaactggcagaggcatttgctgctatcagcagtggcctacacgttagaagaaatggacgtcaattacgagagattcgccacagttgacaggcgcagatacaggatgctcttgcttgctacagagaaatatatagtgaaaagaagaaacaagctgtacggtcaaaacttggtatcttcctgaagaacaacactatgcttgctaaaccatcaactagtgttgatgtcccaatgccttctaccacctattctcgatgttcatcagaagagagagaaattgaggaccctgttgcatccccatcatccagcaattaattctatttcagtgcttcaaacatttttcaggaccactgtgctttcagctgtgtaaattaatgatgccctccaaatccttggttatggaatatttggctcatcccagtacactcggcttggctgttggagttgcttgtggcatgtgcctgggctggagccttcgagtatgctttgggatgctccccaaaagcaagacgagcaagacacacacagatactgaaagtgaagcaagcatcttgggagacagcggggagtacaagatgattcttgtggttcgaaatgacttaaagatgggaaaagggaaagtggctgcccagtgctctcatgctgctgtttcagcctacaagcagattcaaagaagaaatcctgaaatgctcaaacaatgggaatactgtggccagcccaaggtggtggtcaaagctcctgatgaagaaaccctgattgcattattggcccatgcaaaaatgctgggactgactgtaagtttaattcaagatgctggacgtactcagattgcaccaggctctcaaactgtcctagggattgggccaggaccagcagacctaattgacaaagtcactggtcacctaaaactttactaggtggactttgatatgacaacaacccctccatcacaagtgtttgaagcctgtcagattctaacaacaaaagctgaatttcttcacccaacttaaatgttcttgagatgaaaataaaacctattcccatgttc

SEQ ID NO: 164366 - DNA, 4114 bp, Homo sapiens
  Payload ID: 12376
  Gene Symbol: PTRH2
  Gene Name: peptidyl-tRNA hydrolase 2
  Uniprot ID: Q9Y3E5
  ENST ID: ENST00000470557
  CDS Start-End: 3448-3987
aaatcaaaaccctatgcatcgctctaagtctttccagtttactttcattacacctgttcttcaacagcatgtctagataaatagcatgcatcactttattgtccataaatcagtctttgataatacaggttgctttttatcaggtaggccaaaagagaaaaatgtaataacacaggttgcatggtctatcatgtcaaacattcttacccttatcctaaattcccttgtaccactgtgtcttggggcgtgctcctggcataatttaaacttggatacatccaactaccatttcagtaggaggggagagcaaaggatgagtgtggatggaggttagtttgtatgtctggaggaagtgattagtagttttagtcttttggcttctaagtactactggagaaaatcacaaatagtatgttgccattaaaaagtcatcattaatcttaaccatgctttcaatattcctctgcaatcctgccatattttgccacaccttttatttccgcctttctcttctctactccattttaacttctgtctgagctccttccctcagggggaatactttcctgccttcaaatccgtggacctacttgatttaaaactgaaattgggaaaggtgtcccttttcctttccaaaaccacatccctttataaagtctttctctatcttgagcatttacctgcctttcttctggcttcatcctattaacatttaaatatgcttatcctttcttcttaggagaaaaaaaaaattgctttcctctgtgtcgccttatatccattgctttttctttttgctctatctcttgaccccacctcaaacgaatttctgccccaccaaagacagtaaccccttttatgttaaaattagtggaaagaatgttaatataatgccctaactttaaagaagaacataaaggaaatttataagtacttccagggctgtcatctatgccgtgccaatcatgcagtgcacaattccaagggcaccactttacattacaaatacagtgcattacaaatatagtggccccatgtttataaatgcttagataatactccactagaaaaagaaactgatagttgcttgccacatagaagcactgtgaatccagcagcctcatttgtagactgatataagtgtcttattggtgactcaaatattatgaacagctttgccgaagtagcaagattttctaaaataataaaggatgacattcctttgttttatgatagctacacttctggaaaattcagtatggacagtctccgacttaggatttttcaactttaggatggtgtgaaagagacacccattcagtagaaactgtacttcgagttttgcattttgatcttttcctggcctagtgataatgtggtacagtacactcttgtgatgctgggcagcggcagcgagccacagctcccagtcacccatgtgatcacgggaatcaacaacccatcctctaccgtgtactgtgttgtcagcttttttggatattgtgttttgtgttttcacattccatcatgtctacaaaatgtccatcagtgtctcctgtttctggtgagatgaagaagaggaaggcaattactcttgaaatgaaactcaagataattgcccagcatgaaggtggcaagccagtaatggccattgcacgtgagttaggactttggcaatccacgatttcaaccatcttaagggataagaagcaaatcagtgatgcagcgaaatcgtcagcatcagttaaatccactgtcatcacaaagaaaagggctggaccaattgatgatatggaaaaattacttgttatgtggatggaagaccagatacagaagcgtataccacttagcctactgatgatccaggctaaggcaagaagtctttttaatatgctaaaagaccgtgccagtgatcctacatatacacaaatgtttaaagcaagtcatggatggttccagcgcttcaaaaggcgtcataattttcacaatgtaaagatcactggtgaggcagcacgtgctggtaatgaaggtgccatagcttttaaggaacagctgcataggataattatggctaaagatctttgcaataaggagctgattgcactggaggaagaaagaggtaaaggcgttgaggcagtggaagaagttacacccacggcacctagaaagttcacagcaaagaaactggcagaggcatttgctgctatcagcagtggcctacacgttagaagaaatggacgtcaattacgagagattcgccacagttgacaggcgcagatacaggatgctcttgcttgctacagagaaatatatagtgaaaagaagaaacaagctgtacggtcaaaacttggtatcttcctgaagaacaacactatgcttgctaaaccatcaactagtgttgatgtcccaatgccttctaccacctattctcgatgttcatcagaagagagagaaattgaggaccctgttgcatccccatcatccagcaattaattctatttcagtgcttcaaacatttttcaggaccactgtgctttcagctgtgtaaattaatggtgagtacccatacaaccattgttttccacttacagtattcaataaattacaggagatattcaacactattataaaagagcctcgtgttagatgatttttgtccaactgtaggctaatgtaagtgttctgagcacatttaaggtaggctaggctaagtcatgatattctgtaggtgtattaaatgcatttttggcttacagtattttcaattaattgggttaattgggatataaccccatggaaaattgaggagcacctgtacatagtaaaactatgcaaaaaatattttgtgttcttaagtaaaatgatgttgagttctcatctcagttattaagtttttcagctgcactcacgtccaatgggacaactcttcattttgtaaggtttttagcatccttgctcaggcttagtaaatttcagtagtgcacctcactccaggcccattaatgtgacagtgaggttcttctgagggtaactgatttgataccatctccactgagaaccactgcattgtgaaaacaccgattagcactgtattccaggaaagggttatttttggtttctttaaatcttaggcatcttggtaaaacggaacatctccacaagactaagggaagactgaggaatagagtttttgaactttatgcaacttcgtttacatcaagattcaaaatgacctaaactgtttcatgtggatgcttgaatcttttctagtacactggtggtgggcaagagggtgttggaaacagggtgcaggcataagatcaaaggtgtgttttgccttttttctggatgaccattaagtgtatagtcaaaatgtttctctgataagcctatacctctgtaagttgttactgccggatagtgataactgttttcctttcctttaagatgccctccaaatccttggttatggaatatttggctcatcccagtacactcggcttggctgttggagttgcttgtggcatgtgcctgggctggagccttcgagtatgctttgggatgctccccaaaagcaagacgagcaagacacacacagatactgaaagtgaagcaagcatcttgggagacagcggggagtacaagatgattcttgtggttcgaaatgacttaaagatgggaaaagggaaagtggctgcccagtgctctcatgctgctgtttcagcctacaagcagattcaaagaagaaatcctgaaatgctcaaacaatgggaatactgtggccagcccaaggtggtggtcaaagctcctgatgaagaaaccctgattgcattattggcccatgcaaaaatgctgggactgactgtaagtttaattcaagatgctggacgtactcagattgcaccaggctctcaaactgtcctagggattgggccaggaccagcagacctaattgacaaagtcactggtcacctaaaactttactaggtggactttgatatgacaacaacccctccatcacaagtgtttgaagcctgtcagattctaacaacaaaagctgaatttcttcacccaacttaaatgttcttgagatgaaaataaaacctattcccat

SEQ ID NO: 164367 - DNA, 1105 bp, Homo sapiens
  Payload ID: 12377
  Gene Symbol: PTRHD1
  Gene Name: peptidyl-tRNA hydrolase domain containing 1
  Uniprot ID: Q6GMV3
  ENST ID: ENST00000328379
  CDS Start-End: 6-428
ccaagatgcaccggggagtaggtccggcctttcgggtggtcaggaagatggcggcctctggggcggagccgcaggtcctggtacaatacttggtgttacgaaaggatctatcacaagctccgttctcctggccggcgggcgcactggtagcgcaggcttgtcacgcggccaccgcggccttgcacactcaccgcgaccacccgcacacagccgcttacctccaagagctggggcgcatgcgcaaagtggtcctcgaggccccagatgagaccaccctaaaggagctggccgagaccctgcaacagaagaacattgaccacatgctgtggcttgagcaaccagagaatatcgccacttgtattgctctccggccctaccccaaggaagaagtgggccagtatttgaagaagttccgattgttcaagtaactgctgctttgatgtgtttgaatacgcaggccacccattccaaagcatcatgtgttccttgcagtgtcagcttgctcccgtctttcagttgtgacaatttcttgagggttaagcacatgttcatattaaagttgtcattaataactacttcctcttattaataagttcaagtggggaaggtgggagagcagtattgtctggggatcattgctcaaatagaagatttggttagactctcctgtggggctcaaggaaactcccttccagtcactcgggtttgaaactttgcttttgaattccttcttattcacatccagttatcatatttcattgaatctaagataacatcaactttaagatgcggtagtattttatgtattgttaaaaaatatgccggcaaattaaacacttgtatttcaataacaaagatgttaaaatttggccagtgtggtggctcacatctgttaattccagggttttgggaagccaaggcaggaggatcgcttgagcccatgagttcaaggttacagtcagttctaatcatgccaccgcactccagcctgggcaacagagtgagacactgtctctataaagattaataacaagttaaaatttgtgtgtgtctatatatatgtacatacatacagatttattagattcaatgaaatctgtcaagt

SEQ ID NO: 164368 - DNA, 2492 bp, Homo sapiens
  Payload ID: 12378
  Gene Symbol: PRF1
  Gene Name: perforin 1 (pore forming protein)
  Uniprot ID: P14222
  ENST ID: ENST00000373209
  CDS Start-End: 120-1787
tggctggtgcaaggagccacagtgggctgcctggggggctgatgccaccattccaggagcctcggtgaagagaggatatccatctgtgtagccgcttctctatacgggattccagctccatggcagcccgtctgctcctcctgggcatccttctcctgctgctgcccctgcccgtccctgccccgtgccacacagccgcacgctcagagtgcaagcgcagccacaagttcgtgcctggtgcatggctggccggggagggtgtggacgtgaccagcctccgccgctcgggctccttcccagtggacacacaaaggttcctgcggcccgacggcacctgcaccctctgtgaaaatgccctacaggagggcaccctccagcgcctgcctctggcgctcaccaactggcgggcccagggctctggctgccagcgccatgtaaccagggccaaagtcagctccactgaagctgtggcccgggatgcggctcgtagcatccgcaacgactggaaggtcgggctggacgtgactcctaagcccaccagcaatgtgcatgtgtctgtggccggctcacactcacaggcagccaactttgcagcccagaagacccaccaggaccagtacagcttcagcactgacacggtggagtgccgcttctacagtttccatgtggtacacactcccccgctgcaccctgacttcaagagggccctcggggacctgccccaccacttcaacgcctccacccagcccgcctacctcaggcttatctccaactacggcacccacttcatccgggctgtggagctgggtggccgcatatcggccctcactgccctgcgcacctgcgagctggccctggaagggctcacggacaacgaggtggaggactgcctgactgtcgaggcccaggtcaacataggcatccacggcagcatctctgccgaagccaaggcctgtgaggagaagaagaagaagcacaagatgacggcctccttccaccaaacctaccgggagcgccactcggaagtggttggcggccatcacacctccattaacgacctgctgttcgggatccaggccgggcccgagcagtactcagcctgggtaaactcgctgcccggcagccctggcctggtggactacaccctggaacccctgcacgtgctgctggacagccaggacccgcggcgggaggcactgaggagggccctgagtcagtacctgacggacagggctcgctggagggactgcagccggccgtgcccaccagggcggcagaagagcccccgagacccatgccagtgtgtgtgccatggctcagcggtcaccacccaggactgctgccctcggcagaggggcctggcccagctggaggtgaccttcatccaagcatggggcctgtggggggactggttcactgccacggatgcctatgtgaagctcttctttggtggccaggagctgaggacgagcaccgtgtgggacaataacaaccccatctggtcagtgcggctggattttggggatgtgctcctggccacaggggggcccctgaggttgcaggtctgggatcaggactctggcagggacgatgacctccttggcacctgtgatcaggctcccaagtctggttcccatgaggtgagatgcaacctgaatcatggccacctaaaattccgctatcatgccaggtgcttgccccacctgggaggaggcacctgcctggactatgtcccccaaatgcttctgggggagcctccaggaaaccggagtggggccgtgtggtgagaacagtgagcttggaaaggaccagtatgcttggactgaaggggttctcacagtgggagccagggctgtcttcgtattcccattagaccaagcttgtccaacccgaggcccgcatgcggcccaggatggctttgaatgcggcccaacgcaaattcgcaaactttcttaaaacattatgagtttctttttgctattttttttttttttttagctcatcggctatcgttagtgctagtggattttacatgtggcccaacacaattcttcttccaacgtggcccagagaagccaaaagattggatacgcatcagacagatggaaaagggagattcagactgtttttcagggaggtggctgggtttacacgctaatcccgattcaccctgtccaaactgcctaagccctccgccattctcaagccctgcagtcacagctacacagatcacagcttcagccaggagctgggcagaaggccaagaggctgttcccaccaggctgctcagggctggtcttttaggacccttcccttgagccctctatggtgtggcaaagccttcattgccttaactggagccccatcagctccagctgctctgtcttctttgcccacaatgctttgcccctgagacaaatggaggcctgtcctgacctgtctcaccatgtacatagcttgataaagggccaataaatatgatgttatggtga

SEQ ID NO: 164369 - DNA, 2533 bp, Homo sapiens
  Payload ID: 12378
  Gene Symbol: PRF1
  Gene Name: perforin 1 (pore forming protein)
  Uniprot ID: P14222
  ENST ID: ENST00000441259
  CDS Start-End: 162-1829
gaagtgatgtgagtggtggctggtgcaaggagccacagtgggctgcctggggggctgatgccaccattccaggagcctcggtgaagagaggatatccatctgtgtagccgcttctctatacgggattccagagcccaagtgccccctgtctctgcagctccatggcagcccgtctgctcctcctgggcatccttctcctgctgctgcccctgcccgtccctgccccgtgccacacagccgcacgctcagagtgcaagcgcagccacaagttcgtgcctggtgcatggctggccggggagggtgtggacgtgaccagcctccgccgctcgggctccttcccagtggacacacaaaggttcctgcggcccgacggcacctgcaccctctgtgaaaatgccctacaggagggcaccctccagcgcctgcctctggcgctcaccaactggcgggcccagggctctggctgccagcgccatgtaaccagggccaaagtcagctccactgaagctgtggcccgggatgcggctcgtagcatccgcaacgactggaaggtcgggctggacgtgactcctaagcccaccagcaatgtgcatgtgtctgtggccggctcacactcacaggcagccaactttgcagcccagaagacccaccaggaccagtacagcttcagcactgacacggtggagtgccgcttctacagtttccatgtggtacacactcccccgctgcaccctgacttcaagagggccctcggggacctgccccaccacttcaacgcctccacccagcccgcctacctcaggcttatctccaactacggcacccacttcatccgggctgtggagctgggtggccgcatatcggccctcactgccctgcgcacctgcgagctggccctggaagggctcacggacaacgaggtggaggactgcctgactgtcgaggcccaggtcaacataggcatccacggcagcatctctgccgaagccaaggcctgtgaggagaagaagaagaagcacaagatgacggcctccttccaccaaacctaccgggagcgccactcggaagtggttggcggccatcacacctccattaacgacctgctgttcgggatccaggccgggcccgagcagtactcagcctgggtaaactcgctgcccggcagccctggcctggtggactacaccctggaacccctgcacgtgctgctggacagccaggacccgcggcgggaggcactgaggagggccctgagtcagtacctgacggacagggctcgctggagggactgcagccggccgtgcccaccagggcggcagaagagcccccgagacccatgccagtgtgtgtgccatggctcagcggtcaccacccaggactgctgccctcggcagaggggcctggcccagctggaggtgaccttcatccaagcatggggcctgtggggggactggttcactgccacggatgcctatgtgaagctcttctttggtggccaggagctgaggacgagcaccgtgtgggacaataacaaccccatctggtcagtgcggctggattttggggatgtgctcctggccacaggggggcccctgaggttgcaggtctgggatcaggactctggcagggacgatgacctccttggcacctgtgatcaggctcccaagtctggttcccatgaggtgagatgcaacctgaatcatggccacctaaaattccgctatcatgccaggtgcttgccccacctgggaggaggcacctgcctggactatgtcccccaaatgcttctgggggagcctccaggaaaccggagtggggccgtgtggtgagaacagtgagcttggaaaggaccagtatgcttggactgaaggggttctcacagtgggagccagggctgtcttcgtattcccattagaccaagcttgtccaacccgaggcccgcatgcggcccaggatggctttgaatgcggcccaacgcaaattcgcaaactttcttaaaacattatgagtttctttttgctattttttttttttttttagctcatcggctatcgttagtgctagtggattttacatgtggcccaacacaattcttcttccaacgtggcccagagaagccaaaagattggatacgcatcagacagatggaaaagggagattcagactgtttttcagggaggtggctgggtttacacgctaatcccgattcaccctgtccaaactgcctaagccctccgccattctcaagccctgcagtcacagctacacagatcacagcttcagccaggagctgggcagaaggccaagaggctgttcccaccaggctgctcagggctggtcttttaggacccttcccttgagccctctatggtgtggcaaagccttcattgccttaactggagccccatcagctccagctgctctgtcttctttgcccacaatgctttgcccctgagacaaatggaggcctgtcctgacctgtctcaccatgtacatagcttgataaagggccaataaatatgatgttatggtg

SEQ ID NO: 164370 - DNA, 5502 bp, Homo sapiens
  Payload ID: 12379
  Gene Symbol: PRX
  Gene Name: periaxin
  Uniprot ID: Q9BXM0
  ENST ID: ENST00000291825
  CDS Start-End: 270-713
gctctcgaggtgtctggaggctcagcgagcgccggacccaggaggcccaaggagctggaggtgaccctcaggcagcaagaaccccacggaagggcgtgagccctgcagacagctgtgcggcacctcgggctgggctcctgttaggaggaagtgcctgcacccaggcagcggctcagaggcagctgctccatgcagaactgaagctggttctgcagcagaaaggggagaggacacaggagcctggggtgcaggtgcctcccagcaacgccatggaggccaggagccggagtgccgaggagctgaggcgggcggagttggtggaaattatcgtggagacggaggcgcagaccggggtcagcggcatcaacgtagcgggcggcggcaaagagggaatcttcgttcgggagctgcgcgaggactcacccgccgccaggagcctcagcctgcaggaaggggaccagctgctgagtgcccgagtgttcttcgagaacttcaagtacgaggacgcactacgcctgctgcaatgcgccgagccttacaaagtctccttctgcctgaagcgcactgtgcccaccggggacctggctctgcggcccgggaccgtgtctggctacgagatcaagggcccgcgggccaaggtggccaagctggtacgcgtgcttagcccggccccggccctggactgccccagcgatccggtctctgcgccgtgagccccattccccgccatcgtgggccagccttgccctctgtcttgtcactaacccaagctaattccaccctctgccccttcctctctgccccaaactcttccccgggaagggggacagacccaccccagcccagggccctcacccacctcggagaggcgtccccaccatcggatccaggcttgctaggggtcctgaaccaggctacttcgaaccaggaaagccagattccagcctgagtgctggcccaattactgctgagtggccctggacaaagttgtttctctccctgggcctcagtttccccatctctagaatgaggatgttggggaaaatcccggatcaggatctagaagtcttgggtccccgtccctacactcctgttgactcatttggagatcctagatggctgcctgctttcctgggcactcatggtgaaatgacaggcaagaagtggggatgatgtttggggaacaagatacttgacccagcacatcccccgcctggtccaataccaggtggggctcttcctgtccactcccagcctcccactgtcccaccgcctcctgcctctctcctctctccccagaacatccagagtctgtcccctgtgaagaagaagaagatggtgcctggggctctgggggtccccgctgacctggcccctgttgacgtcgagttctcctttcccaagttctcccgcctgcgtcggggcctcaaagccgaggctgtcaagggtcctgtcccggctgcccctgcccgccggcgcctccagctgcctcggctgcgtgtacgagaagtggccgaagaggctcaggcagcccggctggccgccgccgctcctccccccaggaaagccaaggtggaggctgaggtggctgcaggagctcgtttcacagcccctcaggtggagctggttgggccgcggctgccaggggcggaggtgggtgtcccccaggtctcagcccccaaggctgccccctcagcagaggcagctggtggctttgccctccacctgccaacccttgggctcggagccccggctccgcctgctgtggaggccccagccgtgggaatccaggtcccccaggtggagctgcctgccttgccctcactgcccactctgcccacacttccctgcctagagacccgggaaggggctgtgtcggtagtggtgcccaccctggatgtggcagcaccgactgtgggggtggacctggccttgccgggtgcagaggtggaggcccggggagaggcacctgaggtggccctgaagatgccccgccttagttttccccgatttggggctcgagcaaaggaagttgctgaggccaaggtagccaaggtcagccctgaggccagggtgaaaggtcccagacttcgaatgcccacctttgggctttccctcttggagccccggcccgctgctcctgaagttgtagagagcaagctgaagctgcccaccatcaagatgccctcccttggcatcggagtgtcagggcccgaggtcaaggtgcccaagggacctgaagtgaagctccccaaggctcctgaggtcaagcttccaaaagtgcccgaggcagcccttccagaggttcgactcccagaggtggagctccccaaggtgtcagagatgaaactcccaaaggtgccagagatggctgtgccggaggtgcggcttccagaggtagagctgcccaaagtgtcagagatgaaactcccaaaggtgccagagatggctgtgccggaggtgcggcttccagaggtacagctgctgaaagtgtcggagatgaaactcccaaaggtgccagagatggctgtgccggaggtgcggcttccagaggtacagctgccgaaagtgtcagagatgaaactcccagaggtgtcagaggtggctgtgccagaggtgcggcttccagaggtgcagctgccgaaagtgccagagatgaaagtccctgagatgaagcttccaaaggtgcctgagatgaaacttcctgagatgaaactccctgaagtgcaactcccgaaggtgcccgagatggccgtgcccgatgtgcacctcccagaagtgcagcttccaaaagtcccagagatgaagctccctgagatgaaactccctgaggtgaaactcccgaaggtgcccgagatggctgtgcccgatgtgcacctcccggaagtgcagctcccgaaagtcccagagatgaaactccctaaaatgcctgagatggctgtgccagaggttcgactccccgaggtgcagctgccaaaagtctcagagatgaaactccccaaggtgcctgaaatggccgtgcccgatgtgcacctcccagaggtgcagctgcccaaagtctgtgaaatgaaagtccctgacatgaagctcccagagataaaactccccaaggtgcctgagatggctgtgcccgatgtgcacctccccgaggtgcagctgccgaaagtgtcagagattcggctgccggaaatgcaagtgccgaaggttcccgacgtgcatcttccgaaggcaccagaggtgaagctgcccagggctccggaggtgcagctaaaggccaccaaggcagaacaggcagaagggatggaatttggcttcaagatgcccaagatgaccatgcccaagctagggagggcagagtccccatcacgtggcaagccaggcgaggcgggtgctgaggtctcagggaagctggtaacacttccctgtctgcagccagaggtggatggtgaggctcatgtgggtgtcccctctctcactctgccttcagtggagctagacctgccaggagcacttggcctgcaggggcaggtcccagccgctaaaatgggcaagggagagcgggtggagggccctgaggtggcagcaggggtcagggaagtgggcttccgagtgccctctgttgaaattgtcaccccacagctgcccgccgtggaaattgaggaagggcggctggagatgatagagacaaaagtcaagccctcttccaagttctccttacctaagtttggactctcggggccaaaggtggctaaggcagaggctgagggggctgggcgagctaccaagctgaaggtatccaaatttgccatctcactccccaaggctcgggtgggggctgaggctgaggccaaaggggctggggaggcaggcctgctgcctgccctcgatctgtccatcccacagctcagcctggatgcccacctgccctcaggcaaggtagaggtggcaggggccgacctcaagttcaaggggcccaggtttgctctccccaagtttggggtcagaggccgggacactgaggcagcagaactagtgccaggggtggctgagttggagggcaagggctggggctgggatgggagggtgaagatgcccaagctgaagatgccttcctttgggctggctcgagggaaggaagcagaagttcaaggtgatcgtgccagcccgggggaaaaggctgagtccaccgctgtgcagcttaagatccccgaggtggagctggtcacgctgggcgcccaggaggaagggagggcagagggggctgtggccgtcagtggaatgcagctgtcaggcctgaaggtgtccacagccgggcaggtggtcactgagggccatgacgcggggctgaggatgcctccgctgggcatctccctgccacaggtggagctgaccggctttggggaggcaggtaccccagggcagcaggctcagagtacagtcccttcagcagagggcacagcaggctacagggttcaggtgccccaggtgaccctgtctctgcctggagcccaggttgcaggtggtgagctgctggtgggtgagggtgtctttaagatgcccaccgtgacagtgccccagcttgagctggacgtggggctaagccgagaggcacaggcgggcgaggcggccacaggcgagggtgggctgaggctgaagttgcccacactgggggccagagctagggtggggggcgagggtgctgaggagcagcccccaggggccgagcgtaccttctgcctctcactgcccgacgtggagctctcgccatccgggggcaaccatgccgagtaccaggtggcagagggggagggagaggccggacacaagctcaaggtacggctgccccggtttggcctggtgcgggccaaggagggggccgaggagggtgagaaggccaagagccccaaactcaggctgccccgagtgggcttcagccaaagtgagatggtcactggggaagggtcccccagccccgaggaggaggaggaggaggaggaagagggcagtggggaaggggcctcgggtcgccggggccgggtccgggtccgcttgccacgtgtaggcctggcggccccttctaaagcctctcgggggcaggagggcgatgcagcccccaagtcccccgtcagagagaagtcacccaagttccgcttccccagggtgtccctaagccccaaggcccggagtgggagtggggaccaggaagagggtggattgcgggtgcggctgcccagcgtggggttttcagagacaggggctccaggcccggccaggatggagggggctcaggctgcggctgtctgaagcccctagtcagatggggatcccttcttgccttcctttctctaccccctcgctgttgtgtgtgtgataactagcactaaccctaagagggccgggaggtgggtgactgaccagggctggcagggaggcctgctcctgtctctctggcaggagtgcctgtaccccaccaagccatgtgaataaaataatctggaagta

SEQ ID NO: 164371 - DNA, 4855 bp, Homo sapiens
  Payload ID: 12379
  Gene Symbol: PRX
  Gene Name: periaxin
  Uniprot ID: Q9BXM0
  ENST ID: ENST00000324001
  CDS Start-End: 272-4657
gagctctcgaggtgtctggaggctcagcgagcgccggacccaggaggcccaaggagctggaggtgaccctcaggcagcaagaaccccacggaagggcgtgagccctgcagacagctgtgcggcacctcgggctgggctcctgttaggaggaagtgcctgcacccaggcagcggctcagaggcagctgctccatgcagaactgaagctggttctgcagcagaaaggggagaggacacaggagcctggggtgcaggtgcctcccagcaacgccatggaggccaggagccggagtgccgaggagctgaggcgggcggagttggtggaaattatcgtggagacggaggcgcagaccggggtcagcggcatcaacgtagcgggcggcggcaaagagggaatcttcgttcgggagctgcgcgaggactcacccgccgccaggagcctcagcctgcaggaaggggaccagctgctgagtgcccgagtgttcttcgagaacttcaagtacgaggacgcactacgcctgctgcaatgcgccgagccttacaaagtctccttctgcctgaagcgcactgtgcccaccggggacctggctctgcggcccgggaccgtgtctggctacgagatcaagggcccgcgggccaaggtggccaagctgaacatccagagtctgtcccctgtgaagaagaagaagatggtgcctggggctctgggggtccccgctgacctggcccctgttgacgtcgagttctcctttcccaagttctcccgcctgcgtcggggcctcaaagccgaggctgtcaagggtcctgtcccggctgcccctgcccgccggcgcctccagctgcctcggctgcgtgtacgagaagtggccgaagaggctcaggcagcccggctggccgccgccgctcctccccccaggaaagccaaggtggaggctgaggtggctgcaggagctcgtttcacagcccctcaggtggagctggttgggccgcggctgccaggggcggaggtgggtgtcccccaggtctcagcccccaaggctgccccctcagcagaggcagctggtggctttgccctccacctgccaacccttgggctcggagccccggctccgcctgctgtggaggccccagccgtgggaatccaggtcccccaggtggagctgcctgccttgccctcactgcccactctgcccacacttccctgcctagagacccgggaaggggctgtgtcggtagtggtgcccaccctggatgtggcagcaccgactgtgggggtggacctggccttgccgggtgcagaggtggaggcccggggagaggcacctgaggtggccctgaagatgccccgccttagttttccccgatttggggctcgagcaaaggaagttgctgaggccaaggtagccaaggtcagccctgaggccagggtgaaaggtcccagacttcgaatgcccacctttgggctttccctcttggagccccggcccgctgctcctgaagttgtagagagcaagctgaagctgcccaccatcaagatgccctcccttggcatcggagtgtcagggcccgaggtcaaggtgcccaagggacctgaagtgaagctccccaaggctcctgaggtcaagcttccaaaagtgcccgaggcagcccttccagaggttcgactcccagaggtggagctccccaaggtgtcagagatgaaactcccaaaggtgccagagatggctgtgccggaggtgcggcttccagaggtagagctgcccaaagtgtcagagatgaaactcccaaaggtgccagagatggctgtgccggaggtgcggcttccagaggtacagctgctgaaagtgtcggagatgaaactcccaaaggtgccagagatggctgtgccggaggtgcggcttccagaggtacagctgccgaaagtgtcagagatgaaactcccagaggtgtcagaggtggctgtgccagaggtgcggcttccagaggtgcagctgccgaaagtgccagagatgaaagtccctgagatgaagcttccaaaggtgcctgagatgaaacttcctgagatgaaactccctgaagtgcaactcccgaaggtgcccgagatggccgtgcccgatgtgcacctcccagaagtgcagcttccaaaagtcccagagatgaagctccctgagatgaaactccctgaggtgaaactcccgaaggtgcccgagatggctgtgcccgatgtgcacctcccggaagtgcagctcccgaaagtcccagagatgaaactccctaaaatgcctgagatggctgtgccagaggttcgactccccgaggtgcagctgccaaaagtctcagagatgaaactccccaaggtgcctgaaatggccgtgcccgatgtgcacctcccagaggtgcagctgcccaaagtctgtgaaatgaaagtccctgacatgaagctcccagagataaaactccccaaggtgcctgagatggctgtgcccgatgtgcacctccccgaggtgcagctgccgaaagtgtcagagattcggctgccggaaatgcaagtgccgaaggttcccgacgtgcatcttccgaaggcaccagaggtgaagctgcccagggctccggaggtgcagctaaaggccaccaaggcagaacaggcagaagggatggaatttggcttcaagatgcccaagatgaccatgcccaagctagggagggcagagtccccatcacgtggcaagccaggcgaggcgggtgctgaggtctcagggaagctggtaacacttccctgtctgcagccagaggtggatggtgaggctcatgtgggtgtcccctctctcactctgccttcagtggagctagacctgccaggagcacttggcctgcaggggcaggtcccagccgctaaaatgggcaagggagagcgggtggagggccctgaggtggcagcaggggtcagggaagtgggcttccgagtgccctctgttgaaattgtcaccccacagctgcccgccgtggaaattgaggaagggcggctggagatgatagagacaaaagtcaagccctcttccaagttctccttacctaagtttggactctcggggccaaaggtggctaaggcagaggctgagggggctgggcgagctaccaagctgaaggtatccaaatttgccatctcactccccaaggctcgggtgggggctgaggctgaggccaaaggggctggggaggcaggcctgctgcctgccctcgatctgtccatcccacagctcagcctggatgcccacctgccctcaggcaaggtagaggtggcaggggccgacctcaagttcaaggggcccaggtttgctctccccaagtttggggtcagaggccgggacactgaggcagcagaactagtgccaggggtggctgagttggagggcaagggctggggctgggatgggagggtgaagatgcccaagctgaagatgccttcctttgggctggctcgagggaaggaagcagaagttcaaggtgatcgtgccagcccgggggaaaaggctgagtccaccgctgtgcagcttaagatccccgaggtggagctggtcacgctgggcgcccaggaggaagggagggcagagggggctgtggccgtcagtggaatgcagctgtcaggcctgaaggtgtccacagccgggcaggtggtcactgagggccatgacgcggggctgaggatgcctccgctgggcatctccctgccacaggtggagctgaccggctttggggaggcaggtaccccagggcagcaggctcagagtacagtcccttcagcagagggcacagcaggctacagggttcaggtgccccaggtgaccctgtctctgcctggagcccaggttgcaggtggtgagctgctggtgggtgagggtgtctttaagatgcccaccgtgacagtgccccagcttgagctggacgtggggctaagccgagaggcacaggcgggcgaggcggccacaggcgagggtgggctgaggctgaagttgcccacactgggggccagagctagggtggggggcgagggtgctgaggagcagcccccaggggccgagcgtaccttctgcctctcactgcccgacgtggagctctcgccatccgggggcaaccatgccgagtaccaggtggcagagggggagggagaggccggacacaagctcaaggtacggctgccccggtttggcctggtgcgggccaaggagggggccgaggagggtgagaaggccaagagccccaaactcaggctgccccgagtgggcttcagccaaagtgagatggtcactggggaagggtcccccagccccgaggaggaggaggaggaggaggaagagggcagtggggaaggggcctcgggtcgccggggccgggtccgggtccgcttgccacgtgtaggcctggcggccccttctaaagcctctcgggggcaggagggcgatgcagcccccaagtcccccgtcagagagaagtcacccaagttccgcttccccagggtgtccctaagccccaaggcccggagtgggagtggggaccaggaagagggtggattgcgggtgcggctgcccagcgtggggttttcagagacaggggctccaggcccggccaggatggagggggctcaggctgcggctgtctgaagcccctagtcagatggggatcccttcttgccttcctttctctaccccctcgctgttgtgtgtgtgataactagcactaaccctaagagggccgggaggtgggtgactgaccagggctggcagggaggcctgctcctgtctctctggcaggagtgcctgtaccccaccaagccatgtgaataaaataatctggaagta

SEQ ID NO: 164372 - DNA, 10560 bp, Homo sapiens
  Payload ID: 12380
  Gene Symbol: PCNT
  Gene Name: pericentrin
  Uniprot ID: O95613
  ENST ID: ENST00000359568
  CDS Start-End: 108-10118
gcggggggagggcgagcccaagcgcgggggagggagtgtaaatagagcgaaggctgctctgtgtcagccccgtcaccgccgggcggcccgcgcggagtctgagggagatggaagttgagcaagagcagcggcgcagaaaggtggaggccgggaggacgaagcttgctcacttccgacagagaaaaacaaaaggtgacagttcgcattcggagaaaaagacggcgaagaggaagggctcggctgtcgatgcgtctgtccaggaggagagtccggtaaccaaggaggacagcgcactctgtggaggaggggacatttgcaaaagcacatcatgtgacgacacccctgatggggcaggaggggcctttgcagctcagccggaggactgtgatggagagaagagagaggacttggaacagctgcagcagaagcaagtcaatgaccatcctccagagcagtgtgggatgttcacagtcagtgaccacccaccagaacagcatgggatgttcacagtcggtgaccacccaccagaacagcgtgggatgttcacagtcagtgaccacccaccagaacagcatgggatgttcacagtcagtgaccacccaccagaacagcgtgggatgttcacaatcagtgaccaccaaccggaacagcgtgggatgttcacagtcagtgaccacacaccagaacagcgtgggatcttcacaatcagtgaccacccagcagaacagcgtgggatgttcacaaaggagtgtgaacaagaatgtgaacttgccattactgacctggagagcggccgtgaagatgaggctggcctgcatcagagtcaggccgtgcatggccttgagctggaggcgctgcgcctgagtctgagcaacatgcacacggcgcagctggagctgacacaggccaacctccagaaggagaaggagacggcattgacggagctgcgggagatgctcaacagccggcgtgcccaggagctggccctgctacagagcaggcagcagcacgagctggagctcctcagggagcagcacgcacgggagaaggaggaggtggtgctcaggtgtggacaggaagcagctgagctgaaggagaagttacaatcagaaatggagaaaaacgcccagatagtaaagaccctgaaggaagattgggaatctgaaaaagatttatgtttagaaaatctacgcaaagaactgtctgcaaagcatcaatcagaaatggaggatttacaaaaccagtttcagaaagaattggcagaacagagagctgagttggagaagatttttcaagacaaaaaccaggctgaacgggcccttaggaacctggagagtcatcatcaagcagccattgagaagttacgtgaagacctgcagtccgagcacggccggtgtttagaagacttggagttcaagttcaaagagagcgagaaagaaaaacagctggagttagagaatcttcaagcatcatatgaagacctgaaggcacaatcacaagaagagatcaggcgcttgtggtcccagcttgattctgccaggaccagtagacaggaattgagtgagctacatgagcaactcctggcgcgcacctctcgtgtggaagatttagaacagctgaagcagcgagaaaaaacccagcatgagtccgaactggagcaactgaggatttattttgaaaagaagttaagggatgctgagaaaacttaccaagaagacctaaccctgttacagcagaggctgcagggggcgagggaagatgctcttctggactctgtggaagttgggttgtcctgtgtgggtttagaagagaaacctgagaaaggaagaaaagatcacgttgatgaactcgagcctgagcgacataaggagagcctgccacgcttccaggcggagttagaagaaagccacaggcaccagctggaagcgctggagtctcccctctgcatccagcacgaggggcatgtctcagacagatgctgcgtagagacttcagcattgggacacgagtggcgtctggaaccctctgaagggcacagccaagagcttccctgggtgcatctccagggtgtgcaggacggggacttggaggccgacacagagcgggcagccagagtcttgggtctggaaactgagcacaaggtgcaactttcgcttcttcagactgagctcaaagaagaaattgaactcctaaaaatagaaaatagaaatttgtatgggaagttgcagcatgaaactcgtctgaaggacgatttggagaaggtaaaacacaatctaattgaagaccaccagaaggaactaaataatgctaagcaaaagactgagctgatgaaacaggaattccaaagaaaagaaacggactggaaagttatgaaggaggagctacagcgggaagctgaggagaagttaacattgatgctacttgaactgagagaaaaggctgaatccgagaaacagaccatcataaacaagtttgagcttcgagaagctgaaatgaggcagcttcaggaccaacaggcagcccagatcctggatctggagaggtccttgacggagcagcagggccgcctgcagcagctggaacaggacctcacttcagacgacgccctgcattgcagccagtgtgggcgggagccgcccacagcccaggacggggagcttgctgcgctccacgtgaaggaagactgcgccctgcagctgatgctggcccggagcaggtttttagaggaacgtaaagagatcaccgagaaattcagtgcggaacaagatgccttcctgcaggaggcccaggagcagcatgcccgtgagctgcagctcctccaggagagacaccagcagcagctcctgtcagtgacggcggagctcgaggccagacaccaggccgcgttgggcgagctgacagcctccttagagagcaagcagggggctctgctggctgcacgtgtggccgaactgcagacaaaacacgctgccgacctcggcgctctggagaccagacatctgtccagccttgattctttggaatcctgttacctctctgaatttcagaccatccgtgaggagcacaggcaggccctagagctcttacgagcagactttgaggaacaactgtggaaaaaggactctcttcaccaaacgattttgactcaagagttggagaaactgaagcggaaacacgaaggggagctacagtctgtgcgggaccacctgcgaaccgaagtgagcacagagctcgccggaaccgtggctcacgagctgcagggagtgcaccagggtgaatttggaagtgaaaagaaaactgctttgcatgaaaaagaggagacacttcggcttcagagtgcacaggcacagccttttcaccaagaggagaaagagtctttgtctctgcagcttcaaaagaagaatcaccaagtccagcagctgaaagaccaggttttatccttaagtcacgagatagaagagtgccgctccgagttggaggtgctgcagcagaggcgggagcgggagaaccgggaaggcgcaaacctcctctccatgctcaaggccgacgtcaacctgtcccacagcgaaagaggggccctccaggacgccctgcgcaggctgctgggtttgtttggagagacgctgagggcagccgtcaccctgaggagccggatcggggagcgcgtggggctctgcctggatgacgcgggcgcaggcctggccctgtcgacagctccggcgctggaggagacatggtctgatgtggccctcccggagttggacagaactttgtctgaatgtgcagagatgtcttccgtggctgaaattagcagccacatgcgtgaaagctttctcatgagcccagaaagtgtgcgggagtgtgagcagcccatccggagggtcttccagagcctcagcctggccgtggacggcctcatggagatggccctggactccagcaggcagctggaagaagcacgccaaattcattctcgttttgaaaaagaatttagttttaagaatgaggagacagcacaggttgtcaggaagcaccaggagctgctggagtgtttgaaggaggagagcgcagcaaaggcagagctggcgctggagctgcacaagactcagggtacccttgagggattcaaggtggagacagcagatctgaaggaggtgctggccgggaaggaggattccgagcaccgtctggtgctggagctggagagcctgagacggcagctgcagcaggcggcccaggagcaggcggcgctgagggaggagtgcacccgtctgtggagtcggggggaggccacagccacggacgccgaggccagagaagctgctctccggaaggaagtggaggatctgaccaaagaacagtcggagaccaggaagcaggctgagaaggaccgctcagccctgctctcccagatgaagattttggagtctgagttagaagaacagctgtctcagcatcgcgggtgtgccaagcaggcggaggccgtcactgccctggaacagcaggtggcatctctggacaagcatttgcgcaaccagcggcaattcatggatgagcaggcagccgagcgggagcacgagcgcgaggagttccagcaggagattcagaggctggaggggcagctccgccaggcggccaagccgcagccctggggccctcgcgacagccagcaggcgccgctggatggagaggttgagttgttacaacaaaagttgagagaaaagttggatgaatttaatgaattggctatacagaaagagtcggcagatagacaagtgttaatgcaggaagaagaaattaaacgtctggaggagatgaacatcaacatcaggaaaaaagtggcccagctccaggaagaagtggaaaaacagaaaaacatcgtgaaagggctggaacaggataaagaggtgttaaagaaacagcagatgagtagcttgcttctggcgtccacgttgcagtctacactagatgcaggcagatgtcccgagcctccttcgggcagccctcctgagggtccagaaatacagttagaggtgacacagagagcactcctgcggcgcgagagcgaggttttggacttaaaagaacagctagaaaagatgaaaggtgacttagaaagtaaaaatgaagaaatactacatctgaacttaaaattggacatgcagaacagccagactgctgtcagcctcagagaacttgaggaagagaacacgagcttgaaggtcatatataccagaagttctgagattgaagagctgaaagccactattgaaaatctgcaagagaatcagaaacgattacaaaaggagaaagcagaggaaattgaacaactccatgaagtcattgagaagctgcagcacgagctgtccctcatggggcctgtggtgcacgaagtcagcgacagtcaggctggcagtctgcagagcgagctgctctgctcccaggccgggggccctcgtgggcaggccctacagggcgagctcgaggctgcgctggaagccaaggaggccctgagccggctgctggctgaccaggagcgcaggcacagccaggccctggaggccctgcagcagcgcctccagggcgcagaggaggctgcggagctacagctggctgagctggagcgcaatgtagccctcagggaggctgaggtcgaagacatggcctcccggatccaggagttcgaagcggccctgaaagcaaaggaagcgacgattgccgagagaaatttagaaatcgacgctctgaaccagcggaaggcggcccactctgccgagctggaggccgtcctgttggccttggcccgcatccgccgcgccctggagcagcagcccctggcagccggggcggcgcctcccgagctgcagtggctccgagcgcagtgtgcccgcctcagccgccagctgcaggtgctgcaccagcggttcctgaggtgccaggtggagctggacaggcggcaggcccgcagagccacagctcacacacgggtgcccggggcccacccacagcctcgcatggatggtggcgccaaggcccaggtcaccggcgacgtggaggcctcccatgatgctgctttggagccggttgtccctgacccacagggtgatctgcagcctgtcctggtgacgttgaaggatgcacctctctgcaagcaagaaggcgtgatgtcagtgctcaccgtctgccagaggcagctgcagtcggagctgctcttggtgaaaaatgaaatgcgcctgagtctggaggacggcggcaagggtaaagaaaaagtactggaagattgtcagctgccgaaggtcgatctcgtagctcaggtgaaacagcttcaggaaaaactgaaccgtttgctgtattccatgaccttccagaatgtggatgctgccgacaccaaatctctgtggcccatggcctcagcacacctgttggagagcagctggagtgatgattcctgtgacggagaagagcctgacatatcaccccacatagacacatgtgatgccaatacagccacggggggtgtaactgatgttatcaaaaatcaggccatagacgcgtgtgatgccaatacaaccccagggggtgtaactgatgttatcaaaaattgggattccttgataccagatgaaatgccagattctcccattcaagaaaaatcagaatgtcaggacatgtctctttcttcaccgaccagcgtacttggtggctcccgccaccagagccacactgcagaggctgggccccggaagagcccggtcgggatgctggacctgtcttcctggagctcccctgaggtcctcaggaaggactggaccctggagccctggcccagcctccccgtgacaccccactcaggagccctgagcctgtgcagtgccgacacatccctgggggacagggcggacacctcgctgccacagacccaggggccggggctgctttgttccccaggcgtgtctgcagcagcgctggcactgcagtgggccgagtctccgccggctgacgaccaccatgtgcagaggacggctgtggagaaagatgtcgaagattttatcacaacatcctttgattctcaagaaacattaagttcacctcctcctggattagaaggaaaagctgatagaagtgagaaaagtgacggctcgggttttggagcaagactgagcccggggtcaggaggccctgaggctcaaactgctggtcctgtgacccctgcttccatctctggaaggtttcagccgctgccggaagccatgaaggagaaggaagtgcgtccgaagcacgtgaaggctttactgcagatggtgcgtgacgagagccaccagatcctggcgctgtcagaaggccttgcacccccaagcggcgagccacacccaccccggaaggaagacgagatacaggacatctcgctccatgggggaaagacgcaggaagtgcccaccgcgtgccccgattggagaggggaccttctgcaggttgtgcaagaggcctttgaaaaagagcaggagatgcagggggttgagctgcagccccgactcagtggctcagatctggggggtcacagctccctgctcgaaaggctggagaagatcatccgtgagcagggagacctgcaggaaaagtccctggagcatcttcgcttgccggaccggagcagcctgctgtccgagatccaggcgctgcgtgcccagctgcgcatgacgcacctgcagaaccaggagaagctgcagcacttgcgcacggcgctgacaagcgcagaggcgcgcgggagccagcaggagcaccagctgcgcaggcaggttgaactgctggcttataaagtagagcaggagaagtgcattgctggtgacttgcagaagacgctgagtgaagagcaagagaaggcaaacagcgtgcagaagctcctggcggcggagcagactgtagtgcgagatttgaagtccgacctctgtgagagcaggcagaagagcgaacagctgtcccggtccctctgcgaggtgcagcaggaggtcctccagctgagatccatgctgagcagtaaggagaacgagctgaaggccgcgcttcaggagctggagagtgagcaggggaaggggcgtgccctgcagagccagctggaggaggagcagctgcggcacctgcagagggagagccagagtgccaaggccctggaggagctgcgggcgtctttggagacacagcgtgctcagagcagtcgactctgcgtggcactgaaacacgagcagacggccaaggacaacctgcagaaggagctgcgtatcgagcactcacgctgcgaggccttgctggctcaggagcggagccagctctctgagctccagaaggaccttgcggctgagaagagccgcaccctggagctgtcagaggccttgcggcacgagcggctcctgaccgagcagctgagccagaggacacaggaggcttgcgtgcaccaggacacacaggcccatcacgctctgctgcagaagctgaaggaggagaagtcccgggtggtggacttgcaagcgatgcttgaaaaggtgcagcagcaagccctgcattctcagcagcagcttgaggctgaggctcagaagcactgtgaggcgctcaggagagagaaggaggtaagtgccacactgaagtcgacggtggaagccctgcacacccaaaaacgagagctgagatgctctctggagagagagagggagaaaccagcgtggttgcaggcagaattagagcagtcacacccacggttgaaagagcaagaaggacgcaaggctgcgaggaggagcgcggaggccaggcagagcccagcggctgcggagcagtggaggaagtggcagagagacaaggagaagctgcgagaattagaactgcagcgtcagcgtgacttgcataagatcaagcagcttcagcagacagtgagagacctggagtcgaaggacgaggtgcctggcagccgcctccacctaggttctgcccgcagggctgccggctcggatgcggaccacctccgggaacagcagcgagagctggaggcgatgaggcagcggctgctctctgccgcccggcttctcaccagcttcaccagccaggccgtggacaggacagttaatgattggacgtcatccaatgagaaagcagtgatgtctttactgcacacgttggaggagctgaagtctgacttgagcaggcccacctcctcccagaaaaaaatggcagcagagctgcagttccagtttgtggacgtcctgctgaaagacaatgtttccctcacaaaagcgctcagcacggtgacccaggagaagctggagctgagcagagccgtgtctaagcttgagaagttgctgaagcaccatctgcagaagggctgcagcccaagcaggtcggaaaggtctgcttggaagccagacgaaacggctccacagagttccctgaggcgcccagaccccggccggcttccaccagctgccagcgaggaagcacacaccagcaatgtcaagatggaaaaattgtacctgcattacttgagagcagagagctttagaaaagctctgatttatcaaaagaagtatcttttgctgttgattggtggattccaggattctgaacaagaaacactctccatgattgcccatttgggggtatttccttccaaagcagaacggaaaatcacatctcgtcctttcaccaggttccgcacggccgtcagggtggtcattgcaatattaagattacgttttttggttaagaaatggcaagaagtagatcggaaaggagctctggcacaaggcaaagcccctcgcccagggccccgagcacgacagccgcagtctccacccagaaccagagagtcccccccaacccgggatgtaccctctggccacaccagggaccctgccagaggccgcagactggcagcagcagcctccccacacagtgggggaagagccactccatccccaaattcaagattagaaagatccctgactgcttctcaagatccagaacattccttgacagagtatattcaccatttagaagtgatccagcaaagattgggaggggtactaccagattctacttcaaagaaatcctgccacccgatgattaaacagtgaataaaatgtcatggctctttcctgcgacaattctatttgaggaaaagatttgtttttcccttttcccaaggaagctcgtgggacagcatgggcactactcttcatgtgcggtgacaccagcccccagatgccttgaattaagtgtcctcacctttatgcatgactgcaaagccagctggagcattttctatggagcctccgtatgttttaggcccatgaccttcgtgaggtgacgggcactcactcccatgagccctggctgtgtgctgttgtgtgcctatcggcagatccatccttcctgcctccaaggaggatacacagagaatggcttcctgttgttttgtttattttcttaacgtgtacagatggaaacttcatttaaaaataaaaacaaaacaactcaaaaaggaataaaatttaatcactgttttgtttgtgaata

SEQ ID NO: 164373 - DNA, 796 bp, Homo sapiens
  Payload ID: 12380
  Gene Symbol: PCNT
  Gene Name: pericentrin
  ENST ID: ENST00000418394
  CDS Start-End: 1-686
aggagctgaagtctgacttgagcaggcccacctcctcccagaaaaaaatggcagcagagctgcagttccagtttgtggacgtcctgctgaaagacaatgtttccctcacaaaagcgctcagcacggtgacccaggagaagctggagctgagcagagccgtgtctaagcttgagaagttgctgaagcaccatctgcagaagggctgcagcccaagcaggtcggaaaggtctgcttggaagccagacgaaacggctccacagagttccctgaggcgcccagaccccggccggcttccaccagctgccagcgaggaagcacacaccagcaatgtcaagatggaaaaattgtacctgcattacttgagagcagagagctttagaaaagctctgatttatcaaaagaagtatcttttgctgttgattggtggattccaggattctgaacaagaaacactctccatgattgcccatttgggggtatttccttccaaagcagaacggaaaatcacatctcgtcctttcaccaggttccgcacggccgtcagggtggtcattgcaatattaagattacgttttttggttaagaaatggcaagaagtagatcggaaaggagctctggcacaaggcaaagcccctcgcccagattctacttcaaagaaatcctgccacccgatgattaaacagtgaataaaatgtcatggctctttcctgcgacaattctatttgaggaaaagatttgtttttcccttttcccaaggaagctcgtgggacagcatgggcactactcttcatgtgcg

SEQ ID NO: 164374 - DNA, 6820 bp, Homo sapiens
  Payload ID: 12381
  Gene Symbol: PCM1
  Gene Name: pericentriolar material 1
  Uniprot ID: Q15154
  ENST ID: ENST00000325083
  CDS Start-End: 440-6514
tccggcgggtcacatgactccagtctagctcgcattgcggctcccgcccgggcgagttctcgcccccgcgcggccgttgccgaggagacggcgcatgtcccgccgcgcgttgccccctctgcagtacccccgcccctcttctcccaccacaatgagatcctaagatggcggtggctgcggcggttggcgctgcgtagctgaggtcgaaaaggcggccactggggccgaggcagccaggaaacgtgtgggcctctctgctgcggtctccgagggccgaccgctgccggcggcgggtcgtgggggctgactgtcgctctgcctttgacaggagaggctgcttcttgtagaggaaacagctttgaagtgtggagcgggaaaggagcagtttctgagctgcaaaaactagtttctaaacagagagttaattgttaaatccagtatggccacaggaggaggtccctttgaagatggcatgaatgatcaggatttaccaaactggagtaatgagaatgttgatgacaggctcaacaatatggattggggtgcccaacagaagaaagcaaatagatcatcagaaaagaataagaaaaagtttggtgtagaaagtgataaaagagtaaccaatgatatttctccggagtcgtcaccaggagttggaaggcgaagaacaaagactccacatacgttcccacacagtagatacatgagtcagatgtctgtcccagagcaggcagaattagagaaactgaaacagcggataaacttcagtgatttagatcagagaagcattggaagtgattcccaaggtagagcaacagctgctaacaacaaacgtcagcttagtgaaaaccgaaagcccttcaactttttgcctatgcagattaatactaacaagagcaaagatgcatctacaaaccccccaaacagagaaacgattggatcagcacagtgtaaagagttgtttgcttctgctttaagtaatgacctcttgcaaaactgtcaggtgtctgaagaagatgggaggggagaacctgcaatggagagcagccagattgtaagcaggcttgttcaaattcgcgattatattactaaagctagttccatgcgggaagatcttgtagagaaaaatgagagatctgctaatgttgagcgccttactcatctaatagatcaccttaaagaacaagagaagtcatatatgaaatttcttaaaaaaatccttgccagagatcctcagcaggagcctatggaagagatagaaaatttgaagaaacaacatgatttattaaaaagaatgttacaacagcaggagcaactaagagctctacagggacggcaggctgcacttctagctctgcaacataaagcagagcaagctattgcagtgatggatgattctgttgttgcagaaactgcaggtagcttatctggcgtcagtatcacatctgaactaaatgaagaattgaatgacttaattcagcgttttcataatcagcttcgtgattctcagcctccagctgttccagacaatagaagacaggcagaaagtctttcattaactagggaggtttcccagagcaggaaaccatcagcttcagaacgtttacctgatgagaaagtcgaactttttagcaaaatgagagtgctacaggaaaagaaacaaaaaatggacaaattgcttggagaacttcatacacttcgagatcagcatcttaacaattcatcatcctctccacaaaggagtgtcgatcagagaagtacttcagctccctctgcttctgtaggcttggcaccggttgtcaatggagaatccaatagcctcacatcatctgttccttatcctactgcttctctagtatctcagaatgagagtgaaaacgaaggccacctcaatccatctgaaaaactccagaagttaaatgaagttcgaaagagattgaatgagctaagagaattagttcattattatgaacaaacgtcagacatgatgacagatgctgtgaatgaaaacaggaaagatgaagaaactgaagagtcagaatatgattctgagcatgaaaattccgagcctgttactaacattcgaaatccacaagtagcttccacttggaatgaagtaaatagtcatagtaatgcacagtgtgtttctaataatagagatgggcgaacagttaattctaattgtgaaattaacaacagatctgctgccaacataagggctctaaacatgcctccttctttagattgtcgatataatagagaaggggaacaggagattcatgttgcacaaggtgaagatgatgaggaggaggaggaagaagcagaagaggagggagtcagtggagcttcattatctagtcacaggagcagtctggttgatgagcatccagaagatgctgaatttgaacagaagatcaaccgacttatggctgcaaaacagaaacttagacagttacaagatcttgttgctatggtacaggatgatgatgcagctcaaggagttatctctgccagtgcatcaaatttggatgatttctacccagcagaagaagacaccaagcaaaattcaaataacactagaggaaatgccaataaaacacagaaagatactggagtaaatgaaaaggcaagagagaaattttatgaggctaaactacagcagcaacagagagagctaaaacaattgcaggaagaaagaaagaaactgattgacattcaggagaaaattcaagcattgcaaacggcatgccctgacttacagctgtcagctgctagtgtgggtaactgtcccaccaaaaaatatatgccagctgttacttcaaccccaactgttaatcaacacgagaccagtacaagcaaatctgtttttgagcctgaagattcttcaatagtagataatgagttgtggtcagaaatgagaagacatgaaatgttgagggaggagctgcgacagagaagaaagcagcttgaagctctgatggctgaacatcagaggaggcaaggtctagctgaaactgcatctccagtggctgtgtcattgagaagtgatggatctgagaacctatgtactcctcagcaaagtagaacagaaaaaacgatggcaacttggggagggtctacccagtgtgcactagatgaagaaggagatgaagacggttacctttctgaaggaattgttcggacagatgaagaggaggaagaagagcaagatgccagttccaatgataacttttctgtgtgtccttctaacagtgtgaatcataactcctacaatggaaaggaaactaaaaataggtggaagaacaattgccctttttcggcagatgaaaattatcgtcctttagccaagacaaggcaacagaatatcagcatgcaacggcaagaaaaccttcgttgggtgtcagagctctcttacgtagaagagaaagaacaatggcaagaacaaatcaatcagctaaagaaacagcttgattttagtgtcagtatttgtcagactttgatgcaagaccagcagactctatcttgtctgctacaaactcttctcacgggtccttacagtgttatgcccagcaatgttgcatctcctcaagtacacttcataatgcaccagttgaaccagtgctatactcagctaacatggcaacagaataatgttcagaggttgaaacaaatgctaaatgaacttatgcgccagcaaaatcagcatccagaaaaacctggaggcaaggaaagaggcagtagtgcatcgcaccctccttctcccagtttattttgtcctttcagctttccaacacagcctgtaaatctcttcaatatacctggatttactaacttttcatcatttgcaccaggtatgaatttcagccctttatttccttctaattttggagatttttctcagaatatctctacacccagtgaacagcagcaacccttagcccagaattcttcaggaaaaacagaatatatggcttttccaaaaccttttgaaagcagttcctctattggagcagagaaaccaaggaataaaaaactgcctgaagaggaggtggaaagcagtaggacaccatggttatatgaacaagaaggtgaagtagagaaaccatttatcaagactggattttcagtgtctgtagaaaaatctacaagtagtaaccgcaaaaatcaattagatacaaacggaagaagacgccagtttgatgaagaatcactggaaagctttagcagtatgcctgatccagtagatccaacaacagtgactaaaacattcaagacaagaaaagcgtctgcacaggccagcctggcatctaaagataaaactcccaagtcaaaaagtaagaagaggaattctactcagctgaaaagcagagttaaaaacatcaggtatgaaagtgccagtatgtctagcacatgtgaaccttgcaaaagtaggaacagacattcagcccagactgaagagcctgttcaagcaaaagtattcagcagaaagaatcatgagcaactggaaaaaataataaaatgtaataggtctacagaaatatcttcagaaactgggagtgatttttccatgtttgaagctttgcgagatactatttattctgaagtagctacattaatttctcaaaatgaatctcgtccacattttcttattgaactcttccatgagctgcagctactaaacacagactacttgagacagagggctttatatgcattgcaggacatagtatccagacatatttctgagagccatgaaaaaggagaaaatgtaaagtcagtaaactctggtacttggatagcatcaaactcagaacttactcctagtgagagccttgctactactgatgatgaaacttttgagaagaactttgaaagagaaacccataaaataagtgagcaaaatgatgctgataatgctagtgtcctgtctgtatcatcaaattttgagccttttgcaacagatgatctaggtaacaccgtgattcacttagatcaagcattagccagaatgagagaatatgagcgtatgaagactgaggctgaaagtaactcaaatatgagatgcacctgcaggattattgaggatggagatggtgctggtgcaggtactacagttaataatttagaagaaactcccgttattgaaaatcgtagttcacaacaacctgtaagtgaagtttctaccatcccatgtcctagaattgatactcagcagctggaccggcaaattaaagcaattatgaaagaagtcattccttttttgaaggagcacatggatgaagtatgctcctcgcagcttctaacttcagtaaggcgcatggttttgacccttacccagcaaaatgatgagagcaaagagtttgtaaagttctttcataaacaacttggaagtatattacaggattcactggcaaaatttgctggcagaaaactgaaagactgtggagaagatcttcttgtagagatatctgaagtgttgttcaatgaattggctttctttaagcttatgcaagatttggataataatagtataactgttaaacagagatgcaaaaggaaaatagaagcaactggagtgatacaatcttgtgccaaagaggctaaaaggattcttgaagatcatggctcacctgctggagagattgatgatgaagacaaagacaaggatgaaactgaaacagttaagcagactcaaacatctgaggtgtatgatggtcccaaaaatgtaagatctgatatttctgatcaagaggaagatgaagaaagtgaaggatgtccagtgtctattaatttgtctaaagctgaaactcaggctttaactaattatggaagtggagaagatgaaaatgaggatgaagaaatggaagaatttgaagaaggccctgtggatgtccagacttccctccaggctaacactgaagctactgaagaaaatgaacatgatgaacaggtcctacaacgtgactttaaaaagacagcagaaagcaaaaatgtcccattggaacgagaagccactagtaaaaatgaccaaaataactgtcctgtgaaaccctgttacctcaatatcttggaagatgagcaacctttaaatagtgctgcccataaggagtcacctcctactgttgattcaactcaacagcctaaccctttgccgttacgtttacctgaaatggaacccttagtgcctagagtcaaagaagttaaatctgctcaggaaactcctgaaagctctctggctggaagtcctgatactgaatctccagtgttagtgaatgactatgaagcagaatctggtaatataagtcaaaagtctgatgaagaagattttgtaaaagttgaagatttaccactgaaactgacaatatattcagaggcagatctaagaaagaaaatggtagaagaagaacagaaaaaccatttatctggtgaaatatgtgaaatgcagaccgaagaattagctggaaattctgagacactaaaagaacctgaaacggtgggagcccagagtatatgagatgtcttcagaggctcatctaactctgtccttacatactcaatgcatatatgaaaacaatactaaataaacatctgatctgtataaaaatgtaaattagtttgacactgcttttttgataggtgtggtcatttctccccatggtagtttaaaacatcagaaactgaattctggacagatttaagccttgacacactgtgtttttttttttttcccccttcttttttgggtcttcatttttttccccattgtgatgtttggtaacgaatttaaaatgtagttttaaataaagtttggacttatcta

SEQ ID NO: 164375 - DNA, 8287 bp, Homo sapiens
  Payload ID: 12381
  Gene Symbol: PCM1
  Gene Name: pericentriolar material 1
  ENST ID: ENST00000327578
  CDS Start-End: 423-6005
ctccagtctagctcgcattgcggctcccgcccgggcgagttctcgcccccgcgcggccgttgccgaggagacggcgcatgtcccgccgcgcgttgccccctctgcagtacccccgcccctcttctcccaccacaatgagatcctaagatggcggtggctgcggcggttggcgctgcgtagctgaggtcgaaaaggcggccactggggccgaggcagccaggaaacgtgtgggcctctctgctgcggtctccgagggccgaccgctgccggcggcgggtcgtgggggctgactgtcgctctgcctttgacaggagaggctgcttcttgtagaggaaacagctttgaagtgtggagcgggaaaggagcagtttctgagctgcaaaaactagtttctaaacagagagttaattgttaaatccagtatggccacaggaggaggtccctttgaagatggcatgaatgatcaggatttaccaaactggagtaatgagaatgttgatgacaggctcaacaatatggattggggtgcccaacagaagaaagcaaatagatcatcagaaaagaataagaaaaagtttggtgtagaaagtgataaaagagtaaccaatgatatttctccggagtcgtcaccaggagttggaaggcgaagaacaaagactccacatacgttcccacacagtagatacatgagtcagatgtctgtcccagagcaggcagaattagagaaactgaaacagcggataaacttcagtgatttagatcagagaagcattggaagtgattcccaaggtagagcaacagctgctaacaacaaacgtcagcttagtgaaaaccgaaagcccttcaactttttgcctatgcagattaatactaacaagagcaaagatgcatctacaaaccccccaaacagagaaacgattggatcagcacagtgtaaagagttgtttgcttctgctttaagtaatgacctcttgcaaaactgtcaggtgtctgaagaagatgggaggggagaacctgcaatggagagcagccagattgtaagcaggcttgttcaaattcgcgattatattactaaagctagttccatgcgggaagatcttgtagagaaaaatgagagatctgctaatgttgagcgccttactcatctaatagatcaccttaaagaacaagagaagtcatatatgaaatttcttaaaaaaatccttgccagagatcctcagcaggagcctatggaagagatagaaaatttgaagaaacaacatgatttattaaaaagaatgttacaacagcaggagcaactaagagctctacagggacggcaggctgcacttctagctctgcaacataaagcagagcaagctattgcagtgatggatgattctgttgttgcagaaactgcaggtagcttatctggcgtcagtatcacatctgaactaaatgaagaattgaatgacttaattcagcgttttcataatcagcttcgtgattctcagcctccagctgttccagacaatagaagacaggcagaaagtctttcattaactagggaggtttcccagagcaggaaaccatcagcttcagaacgtttacctgatgagaaagtcgaactttttagcaaaatgagagtgctacaggaaaagaaacaaaaaatggacaaattgcttggagaacttcatacacttcgagatcagcatcttaacaattcatcatcctctccacaaaggagtgtcgatcagagaagtacttcagctccctctgcttctgtaggcttggcaccggttgtcaatggagaatccaatagcctcacatcatctgttccttatcctactgcttctctagtatctcagaatgagagtgaaaacgaaggccacctcaatccatctgaaaaactccagaagttaaatgaagttcgaaagagattgaatgagctaagagaattagttcattattatgaacaaacgtcagacatgatgacagatgctgtgaatgaaaacaggaaagatgaagaaactgaagagtcagaatatgattctgagcatgaaaattccgagcctgttactaacattcgaaatccacaagtagcttccacttggaatgaagtaaatagtcatagtaatgcacagtgtgtttctaataatagagatgggcgaacagttaattctaattgtgaaattaacaacagatctgctgccaacataagggctctaaacatgcctccttctttagcagattgtcgatataatagagaaggggaacaggagattcatgttgcacaaggtgaagatgatgaggaggaggaggaagaagcagaagaggagggagtcagtggagcttcattatctagtcacaggagcagtctggttgatgagcatccagaagatgctgaatttgaacagaagatcaaccgacttatggctgcaaaacagaaacttagacagttacaagatcttgttgctatggtacaggatgatgatgcagctcaaggagttatctctgccagtgcatcaaatttggatgatttctacccagcagaagaagacaccaagcaaaattcaaataacactagaggaaatgccaataaaacacagaaagatactggagtaaatgaaaaggcaagagagaaattttatgaggctaaactacagcagcaacagagagagctaaaacaattgcaggaagaaagaaagaaactgattgacattcaggagaaaattcaagcattgcaaacggcatgccctgacttacagctgtcagctgctagtgtgggtaactgtcccaccaaaaaatatatgccagctgttacttcaaccccaactgttaatcaacacgagaccagtacaagcaaatctgtttttgagcctgaagattcttcaatagtagataatgagttgtggtcagaaatgagaagacatgaaatgttgagggaggagctgcgacagagaagaaagcagcttgaagctctgatggctgaacatcagaggaggcaaggtctagctgaaactgcatctccagtggctgtgtcattgagaagtgatggatctgagaacctatgtactcctcagcaaagtagaacagaaaaaacgatggcaacttggggagggtctacccagtgtgcactagatgaagaaggagatgaagacggttacctttctgaaggaattgttcggacagatgaagaggaggaagaagagcaagatgccagttccaatgataacttttctgtgtgtccttctaacagtgtgaatcataactcctacaatggaaaggaaactaaaaataggtggaagaacaattgccctttttcggcagatgaaaattatcgtcctttagccaagacaaggcaacagaatatcagcatgcaacggcaagaaaaccttcgttgggtgtcagagctctcttacgtagaagagaaagaacaatggcaagaacaaatcaatcagctaaagaaacagcttgattttagtgtcagtatttgtcagactttgatgcaagaccagcagactctatcttgtctgctacaaactcttctcacgggtccttacagtgttatgcccagcaatgttgcatctcctcaagtacacttcataatgcaccagttgaaccagtgctatactcagctaacatggcaacagaataatgttcagaggttgaaacaaatgctaaatgaacttatgcgccagcaaaatcagcatccagaaaaacctggaggcaaggaaagaggcagtagtgcatcgcaccctccttctcccagtttattttgtcctttcagctttccaacacagcctgtaaatctcttcaatatacctggatttactaacttttcatcatttgcaccaggtatgaatttcagccctttatttccttctaattttggagatttttctcagaatatctctacacccagtgaacagcagcaacccttagcccagaattcttcaggaaaaacagaatatatggcttttccaaaaccttttgaaagcagttcctctattggagcagagaaaccaaggaataaaaaactgcctgaagaggaggtggaaagcagtaggacaccatggttatatgaacaagaaggtgaagtagagaaaccatttatcaagactggattttcagtgtctgtagaaaaatctacaagtagtaaccgcaaaaatcaattagatacaaacggaagaagacgccagtttgatgaagaatcactggaaagctttagcagtatgcctgatccagtagatccaacaacagtgactaaaacattcaagacaagaaaagcgtctgcacaggccagcctggcatctaaagataaaactcccaagtcaaaaagtaagaagaggaattctactcagctgaaaagcagagttaaaaacatcaaaactgggagtgatttttccatgtttgaagctttgcgagatactatttattctgaagtagctacattaatttctcaaaatgaatctcgtccacattttcttattgaactcttccatgagctgcagctactaaacacagactacttgagacagagggctttatatgcattgcaggacatagtatccagacatatttctgagagccatgaaaaaggagaaaatgtaaagtcagtaaactctggtacttggatagcatcaaactcagaacttactcctagtgagagccttgctactactgatgatgaaacttttgagaagaactttgaaagagaaacccataaaataagtgagcaaaatgatgctgataatgctagtgtcctgtctgtatcatcaaattttgagccttttgcaacagatgatctaggtaacaccgtgattcacttagatcaagcattagccagaatgagagaatatgagcgtatgaagactgaggctgaaagtaactcaaatatgagatgcacctgcaggattattgaggatggagatggtgctggtgcaggtactacagttaataatttagaagaaactcccgttattgaaaatcgtagttcacaacaacctgtaagtgaagtttctaccatcccatgtcctagaattgatactcagcagctggaccggcaaattaaagcaattatgaaagaagtcattccttttttgaaggagcacatggatgaagtatgctcctcgcagcttctaacttcagtaaggcgcatggttttgacccttacccagcaaaatgatgagagcaaagagtttgtaaagttctttcataaacaacttggaagtatattacaggattcactggcaaaatttgctggcagaaaactgaaagactgtggagaagatcttcttgtagagatatctgaagtgttgttcaatgaattggctttctttaagcttatgcaagatttggataataatagtataactgttaaacagagatgcaaaaggaaaatagaagcaactggagtgatacaatcttgtgccaaagaggctaaaaggattcttgaagatcatggctcacctgctggagagattgatgatgaagacaaagacaaggatgaaactgaaacagttaagcagactcaaacatctgaggtgtatgatggtcccaaaaatgtaagatctgatatttctgatcaagaggaagatgaagaaagtgaaggatgtccagtgtctattaatttgtctaaagctgaaactcaggctttaactaattatggaagtggagaagatgaaaatgaggatgaagaaatggaagaatttgaagaaggccctgtggatgtccagacttccctccaggctaacactgaagctactgaagaaaatgaacatgatgaacaggaagcagaatctggtaatataagtcaaaagtctgatgaagaagattttgtaaaagttgaagatttaccactgaaactgacaatatattcagaggcagatctaagaaagaaaatggtagaagaagaacagaaaaaccatttatctggtgaaatatgtgaaatgcagaccgaagaattagctggaaattctgagacactaaaagaacctgaaacggtgggagcccagagtatatgagatgtcttcagaggctcatctaactctgtccttacatactcaatgcatatatgaaaacaatactaaataaacatctgatctgtataaaaatgtaaattagtttgacactgcttttttgataggtgtggtcatttctccccatggtagtttaaaacatcagaaactgaattctggacagatttaagccttgacacactgtgtttttttttttttcccccttcttttttgggtcttcatttttttccccattgtgatgtttggtaacgaatttaaaatgtagttttaaataaagtttggacttatctataaagtatcttttttggaaattatattgaattctatacagcaagtcaatgttttatataactttaggctgctcagagaagagcaatggttaagagttagttagagaaatatattatttgttataaagcccatccattaggccagtcttccaactaatgccagtgttgctgctgttgggtctgatgttcttcttttagatacctgcaggtcctattcctgtgcaagaatagggcagattatcaagatatccaggatacctatgaagttattatagaatatttattaatccattgaaattggataataagtttagaacataggttctcagtatctagaacttacatcattatcatctgtttgttaggatttgaaattctggaaaatatttatctacatcgcctcagactaaaagtaaaaaaaataagctttatataattagggagatttctgcacagagaagtaacattgtggttaattttaaatgaaaaacttaactttttcaagtggggataaataatacaactaaatttctgtaatagtaagattctgtatgccttcagataaacttgcctattgagatggtaatttaaagccaaagcatagcagtttcttttgtgtgtagtgaggttgaagcagatttgcaggtgaagtattgaaagtttatgtgactttaagtcagcttttgaaaagtgattgatttgctttttatcccaaactgtccatatacccagtaaggcttcaaaaaaccagtcaacaatgagtaagtcaatcttatagattcttcttcctcgaataaaatacaaagaattagttccaataagtattttaactttgttaacaactgaaataccccataaaaaaagaacttgttgagagtatttctttaaaatggttacttgctgcccaggcaccatggctcactcctgtaatcccagcaccttgggaggccgaggcgggcagatcacgaggtcaagagattgagaccatcctgcccaacatgggggaaaccccgtctctactaaaaataaaaaaattagctgggagaggtggcacgtgcctgtagtcctagctacttgggaggctaaggcaggagaatagcctgaacccgggaggtggaggttgcaggttgcagtgagccgagatcatgccactgcactccagcctggcaacagagcgagactctgtctcaaaaaaaaaaaaaaaaaaaaaaaaaagttaacttgctgtatacctcagtgtaatgtccattcaaggagtattaaatgaggatttccctgcgaggacatttactgtattgctacttaaattatggaagacaatatatcttcaactttaataaaacctattcagaaaattaccaattcagaattcggagttcttatccaggtgctctaactaacttcagggaaattggaacaataagttatgttacatgcacactcaaattctttattttctccactttaagcaggaaagggtaaaaactgttttggtactcaagcccagccttacatactgtgtttctctctctgtctgcatgcatattaaagtggaaaaattgtatttatatcttagttattaccatagtacctatgaaccttatcaaaattgcttatttgactggtgttacagctgctattaatctaagtctattgtttttctattttagtagataatttagttttaaaatacgtagggtttgagagcagatatatttatttaatctgttttctctagtaactattgctgaagggttaggcattcagtattcctatttgtcctaattttgaagttaaaaattttggttacagatagatagagggagaaaagttcaaaatgagtgagagagaactttatgcaggttgagataatgcctaaaataatgagctggccagactgtggaggtactctttgtattttgtaacattgactttgggtaaatgctttttcactgttaataaatatatatcctgtat

SEQ ID NO: 164376 - DNA, 2171 bp, Homo sapiens
  Payload ID: 12381
  Gene Symbol: PCM1
  Gene Name: pericentriolar material 1
  ENST ID: ENST00000518537
  CDS Start-End: 281-1873
ctaagatggcggtggctgcggcggttggcgctgcgtagctgaggtcgaaaaggcggccactggggccgaggcagccaggaaacgtgtgggcctctctgctgcggtctccgagggccgaccgctgccggcggcgggtcgtgggggctgactgtcgctctgcctttgacaggagaggctgcttcttgtagaggaaacagctttgaagtgtggagcgggaaaggagcagtttctgagctgcaaaaactagtttctaaacagagagttaattgttaaatccagtatggccacaggaggaggtccctttgaagatggcatgaatgatcaggatttaccaaactggagtaatgagaatgttgatgacaggctcaacaatatggattggggtgcccaacagaagaaagcaaatagatcatcagaaaagaataagaaaaagtttggtgtagaaagtgataaaagagtaaccaatgatatttctccggagtcgtcaccaggagttggaaggcgaagaacaaagactccacatacgttcccacacagtagatacatgagtcagatgtctgtcccagagcaggcagaattagagaaactgaaacagcggataaacttcagtgatttagatcagagaagcattggaagtgattcccaaggtagagcaacagctgctaacaacaaacgtcagcttagtgaaaaccgaaagcccttcaactttttgcctatgcagattaatactaacaagagcaaagatgcatctacaaaccccccaaacagagaaacgattggatcagcacagtgtaaagagttgtttgcttctgctttaagtaatgacctcttgcaaaactgtcaggtgtctgaagaagatgggaggggagaacctgcaatggagagcagccagattgtaagcaggcttgttcaaattcgcgattatattactaaagctagttccatgcgggaagatcttgtagagaaaaatgagagatctgctaatgttgagcgccttactcatctaatagatcaccttaaagaacaagagaagtcatatatgaaatttcttaaaaaaatccttgctagagaaaatgaggaggaggatgttcggactatagattcagctgtgggatctggttctgtagctgagagcacatcgctaaacatagatgtgcagtctgaggcttcagataccacggccagagatcctcagcaggagcctatggaagagatagaaaatttgaagaaacaacatgatttattaaaaagaatgttacaacagcaggagcaactaagagctctacagggacggcaggctgcacttctagctctgcaacataaagcagagcaagctattgcagtgatggatgattctgttgttgcagaaactgcaggtagcttatctggcgtcagtatcacatctgaactaaatgaagaattgaatgacttaattcagcgttttcataatcagcttcgtgattctcagcctccagctgttccagacaatagaagacaggcagaaagtctttcattaactagggaggtttcccagagcaggaaaccatcagcttcagaacgtttacctgatgagaaagtcgaactttttagcaaaatgagagtgctacaggaaaagaaacaaaaaatggacaaattgcttggagaacttcatacacttcgagatcagcatcttaacaattcatcatcctctccacaaaggagtgtcgatcagagaagtacttcagctccctctgcttctgtaggcttggcaccggttgtcaatggagaatccaatagcctcacatcatctgttccttatcctactgcttctctagtatctcagaatgagagtgaaaacgaaggccacctcaatccatctgaaaaactccagtaaaacatttataatcattgtttacatgaagttaaataatagggataaattctgtttttttttttatgttgaaaattctgcaaaacgagatttatttaatattgttgtaaacattcttaagggataggtagaagaggcgtgtgtgtgttgtgtgggcataatttgagttgtctaagagatgtgatgtaacatagtttctgtgaactgatgttactttcttgtttttcaaataaaggatcaaaaataagattacagttaaaatatttctatattcagatggtttagagaccaggctgtagaa

SEQ ID NO: 164377 - DNA, 2536 bp, Homo sapiens
  Payload ID: 12381
  Gene Symbol: PCM1
  Gene Name: pericentriolar material 1
  ENST ID: ENST00000517730
  CDS Start-End: 290-2536
aatgagatcctaagatggcggtggctgcggcggttggcgctgcgtagctgaggtcgaaaaggcggccactggggccgaggcagccaggaaacgtgtgggcctctctgctgcggtctccgagggccgaccgctgccggcggcgggtcgtgggggctgactgtcgctctgcctttgacaggagaggctgcttcttgtagaggaaacagctttgaagtgtggagcgggaaaggagcagtttctgagctgcaaaaactagtttctaaacagagagttaattgttaaatccagtatggccacaggaggaggtccctttgaagatggcatgaatgatcaggatttaccaaactggagtaatgagaatgttgatgacaggctcaacaatatggattggggtgcccaacagaagaaagcaaatagatcatcagaaaagaataagaaaaagtttggtgtagaaagtgataaaagagtaaccaatgatatttctccggagtcgtcaccaggagttggaaggcgaagaacaaagactccacatacgttcccacacagtagatacatgagtcagatgtctgtcccagagcaggcagaattagagaaactgaaacagcggataaacttcagtgatttagatcagagaagcattggaagtgattcccaaggtagagcaacagctgctaacaacaaacgtcagcttagtgaaaaccgaaagcccttcaactttttgcctatgcagattaatactaacaagagcaaagatgcatctacaaaccccccaaacagagaaacgattggatcagcacagtgtaaagagttgtttgcttctgctttaagtaatgacctcttgcaaaactgtcaggtgtctgaagaagatgggaggggagaacctgcaatggagagcagccagattgtaagcaggcttgttcaaattcgcgattatattactaaagctagttccatgcgggaagatcttgtagagaaaaatgagagatctgctaatgttgagcgccttactcatctaatagatcaccttaaagaacaagagaagtcatatatgaaatttcttaaaaaaatccttgctagagaaaatgaggaggaggatgttcggactatagattcagctgtgggatctggttctgtagctgagagcacatcgctaaacatagatgtgcagtctgaggcttcagataccacggccagagatcctcagcaggagcctatggaagagatagaaaatttgaagaaacaacatgatttattaaaaagaatgttacaacagcaggagcaactaagagctctacagggacggcaggctgcacttctagctctgcaacataaagcagagcaagctattgcagtgatggatgattctgttgttgcagaaactgcaggtagcttatctggcgtcagtatcacatctgaactaaatgaagaattgaatgacttaattcagcgttttcataatcagcttcgtgattctcagcctccagctgttccagacaatagaagacaggcagaaagtctttcattaactagggaggtttcccagagcaggaaaccatcagcttcagaacgtttacctgatgagaaagtcgaactttttagcaaaatgagagtgctacaggaaaagaaacaaaaaatggacaaattgcttggagaacttcatacacttcgagatcagcatcttaacaattcatcatcctctccacaaaggagtgtcgatcagagaagtacttcagctccctctgcttctgtaggcttggcaccggttgtcaatggagaatccaatagcctcacatcatctgttccttatcctactgcttctctagtatctcagaatgagagtgaaaacgaaggccacctcaatccatctgaaaaactccagaagttaaatgaagttcgaaagagattgaatgagctaagagaattagttcattattatgaacaaacgtcagacatgatgacagatgctgtgaatgaaaacaggaaagatgaagaaactgaagagtcagaatatgattctgagcatgaaaattccgagcctgttactaacattcgaaatccacaagtagcttccacttggaatgaagtaaatagtcatagtaatgcacagtgtgtttctaataatagagatgggcgaacagttaattctaattgtgaaattaacaacagatctgctgccaacataagggctctaaacatgcctccttctttagattgtcgatataatagagaaggggaacaggagattcatgttgcacaaggtgaagatgatgaggaggaggaggaagaagcagaagaggagggagtcagtggagcttcattatctagtcacaggagcagtctggttgatgagcatccagaagatgctgaatttgaacagaagatcaaccgacttatggctgcaaaacagaaacttagacagttacaagatcttgttgctatggtacaggatgatgatgcagctcaaggagttatctctgccagtgcatcaaatttggatgatttctacccagcagaagaagacaccaagcaaaattca

SEQ ID NO: 164378 - DNA, 2379 bp, Homo sapiens
  Payload ID: 12381
  Gene Symbol: PCM1
  Gene Name: pericentriolar material 1
  ENST ID: ENST00000522275
  CDS Start-End: 1-2294
gaaaagcgtctgcacaggccagcctggcatctaaagataaaactcccaagtcaaaaagtaagaagaggaattctactcagctgaaaagcagagttaaaaacatcaggtatgaaagtgccagtatgtctagcacatgtgaaccttgcaaaagtaggaacagacattcagcccagactgaagagcctgttcaagcaaaagtattcagcagaaagaatcatgagcaactggaaaaaataataaaatgtaataggtctacagaaatatcttcagcacatgctaggagaatactacagcagtctaacagaaatgcatgcaatgaagcgccagaaactgggagtgatttttccatgtttgaagctttgcgagatactatttattctgaagtagctacattaatttctcaaaatgaatctcgtccacattttcttattgaactcttccatgagctgcagctactaaacacagactacttgagacagagggctttatatgcattgcaggacatagtatccagacatatttctgagagccatgaaaaaggagaaaatgtaaagtcagtaaactctggtacttggatagcatcaaactcagaacttactcctagtgagagccttgctactactgatgatgaaacttttgagaagaactttgaaagagaaacccataaaataagtgagcaaaatgatgctgataatgctagtgtcctgtctgtatcatcaaattttgagccttttgcaacagatgatctaggtaacaccgtgattcacttagatcaagcattagccagaatgagagaatatgagcgtatgaagactgaggctgaaagtaactcaaatatgagatgcacctgcaggattattgaggatggagatggtgctggtgcaggtactacagttaataatttagaagaaactcccgttattgaaaatcgtagttcacaacaacctgtaagtgaagtttctaccatcccatgtcctagaattgatactcagcagctggaccggcaaattaaagcaattatgaaagaagtcattccttttttgaaggagcacatggatgaagtatgctcctcgcagcttctaacttcagtaaggcgcatggttttgacccttacccagcaaaatgatgagagcaaagagtttgtaaagttctttcataaacaacttggaagtatattacaggattcactggcaaaatttgctggcagaaaactgaaagactgtggagaagatcttcttgtagagatatctgaagtgttgttcaatgaattggctttctttaagcttatgcaagatttggataataatagtataactgttaaacagagatgcaaaaggaaaatagaagcaactggagtgatacaatcttgtgccaaagaggctaaaaggattcttgaagatcatggctcacctgctggagagattgatgatgaagacaaagacaaggatgaaactgaaacagttaagcagactcaaacatctgaggtgtatgatggtcccaaaaatgtaagatctgatatttctgatcaagaggaagatgaagaaagtgaaggatgtccagtgtctattaatttgtctaaagctgaaactcaggctttaactaattatggaagtggagaagatgaaaatgaggatgaagaaatggaagaatttgaagaaggccctgtggatgtccagacttccctccaggctaacactgaagctactgaagaaaatgaacatgatgaacaggtcctacaacgtgactttaaaaagacagcagaaagcaaaaatgtcccattggaacgagaagccactagtaaaaatgaccaaaataactgtcctgtgaaaccctgttacctcaatatcttggaagatgagcaacctttaaatagtgctgcccataaggagtcacctcctactgttgattcaactcaacagcctaaccctttgccgttacgtttacctgaaatggaacccttagtgcctagagtcaaagaagttaaatctgctcaggaaactcctgaaagctctctggctggaagtcctgatactgaatctccagtgttagtgaatgactatgaagcagaatctggtaatataagtcaaaagtctgatgaagaagattttgtaaaagttgaagatttaccactgaaactgacaatatattcagaggcagatctaagaaagaaaatggtagaagaagaacagaaaaaccatttatctggtgaaatatgtgaaatgcagaccgaagaattagctggaaattctgagacactaaaagaacctgaaacggtgggagcccagagtatatgagatgtcttcagaggctcatctaactctgtccttacatactcaatgcatatatgaaaacaatactaaataaacatctgatctgtat

SEQ ID NO: 164379 - DNA, 1426 bp, Homo sapiens
  Payload ID: 12381
  Gene Symbol: PCM1
  Gene Name: pericentriolar material 1
  ENST ID: ENST00000523055
  CDS Start-End: 202-1426
gtggctgcggcggttggcgctgcgtagctgaggtcgaaaaggcggccactggggccgaggcagccaggaaacgtgtgggcctctctgctgcggtctccgagggccgaccgctgccggcggcgggtcgtgggggctgactgtcgctctgcctttgacaggagaggctgcttcttgtagagagagttaattgttaaatccagtatggccacaggaggaggtccctttgaagatggcatgaatgatcaggatttaccaaactggagtaatgagaatgttgatgacaggctcaacaatatggattggggtgcccaacagaagaaagcaaatagatcatcagaaaagaataagaaaaagtttggtgtagaaagtgataaaagagtaaccaatgatatttctccggagtcgtcaccaggagttggaaggcgaagaacaaagactccacatacgttcccacacagtagatacatgagtcagatgtctgtcccagagcaggcagaattagagaaactgaaacagcggataaacttcagtgatttagatcagagaagcattggaagtgattcccaaggtagagcaacagctgctaacaacaaacgtcagcttagtgaaaaccgaaagcccttcaactttttgcctatgcagattaatactaacaagagcaaagatgcatctacaaaccccccaaacagagaaacgattggatcagcacagtgtaaagagttgtttgcttctgctttaagtaatgacctcttgcaaaactgtcaggtgtctgaagaagatgggaggggagaacctgcaatggagagcagccagattgtaagcaggcttgttcaaattcgcgattatattactaaagctagttccatgcgggaagatcttgtagagaaaaatgagagatctgctaatgttgagcgccttactcatctaatagatcaccttaaagaacaagagaagtcatatatgaaatttcttaaaaaaatccttgccagagatcctcagcaggagcctatggaagagatagaaaatttgaagaaacaacatgatttattaaaaagaatgttacaacagcaggagcaactaagagctctacagggacggcaggctgcacttctagctctgcaacataaagcagagcaagctattgcagtgatggatgattctgttgttgcagaaactgcaggtagcttatctggcgtcagtatcacatctgaactaaatgaagaattgaatgacttaattcagcgttttcataatcagcttcgtgattctcagcctccagctgttccagacaatagaagacaggcagaaagtctttcattaactagggaggtttcccagagcaggaaaccatcagcttcagaacgtttacctgatgagaaagtcgaactttttagcaaaatgagagtgctacaggaaaagaaacaaa

SEQ ID NO: 164380 - DNA, 5955 bp, Homo sapiens
  Payload ID: 12381
  Gene Symbol: PCM1
  Gene Name: pericentriolar material 1
  ENST ID: ENST00000524226
  CDS Start-End: 60-5642
agcagtttctgagctgcaaaaactagtttctaaacagagagttaattgttaaatccagtatggccacaggaggaggtccctttgaagatggcatgaatgatcaggatttaccaaactggagtaatgagaatgttgatgacaggctcaacaatatggattggggtgcccaacagaagaaagcaaatagatcatcagaaaagaataagaaaaagtttggtgtagaaagtgataaaagagtaaccaatgatatttctccggagtcgtcaccaggagttggaaggcgaagaacaaagactccacatacgttcccacacagtagatacatgagtcagatgtctgtcccagagcaggcagaattagagaaactgaaacagcggataaacttcagtgatttagatcagagaagcattggaagtgattcccaaggtagagcaacagctgctaacaacaaacgtcagcttagtgaaaaccgaaagcccttcaactttttgcctatgcagattaatactaacaagagcaaagatgcatctacaaaccccccaaacagagaaacgattggatcagcacagtgtaaagagttgtttgcttctgctttaagtaatgacctcttgcaaaactgtcaggtgtctgaagaagatgggaggggagaacctgcaatggagagcagccagattgtaagcaggcttgttcaaattcgcgattatattactaaagctagttccatgcgggaagatcttgtagagaaaaatgagagatctgctaatgttgagcgccttactcatctaatagatcaccttaaagaacaagagaagtcatatatgaaatttcttaaaaaaatccttgccagagatcctcagcaggagcctatggaagagatagaaaatttgaagaaacaacatgatttattaaaaagaatgttacaacagcaggagcaactaagagctctacagggacggcaggctgcacttctagctctgcaacataaagcagagcaagctattgcagtgatggatgattctgttgttgcagaaactgcaggtagcttatctggcgtcagtatcacatctgaactaaatgaagaattgaatgacttaattcagcgttttcataatcagcttcgtgattctcagcctccagctgttccagacaatagaagacaggcagaaagtctttcattaactagggaggtttcccagagcaggaaaccatcagcttcagaacgtttacctgatgagaaagtcgaactttttagcaaaatgagagtgctacaggaaaagaaacaaaaaatggacaaattgcttggagaacttcatacacttcgagatcagcatcttaacaattcatcatcctctccacaaaggagtgtcgatcagagaagtacttcagctccctctgcttctgtaggcttggcaccggttgtcaatggagaatccaatagcctcacatcatctgttccttatcctactgcttctctagtatctcagaatgagagtgaaaacgaaggccacctcaatccatctgaaaaactccagaagttaaatgaagttcgaaagagattgaatgagctaagagaattagttcattattatgaacaaacgtcagacatgatgacagatgctgtgaatgaaaacaggaaagatgaagaaactgaagagtcagaatatgattctgagcatgaaaattccgagcctgttactaacattcgaaatccacaagtagcttccacttggaatgaagtaaatagtcatagtaatgcacagtgtgtttctaataatagagatgggcgaacagttaattctaattgtgaaattaacaacagatctgctgccaacataagggctctaaacatgcctccttctttagcagattgtcgatataatagagaaggggaacaggagattcatgttgcacaaggtgaagatgatgaggaggaggaggaagaagcagaagaggagggagtcagtggagcttcattatctagtcacaggagcagtctggttgatgagcatccagaagatgctgaatttgaacagaagatcaaccgacttatggctgcaaaacagaaacttagacagttacaagatcttgttgctatggtacaggatgatgatgcagctcaaggagttatctctgccagtgcatcaaatttggatgatttctacccagcagaagaagacaccaagcaaaattcaaataacactagaggaaatgccaataaaacacagaaagatactggagtaaatgaaaaggcaagagagaaattttatgaggctaaactacagcagcaacagagagagctaaaacaattgcaggaagaaagaaagaaactgattgacattcaggagaaaattcaagcattgcaaacggcatgccctgacttacagctgtcagctgctagtgtgggtaactgtcccaccaaaaaatatatgccagctgttacttcaaccccaactgttaatcaacacgagaccagtacaagcaaatctgtttttgagcctgaagattcttcaatagtagataatgagttgtggtcagaaatgagaagacatgaaatgttgagggaggagctgcgacagagaagaaagcagcttgaagctctgatggctgaacatcagaggaggcaaggtctagctgaaactgcatctccagtggctgtgtcattgagaagtgatggatctgagaacctatgtactcctcagcaaagtagaacagaaaaaacgatggcaacttggggagggtctacccagtgtgcactagatgaagaaggagatgaagacggttacctttctgaaggaattgttcggacagatgaagaggaggaagaagagcaagatgccagttccaatgataacttttctgtgtgtccttctaacagtgtgaatcataactcctacaatggaaaggaaactaaaaataggtggaagaacaattgccctttttcggcagatgaaaattatcgtcctttagccaagacaaggcaacagaatatcagcatgcaacggcaagaaaaccttcgttgggtgtcagagctctcttacgtagaagagaaagaacaatggcaagaacaaatcaatcagctaaagaaacagcttgattttagtgtcagtatttgtcagactttgatgcaagaccagcagactctatcttgtctgctacaaactcttctcacgggtccttacagtgttatgcccagcaatgttgcatctcctcaagtacacttcataatgcaccagttgaaccagtgctatactcagctaacatggcaacagaataatgttcagaggttgaaacaaatgctaaatgaacttatgcgccagcaaaatcagcatccagaaaaacctggaggcaaggaaagaggcagtagtgcatcgcaccctccttctcccagtttattttgtcctttcagctttccaacacagcctgtaaatctcttcaatatacctggatttactaacttttcatcatttgcaccaggtatgaatttcagccctttatttccttctaattttggagatttttctcagaatatctctacacccagtgaacagcagcaacccttagcccagaattcttcaggaaaaacagaatatatggcttttccaaaaccttttgaaagcagttcctctattggagcagagaaaccaaggaataaaaaactgcctgaagaggaggtggaaagcagtaggacaccatggttatatgaacaagaaggtgaagtagagaaaccatttatcaagactggattttcagtgtctgtagaaaaatctacaagtagtaaccgcaaaaatcaattagatacaaacggaagaagacgccagtttgatgaagaatcactggaaagctttagcagtatgcctgatccagtagatccaacaacagtgactaaaacattcaagacaagaaaagcgtctgcacaggccagcctggcatctaaagataaaactcccaagtcaaaaagtaagaagaggaattctactcagctgaaaagcagagttaaaaacatcaaaactgggagtgatttttccatgtttgaagctttgcgagatactatttattctgaagtagctacattaatttctcaaaatgaatctcgtccacattttcttattgaactcttccatgagctgcagctactaaacacagactacttgagacagagggctttatatgcattgcaggacatagtatccagacatatttctgagagccatgaaaaaggagaaaatgtaaagtcagtaaactctggtacttggatagcatcaaactcagaacttactcctagtgagagccttgctactactgatgatgaaacttttgagaagaactttgaaagagaaacccataaaataagtgagcaaaatgatgctgataatgctagtgtcctgtctgtatcatcaaattttgagccttttgcaacagatgatctaggtaacaccgtgattcacttagatcaagcattagccagaatgagagaatatgagcgtatgaagactgaggctgaaagtaactcaaatatgagatgcacctgcaggattattgaggatggagatggtgctggtgcaggtactacagttaataatttagaagaaactcccgttattgaaaatcgtagttcacaacaacctgtaagtgaagtttctaccatcccatgtcctagaattgatactcagcagctggaccggcaaattaaagcaattatgaaagaagtcattccttttttgaaggagcacatggatgaagtatgctcctcgcagcttctaacttcagtaaggcgcatggttttgacccttacccagcaaaatgatgagagcaaagagtttgtaaagttctttcataaacaacttggaagtatattacaggattcactggcaaaatttgctggcagaaaactgaaagactgtggagaagatcttcttgtagagatatctgaagtgttgttcaatgaattggctttctttaagcttatgcaagatttggataataatagtataactgttaaacagagatgcaaaaggaaaatagaagcaactggagtgatacaatcttgtgccaaagaggctaaaaggattcttgaagatcatggctcacctgctggagagattgatgatgaagacaaagacaaggatgaaactgaaacagttaagcagactcaaacatctgaggtgtatgatggtcccaaaaatgtaagatctgatatttctgatcaagaggaagatgaagaaagtgaaggatgtccagtgtctattaatttgtctaaagctgaaactcaggctttaactaattatggaagtggagaagatgaaaatgaggatgaagaaatggaagaatttgaagaaggccctgtggatgtccagacttccctccaggctaacactgaagctactgaagaaaatgaacatgatgaacaggaagcagaatctggtaatataagtcaaaagtctgatgaagaagattttgtaaaagttgaagatttaccactgaaactgacaatatattcagaggcagatctaagaaagaaaatggtagaagaagaacagaaaaaccatttatctggtgaaatatgtgaaatgcagaccgaagaattagctggaaattctgagacactaaaagaacctgaaacggtgggagcccagagtatatgagatgtcttcagaggctcatctaactctgtccttacatactcaatgcatatatgaaaacaatactaaataaacatctgatctgtataaaaatgtaaattagtttgacactgcttttttgataggtgtggtcatttctccccatggtagtttaaaacatcagaaactgaattctggacagatttaagccttgacacactgtgtttttttttttttcccccttcttttttgggtcttcatttttttccccattgtgatgtttggtaacgaatttaaaatgtagttttaaataaagtttggacttatctataaagta

SEQ ID NO: 164381 - DNA, 6443 bp, Homo sapiens
  Payload ID: 12381
  Gene Symbol: PCM1
  Gene Name: pericentriolar material 1
  ENST ID: ENST00000519253
  CDS Start-End: 252-6302
gctgcgtagctgaggtcgaaaaggcggccactggggccgaggcagccaggaaacgtgtgggcctctctgctgcggtctccgagggccgaccgctgccggcggcgggtcgtgggggctgactgtcgctctgcctttgacaggagaggctgcttcttgtagaggaaacagctttgaagtgtggagcgggaaaggagcagtttctgagctgcaaaaactagtttctaaacagagagttaattgttaaatccagtatggccacaggaggaggtccctttgaagatggcatgaatgatcaggatttaccaaactggagtaatgagaatgttgatgacaggctcaacaatatggattggggtgcccaacagaagaaagcaaatagatcatcagaaaagaataagaaaaagtttggtgtagaaagtgataaaagagtaaccaatgatatttctccggagtcgtcaccaggagttggaaggcgaagaacaaagactccacatacgttcccacacagtagatacatgagtcagatgtctgtcccagagcaggcagaattagagaaactgaaacagcggataaacttcagtgatttagatcagagaagcattggaagtgattcccaaggtagagcaacagctgctaacaacaaacgtcagcttagtgaaaaccgaaagcccttcaactttttgcctatgcagattaatactaacaagagcaaagatgcatctacaaaccccccaaacagagaaacgattggatcagcacagtgtaaagagttgtttgcttctgctttaagtaatgacctcttgcaaaactgtcaggtgtctgaagaagatgggaggggagaacctgcaatggagagcagccagattgtaagcaggcttgttcaaattcgcgattatattactaaagctagttccatgcgggaagatcttgtagagaaaaatgagagatctgctaatgttgagcgccttactcatctaatagatcaccttaaagaacaagagaagtcatatatgaaatttcttaaaaaaatccttgccagagatcctcagcaggagcctatggaagagatagaaaatttgaagaaacaacatgatttattaaaaagaatgttacaacagcaggagcaactaagagctctacagggacggcaggctgcacttctagctctgcaacataaagcagagcaagctattgcagtgatggatgattctgttgttgcagaaactgcaggtagcttatctggcgtcagtatcacatctgaactaaatgaagaattgaatgacttaattcagcgttttcataatcagcttcgtgattctcagcctccagctgttccagacaatagaagacaggcagaaagtctttcattaactagggaggtttcccagagcaggaaaccatcagcttcagaacgtttacctgatgagaaagtcgaactttttagcaaaatgagagtgctacaggaaaagaaacaaaaaatggacaaattgcttggagaacttcatacacttcgagatcagcatcttaacaattcatcatcctctccacaaaggagtgtcgatcagagaagtacttcagctccctctgcttctgtaggcttggcaccggttgtcaatggagaatccaatagcctcacatcatctgttccttatcctactgcttctctagtatctcagaatgagagtgaaaacgaaggccacctcaatccatctgaaaaactccagaagttaaatgaagttcgaaagagattgaatgagctaagagaattagttcattattatgaacaaacgtcagacatgatgacagatgctgtgaatgaaaacaggaaagatgaagaaactgaagagtcagaatatgattctgagcatgaaaattccgagcctgttactaacattcgaaatccacaagtagcttccacttggaatgaagtaaatagtcatagtaatgcacagtgtgtttctaataatagagatgggcgaacagttaattctaattgtgaaattaacaacagatctgctgccaacataagggctctaaacatgcctccttctttagattgtcgatataatagagaaggggaacaggagattcatgttgcacaaggtgaagatgatgaggaggaggaggaagaagcagaagaggagggagtcagtggagcttcattatctagtcacaggagcagtctggttgatgagcatccagaagatgctgaatttgaacagaagatcaaccgacttatggctgcaaaacagaaacttagacagttacaagatcttgttgctatggtacaggatgatgatgcagctcaaggagttatctctgccagtgcatcaaatttggatgatttctacccagcagaagaagacaccaagcaaaattcaaataacactagaggaaatgccaataaaacacagaaagatactggagtaaatgaaaaggcaagagagaaattttatgaggctaaactacagcagcaacagagagagctaaaacaattgcaggaagaaagaaagaaactgattgacattcaggagaaaattcaagcattgcaaacggcatgccctgacttacagctgtcagctgctagtgtgggtaactgtcccaccaaaaaatatatgccagctgttacttcaaccccaactgttaatcaacacgagaccagtacaagcaaatctgtttttgagcctgaagattcttcaatagtagataatgagttgtggtcagaaatgagaagacatgaaatgttgagggaggagctgcgacagagaagaaagcagcttgaagctctgatggctgaacatcagaggaggcaaggtctagctgaaactgcatctccagtggctgtgtcattgagaagtgatggatctgagaacctatgtactcctcagcaaagtagaacagaaaaaacgatggcaacttggggagggtctacccagtgtgcactagatgaagaaggagatgaagacggttacctttctgaaggaattgttcggacagatgaagaggaggaagaagagcaagatgccagttccaatgataacttttctgtgtgtccttctaacagtgtgaatcataactcctacaatggaaaggaaactaaaaataggtggaagaacaattgccctttttcggcagatgaaaattatcgtcctttagccaagacaaggcaacagaatatcagcatgcaacggcaagaaaaccttcgttgggtgtcagagctctcttacgtagaagagaaagaacaatggcaagaacaaatcaatcagctaaagaaacagcttgattttagtgtcagtatttgtcagactttgatgcaagaccagcagactctatcttgtctgctacaaactcttctcacgggtccttacagtgttatgcccagcaatgttgcatctcctcaagtacacttcataatgcaccagttgaaccagtgctatactcagctaacatggcaacagaataatgttcagaggttgaaacaaatgctaaatgaacttatgcgccagcaaaatcagcatccagaaaaacctggaggcaaggaaagaggcagtagtgcatcgcaccctccttctcccagtttattttgtcctttcagctttccaacacagcctgtaaatctcttcaatatacctggatttactaacttttcatcatttgcaccaggtatgaatttcagccctttatttccttctaattttggagatttttctcagaatatctctacacccagtgaacagcagcaacccttagcccagaattcttcaggaaaaacagaatatatggcttttccaaaaccttttgaaagcagttcctctattggagcagagaaaccaaggaataaaaaactgcctgaagaggaggtggaaagcagtaggacaccatggttatatgaacaagaaggtgaagtagagaaaccatttatcaagactggattttcagtgtctgtagaaaaatctacaagtagtaaccgcaaaaatcaattagatacaaacggaagaagacgccagtttgatgaagaatcactggaaagctttagcagtatgcctgatccagtagatccaacaacagtgactaaaacattcaagacaagaaaagcgtctgcacaggccagcctggcatctaaagataaaactcccaagtcaaaaagtaagaagaggaattctactcagctgaaaagcagagttaaaaacatcaggtatgaaagtgccagtatgtctagcacatgtgaaccttgcaaaagtaggaacagacattcagcccagactgaagagcctgttcaagcaaaagtattcagcagaaagaatcatgagcaactggaaaaaataataaaatgtaataggtctacagaaatatcttcagaaactgggagtgatttttccatgtttgaagctttgcgagatactatttattctgaagtagctacattaatttctcaaaatgaatctcgtccacattttcttattgaactcttccatgagctgcagctactaaacacagactacttgagacagagggctttatatgcattgcaggacatagtatccagacatatttctgagagccatgaaaaaggagaaaatgtaaagtcagtaaactctggtacttggatagcatcaaactcagaacttactcctagtgagagccttgctactactgatgatgaaacttttgagaagaactttgaaagagaaacccataaaataagtgagcaaaatgatgctgataatgctagtgtcctgtctgtatcatcaaattttgagccttttgcaacagatgatctaggtaacaccgtgattcacttagatcaagcattagccagaatgagagaatatgagcgtatgaagactgaggctgaaagtaactcaaatatgagatgcacctgcaggattattgaggatggagatggtgctggtgcagaaactcccgttattgaaaatcgtagttcacaacaacctgtaagtgaagtttctaccatcccatgtcctagaattgatactcagcagctggaccggcaaattaaagcaattatgaaagaagtcattccttttttgaaggagcacatggatgaagtatgctcctcgcagcttctaacttcagtaaggcgcatggttttgacccttacccagcaaaatgatgagagcaaagagtttgtaaagttctttcataaacaacttggaagtatattacaggattcactggcaaaatttgctggcagaaaactgaaagactgtggagaagatcttcttgtagagatatctgaagtgttgttcaatgaattggctttctttaagcttatgcaagatttggataataatagtataactgttaaacagagatgcaaaaggaaaatagaagcaactggagtgatacaatcttgtgccaaagaggctaaaaggattcttgaagatcatggctcacctgctggagagattgatgatgaagacaaagacaaggatgaaactgaaacagttaagcagactcaaacatctgaggtgtatgatggtcccaaaaatgtaagatctgatatttctgatcaagaggaagatgaagaaagtgaaggatgtccagtgtctattaatttgtctaaagctgaaactcaggctttaactaattatggaagtggagaagatgaaaatgaggatgaagaaatggaagaatttgaagaaggccctgtggatgtccagacttccctccaggctaacactgaagctactgaagaaaatgaacatgatgaacaggtcctacaacgtgactttaaaaagacagcagaaagcaaaaatgtcccattggaacgagaagccactagtaaaaatgaccaaaataactgtcctgtgaaaccctgttacctcaatatcttggaagatgagcaacctttaaatagtgctgcccataaggagtcacctcctactgttgattcaactcaacagcctaaccctttgccgttacgtttacctgaaatggaacccttagtgcctagagtcaaagaagttaaatctgctcaggaaactcctgaaagctctctggctggaagtcctgatactgaatctccagtgttagtgaatgactatgaagcagaatctggtaatataagtcaaaagtctgatgaagaagattttgtaaaagttgaagatttaccactgaaactgacaatatattcagaggcagatctaagaaagaaaatggtagaagaagaacagaaaaaccatttatctggtgaaatatgtgaaatgcagaccgaagaattagctggaaattctgagacactaaaagaacctgaaacggtgggagcccagagtatatgagatgtcttcagaggctcatctaactctgtccttacatactcaatgcatatatgaaaacaatactaaataaacatctgatctgtataaaaatgtaaattagtttgacactgcttttttgataggtgtggtcatttctcccca

SEQ ID NO: 164382 - DNA, 2953 bp, Homo sapiens
  Payload ID: 12382
  Gene Symbol: PLIN1
  Gene Name: perilipin 1
  Uniprot ID: O60240
  ENST ID: ENST00000300055
  CDS Start-End: 167-1735
caggagtgacaggaattgtttctgcctgaggagacactctgcagcctgggctctgtgagactgaggtggcggtcagccggagtgagtgttggggtcctggggcacctgccttacatggcttgtttatgaacattaaagggaagaagttgaagcttgaggagcgaggatggcagtcaacaaaggcctcaccttgctggatggagacctccctgagcaggagaatgtgctgcagcgggtcctgcagctgccggtggtgagtggcacctgcgaatgcttccagaagacctacaccagcactaaggaagcccaccccctggtggcctctgtgtgcaatgcctatgagaagggcgtgcagagcgccagtagcttggctgcctggagcatggagccggtggtccgcaggctgtccacccagttcacagctgccaatgagctggcctgccgaggcttggaccacctggaggaaaagatccccgccctccagtacccccctgaaaagattgcttctgagctgaaggacaccatctccacccgcctccgcagtgccagaaacagcatcagcgttcccatcgcgagcacttcagacaaggtcctgggggccgctttggccgggtgcgagcttgcctggggggtggccagagacactgcggaatttgctgccaacactcgagctggccgactggcttctggaggggccgacttggccttgggcagcattgagaaggtggtggagtacctcctccctccagacaaggaagagtcagcccctgctcctggacaccagcaagcccagaagtctcccaaggccaagccaagcctcttgagcagggttggggctctgaccaacaccctctctcgatacaccgtgcagaccatggcccgggccctggagcagggccacaccgtggccatgtggatcccaggcgtggtgcccctgagcagcctggcccagtggggtgcctcagtggccatgcaggcggtgtcccggcggaggagcgaagtgcgggtaccctggctgcacagcctcgcagccgcccaggaggaggatcatgaggaccagacagacacggagggagaggacacggaggaggaggaagaattggagactgaggagaacaagttcagtgaggtagcagccctgccaggccctcgaggcctcctgggtggtgtggcacataccctgcagaagaccctccagaccaccatctcggctgtgacatgggcacctgcagctgtgctgggcatggcagggagggtgctgcacctcacaccagcccctgctgtctcctcaaccaaggggagggccatgtccctatcagatgccctgaagggcgttactgacaacgtggtggacacagtggtgcattacgtgccgctccccaggctgtcgctgatggagcccgagagcgaattccgggacatcgacaacccaccagccgaggtcgagcgccgggaggcggagcgcagagcgtctggggcgccgtccgccggcccggagcccgccccgcgtctcgcacagccccgccgcagcctgcgcagcgcgcagagccccggcgcgccccccggcccgggcctggaggacgaagtcgccacgcccgcagcgccgcgcccgggcttcccggccgtgccccgcgagaagccaaagcgcagggtcagcgacagcttcttccggcccagcgtcatggagcccatcctgggccgcacgcattacagccagctgcgcaagaagagctgagtcgccgcaccagccgccgcgccccgggccggcgggtttctctaacaaataaacagaacccgcactgcccaggcgagcgttgccactttcaaagtggtcccctggggagctcagcctcatcctgatgatgctgccaaggcgcactttttatttttattttatttttattttttttttagcatccttttggggcttcactctcagagccagtttttaagggacaccagagccgcagcctgctctgattctatggcttggttgttactataagagtaattgcctaacttgatttttcatctctttaaccaaacttgtggccaaaagatatttgaccgtttccaaaattcagattctgcctctgcggataaatatttgccacgaatgagtaactcctgtcaccactctgaaggtccagacagaaggttttgacacattcttagcactgaactcctctgtgatctaggatgatctgttccccctctgatgaacatcctctgatgatctaggctcccagcaggctactttgaagggaacaatcagatgcaaaagctcttgggtgtttatttaaaatactagtgtcactttctgagtacccgccgcttcacaggctgagtccaggcctgtgtgctttgtagagccagctgcttgctcacagccacatttccatttgcatcattactgccttcacctgcatagtcactcttttgatgctggggaaccaaaatggtgatgatatatagactttatgtatagccacagttcatccccaaccctagtcttcgaaatgttaatatttgataaatctagaaaatgcattcatacaattacagaattcaaatattgcaaaaggatgtgtgtctttctccccgagctcccctgttccccttcattgaaaaccaccacggtgccatctcttgtgtatgcagggctatgcacctgcaggcacgtgtgtatgcactccccgcttgtgtttacacaagctgtggggtgttacgcatgcctgcttttttcacttaataatacagcttggagagatttttgtatcacattataaatcccactcgctctttttgatggccacataataactactgcataatatggatacgccttatttgatttaactagttccctaatgatggacttttaagttgtttcctttttttttcttttttgctactgcaaacgatgctataataaatgtccttatcaaaaatg

SEQ ID NO: 164383 - DNA, 2900 bp, Homo sapiens
  Payload ID: 12382
  Gene Symbol: PLIN1
  Gene Name: perilipin 1
  Uniprot ID: O60240
  ENST ID: ENST00000430628
  CDS Start-End: 121-1689
tggaagcagcattgcccaagcctcccaggagtgacaggaattgtttctgcctgaggagacactctgcagcctgggctctgtgagactgaggtggcggtcagccggacttgaggagcgaggatggcagtcaacaaaggcctcaccttgctggatggagacctccctgagcaggagaatgtgctgcagcgggtcctgcagctgccggtggtgagtggcacctgcgaatgcttccagaagacctacaccagcactaaggaagcccaccccctggtggcctctgtgtgcaatgcctatgagaagggcgtgcagagcgccagtagcttggctgcctggagcatggagccggtggtccgcaggctgtccacccagttcacagctgccaatgagctggcctgccgaggcttggaccacctggaggaaaagatccccgccctccagtacccccctgaaaagattgcttctgagctgaaggacaccatctccacccgcctccgcagtgccagaaacagcatcagcgttcccatcgcgagcacttcagacaaggtcctgggggccgctttggccgggtgcgagcttgcctggggggtggccagagacactgcggaatttgctgccaacactcgagctggccgactggcttctggaggggccgacttggccttgggcagcattgagaaggtggtggagtacctcctccctccagacaaggaagagtcagcccctgctcctggacaccagcaagcccagaagtctcccaaggccaagccaagcctcttgagcagggttggggctctgaccaacaccctctctcgatacaccgtgcagaccatggcccgggccctggagcagggccacaccgtggccatgtggatcccaggcgtggtgcccctgagcagcctggcccagtggggtgcctcagtggccatgcaggcggtgtcccggcggaggagcgaagtgcgggtaccctggctgcacagcctcgcagccgcccaggaggaggatcatgaggaccagacagacacggagggagaggacacggaggaggaggaagaattggagactgaggagaacaagttcagtgaggtagcagccctgccaggccctcgaggcctcctgggtggtgtggcacataccctgcagaagaccctccagaccaccatctcggctgtgacatgggcacctgcagctgtgctgggcatggcagggagggtgctgcacctcacaccagcccctgctgtctcctcaaccaaggggagggccatgtccctatcagatgccctgaagggcgttactgacaacgtggtggacacagtggtgcattacgtgccgctccccaggctgtcgctgatggagcccgagagcgaattccgggacatcgacaacccaccagccgaggtcgagcgccgggaggcggagcgcagagcgtctggggcgccgtccgccggcccggagcccgccccgcgtctcgcacagccccgccgcagcctgcgcagcgcgcagagccccggcgcgccccccggcccgggcctggaggacgaagtcgccacgcccgcagcgccgcgcccgggcttcccggccgtgccccgcgagaagccaaagcgcagggtcagcgacagcttcttccggcccagcgtcatggagcccatcctgggccgcacgcattacagccagctgcgcaagaagagctgagtcgccgcaccagccgccgcgccccgggccggcgggtttctctaacaaataaacagaacccgcactgcccaggcgagcgttgccactttcaaagtggtcccctggggagctcagcctcatcctgatgatgctgccaaggcgcactttttatttttattttatttttattttttttttagcatccttttggggcttcactctcagagccagtttttaagggacaccagagccgcagcctgctctgattctatggcttggttgttactataagagtaattgcctaacttgatttttcatctctttaaccaaacttgtggccaaaagatatttgaccgtttccaaaattcagattctgcctctgcggataaatatttgccacgaatgagtaactcctgtcaccactctgaaggtccagacagaaggttttgacacattcttagcactgaactcctctgtgatctaggatgatctgttccccctctgatgaacatcctctgatgatctaggctcccagcaggctactttgaagggaacaatcagatgcaaaagctcttgggtgtttatttaaaatactagtgtcactttctgagtacccgccgcttcacaggctgagtccaggcctgtgtgctttgtagagccagctgcttgctcacagccacatttccatttgcatcattactgccttcacctgcatagtcactcttttgatgctggggaaccaaaatggtgatgatatatagactttatgtatagccacagttcatccccaaccctagtcttcgaaatgttaatatttgataaatctagaaaatgcattcatacaattacagaattcaaatattgcaaaaggatgtgtgtctttctccccgagctcccctgttccccttcattgaaaaccaccacggtgccatctcttgtgtatgcagggctatgcacctgcaggcacgtgtgtatgcactccccgcttgtgtttacacaagctgtggggtgttacgcatgcctgcttttttcacttaataatacagcttggagagatttttgtatcacattataaatcccactcgctctttttgatggccacataataactactgcataatatggatacgccttatttgatttaactagttccctaatgatggacttttaagttgtttcctttttttttcttttttgctactgcaaacgatgctataataaatgtccttatc

SEQ ID NO: 164384 - DNA, 698 bp, Homo sapiens
  Payload ID: 12382
  Gene Symbol: PLIN1
  Gene Name: perilipin 1
  ENST ID: ENST00000560330
  CDS Start-End: 1-222
gaggaagaattggagactgaggagaacaagttcagtgaggtagcagccctgccaggccctcgaggcctcctgggtggtgtggcacataccctgcagaagaccctccagaccaccatctcggctctgcttgctcacagccacatttccatttgcatcattactgccttcacctgcatagtcactcttttgatgctggggaaccaaaatggtgatgatatatagactttatgtatagccacagttcatccccaaccctagtcttcgaaatgttaatatttgataaatctagaaaatgcattcatacaattacagaattcaaatattgcaaaaggatgtgtgtctttctccccgagctcccctgttccccttcattgaaaaccaccacggtgccatctcttgtgtatgcagggctatgcacctgcaggcacgtgtgtatgcactccccgcttgtgtttacacaagctgtggggtgttacgcatgcctgcttttttcacttaataatacagcttggagagatttttgtatcacattataaatcccactcgctctttttgatggccacataataactactgcataatatggatacgccttatttgatttaactagttccctaatgatggacttttaagttgtttcctttttttttcttttttgctactgcaaacgatgctataataaatgtccttatcaaaaa

SEQ ID NO: 164385 - DNA, 1972 bp, Homo sapiens
  Payload ID: 12383
  Gene Symbol: PLIN2
  Gene Name: perilipin 2
  Uniprot ID: Q99541
  ENST ID: ENST00000276914
  CDS Start-End: 181-1494
cgtgctgccgcgggtcacgtgctgcggaggcttggggaggggcggcgaggcggggtttatagcccgggcgcccgcgggccccacgctttgaccgggtcgtggcagccggagtcgtcttcgggacgcgcctgctcttcgcctttcgctgcagtccgtcgatttctttctccaggaagaaaaatggcatccgttgcagttgatccacaaccgagtgtggtgactcgggtggtcaacctgcccttggtgagctccacgtatgacctcatgtcctcagcctatctcagtacaaaggaccagtatccctacctgaagtctgtgtgtgagatggcagagaacggtgtgaagaccatcacctccgtggccatgaccagtgctctgcccatcatccagaagctagagccgcaaattgcagttgccaatacctatgcctgtaaggggctagacaggattgaggagagactgcctattctgaatcagccatcaactcagattgttgccaatgccaaaggcgctgtgactggggcaaaagatgctgtgacgactactgtgactggggccaaggattctgtggccagcacgatcacaggggtgatggacaagaccaaaggggcagtgactggcagtgtggagaagaccaagtctgtggtcagtggcagcattaacacagtcttggggagtcggatgatgcagctcgtgagcagtggcgtagaaaatgcactcaccaaatcagagctgttggtagaacagtacctccctctcactgaggaagaactagaaaaagaagcaaaaaaagttgaaggatttgatctggttcagaagccaagttattatgttagactgggatccctgtctaccaagcttcactcccgtgcctaccagcaggctctcagcagggttaaagaagctaagcaaaaaagccaacagaccatttctcagctccattctactgttcacctgattgaatttgccaggaagaatgtgtatagtgccaatcagaaaattcaggatgctcaggataagctctacctctcatgggtagagtggaaaaggagcattggatatgatgatactgatgagtcccactgtgctgagcacattgagtcacgtactcttgcaattgcccgcaacctgactcagcagctccagaccacgtgccacaccctcctgtccaacatccaaggtgtaccacagaacatccaagatcaagccaagcacatgggggtgatggcaggcgacatctactcagtgttccgcaatgctgcctcctttaaagaagtgtctgacagcctcctcacttctagcaaggggcagctgcagaaaatgaaggaatctttagatgacgtgatggattatcttgttaacaacacgcccctcaactggctggtaggtcccttttatcctcagctgactgagtctcagaatgctcaggaccaaggtgcagagatggacaagagcagccaggagacccagcgatctgagcataaaactcattaaacctgcccctatcactagtgcatgctgtggccagacagatgacaccttttgttatgttgaaattaacttgctaggcaaccctaaattgggaagcaagtagctagtataaaggccctcaattgtagttgtttccagctgaattaagagctttaaagtttctggcattagcagatgatttctgttcacctggtaagaaaagaatgataggcttgtcagagcctatagccagaactcagaaaaaattcaaatgcacttatgttctcattctatggccattgtgttgcctctgttactgtttgtattgaataaaaacatcttcatgtgggctggggtagaaactggtgtctgctctggtgtgatctgaaaaggcgtcttcactgctttatctcatgatgcttgcttgtaaaacttgattttagtttttcatttctcaaataggaatactacctttgaattcaataaaattcactgcaggata

SEQ ID NO: 164386 - DNA, 655 bp, Homo sapiens
  Payload ID: 12383
  Gene Symbol: PLIN2
  Gene Name: perilipin 2
  ENST ID: ENST00000380464
  CDS Start-End: 95-427
tttgaccgggtcgtggcagccggagtcgtcttcgggacgcgcctgctcttcgcctttcgctgcagtccgtcgatttctttctccaggaagaaaaatggcatccgttgcagttgatccacaaccgagtgtggtgactcgggtggtcaacctgcccttggtgagctccacgtatgacctcatgtcctcagcctatctcagtacaaaggaccagtatccctacctgaagtctgtgtgtgagatggcagagaacggtgtgaagaccatcacctccgtggccatgaccagtgctctgcccatcatccagaagctagagccgcaaattgcagttgccaatacctatgcctgtaaggggctagacaggattgaggagagactgcctattctgaatcagccatcaactcaggtgagcttgggacaaaagtgctgagacttgacacttcacatgttttcatcttctatctgttaaaacaagctgtacatatcacaaacaggcaaatacttgttttcccaacctggatctggatgtatgtttgaaaaataatggccacttccttacttcctgaactgttgtcaagttgtatctacgaagcagagaagaactagcctcctttggattagaaaacttttagtgtgttgtctatcagtttgtgtcttt

SEQ ID NO: 164387 - DNA, 631 bp, Homo sapiens
  Payload ID: 12383
  Gene Symbol: PLIN2
  Gene Name: perilipin 2
  ENST ID: ENST00000380465
  CDS Start-End: 81-461
ggcagccggagtcgtcttcgggacgcgcctgctcttcgcctttcgctgcagtccgtcgatttctttctccaggaagaaaaatggcatccgttgcagttgatccacaaccgagtgtggtgactcgggtggtcaacctgcccttggtgagctccacgtatgacctcatgtcctcagcctatctcagtacaaaggaccagtatccctacctgaagtctgtgtgtgagatggcagagaacggtgtgaagaccatcacctccgtggccatgaccagtgctctgcccatcatccagaagctagagccgcaaattgcagttgccaatacctatgcctgtaaggggctagacaggattgaggagagactgcctattctgaatcagccatcaactcaggcaaatacttgttttcccaacctggatctggatgtatgtttgaaaaataatggccacttccttacttcctgaactgttgtcaagttgtatctacgaagcagagaagaactagcctcctttggattagaaaacttttagtgtgttgtctatcagtttgtgtctttgctcctataaatgaaattgctgtctcaagtaactgattgtcttgtggtattaaataaatgcagacgtgatatatataa

SEQ ID NO: 164388 - DNA, 623 bp, Homo sapiens
  Payload ID: 12383
  Gene Symbol: PLIN2
  Gene Name: perilipin 2
  ENST ID: ENST00000434144
  CDS Start-End: 249-623
cagaacgttttgtcagaacaattatggctttcttcctgaagtgtgcttggccggaaaagaaagcaggagacctcaagggctaataatctagcagtggctgacactgaaatgatgcatggaagaaaggctaccaagcaagggaggtggagagcagtttgaagcaactggggtaaagtccggagaagaagctggtgagaaagagacaggagccagatgctgaatgacgatttctttctccaggaagaaaaatggcatccgttgcagttgatccacaaccgagtgtggtgactcgggtggtcaacctgcccttggtgagctccacgtatgacctcatgtcctcagcctatctcagtacaaaggaccagtatccctacctgaagtctgtgtgtgagatggcagagaacggtgtgaagaccatcacctccgtggccatgaccagtgctctgcccatcatccagaagctagagccgcaaattgcagttgccaatacctatgcctgtaaggggctagacaggattgaggagagactgcctattctgaatcagccatcaactcagattgttgccaatgccaaaggcgctgtgactggggcaaaagatgctgtgacgactactgtgactggg

SEQ ID NO: 164389 - DNA, 2333 bp, Homo sapiens
  Payload ID: 12384
  Gene Symbol: PLIN3
  Gene Name: perilipin 3
  Uniprot ID: O60664
  ENST ID: ENST00000221957
  CDS Start-End: 178-1482
tggcgcgggcaatccctcaacctgattggtcccctcgcccgtcactccagtgcgcccccaacctaccacgcagtaaaagccacccccgcctcggcccggacggtttccaagctggttttgaagtcgcggcagctgttcctgggacgtccggttgaccgcgcgtctgctgcagagaccatgtctgccgacggggcagaggctgatggcagcacccaggtgacagtggaagaaccggtacagcagcccagtgtggtggaccgtgtggccagcatgcctctgatcagctccacctgcgacatggtgtccgcagcctatgcctccaccaaggagagctacccgcacatcaagactgtctgcgacgcagcagagaagggagtgaggaccctcacggcggctgctgtcagcggggctcagccgatcctctccaagctggagccccagattgcatcagccagcgaatacgcccacagggggctggacaagttggaggagaacctccccatcctgcagcagcccacggagaaggtcctggcggacaccaaggagcttgtgtcgtctaaggtgtcgggggcccaagagatggtgtctagcgccaaggacacggtggccacccaattgtcggaggcggtggacgcgacccgcggtgctgtgcagagcggcgtggacaagacaaagtccgtagtgaccggcggcgtccaatcggtcatgggctcccgcttgggccagatggtgttgagtggggtcgacacggtgctggggaagtcggaggagtgggcggacaaccacctgccccttacggatgccgaactggcccgcatcgccacatccctggatggctttgacgtcgcgtccgtgcagcagcagcggcaggaacagagctacttcgtacgtctgggctccctgtcggagaggctgcggcagcacgcctatgagcactcgctgggcaagcttcgagccaccaagcagagggcacaggaggctctgctgcagctgtcgcaggtcctaagcctgatggaaactgtcaagcaaggcgttgatcagaagctggtggaaggccaggagaagctgcaccagatgtggctcagctggaaccagaagcagctccagggccccgagaaggagccgcccaagccagagcaggtcgagtcccgggcgctcaccatgttccgggacattgcccagcaactgcaggccacctgtacctccctggggtccagcattcagggcctccccaccaatgtgaaggaccaggtgcagcaggcccgccgccaggtggaggacctccaggccacgttttccagcatccactccttccaggacctgtccagcagcattctggcccagagccgtgagcgtgtcgccagcgcccgcgaggccctggaccacatggtggaatatgtggcccagaacacacctgtcacgtggctcgtgggaccctttgcccctggaatcactgagaaagccccggaggagaagaagtagggggagaggagaggactcagcgggccccgtctctataatgcagctgtgctctggagtcctcaacccggggctcatttcaaacttattttctagccactcctcccagctcttctgtgctgtccacttgggaagctaaggctctcaaaacgggcatcacccagttgacccatctctcagcctctctgagcttggaagaagcctgttctgagcctcaccctatcagtcagtagagagagatgtccagaaaaaatatctttcaggaaagttctcccctgcagaattttttttccttgttaaatatcaggaatataggccgggtgcggtggctcacacctgtaatcccagcactttgggaggctgaggcgggcggaacacctgaggtcaggtgttcgagaccagccaggccaacatggtgaaaccccgtctctactaaaaatacaaaaaaaaatgagccgggcatggtagcaggtgtctgttatcccagttaggaggctgaggcaagagaatctcttgaacctgagaggcggaggttgcagtgagccaagatcgcgccattgcactccagcctgggggacaagagtgagacttagtctcaaaaaaaaaaaaaaagaaaaaaaaatcagggatatagttcatatcccacttctttgtttacaccgatgtccctgaatatcagcctgtagctaatggacttgggatttctggtctaagtgggcctcctggggatggggtggtacactgagcttctgagcctcattgtagagtagaaaggtactggggcctgtgtggtaagccttgttgaaatgctctggtattcagtattgccttaataaacttcacccacaactgca

SEQ ID NO: 164390 - DNA, 604 bp, Homo sapiens
  Payload ID: 12384
  Gene Symbol: PLIN3
  Gene Name: perilipin 3
  ENST ID: ENST00000587462
  CDS Start-End: 498-604
attctggggaggtcttgggcaaagcctgcccacttccctcgggtgggcgtggcgacgaggtggcttaaaagtaggaaggcctatccgttaactgctttggggttcttgtcccggctaggcctggcagtgggacctggggcccttggaattttggaagtccagtcttagcatgctctgaagttgctggatggctgggtctggcctggagctccccttctggagccagcggcaaggcaggtcactgacccccaggggtttcatagggtgttgacatctgccatggccacccttgcttaaaccagttccaggaagtcatggtggacagaggggacgggaggaagctgcctgagtcctaagtgggacttgagaatcggtcgaggccaggagtttgatgcctgcctacctggccccctgcccaggtgagctcaggctccaaaggaggtgaggagaagcacagatttaggcaatgatcactgggagcgtctgctgcagagaccatgtctgccgacggggcagaggctgatggcagcacccaggtgacagtggaagaaccggtacagcagcccagtgtggtggaccgtgtggccagcatgcctctgatcag

SEQ ID NO: 164391 - DNA, 1535 bp, Homo sapiens
  Payload ID: 12384
  Gene Symbol: PLIN3
  Gene Name: perilipin 3
  Uniprot ID: O60664
  ENST ID: ENST00000585479
  CDS Start-End: 104-1405
aaaagccacccccgcctcggcccggacggtttccaagctggttttgaagtcgcggcagctgttcctgggacgtccggttgaccgcgcgtctgctgcagagaccatgtctgccgacggggcagaggctgatggcagcacccaggtgacagtggaagaaccggtacagcagcccagtgtggtggaccgtgtggccagcatgcctctgatcagctccacctgcgacatggtgtccgcagcctatgcctccaccaaggagagctacccgcacatcaagactgtctgcgacgcagcagagaagggagtgaggaccctcacggcggctgctgtcagcggggctcagccgatcctctccaagctggagccccagattgcatcagccagcgaatacgcccacagggggctggacaagttggaggagaacctccccatcctgcagcagcccacggagaaggtcctggcggacaccaaggagcttgtgtcgtctaaggtgtcgggggcccaagagatggtgtctagcgccaaggacacggtggccacccaattgtcggaggcggtggacgcgacccgcggtgctgtgcagagcggcgtggacaagacaaagtccgtagtgaccggcggcgtccaatcggtcatgggctcccgcttgggccagatggtgttgagtggggtcgacacggtgctggggaagtcggaggagtgggcggacaaccacctgccccttacggatgccgaactggcccgcatcgccacatccctggatggctttgacgtcgcgtccgtgcagcagcagcggcaggaacagagctacttcgtacgtctgggctccctgtcggagaggctgcggcagcacgcctatgagcactcgctgggcaagcttcgagccaccaagcagagggcacaggaggctctgctgcagctgtcgcaggtcctaagcctgatggaaactgtcaagcaaggcgttgatcagaagctggtggaaggccaggagaagctgcaccagatgtggctcagctggaaccagaagcagctccagggccccgagaaggagccgcccaagccagaggtcgagtcccgggcgctcaccatgttccgggacattgcccagcaactgcaggccacctgtacctccctggggtccagcattcagggcctccccaccaatgtgaaggaccaggtgcagcaggcccgccgccaggtggaggacctccaggccacgttttccagcatccactccttccaggacctgtccagcagcattctggcccagagccgtgagcgtgtcgccagcgcccgcgaggccctggaccacatggtggaatatgtggcccagaacacacctgtcacgtggctcgtgggaccctttgcccctggaatcactgagaaagccccggaggagaagaagtagggggagaggagaggactcagcgggccccgtctctataatgcagctgtgctctggagtcctcaacccggggctcatttcaaacttattttctagccactcctcccagctcttctgtgctgtccacttggga

SEQ ID NO: 164392 - DNA, 574 bp, Homo sapiens
  Payload ID: 12384
  Gene Symbol: PLIN3
  Gene Name: perilipin 3
  ENST ID: ENST00000589034
  CDS Start-End: 57-574
gctgttcctgggacgtccggttgaccgcgcccagtgtggtggaccgtgtggccagcatgcctctgatcagctccacctgcgacatggtgtccgcagcctatgcctccaccaaggagagctacccgcacatcaagactgtctgcgacgcagcagagaagggagtgaggaccctcacggcggctgctgtcagcggggctcagccgatcctctccaagctggagccccagattgcatcagccagcgaatacgcccacagggggctggacaagttggaggagaacctccccatcctgcagcagcccacggagaaggtcctggcggacaccaaggagcttgtgtcgtctaaggtgtcgggggcccaagagatggtgtctagcgccaaggacacggtggccacccaattgtcggaggcggtggacgcgacccgcggtgctgtgcagagcggcgtggacaagacaaagtccgtagtgaccggcggcgtccaatcggtcatgggctcccgcttgggccagatggtgttgagtggggtcgacacggtgctggggaagtcggaggagtgggcggacaaccacct

SEQ ID NO: 164393 - DNA, 2154 bp, Homo sapiens
  Payload ID: 12384
  Gene Symbol: PLIN3
  Gene Name: perilipin 3
  Uniprot ID: O60664
  ENST ID: ENST00000592528
  CDS Start-End: 63-1331
ttttgaagtcgcggcagctgttcctgggacgtccggttgaccgcgcgtctgctgcagagaccatgtctgccgacggggcagaggctgatggcagcacccaggtgacagtggaagaaccggtacagcagcccagtgtggtggaccgtgtggccagcatgcctctgatcagctccacctgcgacatggtgtccgcagcctatgcctccaccaaggagagctacccgcacatcaagactgtctgcgacgcagcagagaagggagtgaggaccctcacggcggctgctgtcagcggggctcagccgatcctctccaagctggagccccagattgcatcagccagcgaatacgcccacagggggctggacaagttggaggagaacctccccatcctgcagcagcccacggagaaggtgtcgggggcccaagagatggtgtctagcgccaaggacacggtggccacccaattgtcggaggcggtggacgcgacccgcggtgctgtgcagagcggcgtggacaagacaaagtccgtagtgaccggcggcgtccaatcggtcatgggctcccgcttgggccagatggtgttgagtggggtcgacacggtgctggggaagtcggaggagtgggcggacaaccacctgccccttacggatgccgaactggcccgcatcgccacatccctggatggctttgacgtcgcgtccgtgcagcagcagcggcaggaacagagctacttcgtacgtctgggctccctgtcggagaggctgcggcagcacgcctatgagcactcgctgggcaagcttcgagccaccaagcagagggcacaggaggctctgctgcagctgtcgcaggtcctaagcctgatggaaactgtcaagcaaggcgttgatcagaagctggtggaaggccaggagaagctgcaccagatgtggctcagctggaaccagaagcagctccagggccccgagaaggagccgcccaagccagagcaggtcgagtcccgggcgctcaccatgttccgggacattgcccagcaactgcaggccacctgtacctccctggggtccagcattcagggcctccccaccaatgtgaaggaccaggtgcagcaggcccgccgccaggtggaggacctccaggccacgttttccagcatccactccttccaggacctgtccagcagcattctggcccagagccgtgagcgtgtcgccagcgcccgcgaggccctggaccacatggtggaatatgtggcccagaacacacctgtcacgtggctcgtgggaccctttgcccctggaatcactgagaaagccccggaggagaagaagtagggggagaggagaggactcagcgggccccgtctctataatgcagctgtgctctggagtcctcaacccggggctcatttcaaacttattttctagccactcctcccagctcttctgtgctgtccacttgggaagctaaggctctcaaaacgggcatcacccagttgacccatctctcagcctctctgagcttggaagaagcctgttctgagcctcaccctatcagtcagtagagagagatgtccagaaaaaatatctttcaggaaagttctcccctgcagaattttttttccttgttaaatatcaggaatataggccgggtgcggtggctcacacctgtaatcccagcactttgggaggctgaggcgggcggaacacctgaggtcaggtgttcgagaccagccaggccaacatggtgaaaccccgtctctactaaaaatacaaaaaaaaatgagccgggcatggtagcaggtgtctgttatcccagttaggaggctgaggcaagagaatctcttgaacctgagaggcggaggttgcagtgagccaagatcgcgccattgcactccagcctgggggacaagagtgagacttagtctcaaaaaaaaaaaaaaagaaaaaaaaatcagggatatagttcatatcccacttctttgtttacaccgatgtccctgaatatcagcctgtagctaatggacttgggatttctggtctaagtgggcctcctggggatggggtggtacactgagcttctgagcctcattgtagagtagaaaggtactggggcctgtgtggtaagccttgttgaaatgctctggtattcagtatt

SEQ ID NO: 164394 - DNA, 629 bp, Homo sapiens
  Payload ID: 12384
  Gene Symbol: PLIN3
  Gene Name: perilipin 3
  ENST ID: ENST00000589494
  CDS Start-End: 125-629
tccaagctggttttgaagtcgcggcagctgttcctgggacgtccggttgaccgcggcctggcagtgggacctggggcccttggaattttggaagtccagtcttagcatgctctgaagttgctggatggctgggtctggcctggagctccccttctggagccagcggcaagcgtctgctgcagagaccatgtctgccgacggggcagaggctgatggcagcacccaggtgacagtggaagaaccggtacagcagcccagtgtggtggaccgtgtggccagcatgcctctgatcagctccacctgcgacatggtgtccgcagcctatgcctccaccaaggagagctacccgcacatcaagactgtctgcgacgcagcagagaagggagtgaggaccctcacggcggctgctgtcagcggggctcagccgatcctctccaagctggagccccagattgcatcagccagcgaatacgcccacagggggctggacaagttggaggagaacctccccatcctgcagcagcccacggagaaggtcctggcggacaccaaggagcttgtgtcgtctaaggtgtcgggggcccaagagatggtgtctagcgccaaggacacggtggccacccaattgt

SEQ ID NO: 164395 - DNA, 1699 bp, Homo sapiens
  Payload ID: 12384
  Gene Symbol: PLIN3
  Gene Name: perilipin 3
  ENST ID: ENST00000589163
  CDS Start-End: 1-878
acaagttggaggagaacctccccatcctgcagcagcccacggagaaggtcctggcggacaccaaggagcttgtgtcgtctaaggtgtcgggggcccaagagatggtgtctagcgccaaggacacggtggccacccaattgtcggaggcggtggacgcgacccgcggtgctgtgcagagcggcgtggacaagacaaagtccgtagtgaccggcggcgtccaatcggtcatgggctcccgcttgggccagatggtgttgagtggggtcgacacggtgctggggaagtcggaggagtgggcggacaaccacctgccccttacggatgccgaactggcccgcatcgccacatccctggatggctttgacgtcgcgtccgtgcagcagcagcggcaggaacagagctacttcatggaaactgtcaagcaaggcgttgatcagaagctggtggaaggccaggagaagctgcaccagatgtggctcagctggaaccagaagcagctccagggccccgagaaggagccgcccaagccagagcaggtcgagtcccgggcgctcaccatgttccgggacattgcccagcaactgcaggccacctgtacctccctggggtccagcattcagggcctccccaccaatgtgaaggaccaggtgcagcaggcccgccgccaggtggaggacctccaggccacgttttccagcatccactccttccaggacctgtccagcagcattctggcccagagccgtgagcgtgtcgccagcgcccgcgaggccctggaccacatggtggaatatgtggcccagaacacacctgtcacgtggctcgtgggaccctttgcccctggaatcactgagaaagccccggaggagaagaagtagggggagaggagaggactcagcgggccccgtctctataatgcagctgtgctctggagtcctcaacccggggctcatttcaaacttattttctagccactcctcccagctcttctgtgctgtccacttgggaagctaaggctctcaaaacgggcatcacccagttgacccatctctcagcctctctgagcttggaagaagcctgttctgagcctcaccctatcagtcagtagagagagatgtccagaaaaaatatctttcaggaaagttctcccctgcagaattttttttccttgttaaatatcaggaatataggccgggtgcggtggctcacacctgtaatcccagcactttgggaggctgaggcgggcggaacacctgaggtcaggtgttcgagaccagccaggccaacatggtgaaaccccgtctctactaaaaatacaaaaaaaaatgagccgggcatggtagcaggtgtctgttatcccagttaggaggctgaggcaagagaatctcttgaacctgagaggcggaggttgcagtgagccaagatcgcgccattgcactccagcctgggggacaagagtgagacttagtctcaaaaaaaaaaaaaaagaaaaaaaaatcagggatatagttcatatcccacttctttgtttacaccgatgtccctgaatatcagcctgtagctaatggacttgggatttctggtctaagtgggcctcctggggatggggtggtacactgagcttctgagcctcattgtagagtagaaaggtactggggcctgtgtggtaagccttgttgaaatgctctggtattcagta

SEQ ID NO: 164396 - DNA, 6353 bp, Homo sapiens
  Payload ID: 12385
  Gene Symbol: PLIN4
  Gene Name: perilipin 4
  Uniprot ID: Q96Q06
  ENST ID: ENST00000301286
  CDS Start-End: 1-4074
atgcagaccctgggcagcttctttgggtccctgcctggcttcagctctgcccggaacctggtggccaacgcacatagctcggcgagagcccggccggccgctgaccccacaggagcgcctgctgccgaggctgcccaaccacaggctcaggtggctgcccacccagagcagacggccccatggacggagaaggagctgcaaccttcggaaaagcagatggtgtccggggccaaagacctggtgtgttccaagatgtccagggccaaggatgccgtgtcctccggggtggccagcgtggtggacgtggctaagggagtggtccagggaggcctggacaccactcggtctgcacttacgggcaccaaggaggtggtgtccagcggggtcacaggggccatggacatggctaagggggccgtccaagggggtctggacacctcgaaggctgtcctcaccggcaccaaggacacggtgtccactgggctcacgggggcagtgaatgtggccaaagggaccgtacaggccggtgtggacaccaccaagactgtgctgaccggcaccaaagacacagtgactactggggtcatgggggcagtgaacttggccaaagggactgtccagactggcgtggaaacctccaaggctgtgctgaccggcaccaaagatgctgtgtccactgggctcacaggggcagtgaatgtggccagaggaagcattcagaccggtgtggacaccagtaagactgtcctaacaggtaccaaggacaccgtctgtagtggggtgactggtgccatgaatgtggccaaaggaaccatccagaccggcgtggacaccagtaagactgtcctaacaggtaccaaggacaccgtctgtagtggggtgactggtgccatgaatgtggccaaaggaaccatccagaccggcgtggacaccagtaagactgtcctaacaggtaccaaggacaccgtctgtagtggggtgactggtgccatgaatgtggccaaaggaaccatccagaccggcgtggacaccaccaagactgtcctaactggcaccaagaacactgtctgcagtggggtgaccggtgccgtgaacttggccaaagaggccatccaggggggcctggataccaccaagtctatggtcatgggtacgaaagacacgatgtccactgggctcacaggggcagcgaatgtggccaagggggccatgcaaactgggctgaacacaacccaaaatatcgcaacaggtacaaaggacaccgtctgcagtggggtgactggtgccatgaatttggccagaggaaccatccagacaggcgtggacaccaccaagatcgttctaactggtaccaaggacactgtctgcagtggggtcaccggtgctgcgaatgtggccaaaggggccgtccagggcggcctggacactacaaagtctgtcctgactggcactaaagatgctgtgtccactgggctcacaggggctgtgaacgtggccaaagggaccgtccagaccggcgtagacaccaccaagactgtcctaaccggcaccaaggacaccgtctgcagtggggtgaccagtgctgtgaacgtggccaaaggggccgtccaggggggcctggacaccaccaagtctgtggtcataggtacaaaagacacgatgtccactgggctcacgggggcagcgaatgtggccaagggggctgtccagacaggtgtagacacagccaagaccgtgctgaccggcaccaaggacacagtgactactgggctcgtgggggcagtgaatgtcgccaaagggaccgtccagacaggcatggacaccaccaaaactgtcctaaccggtaccaaggacaccatctacagtggggtcaccagtgccgtgaacgtggccaagggggctgtgcaaactgggctgaaaacgacccaaaatatcgcgacaggtacaaagaacacctttggcagtggggtgaccagtgctgtgaatgtggccaaaggggctgcccagacaggtgtagacacggccaagaccgtgctgaccggcaccaaggacacagtcactactgggctcatgggggcagtgaatgtcgccaaagggactgtccagaccagtgtggacaccaccaagactgtcctaactggtaccaaggacaccgtctgcagtggggtgaccggtgctgcgaatgtggccaaaggggccatccaagggggcctggacactacaaagtctgtcctgactggcactaaagatgctgtgtccactgggctcacaggggctgtgaagttggccaaagggactgtccagaccggcatggacaccaccaagactgtgttaactggtaccaaggatgctgtgtgcagtggggtgaccggtgctgcgaatgtggccaagggggccgtccagatgggtgtagacacggccaagaccgtgctgaccggtaccaaggacactgtctgcagtggggtcaccggtgctgcgaacgtggccaagggtgctgtgcaaactgggctgaaaacgacccaaaatatcgcaacaggtacaaagaacacccttggcagtggggtgaccggtgctgcgaaagtggccaaaggggccgtccaggggggcctggacactacaaagtctgtcctgactggcactaaagatgccgtgtccactgggctcacaggggctgtgaacttggccaaagggactgtccagaccggcgtggacaccagcaagactgtcctgaccggtaccaaggacaccgtctgcagtggagtcactggtgccgtaaatgtggccaaagggaccgtccagacaggtgtggacacagccaagacggtgctgagtggcgctaaggatgcagtgactactggagtcacgggggcagtgaatgtggccaaaggaaccgtgcagaccggcgtggacgcctccaaggctgtgcttatgggtaccaaggacactgtcttcagtggggttaccggtgccatgagcatggccaaaggggccgtccaggggggcctggacaccaccaagacagtgctgaccggaaccaaagacgcagtgtccgctgggctcatggggtcagggaacgtggcgacaggggccacccacactggcctcagcaccttccagaactggttacctagtacccccgccacctcctggggtggactcaccagttccaggaccacagacaatggtggggagcagactgccctgagcccccaagaggccccgttctctggcatctccacgcccccggatgtgctcagtgtaggcccggagcctgcctgggaagccgcagccactaccaagggccttgcgactgacgtggcgacgttcacccaaggggccgccccaggcagggaggacacggggcttttggccaccacacacggccccgaagaagccccacgcttggcaatgctgcagaatgagttggaggggctgggggacatcttccaccccatgaatgcggaggagcaagctcagctggctgcctcccagcctgggccaaaggtgctgtcggcggaacaggggagctacttcgttcgtttaggtgacctgggtcccagcttccgccagcgggcatttgaacacgcggtgagccacctgcagcacggccagttccaagccagggacactctggcccagctccaggactgcttcaggctgattgaaaaggcccagcaggctccagaagggcagccacgtctggaccagggctcaggtgccagtgcggaggacgctgctgtccaggaggagcgggatgccggggttctgtccagggtctgcggccttctccggcagctgcacacggcctacagtggcctggtctccagcctccagggcctgcccgccgagctccagcagccagtggggcgggcgcggcacagcctctgtgagctctatggcatcgtggcctcagctggctctgtagaggagctgcccgcagagcggctggtgcagagccgcgagggtgtgcaccaggcttggcaggggttagagcagctgctggagggcctacagcacaatcccccgctcagctggctggtagggcccttcgccttgcccgctggcgggcagtagctgtaggagcctgcaggcccggcgcggggtcgccctgctctgtccagggaggagctgcctcagaactttctccccgcccccaaacctggatcggttccctaaagccctagacctttggggctgcagctggctgagcgccgaggggctgcggaggcagtgaccttcttaactgagccaccccacgccctgctccgggcctgcctgcatctcccacctcctccccagcgctgcctgcccctctcggagcctggggtcactcagaccaccagccaagagccttcccttgaagtccccaagcaagcactgcaattaggaaagagaaaaagcagcgtgcccagcctggaagggcatctgtttgccccgctagcaacccttttatatctagcagggctcttccagtcctgcagcacgggcccccagctatcagcggtgcaggcagtgctgtggcatcccaggctccgggcagctccgttctcatgctgaaagtgggtctccggccttagcacacacaccttgagggtcttaagaaccacattccctcatagtagaaagtactagaaaaagcgacactgccatcatcatcccaaggcaggctgctactgcctttgctgacccccggggtggcctcacggtggggacaaagctgccaggagccacagcagccacagctggggctttgcaccagcctggcttgagactgagcagtttgcagggggtggggggtgcaaaaaacaagcaaacaggctgctgctgcctccagctgcccaccacaggcctgccccaggcacctggggctctgaggcccctggggaggctgggcccagcagctgcccctggagaacacagacaaaggacttccccgcagggaactgtgccctatggagggatcagacagggctgggaacagccacagaggctgcgtgcctatggcacagcccttcctccgccgcacactccccctgggtcctcaggcccacccaagcgccgggctgcagaggaagcggggctggggaggctgcaggcatcagagacactggtggtggcggacccggccgccgggccccgtgctctcaggctagcccaggtcgtggaggctggcaggctcaggtcgggtgtgagacgtgccgtggctgcgctcagtccagcggggaggagccgttcagcccggcctccccaggaagccatatccccactcacccggtaagagaaccttgtcgtcccctttccatgctctcctaggacacgagcccaggaaccccagacccagggggaggaagggtggaggggccccaggggtcaccgtgtgcaccaggggccgtgaggggccggggcattcagctcagctctgaaccggggaagctggcacggcaaggactgcctcaggtgacgggccgtgagaggggacgggtcaggagccttcccaagccttctcctcagcccgacacccatggccatcggaggctaggatgccagacacagccatttgcagaaatcaggcacagtgactgcagctcacgtccagccaaccaagcatggggccgcagctcaggaagtcccttcccgccacaccacagcctaattcttactgggacggaggcaactcggctacgctgggcaggacgacaaacacgagacgccactgtggaatgagcaacttcggagcacggggtgacttgcttgggaccgtgcccacgtgacagccccttatgcagaggaggaaagagaagccccgagtgggaggggaacctgtccaaagtcacacggtgtgtgggtgacacagctggggtgagtcgaggctggcccctgaggcccatgctccctgaacgctggagaccactgtcggctagcagcggctctcagggaaggcctggtctccaccctcccagcctagcctcgcggaccctcgtcctccccacatcggacctgctcacctgcctggaccctgggctgccagatgcaggaagcatcaaaccccccagcctcgtgggtgcggggcagggcgcaggcagcacagcttagatgccctggtttgtccctcttgtctcctgggaagagcttgctcccgcccagctctcctgccactggcctttcagggttgggctgggcccagagtgccttttagtcgcttctcacggtggcctgatggctcaacccagtcccaaacgggcccagtgacactgccgcctgcgccccagctcaggcccccactgcaccagcaatgctagaaaaccaagccaataaaagtgatttcttttttcattaaaaaaccatttatagtc

SEQ ID NO: 164397 - DNA, 6484 bp, Homo sapiens
  Payload ID: 12385
  Gene Symbol: PLIN4
  Gene Name: perilipin 4
  ENST ID: ENST00000633942
  CDS Start-End: 99-4217
gtcctccaggggaccccgcgcagtccaggtgagcggggccgcgtctgcttcggtgacaccagggtgaggccaggcctgcagcttctcacgttctcactatgtctgctccagacgaagggagacgggatccccccaaaccgaagggcaagaccctgggcagcttctttgggtccctgcctggcttcagctctgcccggaacctggtggccaacgcacatagctcggcgagagcccggccggccgctgaccccacaggagcgcctgctgccgaggctgcccaaccacaggctcaggtggctgcccacccagagcagacggccccatggacggagaaggagctgcaaccttcggaaaagcagatggtgtccggggccaaagacctggtgtgttccaagatgtccagggccaaggatgccgtgtcctccggggtggccagcgtggtggacgtggctaagggagtggtccagggaggcctggacaccactcggtctgcacttacgggcaccaaggaggtggtgtccagcggggtcacaggggccatggacatggctaagggggccgtccaagggggtctggacacctcgaaggctgtcctcaccggcaccaaggacacggtgtccactgggctcacgggggcagtgaatgtggccaaagggaccgtacaggccggtgtggacaccaccaagactgtgctgaccggcaccaaagacacagtgactactggggtcatgggggcagtgaacttggccaaagggactgtccagactggcgtggaaacctccaaggctgtgctgaccggcaccaaagatgctgtgtccactgggctcacaggggcagtgaatgtggccagaggaagcattcagaccggtgtggacaccagtaagactgtcctaacaggtaccaaggacaccgtctgtagtggggtgactggtgccatgaatgtggccaaaggaaccatccagaccggcgtggacaccagtaagactgtcctaacaggtaccaaggacaccgtctgtagtggggtgactggtgccatgaatgtggccaaaggaaccatccagaccggcgtggacaccagtaagactgtcctaacaggtaccaaggacaccgtctgtagtggggtgactggtgccatgaatgtggccaaaggaaccatccagaccggcgtggacaccaccaagactgtcctaactggcaccaagaacactgtctgcagtggggtgaccggtgccgtgaacttggccaaagaggccatccaggggggcctggataccaccaagtctatggtcatgggtacgaaagacacgatgtccactgggctcacaggggcagcgaatgtggccaagggggccatgcaaactgggctgaacacaacccaaaatatcgcaacaggtacaaaggacaccgtctgcagtggggtgactggtgccatgaatttggccagaggaaccatccagacaggcgtggacaccaccaagatcgttctaactggtaccaaggacactgtctgcagtggggtcaccggtgctgcgaatgtggccaaaggggccgtccagggcggcctggacactacaaagtctgtcctgactggcactaaagatgctgtgtccactgggctcacaggggctgtgaacgtggccaaagggaccgtccagaccggcgtagacaccaccaagactgtcctaaccggcaccaaggacaccgtctgcagtggggtgaccagtgctgtgaacgtggccaaaggggccgtccaggggggcctggacaccaccaagtctgtggtcataggtacaaaagacacgatgtccactgggctcacgggggcagcgaatgtggccaagggggctgtccagacaggtgtagacacagccaagaccgtgctgaccggcaccaaggacacagtgactactgggctcgtgggggcagtgaatgtcgccaaagggaccgtccagacaggcatggacaccaccaaaactgtcctaaccggtaccaaggacaccatctacagtggggtcaccagtgccgtgaacgtggccaagggggctgtgcaaactgggctgaaaacgacccaaaatatcgcgacaggtacaaagaacacctttggcagtggggtgaccagtgctgtgaatgtggccaaaggggctgcccagacaggtgtagacacggccaagaccgtgctgaccggcaccaaggacacagtcactactgggctcatgggggcagtgaatgtcgccaaagggactgtccagaccagtgtggacaccaccaagactgtcctaactggtaccaaggacaccgtctgcagtggggtgaccggtgctgcgaatgtggccaaaggggccatccaagggggcctggacactacaaagtctgtcctgactggcactaaagatgctgtgtccactgggctcacaggggctgtgaagttggccaaagggactgtccagaccggcatggacaccaccaagactgtgttaactggtaccaaggatgctgtgtgcagtggggtgaccggtgctgcgaatgtggccaagggggccgtccagatgggtgtagacacggccaagaccgtgctgaccggtaccaaggacactgtctgcagtggggtcaccggtgctgcgaacgtggccaagggtgctgtgcaaactgggctgaaaacgacccaaaatatcgcaacaggtacaaagaacacccttggcagtggggtgaccggtgctgcgaaagtggccaaaggggccgtccaggggggcctggacactacaaagtctgtcctgactggcactaaagatgccgtgtccactgggctcacaggggctgtgaacttggccaaagggactgtccagaccggcgtggacaccagcaagactgtcctgaccggtaccaaggacaccgtctgcagtggagtcactggtgccgtaaatgtggccaaagggaccgtccagacaggtgtggacacagccaagacggtgctgagtggcgctaaggatgcagtgactactggagtcacgggggcagtgaatgtggccaaaggaaccgtgcagaccggcgtggacgcctccaaggctgtgcttatgggtaccaaggacactgtcttcagtggggttaccggtgccatgagcatggccaaaggggccgtccaggggggcctggacaccaccaagacagtgctgaccggaaccaaagacgcagtgtccgctgggctcatggggtcagggaacgtggcgacaggggccacccacactggcctcagcaccttccagaactggttacctagtacccccgccacctcctggggtggactcaccagttccaggaccacagacaatggtggggagcagactgccctgagcccccaagaggccccgttctctggcatctccacgcccccggatgtgctcagtgtaggcccggagcctgcctgggaagccgcagccactaccaagggccttgcgactgacgtggcgacgttcacccaaggggccgccccaggcagggaggacacggggcttttggccaccacacacggccccgaagaagccccacgcttggcaatgctgcagaatgagttggaggggctgggggacatcttccaccccatgaatgcggaggagcaagctcagctggctgcctcccagcctgggccaaaggtgctgtcggcggaacaggggagctacttcgttcgtttaggtgacctgggtcccagcttccgccagcgggcatttgaacacgcggtgagccacctgcagcacggccagttccaagccagggacactctggcccagctccaggactgcttcaggctgattgaaaaggcccagcaggctccagaagggcagccacgtctggaccagggctcaggtgccagtgcggaggacgctgctgtccaggaggagcgggatgccggggttctgtccagggtctgcggccttctccggcagctgcacacggcctacagtggcctggtctccagcctccagggcctgcccgccgagctccagcagccagtggggcgggcgcggcacagcctctgtgagctctatggcatcgtggcctcagctggctctgtagaggagctgcccgcagagcggctggtgcagagccgcgagggtgtgcaccaggcttggcaggggttagagcagctgctggagggcctacagcacaatcccccgctcagctggctggtagggcccttcgccttgcccgctggcgggcagtagctgtaggagcctgcaggcccggcgcggggtcgccctgctctgtccagggaggagctgcctcagaactttctccccgcccccaaacctggatcggttccctaaagccctagacctttggggctgcagctggctgagcgccgaggggctgcggaggcagtgaccttcttaactgagccaccccacgccctgctccgggcctgcctgcatctcccacctcctccccagcgctgcctgcccctctcggagcctggggtcactcagaccaccagccaagagccttcccttgaagtccccaagcaagcactgcaattaggaaagagaaaaagcagcgtgcccagcctggaagggcatctgtttgccccgctagcaacccttttatatctagcagggctcttccagtcctgcagcacgggcccccagctatcagcggtgcaggcagtgctgtggcatcccaggctccgggcagctccgttctcatgctgaaagtgggtctccggccttagcacacacaccttgagggtcttaagaaccacattccctcatagtagaaagtactagaaaaagcgacactgccatcatcatcccaaggcaggctgctactgcctttgctgacccccggggtggcctcacggtggggacaaagctgccaggagccacagcagccacagctggggctttgcaccagcctggcttgagactgagcagtttgcagggggtggggggtgcaaaaaacaagcaaacaggctgctgctgcctccagctgcccaccacaggcctgccccaggcacctggggctctgaggcccctggggaggctgggcccagcagctgcccctggagaacacagacaaaggacttccccgcagggaactgtgccctatggagggatcagacagggctgggaacagccacagaggctgcgtgcctatggcacagcccttcctccgccgcacactccccctgggtcctcaggcccacccaagcgccgggctgcagaggaagcggggctggggaggctgcaggcatcagagacactggtggtggcggacccggccgccgggccccgtgctctcaggctagcccaggtcgtggaggctggcaggctcaggtcgggtgtgagacgtgccgtggctgcgctcagtccagcggggaggagccgttcagcccggcctccccaggaagccatatccccactcacccggtaagagaaccttgtcgtcccctttccatgctctcctaggacacgagcccaggaaccccagacccagggggaggaagggtggaggggccccaggggtcaccgtgtgcaccaggggccgtgaggggccggggcattcagctcagctctgaaccggggaagctggcacggcaaggactgcctcaggtgacgggccgtgagaggggacgggtcaggagccttcccaagccttctcctcagcccgacacccatggccatcggaggctaggatgccagacacagccatttgcagaaatcaggcacagtgactgcagctcacgtccagccaaccaagcatggggccgcagctcaggaagtcccttcccgccacaccacagcctaattcttactgggacggaggcaactcggctacgctgggcaggacgacaaacacgagacgccactgtggaatgagcaacttcggagcacggggtgacttgcttgggaccgtgcccacgtgacagccccttatgcagaggaggaaagagaagccccgagtgggaggggaacctgtccaaagtcacacggtgtgtgggtgacacagctggggtgagtcgaggctggcccctgaggcccatgctccctgaacgctggagaccactgtcggctagcagcggctctcagggaaggcctggtctccaccctcccagcctagcctcgcggaccctcgtcctccccacatcggacctgctcacctgcctggaccctgggctgccagatgcaggaagcatcaaaccccccagcctcgtgggtgcggggcagggcgcaggcagcacagcttagatgccctggtttgtccctcttgtctcctgggaagagcttgctcccgcccagctctcctgccactggcctttcagggttgggctgggcccagagtgccttttagtcgcttctcacggtggcctgatggctcaacccagtcccaaacgggcccagtgacactgccgcctgcgccccagctcaggcccccactgcaccagcaatgctagaaaaccaagccaataaaagtgatttcttttttcattaaaaaa

SEQ ID NO: 164398 - DNA, 2470 bp, Homo sapiens
  Payload ID: 12386
  Gene Symbol: PLIN5
  Gene Name: perilipin 5
  Uniprot ID: Q00G26
  ENST ID: ENST00000381848
  CDS Start-End: 82-1473
gtggagactcgagcctggggtcggcggagacagctggtgtctgaagccgctcgcgcccagggtgaccctgtttgcagcacgatgtctgaagaagaggcggctcagatccccagatccagtgtgtgggagcaggaccagcagaacgtggtgcagcgtgtggtggctctgcccctggtcagggccacgtgcaccgcggtctgcgatgtttacagtgcagccaaggacaggcacccgctgctgggctccgcctgccgcctggctgagaactgcgtgtgcggcctgaccacccgtgccctggaccacgcccagccgctgctcgagcacctgcagccccagctggccactatgaacagcctcgcctgcaggggcctggacaagctggaagagaagcttccctttctccagcaaccttcggagacggtggtgacctcagccaaggacgtggtggccagcagtgtcacgggtgtggtggacctggcccggaggggccggcgctggagcgtggagctgaagcgctccgtgagccatgctgtggatgttgtactggaaaaatcagaggagctggtggatcacttcctgcccatgacggaggaagagctcgcggcactggcggctgaggctgaaggccctgaagtgggttcggtggaggatcagaggagacagcagggctactttgtgcgcctcggctccctgtcagcacggatccgccacctggcctacgagcactctgtggggaaactgaggcagagcaaacaccgtgcccaggacaccctggcccagctgcaggagacgctggagctgatagaccacatgcagtgtggggtgacccccaccgccccggcctgccctgggaaggtgcacgagctgtggggggaatggggccagcgccctccggagagccgccgccggagccaggcagagctggagacgctggtgctgtcccgcagcctgacccaggagctgcagggcacggtagaggctctggagtccagcgtgcggggcctgcccgccggcgcccaggagaaggtggctgaggtgcggcgcagtgtggatgccctgcagaccgccttcgctgatgcccgctgcttcagggacgtgccagcggccgcgctggccgagggccggggtcgcgtggcccacgcgcacgcctgcgtggacgagctgctggagctggtggtgcaggccgtgccgctgccctggctggtgggacccttcgcgcccatccttgtggagcgacccgagcccctgcccgacctggcggacctggtggacgaggtcatcgggggccctgacccccgctgggcgcacctggactggccggcccagcagagagcctgggaggcagagcacagggacgggagtgggaatggggatggggacaggatgggtgttgccggggacatctgcgagcaggaacccgagacccccagctgcccggtcaagcacaccctgatgcccgagctggacttctgacccatgggccagtggaggcggggaggaaaggccacctgcacaccccgatccctgctgccccctggtggccacacgtaagctcgaggccttggccttgacccttctttggaatcaggcccaactccggatctctgaccacctttttggtattggactctcccattttttccttgaacacatggacaaagaggcccgggggagcagggcctcgaaccctattcaggccaacttgagccacaagctgggttcttcacctatgtcctgctccctggctccatgaagcgaatccaaatctttccaagaggctgggcacagtggctcacgcctgtaatcccagcactttgggagtctgaggcaggtggatcatctgaagtcaggagttcgggatcatcctggccaacatgatgaaaccctgtctctacttagaaagaaagaaaaaaaaaaaaaaagccaggtgtggtggtgtgcacctgtagtcccagctagttgtgaggctgacgcagaagaattgcttaaacccgagaggcgcggagcttgcagtgagcagagatcgcgccactgcacaccagcctgggtgacagagcgagactccatctaacaaaaaataatagtaacagcctcccgaagaaatacacattttgcccaatgccttctgtttggggctttgaaaagtgagccctgactgggtgtggtggttgacacctgttatcacagcactttgggaggccaaggtgggaggactgcttgagcccaggagttggaggctgcagtgagccatgatcttgcccctgcgctctcgcctgggtgacagagcaagactctatctcaaaaatgtttttaaaaaatacttcctagggaaacacacattttgccctatttggaactttgaaaagtgagccctcctctgcccatgggccgtgctgctcagcctgccatactcgcttgctttgctgtttgggatttgcctccagaataaaggtcctttttgttgttgaaa

SEQ ID NO: 164399 - DNA, 1903 bp, Homo sapiens
  Payload ID: 12386
  Gene Symbol: PLIN5
  Gene Name: perilipin 5
  ENST ID: ENST00000592610
  CDS Start-End: 201-377
ggacaccctctgtgtacagagctctggacatgcattgtctgagctccacagaatgccccattatgcagatgaagaaactgaggccccaagaggtttgagagttgctcaagtcacagagcccaatttgacaggatctgatgcctgggcaggtgctccccttactcaatcctgccccgcagggtgaccctgtttgcagcacgatgtctgaagaagaggcggctcagatccccagatccagtgtgtgggagcaggaccagcaggtgagggctgcccctcccatggagcagggacagaaggtattgtgtgggacagtcccttctaggagcgtttcaggccaggtatcccgccccactcctctccttgctgggaaaacctgagtcataaaatattttggtccatggaggggatggtctatttcctagtgggggcttaatgaggccctgggaggggagtgtctctcaaagacacccagctggcttctgtggcccctacccaaccctttccctctcctttgatccctgggtctccacctgtatccttctgtctccacgtccaccatcatggcgccctcagtaacaacaatagtaagagcagcaatcactgtatcagtcacagttccaaccgtttcatgtatattggctccttgaacacccatcacaaccctagtaacccatttcatagatggggaaacaaaggcaccgaacagttcagtggcttgcccaagttcacacaacttgcaggcagctgaaccagaagtgaacagaggccactgtgctccaggggcagtgctctgaacccccagactctaacatctcctccctcgagcagacagatcgcagtggacccttcaacaacatgggtttgaactgcacaggtcaggctgggtgcggtggctcagacgcctgtaatcccagcactttgggaggccaagcgggcagatcaactgaggtcaggagttcgagaccagcctggctaacttggtgaaaccctgtctctactaaaaatacaagaattagccgggtgtggtggcgggtgcctgtattcccagctactcgggagcctgaggcaggagaaccgcttgaaccctgaaggcgggggttgcagtgagccgagatcacgccactgcactccagcctaggtaacaagaacgagactccatctcaaaaaaaaaaaaaagccaggtggggtggtgcctgcctggaatcccagctaattgggaggctgaggcaggagaatctcttgaacccaggagacagaagtatgcagacctttttcaaccaaatgcagataaaaaaaatatagtatttggccaggtgcagtggctcatgcctataatcccagcatattaggagactgaagcgggaggatcgcttgagccaggagttcaagaccagcatgggcaacacagcaagacccaatctctataaaataaaataaaattagctgggcacagtggtgtgcacctgtaatcccaggtacttggaaactgaggttggaggattgcttgaggctaggaggcttaggctgcagtgagccgtgcttgaatcactgccctctagcctggccaacagagcaagaccttgtctctattgaaaacaaaaaaattgtgaccaggtgcaatggctcaggcctgtaatcctagcactttgggaggctgaggtgggtggatcacctgaggtgggtggatcacctgaggtcgggagttcgacaccagcctggtcaacatagtgaaaccctgtttctactaaaaataaaaataaaaacaaaattggctgggcgcggtggctcacgcctgtaatccctgcactttgggaggccaaggcaggtggatcacctgaggtcggtagtttgagaccagcctgaccaatgtggagaaaccccatctctactaaaaatacacaaa

SEQ ID NO: 164400 - DNA, 907 bp, Homo sapiens
  Payload ID: 12386
  Gene Symbol: PLIN5
  Gene Name: perilipin 5
  ENST ID: ENST00000586133
  CDS Start-End: 82-258
gtggagactcgagcctggggtcggcggagacagctggtgtctgaagccgctcgcgcccagggtgaccctgtttgcagcacgatgtctgaagaagaggcggctcagatccccagatccagtgtgtgggagcaggaccagcaggtgagggctgcccctcccatggagcagggacagaaggtattgtgtgggacagtcccttctaggagcgtttcaggccaggtatcccgccccactcctctccttgctgggaaaacctgagtcataaaatattttggtccatggaggggatggtctatttcctagtgggggcttaatgaggccctgggaggggagtgtctctcaaagacacccagctggcttctgtggcccctacccaaccctttccctctcctttgatccctgggtctccacctgtatccttctgtctccacgtccaccatcatggcgccctcagtaacaacaatagtaagagcagcaatcactgtatcagtcacagttccaaccgtttcatgtatattggctccttgaacacccatcacaaccctagtaacccatttcatagatggggaaacaaaggcaccgaacagttcagtggcttgcccaagttcacacaacttgcaggcagctgaaccagaagtgaacagaggccactgtgctccaggggcagtgctctgaacccccagactctaacatctcctccctcgagcagacagatcgcagtggacccttcaacaacatgggtttgaactgcacaggtcaggctgggtgcggtggctcagacgcctgtaatcccagcactttgggaggccaagcgggcagatcaactgaggtcaggagttcgagaccagcctggctaacttggtgaaaccctgtctctactaaaaatacaagaattagccgggtgtgg

SEQ ID NO: 164401 - DNA, 4707 bp, Homo sapiens
  Payload ID: 12387
  Gene Symbol: PER1
  Gene Name: period circadian clock 1
  Uniprot ID: O15534
  ENST ID: ENST00000317276
  CDS Start-End: 239-4111
attatgcaacccgcctccccgcccgcccggtggagcttccactcggctgcgggctggagcggcggcgggcaggcgtgcggaggacactcctgcgaccaggtactggctgtgatcgaacttctcaaccctcagagacttagatcttccacctcactccctcagccaagcctccaggccccctcgtgcatccgtggtggcctctctgccttctctgttctgttctccccatggcccagacatgagtggccccctagaaggggctgatgggggaggggaccccaggcctggggaatcattttgtcctgggggcgtcccatcccctgggcccccacagcaccggccttgcccaggccccagcctggccgatgacaccgatgccaacagcaatggttcaagtggcaatgagtccaacgggcatgagtctagaggcgcatctcagcggagctcacacagctcctcctcaggcaacggcaaggactcagccctgctggagaccactgagagcagcaagagcacaaactctcagagcccatccccacccagcagttccattgcctacagcctcctgagtgccagctcagagcaggacaacccgtccaccagtggctgcagcagtgaacagtcagcccgggcaaggactcagaaggaactcatgacagcacttcgagagctcaagcttcgactgccgccagagcgccggggcaagggccgctctgggaccctggccacgctgcagtacgcactggcctgtgtcaagcaggtgcaggccaaccaggaatactaccagcagtggagcctggaggagggcgagccttgctccatggacatgtccacctataccctggaggagctggagcacatcacgtctgagtacacacttcagaaccaggataccttctcagtggctgtctccttcctgacgggccgaatcgtctacatttcggagcaggcagccgtcctgctgcgttgcaagcgggacgtgttccggggtacccgcttctctgagctcctggctccccaggatgtgggagtcttctatggttccactgctccatctcgcctgcccacctggggcacaggggcctcagcaggttcaggcctcagggactttacccaggagaagtccgtcttctgccgtatcagaggaggtcctgaccgggatccagggcctcggtaccagccattccgcctaaccccgtatgtgaccaagatccgggtctcagatggggcccctgcacagccgtgctgcctgctgattgcagagcgcatccattcgggttacgaagctccccggataccccctgacaagaggattttcactacgcggcacacacccagctgcctcttccaggatgtggatgaaagggctgcccccctgctgggctacctgccccaggacctcctgggggccccagtgctcctgttcctgcatcctgaggaccgacccctcatgctggctatccacaagaagattctgcagttggcgggccagccctttgaccactcccctatccgcttctgtgcccgcaacggggagtatgtcaccatggacaccagctgggctggctttgtgcacccctggagccgcaaggtagccttcgtgttgggccgccacaaagtacgcacggcccccctgaatgaggacgtgttcactcccccggcccccagcccagctccctccctggacactgatatccaggagctgtcagagcagatccaccggctgctgctgcagcccgtccacagccccagccccacgggactctgtggagtcggcgccgtgacatccccaggccctctccacagccctgggtcctccagtgatagcaacgggggtgatgcagaggggcctgggcctcctgcgccagtgactttccagcagatctgtaaggatgtgcatctggtgaagcaccagggccagcagctttttattgagtctcgggcccggcctcagtcccggccccgcctccctgctacaggcacgttcaaggccaaggcccttccctgccaatccccagacccagagctggaggcgggttctgctcccgtccaggccccactagccttggtccctgaggaggccgagaggaaagaagcctccagctgctcctaccagcagatcaactgcctggacagcatcctcaggtacctggagagctgcaacctccccagcaccactaagcgtaaatgtgcctcctcctcctcctataccacctcctcagcctctgacgacgacaggcagaggacaggtccagtctctgtggggaccaagaaagatccgccgtcagcagcgctgtctggggagggggccaccccacggaaggagccagtggtgggaggcaccctgagcccgctcgccctggccaataaggcggagagtgtggtgtccgtcaccagtcagtgtagcttcagctccaccatcgtccatgtgggagacaagaagcccccggagtcggacatcatcatgatggaggacctgcctggcctagccccaggcccagcccccagcccagcccccagccccacagtagcccctgacccagccccagacgcctaccgtccagtggggctgaccaaggccgtgctgtccctgcacacacagaaggaagagcaagccttcctcagccgcttccgagacctgggcaggctgcgtggactcgacagctcttccacagctccctcagcccttggcgagcgaggctgccaccacggccccgcacccccaagccgccgacaccactgccgatccaaagccaagcgctcacgccaccaccagaaccctcgggctgaagcgccctgctatgtctcacacccctcacccgtgccaccctccaccccctggcccaccccaccagccactacccccttcccagcggttgtccagccctaccctctcccagtgttctctcctcgaggaggcccccagcctcttccccctgctcccacatctgtgcccccagctgctttccccgcccctttggtgaccccaatggtggccttggtgctccctaactatctgttcccaaccccatccagctatccttatggggcactccagacccctgctgaagggcctcccactcctgcctcgcactccccttctccatccttgcccgccctcgccccgagtcctcctcaccgcccggactctccactgttcaactcgagatgcagctctccactccagctcaatctgctgcagctggaggagctcccccgtgctgagggggctgctgttgcaggaggccctgggagcagtgccgggcccccacctcccagtgcggaggctgctgagccagaggccagactggcggaggtcactgagtcctccaatcaggacgcactttccggctccagtgacctgctcgaacttctgctgcaagaggactcgcgctccggcacaggctccgcagcctcgggctccttgggctctggcttgggctctgggtctggttcaggctcccatgaagggggcagcacctcagccagcatcactcgcagcagccagagcagccacacaagcaaatactttggcagcatcgactcttccgaggctgaggctggggctgctcggggcggggctgagcctggggaccaggtgattaagtacgtgctccaggatcccatttggctgctcatggccaatgctgaccagcgcgtcatgatgacctaccaggtgccctccagggacatgacctctgtgctgaagcaggatcgggagcggctccgagccatgcagaagcagcagcctcggttttctgaggaccagcggcgggaactgggtgctgtgcactcctgggtccggaagggccaactgcctcgggctcttgatgtgatggcctgtgtggactgtgggagcagcacccaagatcctggtcaccctgatgacccactcttctcagagctggatggactggggctggagcccatggaagagggtggaggcgagcagggcagcagcggtggcggcagtggtgagggagagggctgcgaggaggcccaaggcggggccaaggcttcaagctctcaggacttggctatggaggaggaggaagaaggcaggagctcatccagtccagccttacctacagcaggaaactgcaccagctagactccattctgggaccatctccaggagtccatgagaggctttcttctcctatgtcccaattctcagaactcagatgtggctagaccaaccagtgggaaactgccccagcttctcccaccatagggggccggacccccatcaccagcctaggatccaggggctgcctctggcctcttagggagcagagagcagaactccgcagcccagcccagaggagtgtcacctcccacctttggagaggaatccttccctcccctggacaaagttgctgacaagctgctgaagtggcctctccatattccagctgagcctgaatctgactcttgagggttggggctgcacttatttattgcggggagacagctctctctcccacctcctccccagatgggaggagagcctgaggcccaagcaggacccgggggttccagcccctagctgctctggagtgggggaggttggtggaccatggagtccctggtgctgcccctcaggtgggacccaggcgttctcagctgtaccctctgccgatggcatttgtgtttttgatatttgtgtctgttactacttttttaatacaaaaagataaaaacgcc

SEQ ID NO: 164402 - DNA, 3115 bp, Homo sapiens
  Payload ID: 12387
  Gene Symbol: PER1
  Gene Name: period circadian clock 1
  Uniprot ID: O15534
  ENST ID: ENST00000354903
  CDS Start-End: 7-2586
agtgtaatgctagaagtcctagaagaaatttggagtgtgcgtgcgcgccgagcgcaccggccttgcccaggccccagcctggccgatgacaccgatgccaacagcaatggttcaagtggcaatgagtccaacgggcatgagtctagaggcgcatctcagcggagctcacacagctcctcctcaggcaacggcaaggactcagccctgctggagaccactgagagcagcaagagcacaaactctcagagcccatccccacccagcagttccattgcctacagcctcctgagtgccagctcagagcaggacaacccgtccaccagtggctgcagcagtgaacagtcagcccgggcaaggactcagaaggaactcatgacagcacttcgagagctcaagcttcgactgccgccagagcgccggggcaagggccgctctgggaccctggccacgctgcagtacgcactggcctgtgtcaagcaggtgcaggccaaccaggaatactaccagcagtggagcctggaggagggcgagccttgctccatggacatgtccacctataccctggaggagctggagcacatcacgtctgagtacacacttcagaaccaggataccttctcagtggctgtctccttcctgacgggccgaatcgtctacatttcggagcaggcagccgtcctgctgcgttgcaagcgggacgtgttccggggtacccgcttctctgagctcctggctccccaggatgtgggagtcttctatggttccactgctccatctcgcctgcccacctggggcacaggggcctcagcaggttcaggcctcagggactttacccaggagaagtccgtcttctgccgtatcagaggaggtcctgaccgggatccagggcctcggtaccagccattccgcctaaccccgtatgtgaccaagatccgggtctcagatggggcccctgcacagccgtgctgcctgctgattgcagagcgcatccattcgggttacgaagctccccggataccccctgacaagaggattttcactacgcggcacacacccagctgcctcttccaggatgtggatgaaagggctgcccccctgctgggctacctgccccaggacctcctgggggccccagtgctcctgttcctgcatcctgaggaccgacccctcatgctggctatccacaagaagattctgcagttggcgggccagccctttgaccactcccctatccgcttctgtgcccgcaacggggagtatgtcaccatggacaccagctgggctggctttgtgcacccctggagccgcaaggtagccttcgtgttgggccgccacaaagtacgcacggcccccctgaatgaggacgtgttcactcccccggcccccagcccagctccctccctggacactgatatccaggagctgtcagagcagatccaccggctgctgctgcagcccgtccacagccccagccccacgggactctgtggagtcggcgccgtgacatccccaggccctctccacagccctgggtcctccagtgatagcaacgggggtgatgcagaggggcctgggcctcctgcgccagtgactttccagcagatctgtaaggatgtgcatctggtgaagcaccagggccagcagctttttattgagtctcgggcccggcctcagtcccggccccgcctccctgctacaggcacgttcaaggccaaggcccttccctgccaatccccagacccagagctggaggcgggttctgctcccgtccaggccccactagccttggtccctgaggaggccgagaggaaagaagcctccagctgctcctaccagcagatcaactgcctggacagcatcctcaggtacctggagagctgcaacctccccagcaccactaagcgtaaatgtgcctcctcctcctcctataccacctcctcagcctctgacgacgacaggcagaggacaggtccagtctctgtggggaccaagaaagatccgccgtcagcagcgctgtctggggagggggccaccccacggaaggagccagtggtgggaggcaccctgagcccgctcgccctggccaataaggcggagagtgtggtgtccgtcaccagtcagtgtagcttcagctccaccatcgtccatgtgggagacaagaagcccccggagtcggacatcatcatgatggaggacctgcctggcctagccccaggcccagcccccagcccagcccccagccccacagtagcccctgacccagccccagacgcctaccgtccagtggggctgaccaaggccgtgctgtccctgcacacacagaaggaagagcaagccttcctcagccgcttccgagacctgggcaggctgcgtggactcgacagctcttccacagctccctcagcccttggcgagcgaggtagccacctggggcctcctggagcctgccctctgcccagtctaggactggattgttggggggtgggtcttaagggaggtgtttctgctccagggacccaggctggtgttgcttccaccactaggccctgcctagggacaggcccctcgctagcttctccccactaggatggggttccgggctgcagccagaggagggcagcctggggggatggcactgggatgggcaggcagaggtgctgtctccaggtaagcgacttcaggcctagcctgggggcaggggcaggaagtatgcccacttaggagtcagttgtcactgatgaagagacatgcatagattctgggccaactctgggtggggtctgggcttcaagggcaggtggaaggcagcccctccaggtgcctgagggagatcccctgcaggcagacgcaggactcaggactgggctttccagccccactcttcactccattgcaagctaggcagaatacggcctcgatgggcaggaggaatgcctaggctggcagtgcccacaggagtttggcggaccagagccatctgtccatgtgtccatggactcaccctgcttcctccatctgccagcatgcctccatcttccgcacacccccagctcgacccctcgtgtaacctctccctggccttgttcctttctcaataaatccccttgtccctggc

SEQ ID NO: 164403 - DNA, 4521 bp, Homo sapiens
  Payload ID: 12387
  Gene Symbol: PER1
  Gene Name: period circadian clock 1
  ENST ID: ENST00000581082
  CDS Start-End: 127-3930
tcgaacttctcaaccctcagagacttagatcttccacctcactccctcagccaagcctccaggccccctcgtgcatccgtggtggcctctctgccttctctgttctgttctccccatggcccagacatgagtggccccctagaaggggctgatgggggaggggaccccaggcctggggaatcattttgtcctgggggcgtcccatcccctgggcccccacagcaccggccttgcccaggccccagcctggccgatgacaccgatgccaacagcaatggttcaagtggcaatgagtccaacgggcatgagtctagaggcgcatctcagcggagctcacacagctcctcctcaggcaacggcaaggactcagccctgctggagaccactgagagcagcaagagcacaaactctcagagcccatccccacccagcagttccattgcctacagcctcctgagtgccagctcagagcaggacaacccgtccaccagtggctgcagcagtgaacagtcagcccgggcaaggactcagaaggaactcatgacagcacttcgagagctcaagcttcgactgccgccagagcgccggggcaagggccgctctgggaccctggccacgctgcagtacgcactggcctgtgtcaagcaggtgcaggccaaccaggaatactaccagcagtggagcctggaggagggcgagccttgctccatggacatgtccacctataccctggaggagctggagcacatcacgtctgagtacacacttcagaaccaggcagccgtcctgctgcgttgcaagcgggacgtgttccggggtacccgcttctctgagctcctggctccccaggatgtgggagtcttctatggttccactgctccatctcgcctgcccacctggggcacaggggcctcagcaggttcaggcctcagggactttacccaggagaagtccgtcttctgccgtatcagaggaggtcctgaccgggatccagggcctcggtaccagccattccgcctaaccccgtatgtgaccaagatccgggtctcagatggggcccctgcacagccgtgctgcctgctgattgcagagcgcatccattcgggttacgaagctccccggataccccctgacaagaggattttcactacgcggcacacacccagctgcctcttccaggatgtggatgaaagggctgcccccctgctgggctacctgccccaggacctcctgggggccccagtgctcctgttcctgcatcctgaggaccgacccctcatgctggctatccacaagaagattctgcagttggcgggccagccctttgaccactcccctatccgcttctgtgcccgcaacggggagtatgtcaccatggacaccagctgggctggctttgtgcacccctggagccgcaaggtagccttcgtgttgggccgccacaaagtacgcacggcccccctgaatgaggacgtgttcactcccccggcccccagcccagctccctccctggacactgatatccaggagctgtcagagcagatccaccggctgctgctgcagcccgtccacagccccagccccacgggactctgtggagtcggcgccgtgacatccccaggccctctccacagccctgggtcctccagtgatagcaacgggggtgatgcagaggggcctgggcctcctgcgccagtgactttccagcagatctgtaaggatgtgcatctggtgaagcaccagggccagcagctttttattgagtctcgggcccggcctcagtcccggccccgcctccctgctacaggcacgttcaaggccaaggcccttccctgccaatccccagacccagagctggaggcgggttctgctcccgtccaggccccactagccttggtccctgaggaggccgagaggaaagaagcctccagctgctcctaccagcagatcaactgcctggacagcatcctcaggtacctggagagctgcaacctccccagcaccactaagcgtaaatgtgcctcctcctcctcctataccacctcctcagcctctgacgacgacaggcagaggacaggtccagtctctgtggggaccaagaaagatccgccgtcagcagcgctgtctggggagggggccaccccacggaaggagccagtggtgggaggcaccctgagcccgctcgccctggccaataaggcggagagtgtggtgtccgtcaccagtcagtgtagcttcagctccaccatcgtccatgtgggagacaagaagcccccggagtcggacatcatcatgatggaggacctgcctggcctagccccaggcccagcccccagcccagcccccagccccacagtagcccctgacccagccccagacgcctaccgtccagtggggctgaccaaggccgtgctgtccctgcacacacagaaggaagagcaagccttcctcagccgcttccgagacctgggcaggctgcgtggactcgacagctcttccacagctccctcagcccttggctgccaccacggccccgcacccccaagccgccgacaccactgccgatccaaagccaagcgctcacgccaccaccagaaccctcgggctgaagcgccctgctatgtctcacacccctcacccgtgccaccctccaccccctggcccaccccaccagccactacccccttcccagcggttgtccagccctaccctctcccagtgttctctcctcgaggaggcccccagcctcttccccctgctcccacatctgtgcccccagctgctttccccgcccctttggtgaccccaatggtggccttggtgctccctaactatctgttcccaaccccatccagctatccttatggggcactccagacccctgctgaagggcctcccactcctgcctcgcactccccttctccatccttgcccgccctcgccccgagtcctcctcaccgcccggactctccactgttcaactcgagatgcagctctccactccagctcaatctgctgcagctggaggagctcccccgtgctgagggggctgctgttgcaggaggccctgggagcagtgccgggcccccacctcccagtgcggaggctgctgagccagaggccagactggcggaggtcactgagtcctccaatcaggacgcactttccggctccagtgacctgctcgaacttctgctgcaagaggactcgcgctccggcacaggctccgcagcctcgggctccttgggctctggcttgggctctgggtctggttcaggctcccatgaagggggcagcacctcagccagcatcactcgcagcagccagagcagccacacaagcaaatactttggcagcatcgactcttccgaggctgaggctggggctgctcggggcggggctgagcctggggaccaggtgattaagtacgtgctccaggatcccatttggctgctcatggccaatgctgaccagcgcgtcatgatgacctaccaggtgccctccagggacatgacctctgtgctgaagcaggatcgggagcggctccgagccatgcagaagcagcagcctcggttttctgaggaccagcggcgggaactgggtgctgtgcactcctgggtccggaagggccaactgcctcgggctcttgatgtgatggcctgtgtggactgtgggagcagcacccaagatcctggtcaccctgatgacccactcttctcagagctggatggactggggctggagcccatggaagagggtggaggcgagcagggcagcagcggtggcggcagtggtgagggagagggctgcgaggaggcccaaggcggggccaaggcttcaagctctcaggacttggctatggaggaggaggaagaaggcaggagctcatccagtccagccttacctacagcaggaaactgcaccagctagactccattctgggaccatctccaggagtccatgagaggctttcttctcctatgtcccaattctcagaactcagatgtggctagaccaaccagtgggaaactgccccagcttctcccaccatagggggccggacccccatcaccagcctaggatccaggggctgcctctggcctcttagggagcagagagcagaactccgcagcccagcccagaggagtgtcacctcccacctttggagaggaatccttccctcccctggacaaagttgctgacaagctgctgaagtggcctctccatattccagctgagcctgaatctgactcttgagggttggggctgcacttatttattgcggggagacagctctctctcccacctcctccccagatgggaggagagcctgaggcccaagcaggacccgggggttccagcccctagctgctctggagtgggggaggttggtggaccatggagtccctggtgctgcccctcaggtgggacccaggcgttctcagctgtaccctctgccgatggcatttgtgtttttgatatttgtgtctgttactacttttttaatacaaaaagataaaa

SEQ ID NO: 164404 - DNA, 589 bp, Homo sapiens
  Payload ID: 12387
  Gene Symbol: PER1
  Gene Name: period circadian clock 1
  ENST ID: ENST00000577253
  CDS Start-End: 239-589
gtggggggcgtggcagcccggcccgtgggcgggtttggaggagccagtgtaatgctagaagtcctagaagaaatttggagtgtgcgtgcgcgccgagcggtactggctgtgatcgaacttctcaaccctcagagacttagatcttccacctcactccctcagccaagcctccaggccccctcgtgcatccgtggtggcctctctgccttctctgttctgttctccccatggcccagacatgagtggccccctagaaggggctgatgggggaggggaccccaggcctggggaatcattttgtcctgggggcgtcccatcccctgggcccccacagcaccggccttgcccaggccccagcctggccgatgacaccgatgccaacagcaatggttcaagtggcaatgagtccaacgggcatgagtctagaggcgcatctcagcggagctcacacagctcctcctcaggcaacggcaaggactcagccctgctggagaccactgagagcagcaagagcagtgaacagtcagcccgggcaaggactcagaaggaactcatgacagcacttcgagagctcaagcttcgactgccg

SEQ ID NO: 164405 - DNA, 3677 bp, Homo sapiens
  Payload ID: 12387
  Gene Symbol: PER1
  Gene Name: period circadian clock 1
  ENST ID: ENST00000582719
  CDS Start-End: 148-2622
gcgaccaggtactggctgtgatcgaacttctcaaccctcagagacttagatcttccacctcactccctcagccaagcctccaggccccctcgtgcatccgtggtggcctctctgccttctctgttctgttctccccatggcccagacatgagtggccccctagaaggggctgatgggggaggggaccccaggcctggggaatcattttgtcctgggggcgtcccatcccctgggcccccacagcaccggccttgcccaggccccagcctggccgatgacaccgatgccaacagcaatggttcaagtggcaatgagtccaacgggcatgagtctagaggcgcatctcagcggagctcacacagctcctcctcaggcaacggcaaggactcagccctgctggagaccactgagagcagcaagagcacaaactctcagagcccatccccacccagcagttccattgcctacagcctcctgagtgccagctcagagcaggacaacccgtccaccagtggctgcagcagtgaacagtcagcccgggcaaggactcagaaggaactcatgacagcacttcgagagctcaagcttcgactgccgccagagcgccggggcaagggccgctctgggaccctggccacgctgcagtacgcactggcctgtgtcaagcaggtgcaggccaaccaggaatactaccagcagtggagcctggaggagggcgagccttgctccatggacatgtccacctataccctggaggagctggagcacatcacgtctgagtacacacttcagaaccaggataccttctcagtggctgtctccttcctgacgggccgaatcgtctacatttcggagcaggcagccgtcctgctgcgttgcaagcgggacgtgttccggggtacccgcttctctgagctcctggctccccaggatgtgggagtcttctatggttccactgctccatctcgcctgcccacctggggcacaggggcctcagcaggttcaggcctcagggactttacccaggagaagtccgtcttctgccgtatcagaggaggtcctgaccgggatccagggcctcggtaccagccattccgcctaaccccgtatgtgaccaagatccgggtctcagatggggcccctgcacagccgtgctgcctgctgattgcagagcgcatccattcgggttacgaagctccccggataccccctgacaagaggattttcactacgcggcacacacccagctgcctcttccaggatgtggatgaaagggctgcccccctgctgggctacctgccccaggacctcctgggggccccagtgctcctgttcctgcatcctgaggaccgacccctcatgctggctatccacaagaagattctgcagttggcgggccagccctttgaccactcccctatccgcttctgtgcccgcaacggggagtatgtcaccatggacaccagctgggctggctttgtgcacccctggagccgcaaggtagccttcgtgttgggccgccacaaagtacgcacggcccccctgaatgaggacgtgttcactcccccggcccccagcccagctccctccctggacactgatatccaggagctgtcagagcagatccaccggctgctgctgcagcccgtccacagccccagccccacgggactctgtggagtcggcgccgtgacatccccaggccctctccacagccctgggtcctccagtgatagcaacgggggtgatgcagaggggcctgggcctcctgcgccagtgactttccagcagatctgtaaggatgtgcatctggtgaagcaccagggccagcagctttttattgagtctcgggcccggcctcagtcccggccccgcctccctgctacaggcacgttcaaggccaaggcccttccctgccaatccccagacccagagctggaggcgggttctgctcccgtccaggccccactagccttggtccctgaggaggccgagaggaaagaagcctccagctgctcctaccagcagatcaactgcctggacagcatcctcaggtacctggagagctgcaacctccccagcaccactaagcgtaaatgtgcctcctcctcctcctataccacctcctcagcctctgacgacgacaggcagaggacaggtccagtctctgtggggaccaagaaagatccgccgtcagcagcgctgtctggggagggggccaccccacggaaggagccagtggtgggaggcaccctgagcccgctcgccctggccaataaggcggagagtgtggtgtccgtcaccagtcagtgtagcttcagctccaccatcgtccatgtgggagacaagaagcccccggagtcggacatcatcatgatggaggacctgcctggcctagccccaggcccagcccccagcccagcccccagccccacagtagcccctgacccagccccagacgcctaccgtccagtggggctgaccaaggccgtgctgtccctgcacacacagaaggaagagcaagccttcctcagccgcttccgagacctgggcaggctgcgtggactcgacagctcttccacagctccctcagcccttggcgagcgaggcggaggtcactgagtcctccaatcaggacgcactttccggctccagtgacctgctcgaacttctgctgcaagaggactcgcgctccggcacaggctccgcagcctcgggctccttgggctctggcttgggctctgggtctggttcaggctcccatgaagggggcagcacctcagccagcatcactcgcagcagccagagcagccacacaagcaaatactttggcagcatcgactcttccgaggctgaggctggggctgctcggggcggggctgagcctggggaccaggtgattaagtacgtgctccaggatcccatttggctgctcatggccaatgctgaccagcgcgtcatgatgacctaccaggtgccctccagggacatgacctctgtgctgaagcaggatcgggagcggctccgagccatgcagaagcagcagcctcggttttctgaggaccagcggcgggaactgggtgctgtgcactcctgggtccggaagggccaactgcctcgggctcttgatgtgatggcctgtgtggactgtgggagcagcacccaagatcctggtcaccctgatgacccactcttctcagagctggatggactggggctggagcccatggaagagggtggaggcgagcagggcagcagcggtggcggcagtggtgagggagagggctgcgaggaggcccaaggcggggccaaggcttcaagctctcaggacttggctatggaggaggaggaagaaggcaggagctcatccagtccagccttacctacagcaggaaactgcaccagctagactccattctgggaccatctccaggagtccatgagaggctttcttctcctatgtcccaattctcagaactcagatgtggctagaccaaccagtgggaaactgccccagcttctcccaccatagggggccggacccccatcaccagcctaggatccaggggctgcctctggcctcttagggagcagagagcagaactccgcagcccagcccagaggagtgtcacctcccacctttggagaggaatccttccctcccctggacaaagttg

SEQ ID NO: 164406 - DNA, 523 bp, Homo sapiens
  Payload ID: 12387
  Gene Symbol: PER1
  Gene Name: period circadian clock 1
  ENST ID: ENST00000583559
  CDS Start-End: 1-507
gtcaccagtcagtgtagcttcagctccaccatcgtccatgtgggagacaagaagcccccggagtcggacatcatcatgatggaggacctgcctggcctagccccaggcccagcccccagcccagcccccagccccacagtagcccctgacccagccccagacgcctaccgtccagtggggctgaccaaggccgtgctgtccctgcacacacagaaggaagagcaagccttcctcagccgcttccgagacctgggcaggctgcgtggactcgacagctcttccacagctccctcagcccttggcgagcgaggcagaatacggcctcgatgggcaggaggaatgcctaggctggcagtgcccacaggagtttggcggaccagagccatctgtccatgtgtccatggactcaccctgcttcctccatctgccagcatgcctccatcttccgcacacccccagctcgacccctcgtgtaacctctccctggccttgttcctttctcaataaatccccttgtccctgg

SEQ ID NO: 164407 - DNA, 528 bp, Homo sapiens
  Payload ID: 12387
  Gene Symbol: PER1
  Gene Name: period circadian clock 1
  ENST ID: ENST00000581703
  CDS Start-End: 4-528
attatgcaacccgcctccccgcccgcccggtggagcttccactcggctgcgggctggagcggcggcgggcaggcgtgcggaggacactcctgcgaccagcaccggccttgcccaggccccagcctggccgatgacaccgatgccaacagcaatggttcaagtggcaatgagtccaacgggcatgagtctagaggcgcatctcagcggagctcacacagctcctcctcaggcaacggcaaggactcagccctgctggagaccactgagagcagcaagagcacaaactctcagagcccatccccacccagcagttccattgcctacagcctcctgagtgccagctcagagcaggacaacccgtccaccagtggctgcagcagtgaacagtcagcccgggcaaggactcagaaggaactcatgacagcacttcgagagctcaagcttcgactgccgccagagcgccggggcaagggccgctctgggaccctggccacgctgcagtacgcactggcctgtgtcaagcaggtg

SEQ ID NO: 164408 - DNA, 576 bp, Homo sapiens
  Payload ID: 12387
  Gene Symbol: PER1
  Gene Name: period circadian clock 1
  ENST ID: ENST00000584202
  CDS Start-End: 240-576
aatgctagaagtcctagaagaaatttggagtgtgcgtgcgcgccgagcgagacggggtttctccatgttggtcaggctggtctcgaactcgctacctcaggtactggctgtgatcgaacttctcaaccctcagagacttagatcttccacctcactccctcagccaagcctccaggccccctcgtgcatccgtggtggcctctctgccttctctgttctgttctccccatggcccagacatgagtggccccctagaaggggctgatgggggaggggaccccaggcctggggaatcattttgtcctgggggcgtcccatcccctgggcccccacagcaccggccttgcccaggccccagcctggccgatgacaccgatgccaacagcaatggttcaagtggcaatgagtccaacgggcatgagtctagaggcgcatctcagcggagctcacacagctcctcctcaggcaacggcaaggactcagccctgctggagaccactgagagcagcaagagcacaaactctcagagcccatccccacccagcagttccattgcctacagcctcctgagtgcca

SEQ ID NO: 164409 - DNA, 3209 bp, Homo sapiens
  Payload ID: 12387
  Gene Symbol: PER1
  Gene Name: period circadian clock 1
  ENST ID: ENST00000581395
  CDS Start-End: 340-2058
atgagaagacgatggcggccggaggtgccaatggaggctgtgcgggggccggcggctgcacgcggcacggggcatgggtcggcgcccctaagccaataagcgtggggggcgtggcagcccggcccgtgggcgggtttggaggagccagtgtaatgctagaagtcctagaagaaatttggagtgtgcgtgcgcgccgagcggtactggctgtgatcgaacttctcaaccctcagagacttagatcttccacctcactccctcagccaagcctccaggccccctcgtgcatccgtggtggcctctctgccttctctgttctgttctccccatggcccagacatgagtggccccctagaaggggctgatgggggaggggaccccaggcctggggaatcattttgtcctgggggcgtcccatcccctgggcccccacagcaccggccttgcccaggccccagcctggccgatgacaccgatgccaacagcaatggttcaagtggcaatgagtccaacgggcatgagtctagaggcgcatctcagcggagctcacacagctcctcctcaggcaacggcaaggactcagccctgctggagaccactgagagcagcaagagcacaaactctcagagcccatccccacccagcagttccattgcctacagcctcctgagtgccagctcagagcaggacaacccgtccaccagtggctgcagcagtgaacagtcagcccgggcaaggactcagaaggaactcatgacagcacttcgagagctcaagcttcgactgccgccagagcgccggggcaagggccgctctgggaccctggccacgctgcagtacgcactggcctgtgtcaagcaggtgcaggccaaccaggaatactaccagcagtggagcctggaggagggcgagccttgctccatggacatgtccacctataccctggaggagctggagcacatcacgtctgagtacacacttcagaaccaggataccttctcagtggctgtctccttcctgacgggccgaatcgtctacatttcggagcaggcagccgtcctgctgcgttgcaagcgggacgtgttccggggtacccgcttctctgagctcctggctccccaggatgtgggagtcttctatggttccactgctccatctcgcctgcccacctggggcacaggggcctcagcaggttcaggcctcagggactttacccaggagaagtccgtcttctgccgtatcagaggaggtcctgaccgggatccagggcctcggtaccagccattccgcctaaccccgtatgtgaccaagatccgggtctcagatggggcccctgcacagccgtgctgcctgctgattgcagagcgcatccattcgggttacgaagctccccggataccccctgacaagaggattttcactacgcggcacacacccagctgcctcttccaggatgtggatgaaagggctgcccccctgctgggctacctgccccaggacctcctgggggccccagtgctcctgttcctgcatcctgaggaccgacccctcatgctggctatccacaagaagattctgcagttggcgggccagccctttgaccactcccctatccgcttctgtgcccgcaacggggagtatgtcaccatggacaccagctgggctggctttgtgcacccctggagccgcaaggtagccttcgtgttgggccgccacaaagtacgcacggcccccctgaatgaggacgtgttcactcccccggcccccagcccagctccctccctggacactgatatccaggagctgtcagagcagatccaccggctgctgctgcagcccgtccacagccccagccccacgggactctgtggagtcggcgccgtgacatccccaggccctctccacagccctgggtcctccagtgatagcaacgggggtgatgcagaggggcctgggcctcctgcgccactacaggcacgttcaaggccaaggcccttccctgccaatccccagacccagagctggaggcgggttctgctcccgtccaggccccactagccttggtccctgaggaggccgagaggaaagaagcctccagctgctcctaccagcagatcaactgcctggacagcatcctcaggtacctggagagctgcaacctccccagcaccactaagcgtaaatgtgcctcctcctcctcctataccacctcctcagcctctgacgacgacaggcagaggacaggtccagtctctgtggggaccaagaaagacatcatcatgatggaggacctgcctggcctagccccaggcccagcccccagcccagcccccagccccacagtagcccctgacccagccccagacgcctaccgtccagtggggctgaccaaggccgtgctgtccctgcacacacagaaggaagagcaagccttcctcagccgcttccgagacctgggcaggctgcgtggactcgacagctcttccacagctccctcagcccttggcgagcgaggtagccacctggggcctcctggagcctgccctctgcccagtctaggactggattgttggggggtgggtcttaagggaggtgtttctgctccagggacccaggctggtgttgcttccaccactaggccctgcctagggacaggcccctcgctagcttctccccactaggatggggttccgggctgcagccagaggagggcagcctggggggatggcactgggatgggcaggcagaggtgctgtctccaggtaagcgacttcaggcctagcctgggggcaggggcaggaagtatgcccacttaggagtcagttgtcactgatgaagagacatgcatagattctgggccaactctgggtggggtctgggcttcaagggcaggtggaaggcagcccctccaggtgcctgagggagatcccctgcaggcagacgcaggactcaggactgggctttccagccccactcttcactccattgcaagctaggcagaatacggcctcgatgggcaggaggaatgcctaggctggcagtgcccacaggagtttggcggaccagagccatctgtccatgtgtccatggactcaccctgcttcctccatctgccagcatgcctccatcttccgcacacccccagctcgacccctcgtgtaacctctccctggccttgttcctttctcaataaatccccttgtccctgg

SEQ ID NO: 164410 - DNA, 6385 bp, Homo sapiens
  Payload ID: 12388
  Gene Symbol: PER2
  Gene Name: period circadian clock 2
  Uniprot ID: O15055
  ENST ID: ENST00000254657
  CDS Start-End: 281-4048
gtaaccgccgccggcgcgcgggcctcgggcaggtcggggtcccagcgccggctcgggcagcggaggcgccgccggaagttccttgggctgctggactcctcggcttgaaacggcgccggcgtgggggcgtgtgcccttggccctgtcccaggtggagagtggtcgagccgcgcgcagggtgcgctcgtttgaactgcggtgacaccgagggttggggactcgaacccccgcttcgcagctcaggagcctgaggtccgaaagcttcgttccagagcccagcatgaatggatacgcggaatttccgcccagccccagtaaccccaccaaggagcccgtggagccccagcccagccaggtcccactgcaggaagatgtggacatgagcagtggctccagtggacatgagaccaacgaaaactgctccacggggcgggactcgcagggcagtgactgtgacgacagtgggaaggagctggggatgctggtggagccaccggatgcccgccagagtccagatacctttagcctgatgatggcaaaatctgaacacaacccatctacaagtggctgcagtagcgaccagtcttcgaaagtggacacacacaaagaactgataaaaacactaaaggagctgaaggtccacctccctgcagacaagaaggccaagggcaaggccagtacgctggccaccttgaagtacgccctcaggagcgtgaagcaggtgaaagccaatgaagagtattaccagctgctgatgtccagcgagggtcacccctgtggagcagacgtgccctcctacaccgtggaggagatggagagcgttacctctgagcacattgtgaagaatgccgatatgtttgcggtggccgtgtccctggtgtctgggaagatcctgtacatctctgaccaggttgcatccatatttcactgtaaaagagatgccttcagcgatgccaagtttgtggagttcctggcgcctcacgatgtgggcgtgttccacagtttcacctccccgtacaagcttcccttgtggagcatgtgcagtggagcagattcttttactcaagaatgcatggaggagaaatctttcttttgccgtgtcagtgtccggaaaagccacgagaatgaaatccgctaccaccccttccgcatgacgccctacctggtcaaggtgcgggaccaacaaggtgctgagagtcagctttgctgccttctgctggcagagagagtgcactctggttatgaagcccctagaattcctcctgaaaagagaatttttacaaccacccatacaccaaattgtttgttccaggatgtggatgaaagggcggtccctctcctgggctacctacctcaggacctgattgaaaccccagtgctcgtgcagctccaccctagtgacaggcccttgatgctggccatccacaaaaagatcctgcagtcaggcgggcagcctttcgactattctcccattcggtttcgcgcccggaacggagagtacatcacgttggacaccagctggtccagcttcatcaacccatggagcaggaaaatctccttcatcattgggaggcacaaagtcagggtgggccctttgaatgaggacgtgtttgcagcccacccctgcacagaggagaaggccctgcaccccagcattcaggagctcacagagcagatccaccggctcctgctgcagcccgtcccccacagcggctccagtggctacgggagtctgggcagcaacgggtcccacgagcaccttatgagccagacctcctccagcgacagcaacggccatgaggactcacgccggaggagagccgaaatttgtaaaaatggtaacaagaccaaaaatagaagtcattattctcatgaatctggagaacaaaagaaaaaatccgttacagaaatgcaaactaatcccccagctgagaagaaagctgtccctgccatggaaaaggacagcctgggggtcagcttccccgaggagttggcctgcaagaaccagcccacctgctcctaccagcagatcagctgcttggacagcgtcatcaggtacttggagagctgcaatgaggctgccaccctgaagaggaaatgcgagttcccagcaaacgtcccagcgctaaggtccagtgataagcggaaggccacagtcagcccagggccacacgctggagaggcagagccgccctccagggtgaacagccgcacgggagtaggtacgcacctgacctcgctggcactgccgggcaaggcagagagtgtggcgtcgctcaccagccagtgcagctacagcagcaccatcgtccatgtgggagacaagaagccgcagccggagttagagatggtggaagatgctgcgagtgggccagaatccctggactgcctggcgggccctgccctggcctgtggtctcagccaagagaaggagcccttcaagaagctgggcctcaccaaggaggtactcgctgcacacacacagaaggaggagcagagcttcctgcagaagttcaaagaaataagaaaactcagcattttccagtcccactgccattactacttgcaagaaagatccaaggggcagccaagtgaacgaactgcccctggactaagaaatacttccggaatagattcaccttggaaaaaaacaggaaagaacagaaaattgaagtccaagcgggtcaaacctcgagactcatctgagagcaccggatctggggggcccgtgtccgcccggcccccgctggtgggcttgaacgccacagcctggtcaccctcagacacgtcccagtccagctgcccagccgtgccctttcccgccccagtgccagcagcttattcactgcccgtgtttccagcgccagggactgtggcagcacccccggcacctccccacgccagcttcacagtgcctgctgtgcccgtggacctccagcaccagtttgcagtccagcccccacctttccctgcccctttggcgcctgtcatggcattcatgctacccagttattccttcccctcggggaccccaaacctgccccaggccttcttccccagccagcctcagtttccgagccaccccacactcacatccgagatggcctctgcctcacagcctgagttccccagccggacctcgatccccagacagccatgtgcttgtccagccacccgggccaccccaccatcggccatgggtagggcctccccaccgctctttcagtcccgcagcagctcgcccctgcagctcaacctgctgcagctggaggaagcccctgagggtggcactggagccatggggaccacaggggccacagagacagcagctgtaggggcggactgcaaacctggcacttctcgggaccagcagccgaaggcgcctctgacccgtgatgaaccctcagacacacagaacagtgacgccctttccacgtcaagcggcctcctaaacctcctgctgaatgaggacctctgctcagcctcgggctctgctgcttcggagtctctgggctccggctcactgggctgcgacgcctccccgagtggggcaggcagtagtgacacaagtcataccagcaaatattttggaagcattgactcctcagagaataatcacaaagcaaaaatgaacactggtatggaagaaagtgagcatttcattaagtgcgtcctgcaggatcccatctggctgctgatggcagatgcggacagcagcgtcatgatgacgtaccagctgccttcccgaaatttagaagcggttttgaaggaggacagagagaagctgaagctcctacagaaactccagcccaggttcacggagagtcagaagcaggagctgcgcgaggtccaccagtggatgcagacgggcggcctgcccgcagccatcgacgtggcagaatgtgtttactgtgaaaacaaggaaaaaggtaatatttgcataccatatgaggaagatattccttctctgggactcagcgaagtgtcggacaccaaagaagacgaaaatggatcccccttgaatcacaggatcgaagagcagacgtaacccctgccccacctcagcccggcagccagcgaggtacaccaggtggtgcttggaagagatgaaagatcttcatggctgtttccactgaaatggacacatatgctcatgttgctttttttgttttagaaaaaaaaacaacatagttttctgaaggggcgacttaaaactgtggagagtggggagagttcggaaagaaatatgtttttatatataaaatatatatgtggagttttgtgggatggggaagagattttagttgttatttaacttgagaaagactaagcgcctcttagtgtcagggaagttgcctcagtgctcccagaagtcctgtgactgtgacgagacctctgtctgctgcaccagctggggactctggcttccagagctttcccagggtgtttggatcagatcaaattttgtcctctcttggggactgctttttatctgaattatcatttagtcaaggtagagtgtttttttatacataccaaatggagatagcagcctctcctagttttatttcaaaacgtttcacattaaatggtgtgaagcgttgtttggcaaaccaacagctttggcttctggtgtggtcaatatttcagtctgacataggttttgtttgtagtgaacaaagttgaaacatttgctctggactaaagaagcctagtggtttgtgtggccaactccatcggatgaatgcacacgcagacagaccctctgtatatttctgcattattcttgtctccttttcagaccatgatggccaatatggagattaaaatatgtcatcagtcatctctttatggtgacttccctttgcaaaccaggctgtgaccaacacatgtgagacccagtcctgtttggttttcttccgttggaaccacccagacatctgcttccacccagccaagcccacatcacatctcctggccgagagcagccactgccactcagtctgacagcttgcgactgcatctgtattttcaggggtgcagtgagctcacctctcccactgcaccctgggttgggtgcacagccctcattcttttcatgagcccgacctctctcggagcagcttcaggcctctgccagtgtccccagcacttttaggtcatttggacacttggggaaaagtgaggccagtctgcccggctttttacaaaacctcatgttgcattgtatattccaaagatggttcagaaaatttaatattggtccctggtggaaattcaaagttatcactgaagaacagttgacttaaaattggaccaagactatgaggcttaaaagggaccagggttttcttttttttttttttttttttttttttttagatggagtttctttttgcccaggctggagtgcagtggcgccatcttggctcactgcaacctctgcctcccaggttcaagcgattctcctgcctcagcctcctgagtagctgggaccacaggcgactgccaccacacccagctaattttttgtatttttagtagagacagggtttcaccatgttggccaggctggtctcgaactcctgacctcaagcgatccacccacctcggcctcccaaagtgctgggattacaggcgtgagccaccacgcccaactgggaccagggttttctgttttttgatggaggtgaaatctctttgtaatccactaggttttcatcgtaaaaccatcttatgcctgactattaaacctattcttcataaacacaagaacactttaatttttcgttaatttacaaagtaacatcagctgcctatgcctatgataaggtagcagtctgcattcttatggccattagatgttacaaactccttgcctctaaagtcagatcatgaagggataggtgttcatctaaggttacagttatgttaccgaaacacaaaactgccaaaatcttactctgctgttatgaatgtttaccatcagcattattttatcatttaatatgtgctcactgattgttaactgtagcttcagcgcgtgccaagcagttgacttaataggatcatcttgtgaatttgtttacgtgatgccaagcatcaagtcatgttttctttagtgtgtgtgcttacacaggtgttaaacagtttttctctattttaaactgagccttctttttaatatattcccgaagagatatgtaaataagctctcagagtttctgtgatgatttgttgagccttgctggacaagtggtttgtttgtgtgcaaaccaaactttctttacccagtgcaatagatttgtttgactgcttgtgtctttttatgacctgtttgccttttagaaaattggtaaataaagcaagtatatttttattttta

SEQ ID NO: 164411 - DNA, 1228 bp, Homo sapiens
  Payload ID: 12388
  Gene Symbol: PER2
  Gene Name: period circadian clock 2
  Uniprot ID: O15055
  ENST ID: ENST00000355768
  CDS Start-End: 1-1215
atgaatggatacgcggaatttccgcccagccccagtaaccccaccaaggagcccgtggagccccagcccagccaggtcccactgcaggaagatgtggacatgagcagtggctccagtggacatgagaccaacgaaaactgctccacggggcgggactcgcagggcagtgactgtgacgacagtgggaaggagctggggatgctggtggagccaccggatgcccgccagagtccagatacctttagcctgatgatggcaaaatctgaacacaacccatctacaagtggctgcagtagcgaccagtcttcgaaagtggacacacacaaagaactgataaaaacactaaaggagctgaaggtccacctccctgcagacaagaaggccaagggcaaggccagtacgctggccaccttgaagtacgccctcaggagcgtgaagcaggtgaaagccaatgaagagtattaccagctgctgatgtccagcgagggtcacccctgtggagcagacgtgccctcctacaccgtggaggagatggagagcgttacctctgagcacattgtgaagaatgccgatatgtttgcggtggccgtgtccctggtgtctgggaagatcctgtacatctctgaccaggttgcatccatatttcactgtaaaagagatgccttcagcgatgccaagtttgtggagttcctggcgcctcacgatgtgggcgtgttccacagtttcacctccccgtacaagcttcccttgtggagcatgtgcagtggagcagattcttttactcaagaatgcatggaggagaaatctttcttttgccgtgtcagtgtccggaaaagccacgagaatgaaatccgctaccaccccttccgcatgacgccctacctggtcaaggtgcgggaccaacaaggtgctgagagtcagctttgctgccttctgctggcagagagagtgcactctggttatgaagcccctagaattcctcctgaaaagagaatttttacaaccacccatacaccaaattgtttgttccaggatgtggatgaaagtcctgcagtcaggcgggcagcctttcgactattctcccattcggtttcgcgcccggaacggagagtacatcacgttggacaccagctggtccagcttcatcaacccatggagcaggaaaatctccttcatcattgggaggcacaaagtcagggtgggccctttgaatgaggacgtgtttgca

SEQ ID NO: 164412 - DNA, 551 bp, Homo sapiens
  Payload ID: 12388
  Gene Symbol: PER2
  Gene Name: period circadian clock 2
  ENST ID: ENST00000431832
  CDS Start-End: 224-551
atcacactcaggaattcctgatgtgggttcataacttttccttctgtcccatccctggtccccaggtgagtccaggtaaagaagaacaagaagagtaaagagagatgctgcgggctccagcttcttggacagtctcgccttccccatgagagcctacacattcagagcctgctgcgtgggagcctgaaagctccttcctgtcctcttcgttccagagcccagcatgaatggatacgcggaatttccgcccagccccagtaaccccaccaaggagcccgtggagccccagcccagccaggtcccactgcaggaagatgtggacatgagcagtggctccagtggacatgagaccaacgaaaactgctccacggggcgggactcgcagggcagtgactgtgacgacagtgggaaggagctggggatgctggtggagccaccggatgcccgccagagtccagatacctttagcctgatgatggcaaaatctgaacacaacccatctacaagtggctgcagtagcgaccagtcttcgaaagtggacacacacaaag

SEQ ID NO: 164413 - DNA, 6203 bp, Homo sapiens
  Payload ID: 12389
  Gene Symbol: PER3
  Gene Name: period circadian clock 3
  Uniprot ID: P56645
  ENST ID: ENST00000361923
  CDS Start-End: 176-3781
ggaaaagctcctcggagatgagcgtgaccccctggctcgtggtggccgcctgttctcactaacgccatggcggggaccggagtgagaaaccggtgtctgtcactgactgcaaagtgagcgagaagcaggctgcgggccgtcccagcacgacgtggagccccgcggagacctcgagatgccccgcggggaagctcctggccccgggagacggggggctaaggacgaggccctgggcgaagaatcgggggagcggtggagccccgagttccatctgcagaggaaattggcggacagcagccacagtgaacagcaagatcgaaacagagtttctgaagaacttatcatggttgtccaagaaatgaaaaaatacttcccctcggagagacgcaataaaccaagcactctagatgccctcaactatgctctccgctgtgtccacagcgttcaagcaaacagtgagtttttccagattctcagtcagaatggagcacctcaggcagatgtgagcatgtacagtcttgaggagctggccactatcgcttcagaacacacttccaaaaacacagatacctttgtggcagtattttcatttctgtctggaaggttagtgcacatttctgaacaggctgctttgatcctgaatcgtaagaaagatgtcctggcgtcttctcactttgttgacctgcttgcacctcaagacatgagggtattctacgcgcacactgccagagctcagcttcctttctggaacaactggacccaaagagctgcacggtatgaatgtgctccggtgaaaccttttttctgcaggatccgtggaggtgaagacagaaagcaagagaagtgtcactccccattccggatcatcccctatctgattcatgtacatcaccctgcccagccagaattggaatcggaaccttgctgtctcactgtggttgaaaagattcactctggttatgaagctcctcggatcccagtgaataaaagaatcttcaccaccacacacaccccagggtgtgtttttcttgaagtagatgaaaaagcagtgcctttgctgggttacctacctcaggacctgattggaacatcgatcctaagctacctgcaccctgaagatcgttctctgatggttgccatacaccaaaaagttttgaagtatgcagggcatcctccctttgaacattctcccattcgattttgtactcaaaacggagactacatcatactggattccagttggtccagctttgtgaatccctggagccggaagatttctttcatcattggtcggcataaagttcgaacgagcccactaaatgaggatgtttttgctaccaaaattaaaaagatgaacgataatgacaaagacataacagaattacaagaacaaatttacaaacttctcttacagccagttcacgtgagcgtgtccagcggctacgggagcctggggagcagcgggtcgcaggagcagcttgtcagcatcgcctcctccagtgaggccagtgggcaccgtgtggaggagacgaaggcggagcagatgaccttgcagcaggtctatgccagtgtgaacaaaattaaaaatctgggtcagcagctctacattgagtcaatgaccaaatcatcattcaagccagtgacggggacacgcacagaaccgaatggtggtggtgaatgtaagacctttacttccttccaccaaacactgaaaaacaatagtgtgtacactgagccctgtgaggatttgaggaacgatgagcacagcccatcctatcaacagatcaactgtatcgacagtgtcatcagatacctgaagagctacaacattccagctttgaaaagaaagtgtatctcctgtacaaatacaacttcttcctcctcagaagaagacaaacagaaccacaaggcagatgatgtccaagccttacaagctggtttgcaaatcccagccatacctaaatcagaaatgccaacaaatggacggtccatagacacaggaggaggagctccacagatcctgtccacggcgatgctgagcttggggtcgggcataagccaatgcggttacagcagcaccattgtccatgtcccacccccagagacagccagggatgctaccctcttctgtgagccctggaccctgaacatgcagccagcccctttgacctcggaagaatttaaacacgtggggctcacagcggctgttctgtcagcgcacacccagaaggaagagcagaattatgttgataaattccgagaaaagatcctgtcatcaccctacagctcctatcttcagcaagaaagcaggagcaaagctaaatattcatattttcaaggagattctacttccaagcagacgcggtcggccggctgcaggaaagggaagcacaagcggaagaagctgccggagccgccagacagcagcagctcgaacaccggctctggtccccgcaggggagcgcatcagaacgcacagccctgctgcccctccgcggcctcctctccgcacacctcgagcccgaccttcccacctgccgccatggtgcccagccaggccccttacctcgtcccagcttttcccctcccagccgcgacctcacccggaagagaatacgcagcccccggaactgcaccggaaggcctgcatgggctgcccttgtccgagggcttgcagccttacccagctttcccttttccttacttggatacttttatgaccgttttcctgcctgacccccctgtctgtcctctgttgtcgccatcgtttttgccatgtccattcctgggggcgacagcctcttctgcgatatcaccctcaatgtcgtcagcaatgagtccaactctggacccacccccttcagtcaccagccaaaggagagaggaggaaaagtgggaggcacaaagcgaggggcacccgttcattacttcgagaagcagctcacccttgcagttaaacttacttcaggaagagatgcccagaccctctgaatctccagatcagatgagaaggaacacgtgcccacaaactgagtattgtgttacaggcaacaatggcagtgagagcagtcctgctactaccggtgcactgtccacggggtcacctcccagggagaatccatcccatcctactgccagcgctctgtccacaggatcgcctcccatgaagaatccatcccatcctactgccagcgctctgtccacaggatcgcctcccatgaagaatccatcccatcctactgccagcacactgtccatgggattgcctcccagcaggactccatcccatcctactgccactgttctgtccacggggtcacctcccagcgaatccccatccagaactggttcagcagcatcaggaagcagcgacagcagtatataccttactagtagtgtttattcttctaaaatctcccaaaatgggcagcaatctcaggacgtacagaaaaaagaaacatttcctaatgtcgccgaagagcccatctggagaatgatacggcagacacctgagcgcattctcatgacataccaggtacctgagagggttaaagaagttgtactaaaagaagacctggaaaagctagaaagtatgaggcagcagcagccccagttttctcatgggcaaaaggaggagctggctaaggtgtataattggattcaaagccagactgtcactcaagaaatcgacattcaagcctgtgtcacttgtgaaaatgaagattcagctgatggtgcggccacatcctgtggtcaggttctggtagaagacagctgttgagtgactgtgaggatgaaccttcataccctttccaagacgtgttacacagacagacctttttaagtcctggacttttaaatgaccatgaagttatcattgaatgttaagattttttcttcttgattttttaatacacgtaatctttttgaagcagacattgtatacagaatcttacttctctttgttcctgatatattaaaatggccagttaggctctttttgtagttgaattgtcttctaaagagattggatggcctctaaagaggtatgtgtatctttatttcagatgtcacccagagtaaattataattagaagtatagctagaatgagccccaaaccttagcctcatttattttgttctgttacataagtcattttccccttagagtgcttgaagaaatgccacctacaggttgtgtacttttcataatggtttccatgaatgtagtacgttcatacaggcttcattcaacctggcgttcccctccataattaagatgaaacattccggttttctcacaacacattagcacatactgtccattagcatatctgggataaccaggttttgggggttgagttttggccttcatccttgtagatccctttcctattgatttcccaccttccagtgaaattctgaaagtcttatcttaaaaatcgatccgcttaccatgggcctattcttgtaagtttcagttagcatttgcatgtgtaatattaaaatgaaagagcttcttacccagtgctgttgcccttttgagtatttttgtttttaaaataatgattgtaaaatgttttacaagtaatgtaaaagctagtatcattcttacatacttctgtgtttaaattttcattcttaccaaaacagttaactctttctttccaatcaatttatacaaaagaggtcgctccagccctaccacaggtctgactggcactgccttttgtttgcccttgaacagggcagtgttgtggggactgcaaaagagaaaacgtccaggcgagcccagttgtcctcgcccacagggtcctgcaggctccatcagtcaccgctttctatggcgtttgtagttgtgtcttttaagaagtgagtgtgattgtttacttgataaatcagctcactctctggtgctttttagagaagtccctgattccttcttaaacttggaatgatagatgaaattcacacccctgcagatcagaaaaaacaaatagaagaaaatgagggttacagtaacctgttgtctttatataacttgcaacaaactaatttatttttttttcctttttttgtttttggttttttatggttttttaaggaaaatacttttctcctttgaagttttacagctttttgtaaatgcgtcctgataatgattaggaaaatcgaccttttcatccatgatgaccatcctcatagctcagatctcctttcaaagtagtggctttctggatggtaattccatcttaaggtgtcagaactattttcaaatgctgcctttgacagttcttggaattttctgatattaagcagttccatgcaaatattcgtgttttataaatagctctcatagtctgctccatcttgatagttaagtgatttctgaagcgtttgtgtgtgtgttgatcaggttgtgtgatatttttgcttgatagagaatcaaatttgaaacaattaaccagccagtagattgtctgtcagtgaccttctgtagtaataaagtttttgccactgtaaataaaaacagtatccgtagctatcaggatcattgcgcactcatatatgctaagccttctgttctctaatagaagcctttcttttccattgtttctggatatttgtattatccaaatgtgcttatttctttgccttagcacacgttttatggagtacttgttatactaggtttgatttgaaactggtgcttgtcgcagaactgtcagagcatgaggagcgctcctcctgtgggtggacgcattcacgcactcccaggttgcacctgctgctggcggtgagcagggggttcagcagcttgaccgatgccccccgagggggctctccccagcttaaactttgttgtttaaatttgttaactttttatattaatgactattgaaagtggtaataaaaatttatattataggcttcaatgttttcatgaatgttacccaaaaagctgtgttttctttggtcagaggtcaaaatttatgaaaaacaaaatgctgtatgaatggaaatcattttgcaattgagtgacacttcattgtaattcacagtgtaaatttaatccaaactgaaattttgtttcaactgaatttgtaattaactctgaatttgtttttaatcattagtaatatttcagttgggtatctttttaagtaaaaacaacaaataaactctgtacatgtaaaacgtga

SEQ ID NO: 164414 - DNA, 6279 bp, Homo sapiens
  Payload ID: 12389
  Gene Symbol: PER3
  Gene Name: period circadian clock 3
  Uniprot ID: P56645
  ENST ID: ENST00000377532
  CDS Start-End: 225-3857
gccggagtcctgaaagtcgagcgagctccgggttttgaaaatgttggagggaaaagctcctcggagatgagcgtgaccccctggctcgtggtggccgcctgttctcactaacgccatggcggggaccggagtgagaaaccggtgtctgtcactgactgcaaagtgagcgagaagcaggctgcgggccgtcccagcacgacgtggagccccgcggagacctcgagatgccccgcggggaagctcctggccccgggagacggggggctaaggacgaggccctgggcgaagaatcgggggagcggtggagccccgagttccatctgcagaggaaattggcggacagcagccacagtgaacagcaagatcgaaacagagtttctgaagaacttatcatggttgtccaagaaatgaaaaaatacttcccctcggagagacgcaataaaccaagcactctagatgccctcaactatgctctccgctgtgtccacagcgttcaagcaaacagtgagtttttccagattctcagtcagaatggagcacctcaggcagatgtgagcatgtacagtcttgaggagctggccactatcgcttcagaacacacttccaaaaacacagatacctttgtggcagtattttcatttctgtctggaaggttagtgcacatttctgaacaggctgctttgatcctgaatcgtaagaaagatgtcctggcgtcttctcactttgttgacctgcttgcacctcaagacatgagggtattctacgcgcacactgccagagctcagcttcctttctggaacaactggacccaaagagcagctgcacggtatgaatgtgctccggtgaaaccttttttctgcaggatccgtggaggtgaagacagaaagcaagagaagtgtcactccccattccggatcatcccctatctgattcatgtacatcaccctgcccagccagaattggaatcggaaccttgctgtctcactgtggttgaaaagattcactctggttatgaagctcctcggatcccagtgaataaaagaatcttcaccaccacacacaccccagggtgtgtttttcttgaagtagatgaaaaagcagtgcctttgctgggttacctacctcaggacctgattggaacatcgatcctaagctacctgcaccctgaagatcgttctctgatggttgccatacaccaaaaagttttgaagtatgcagggcatcctccctttgaacattctcccattcgattttgtactcaaaacggagactacatcatactggattccagttggtccagctttgtgaatccctggagccggaagatttctttcatcattggtcggcataaagttcgaacgagcccactaaatgaggatgtttttgctaccaaaattaaaaagatgaacgataatgacaaagacataacagaattacaagaacaaatttacaaacttctcttacagccagttcacgtgagcgtgtccagcggctacgggagcctggggagcagcgggtcgcaggagcagcttgtcagcatcgcctcctccagtgaggccagtgggcaccgtgtggaggagacgaaggcggagcagatgaccttgcagcaggtctatgccagtgtgaacaaaattaaaaatctgggtcagcagctctacattgagtcaatgaccaaatcatcattcaagccagtgacggggacacgcacagaaccgaatggtggtggtgagtcagcgaatggtggtggtgaatgtaagacctttacttccttccaccaaacactgaaaaacaatagtgtgtacactgagccctgtgaggatttgaggaacgatgagcacagcccatcctatcaacagatcaactgtatcgacagtgtcatcagatacctgaagagctacaacattccagctttgaaaagaaagtgtatctcctgtacaaatacaacttcttcctcctcagaagaagacaaacagaaccacaaggcagatgatgtccaagccttacaagctggtttgcaaatcccagccatacctaaatcagaaatgccaacaaatggacggtccatagacacaggaggaggagctccacagatcctgtccacggcgatgctgagcttggggtcgggcataagccaatgcggttacagcagcaccattgtccatgtcccacccccagagacagccagggatgctaccctcttctgtgagccctggaccctgaacatgcagccagcccctttgacctcggaagaatttaaacacgtggggctcacagcggctgttctgtcagcgcacacccagaaggaagagcagaattatgttgataaattccgagaaaagatcctgtcatcaccctacagctcctatcttcagcaagaaagcaggagcaaagctaaatattcatattttcaaggagattctacttccaagcagacgcggtcggccggctgcaggaaagggaagcacaagcggaagaagctgccggagccgccagacagcagcagctcgaacaccggctctggtccccgcaggggagcgcatcagaacgcacagccctgctgcccctccgcggcctcctctccgcacacctcgagcccgaccttcccacctgccgccatggtgcccagccaggccccttacctcgtcccagcttttcccctcccagccgcgacctcacccggaagagaatacgcagcccccggaactgcaccggaaggcctgcatgggctgcccttgtccgagggcttgcagccttacccagctttcccttttccttacttggatacttttatgaccgttttcctgcctgacccccctgtctgtcctctgttgtcgccatcgtttttgccatgtccattcctgggggcgacagcctcttctgcgatatcaccctcaatgtcgtcagcaatgagtccaactctggacccacccccttcagtcaccagccaaaggagagaggaggaaaagtgggaggcacaaagcgaggggcacccgttcattacttcgagaagcagctcacccttgcagttaaacttacttcaggaagagatgcccagaccctctgaatctccagatcagatgagaaggaacacgtgcccacaaactgagtatcagtgtgttacaggcaacaatggcagtgagagcagtcctgctactaccggtgcactgtccacggggtcacctcccagggagaatccatcccatcctactgccagcgctctgtccacaggatcgcctcccatgaagaatccatcccatcctactgccagcgctctgtccacaggatcgcctcccatgaagaatccatcccatcctactgccagcacactgtccatgggattgcctcccagcaggactccatcccatcctactgccactgttctgtccacggggtcacctcccagcgaatccccatccagaactggttcagcagcatcaggaagcagcgacagcagtatataccttactagtagtgtttattcttctaaaatctcccaaaatgggcagcaatctcaggacgtacagaaaaaagaaacatttcctaatgtcgccgaagagcccatctggagaatgatacggcagacacctgagcgcattctcatgacataccaggtacctgagagggttaaagaagttgtactaaaagaagacctggaaaagctagaaagtatgaggcagcagcagccccagttttctcatgggcaaaaggaggagctggctaaggtgtataattggattcaaagccagactgtcactcaagaaatcgacattcaagcctgtgtcacttgtgaaaatgaagattcagctgatggtgcggccacatcctgtggtcaggttctggtagaagacagctgttgagtgactgtgaggatgaaccttcataccctttccaagacgtgttacacagacagacctttttaagtcctggacttttaaatgaccatgaagttatcattgaatgttaagattttttcttcttgattttttaatacacgtaatctttttgaagcagacattgtatacagaatcttacttctctttgttcctgatatattaaaatggccagttaggctctttttgtagttgaattgtcttctaaagagattggatggcctctaaagaggtatgtgtatctttatttcagatgtcacccagagtaaattataattagaagtatagctagaatgagccccaaaccttagcctcatttattttgttctgttacataagtcattttccccttagagtgcttgaagaaatgccacctacaggttgtgtacttttcataatggtttccatgaatgtagtacgttcatacaggcttcattcaacctggcgttcccctccataattaagatgaaacattccggttttctcacaacacattagcacatactgtccattagcatatctgggataaccaggttttgggggttgagttttggccttcatccttgtagatccctttcctattgatttcccaccttccagtgaaattctgaaagtcttatcttaaaaatcgatccgcttaccatgggcctattcttgtaagtttcagttagcatttgcatgtgtaatattaaaatgaaagagcttcttacccagtgctgttgcccttttgagtatttttgtttttaaaataatgattgtaaaatgttttacaagtaatgtaaaagctagtatcattcttacatacttctgtgtttaaattttcattcttaccaaaacagttaactctttctttccaatcaatttatacaaaagaggtcgctccagccctaccacaggtctgactggcactgccttttgtttgcccttgaacagggcagtgttgtggggactgcaaaagagaaaacgtccaggcgagcccagttgtcctcgcccacagggtcctgcaggctccatcagtcaccgctttctatggcgtttgtagttgtgtcttttaagaagtgagtgtgattgtttacttgataaatcagctcactctctggtgctttttagagaagtccctgattccttcttaaacttggaatgatagatgaaattcacacccctgcagatcagaaaaaacaaatagaagaaaatgagggttacagtaacctgttgtctttatataacttgcaacaaactaatttatttttttttcctttttttgtttttggttttttatggttttttaaggaaaatacttttctcctttgaagttttacagctttttgtaaatgcgtcctgataatgattaggaaaatcgaccttttcatccatgatgaccatcctcatagctcagatctcctttcaaagtagtggctttctggatggtaattccatcttaaggtgtcagaactattttcaaatgctgcctttgacagttcttggaattttctgatattaagcagttccatgcaaatattcgtgttttataaatagctctcatagtctgctccatcttgatagttaagtgatttctgaagcgtttgtgtgtgtgttgatcaggttgtgtgatatttttgcttgatagagaatcaaatttgaaacaattaaccagccagtagattgtctgtcagtgaccttctgtagtaataaagtttttgccactgtaaataaaaacagtatccgtagctatcaggatcattgcgcactcatatatgctaagccttctgttctctaatagaagcctttcttttccattgtttctggatatttgtattatccaaatgtgcttatttctttgccttagcacacgttttatggagtacttgttatactaggtttgatttgaaactggtgcttgtcgcagaactgtcagagcatgaggagcgctcctcctgtgggtggacgcattcacgcactcccaggttgcacctgctgctggcggtgagcagggggttcagcagcttgaccgatgccccccgagggggctctccccagcttaaactttgttgtttaaatttgttaactttttatattaatgactattgaaagtggtaataaaaatttatattataggcttcaatgttttcatgaatgttacccaaaaagctgtgttttctttggtcagaggtcaaaatttatgaaaaacaaaatgctgtatgaatggaaatcattttgcaattgagtgacacttcattgtaattcacagtgtaaatttaatccaaactgaaattttgtttcaactgaatttgtaattaactctgaatttgtttttaatcattagtaatatttcagttgggtatctttttaagtaaaaacaacaaataaactctgtacatgtaaaacgtga

SEQ ID NO: 164415 - DNA, 1524 bp, Homo sapiens
  Payload ID: 12389
  Gene Symbol: PER3
  Gene Name: period circadian clock 3
  ENST ID: ENST00000377541
  CDS Start-End: 282-1418
gcgagggcggccccgggggcgagcggctgtgcgcggggccaagggcgggggcagcaggccggagtcctgaaagtcgagcgagctccgggttttgaaaatgttggagggaaaagctcctcggagatgagcgtgaccccctggctcgtggtggccgcctgttctcactaacgccatggcggggaccggagtgagaaaccggtgtctgtcactgactgcaaagtgagcgagaagcaggctgcgggccgtcccagcacgacgtggagccccgcggagacctcgagatgccccgcggggaagctcctggccccgggagacggggggctaaggacgaggccctgggcgaagaatcgggggagcggtggagccccgagttccatctgcagaggaaattggcggacagcagccacagtgaacagcaagatcgaaacagagtttctgaagaacttatcatggttgtccaagaaatgaaaaaatacttcccctcggagagacgcaataaaccaagcactctagatgccctcaactatgctctccgctgtgtccacagcgttcaagcaaacagtgagtttttccagattctcagtcagaatggagcacctcaggcagatgtgagcatgtacagtcttgaggagctggccactatcgcttcagaacacacttccaaaaacacagatacctttgtggcagtattttcatttctgtctggaaggttagtgcacatttctgaacaggctgctttgatcctgaatcgtaagaaagatgtcctggcgtcttctcactttgttgacctgcttgcacctcaagacatgagggtattctacgcgcacactgccagagctcagcttcctttctggaacaactggacccaaagagctgcacggtatgaatgtgctccggtgaaaccttttttctgcaggatccgtggaggtgaagacagaaagcaagagaagtgtcactccccattccggatcatcccctatctgattcatgtacatcaccctgcccagccagaattggaatcggaaccttgctgtctcactgtggttgaaaagattcactctggttatgaagctcctcggatcccagtgaataaaagaatcttcaccaccacacacaccccagggtgtgtttttcttgaagtagatgaaaaagcagtgcctttgctgggttacctacctcaggacctgattggaacatcgatcctaagctacctgcaccctgaagatcgttctctgatggttgccatacaccaaaaagttttgaagtatgcagggcatcctccctttgaacattctcccattcgattttgtactcaaaacggagactacatcatactggattccagttggtccagctttgtgaatccctggagccggaagatttctttcatcattggtcggcataaagttcgaacgtaagccagtcagttttcatattttctaaaacatctcttgtatcaaataatattccttagcttattgactgccctctgactcaattgacacataaactaaataaagcaca

SEQ ID NO: 164416 - DNA, 6261 bp, Homo sapiens
  Payload ID: 12389
  Gene Symbol: PER3
  Gene Name: period circadian clock 3
  ENST ID: ENST00000614998
  CDS Start-End: 265-3840
actcgcgcgcggcagaggagccccgcgagccctgccctcggccggagtcctgaaagtcgagcgagctccgggttttgaaaatgttggagggaaaagctcctcggagatgagcgtgaccccctggctcgtggtggccgcctgttctcactaacgccatggcggggaccggagtgagaaaccggtgtctgtcactgactgcaaagtgagcgagaagcaggctgcgggccgtcccagcacgacgtggagccccgcggagacctcgagatgccccgcggggaagctcctggccccgggagacggggggctaaggacgaggccctgggcgaagaatcgggggagcggtggagccccgagttccatctgcagaggaaattggcggacagcagccacagtgaacagcaagatcgaaacagagtttctgaagaacttatcatggttgtccaagaaatgaaaaaatacttcccctcggagagacgcaataaaccaagcactctagatgccctcaactatgctctccgctgtgtccacagcgttcaagcaaacagtgagtttttccagattctcagtcagaatggagcacctcaggcagatgtgagcatgtacagtcttgaggagctggccactatcgcttcagaacacacttccaaaaacacagatacctttgtggcagtattttcatttctgtctggaaggttagtgcacatttctgaacaggctgctttgatcctgaatcgtaagaaagatgtcctggcgtcttctcactttgttgacctgcttgcacctcaagacatgagggtattctacgcgcacactgccagagctcagcttcctttctggaacaactggacccaaagagcagctgcacggtatgaatgtgctccggtgaaaccttttttctgcaggatccgtggaggtgaagacagaaagcaagagaagtgtcactccccattccggatcatcccctatctgattcatgtacatcaccctgcccagccagaattggaatcggaaccttgctgtctcactgtggttgaaaagattcactctggttatgaagctcctcggatcccagtgaataaaagaatcttcaccaccacacacaccccagggtgtgtttttcttgaagtagatgaaaaagcagtgcctttgctgggttacctacctcaggacctgattggaacatcgatcctaagctacctgcaccctgaagatcgttctctgatggttgccatacaccaaaaagttttgaagtatgcagggcatcctccctttgaacattctcccattcgattttgtactcaaaacggagactacatcatactggattccagttggtccagctttgtgaatccctggagccggaagatttctttcatcattggtcggcataaagttcgaacgagcccactaaatgaggatgtttttgctaccaaaattaaaaagatgaacgataatgacaaagacataacagaattacaagaacaaatttacaaacttctcttacagccagttcacgtgagcgtgtccagcggctacgggagcctggggagcagcgggtcgcaggagcagcttgtcagcatcgcctcctccagtgaggccagtgggcaccgtgtggaggagacgaaggcggagcagatgaccttgcagcaggtctatgccagtgtgaacaaaattaaaaatctgggtcagcagctctacattgagtcaatgaccaaatcatcattcaagccagtgacggggacacgcacagaaccgaatggtggtggtgagtcagcgaatggtggtggtgaatgtaagacctttacttccttccaccaaacactgaaaaacaatagtgtgtacactgagccctgtgaggatttgaggaacgatgagcacagcccatcctatcaacagatcaactgtatcgacagtgtcatcagatacctgaagagctacaacattccagctttgaaaagaaagtgtatctcctgtacaaatacaacttcttcctcctcagaagaagacaaacagaaccacaaggcagatgatgtccaagccttacaagctggtttgcaaatcccagccatacctaaatcagaaatgccaacaaatggacggtccatagacacaggaggaggagctccacagatcctgtccacggcgatgctgagcttggggtcgggcataagccaatgcggttacagcagcaccattgtccatgtcccacccccagagacagccagggatgctaccctcttctgtgagccctggaccctgaacatgcagccagcccctttgacctcggaagaatttaaacacgtggggctcacagcggctgttctgtcagcgcacacccagaaggaagagcagaattatgttgataaattccgagaaaagatcctgtcatcaccctacagctcctatcttcagcaagaaagcaggagcaaagctaaatattcatattttcaaggagattctacttccaagcagacgcggtcggccggctgcaggaaagggaagcacaagcggaagaagctgccggagccgccagacagcagcagctcgaacaccggctctggtccccgcaggggagcgcatcagaacgcacagccctgctgcccctccgcggcctcctctccgcacacctcgagcccgaccttcccacctgccgccatggtgcccagccaggccccttacctcgtcccagcttttcccctcccagccgcgacctcacccggaagagaatacgcagcccccggaactgcaccggaaggcctgcatgggctgcccttgtccgagggcttgcagccttacccagctttcccttttccttacttggatacttttatgaccgttttcctgcctgacccccctgtctgtcctctgttgtcgccatcgtttttgccatgtccattcctgggggcgacagcctcttctgcgatatcaccctcaatgtcgtcagcaatgagtccaactctggacccacccccttcagtcaccagccaaaggagagaggaggaaaagtgggaggcacaaagcgaggggcacccgttcattacttcgagaagcagctcacccttgcagttaaacttacttcaggaagagatgcccagaccctctgaatctccagatcagatgagaaggaacacgtgcccacaaactgagtattgtgttacaggcaacaatggcagtgagagcagtcctgctactaccggtgcactgtccacggggtcacctcccagggagaatccatcccatcctactgccagcgctctgtccacaggatcgcctcccatgaagaatccatcccatcctactgccagcacactgtccatgggattgcctcccagcaggactccatcccatcctactgccactgttctgtccacggggtcacctcccagcgaatccccatccagaactggttcagcagcatcaggaagcagcgacagcagtatataccttactagtagtgtttattcttctaaaatctcccaaaatgggcagcaatctcaggacgtacagaaaaaagaaacatttcctaatgtcgccgaagagcccatctggagaatgatacggcagacacctgagcgcattctcatgacataccaggtacctgagagggttaaagaagttgtactaaaagaagacctggaaaagctagaaagtatgaggcagcagcagccccagttttctcatgggcaaaaggaggagctggctaaggtgtataattggattcaaagccagactgtcactcaagaaatcgacattcaagcctgtgtcacttgtgaaaatgaagattcagctgatggtgcggccacatcctgtggtcaggttctggtagaagacagctgttgagtgactgtgaggatgaaccttcataccctttccaagacgtgttacacagacagacctttttaagtcctggacttttaaatgaccatgaagttatcattgaatgttaagattttttcttcttgattttttaatacacgtaatctttttgaagcagacattgtatacagaatcttacttctctttgttcctgatatattaaaatggccagttaggctctttttgtagttgaattgtcttctaaagagattggatggcctctaaagaggtatgtgtatctttatttcagatgtcacccagagtaaattataattagaagtatagctagaatgagccccaaaccttagcctcatttattttgttctgttacataagtcattttccccttagagtgcttgaagaaatgccacctacaggttgtgtacttttcataatggtttccatgaatgtagtacgttcatacaggcttcattcaacctggcgttcccctccataattaagatgaaacattccggttttctcacaacacattagcacatactgtccattagcatatctgggataaccaggttttgggggttgagttttggccttcatccttgtagatccctttcctattgatttcccaccttccagtgaaattctgaaagtcttatcttaaaaatcgatccgcttaccatgggcctattcttgtaagtttcagttagcatttgcatgtgtaatattaaaatgaaagagcttcttacccagtgctgttgcccttttgagtatttttgtttttaaaataatgattgtaaaatgttttacaagtaatgtaaaagctagtatcattcttacatacttctgtgtttaaattttcattcttaccaaaacagttaactctttctttccaatcaatttatacaaaagaggtcgctccagccctaccacaggtctgactggcactgccttttgtttgcccttgaacagggcagtgttgtggggactgcaaaagagaaaacgtccaggcgagcccagttgtcctcgcccacagggtcctgcaggctccatcagtcaccgctttctatggcgtttgtagttgtgtcttttaagaagtgagtgtgattgtttacttgataaatcagctcactctctggtgctttttagagaagtccctgattccttcttaaacttggaatgatagatgaaattcacacccctgcagatcagaaaaaacaaatagaagaaaatgagggttacagtaacctgttgtctttatataacttgcaacaaactaatttatttttttttcctttttttgtttttggttttttatggttttttaaggaaaatacttttctcctttgaagttttacagctttttgtaaatgcgtcctgataatgattaggaaaatcgaccttttcatccatgatgaccatcctcatagctcagatctcctttcaaagtagtggctttctggatggtaattccatcttaaggtgtcagaactattttcaaatgctgcctttgacagttcttggaattttctgatattaagcagttccatgcaaatattcgtgttttataaatagctctcatagtctgctccatcttgatagttaagtgatttctgaagcgtttgtgtgtgtgttgatcaggttgtgtgatatttttgcttgatagagaatcaaatttgaaacaattaaccagccagtagattgtctgtcagtgaccttctgtagtaataaagtttttgccactgtaaataaaaacagtatccgtagctatcaggatcattgcgcactcatatatgctaagccttctgttctctaatagaagcctttcttttccattgtttctggatatttgtattatccaaatgtgcttatttctttgccttagcacacgttttatggagtacttgttatactaggtttgatttgaaactggtgcttgtcgcagaactgtcagagcatgaggagcgctcctcctgtgggtggacgcattcacgcactcccaggttgcacctgctgctggcggtgagcagggggttcagcagcttgaccgatgccccccgagggggctctccccagcttaaactttgttgtttaaatttgttaactttttatattaatgactattgaaagtggtaataaaaatttatattataggcttcaatgttttcatgaatgttacccaaaaagctgtgttttctttggtcagaggtcaaaatttatgaaaaacaaaatgctgtatgaatggaaatcattttgcaattgagtgacacttcattgtaattcacagtgtaaatttaatccaaactgaaattttgtttcaactgaatttgtaattaactctgaatttgtttttaatcattagtaatatttcagttgggtatctttttaagtaaaaacaacaaataaactctgtacatgtaaaacgtg

SEQ ID NO: 164417 - DNA, 6318 bp, Homo sapiens
  Payload ID: 12389
  Gene Symbol: PER3
  Gene Name: period circadian clock 3
  Uniprot ID: P56645
  ENST ID: ENST00000613533
  CDS Start-End: 265-3897
actcgcgcgcggcagaggagccccgcgagccctgccctcggccggagtcctgaaagtcgagcgagctccgggttttgaaaatgttggagggaaaagctcctcggagatgagcgtgaccccctggctcgtggtggccgcctgttctcactaacgccatggcggggaccggagtgagaaaccggtgtctgtcactgactgcaaagtgagcgagaagcaggctgcgggccgtcccagcacgacgtggagccccgcggagacctcgagatgccccgcggggaagctcctggccccgggagacggggggctaaggacgaggccctgggcgaagaatcgggggagcggtggagccccgagttccatctgcagaggaaattggcggacagcagccacagtgaacagcaagatcgaaacagagtttctgaagaacttatcatggttgtccaagaaatgaaaaaatacttcccctcggagagacgcaataaaccaagcactctagatgccctcaactatgctctccgctgtgtccacagcgttcaagcaaacagtgagtttttccagattctcagtcagaatggagcacctcaggcagatgtgagcatgtacagtcttgaggagctggccactatcgcttcagaacacacttccaaaaacacagatacctttgtggcagtattttcatttctgtctggaaggttagtgcacatttctgaacaggctgctttgatcctgaatcgtaagaaagatgtcctggcgtcttctcactttgttgacctgcttgcacctcaagacatgagggtattctacgcgcacactgccagagctcagcttcctttctggaacaactggacccaaagagcagctgcacggtatgaatgtgctccggtgaaaccttttttctgcaggatccgtggaggtgaagacagaaagcaagagaagtgtcactccccattccggatcatcccctatctgattcatgtacatcaccctgcccagccagaattggaatcggaaccttgctgtctcactgtggttgaaaagattcactctggttatgaagctcctcggatcccagtgaataaaagaatcttcaccaccacacacaccccagggtgtgtttttcttgaagtagatgaaaaagcagtgcctttgctgggttacctacctcaggacctgattggaacatcgatcctaagctacctgcaccctgaagatcgttctctgatggttgccatacaccaaaaagttttgaagtatgcagggcatcctccctttgaacattctcccattcgattttgtactcaaaacggagactacatcatactggattccagttggtccagctttgtgaatccctggagccggaagatttctttcatcattggtcggcataaagttcgaacgagcccactaaatgaggatgtttttgctaccaaaattaaaaagatgaacgataatgacaaagacataacagaattacaagaacaaatttacaaacttctcttacagccagttcacgtgagcgtgtccagcggctacgggagcctggggagcagcgggtcgcaggagcagcttgtcagcatcgcctcctccagtgaggccagtgggcaccgtgtggaggagacgaaggcggagcagatgaccttgcagcaggtctatgccagtgtgaacaaaattaaaaatctgggtcagcagctctacattgagtcaatgaccaaatcatcattcaagccagtgacggggacacgcacagaaccgaatggtggtggtgagtcagcgaatggtggtggtgaatgtaagacctttacttccttccaccaaacactgaaaaacaatagtgtgtacactgagccctgtgaggatttgaggaacgatgagcacagcccatcctatcaacagatcaactgtatcgacagtgtcatcagatacctgaagagctacaacattccagctttgaaaagaaagtgtatctcctgtacaaatacaacttcttcctcctcagaagaagacaaacagaaccacaaggcagatgatgtccaagccttacaagctggtttgcaaatcccagccatacctaaatcagaaatgccaacaaatggacggtccatagacacaggaggaggagctccacagatcctgtccacggcgatgctgagcttggggtcgggcataagccaatgcggttacagcagcaccattgtccatgtcccacccccagagacagccagggatgctaccctcttctgtgagccctggaccctgaacatgcagccagcccctttgacctcggaagaatttaaacacgtggggctcacagcggctgttctgtcagcgcacacccagaaggaagagcagaattatgttgataaattccgagaaaagatcctgtcatcaccctacagctcctatcttcagcaagaaagcaggagcaaagctaaatattcatattttcaaggagattctacttccaagcagacgcggtcggccggctgcaggaaagggaagcacaagcggaagaagctgccggagccgccagacagcagcagctcgaacaccggctctggtccccgcaggggagcgcatcagaacgcacagccctgctgcccctccgcggcctcctctccgcacacctcgagcccgaccttcccacctgccgccatggtgcccagccaggccccttacctcgtcccagcttttcccctcccagccgcgacctcacccggaagagaatacgcagcccccggaactgcaccggaaggcctgcatgggctgcccttgtccgagggcttgcagccttacccagctttcccttttccttacttggatacttttatgaccgttttcctgcctgacccccctgtctgtcctctgttgtcgccatcgtttttgccatgtccattcctgggggcgacagcctcttctgcgatatcaccctcaatgtcgtcagcaatgagtccaactctggacccacccccttcagtcaccagccaaaggagagaggaggaaaagtgggaggcacaaagcgaggggcacccgttcattacttcgagaagcagctcacccttgcagttaaacttacttcaggaagagatgcccagaccctctgaatctccagatcagatgagaaggaacacgtgcccacaaactgagtatcagtgtgttacaggcaacaatggcagtgagagcagtcctgctactaccggtgcactgtccacggggtcacctcccagggagaatccatcccatcctactgccagcgctctgtccacaggatcgcctcccatgaagaatccatcccatcctactgccagcgctctgtccacaggatcgcctcccatgaagaatccatcccatcctactgccagcacactgtccatgggattgcctcccagcaggactccatcccatcctactgccactgttctgtccacggggtcacctcccagcgaatccccatccagaactggttcagcagcatcaggaagcagcgacagcagtatataccttactagtagtgtttattcttctaaaatctcccaaaatgggcagcaatctcaggacgtacagaaaaaagaaacatttcctaatgtcgccgaagagcccatctggagaatgatacggcagacacctgagcgcattctcatgacataccaggtacctgagagggttaaagaagttgtactaaaagaagacctggaaaagctagaaagtatgaggcagcagcagccccagttttctcatgggcaaaaggaggagctggctaaggtgtataattggattcaaagccagactgtcactcaagaaatcgacattcaagcctgtgtcacttgtgaaaatgaagattcagctgatggtgcggccacatcctgtggtcaggttctggtagaagacagctgttgagtgactgtgaggatgaaccttcataccctttccaagacgtgttacacagacagacctttttaagtcctggacttttaaatgaccatgaagttatcattgaatgttaagattttttcttcttgattttttaatacacgtaatctttttgaagcagacattgtatacagaatcttacttctctttgttcctgatatattaaaatggccagttaggctctttttgtagttgaattgtcttctaaagagattggatggcctctaaagaggtatgtgtatctttatttcagatgtcacccagagtaaattataattagaagtatagctagaatgagccccaaaccttagcctcatttattttgttctgttacataagtcattttccccttagagtgcttgaagaaatgccacctacaggttgtgtacttttcataatggtttccatgaatgtagtacgttcatacaggcttcattcaacctggcgttcccctccataattaagatgaaacattccggttttctcacaacacattagcacatactgtccattagcatatctgggataaccaggttttgggggttgagttttggccttcatccttgtagatccctttcctattgatttcccaccttccagtgaaattctgaaagtcttatcttaaaaatcgatccgcttaccatgggcctattcttgtaagtttcagttagcatttgcatgtgtaatattaaaatgaaagagcttcttacccagtgctgttgcccttttgagtatttttgtttttaaaataatgattgtaaaatgttttacaagtaatgtaaaagctagtatcattcttacatacttctgtgtttaaattttcattcttaccaaaacagttaactctttctttccaatcaatttatacaaaagaggtcgctccagccctaccacaggtctgactggcactgccttttgtttgcccttgaacagggcagtgttgtggggactgcaaaagagaaaacgtccaggcgagcccagttgtcctcgcccacagggtcctgcaggctccatcagtcaccgctttctatggcgtttgtagttgtgtcttttaagaagtgagtgtgattgtttacttgataaatcagctcactctctggtgctttttagagaagtccctgattccttcttaaacttggaatgatagatgaaattcacacccctgcagatcagaaaaaacaaatagaagaaaatgagggttacagtaacctgttgtctttatataacttgcaacaaactaatttatttttttttcctttttttgtttttggttttttatggttttttaaggaaaatacttttctcctttgaagttttacagctttttgtaaatgcgtcctgataatgattaggaaaatcgaccttttcatccatgatgaccatcctcatagctcagatctcctttcaaagtagtggctttctggatggtaattccatcttaaggtgtcagaactattttcaaatgctgcctttgacagttcttggaattttctgatattaagcagttccatgcaaatattcgtgttttataaatagctctcatagtctgctccatcttgatagttaagtgatttctgaagcgtttgtgtgtgtgttgatcaggttgtgtgatatttttgcttgatagagaatcaaatttgaaacaattaaccagccagtagattgtctgtcagtgaccttctgtagtaataaagtttttgccactgtaaataaaaacagtatccgtagctatcaggatcattgcgcactcatatatgctaagccttctgttctctaatagaagcctttcttttccattgtttctggatatttgtattatccaaatgtgcttatttctttgccttagcacacgttttatggagtacttgttatactaggtttgatttgaaactggtgcttgtcgcagaactgtcagagcatgaggagcgctcctcctgtgggtggacgcattcacgcactcccaggttgcacctgctgctggcggtgagcagggggttcagcagcttgaccgatgccccccgagggggctctccccagcttaaactttgttgtttaaatttgttaactttttatattaatgactattgaaagtggtaataaaaatttatattataggcttcaatgttttcatgaatgttacccaaaaagctgtgttttctttggtcagaggtcaaaatttatgaaaaacaaaatgctgtatgaatggaaatcattttgcaattgagtgacacttcattgtaattcacagtgtaaatttaatccaaactgaaattttgtttcaactgaatttgtaattaactctgaatttgtttttaatcattagtaatatttcagttgggtatctttttaagtaaaaacaacaaataaactctgtacatgtaaaacgtg

SEQ ID NO: 164418 - DNA, 3071 bp, Homo sapiens
  Payload ID: 12390
  Gene Symbol: POSTN
  Gene Name: periostin, osteoblast specific factor
  Uniprot ID: Q15063
  ENST ID: ENST00000379742
  CDS Start-End: 33-2372
ttcggggactaactgcaacggagagactcaagatgattccctttttacccatgttttctctactattgctgcttattgttaaccctataaacgccaacaatcattatgacaagatcttggctcatagtcgtatcaggggtcgggaccaaggcccaaatgtctgtgcccttcaacagattttgggcaccaaaaagaaatacttcagcacttgtaagaactggtataaaaagtccatctgtggacagaaaacgactgtgttatatgaatgttgccctggttatatgagaatggaaggaatgaaaggctgcccagcagttttgcccattgaccatgtttatggcactctgggcatcgtgggagccaccacaacgcagcgctattctgacgcctcaaaactgagggaggagatcgagggaaagggatccttcacttactttgcaccgagtaatgaggcttgggacaacttggattctgatatccgtagaggtttggagagcaacgtgaatgttgaattactgaatgctttacatagtcacatgattaataagagaatgttgaccaaggacttaaaaaatggcatgattattccttcaatgtataacaatttggggcttttcattaaccattatcctaatggggttgtcactgttaattgtgctcgaatcatccatgggaaccagattgcaacaaatggtgttgtccatgtcattgaccgtgtgcttacacaaattggtacctcaattcaagacttcattgaagcagaagatgacctttcatcttttagagcagctgccatcacatcggacatattggaggcccttggaagagacggtcacttcacactctttgctcccaccaatgaggcttttgagaaacttccacgaggtgtcctagaaaggatcatgggagacaaagtggcttccgaagctcttatgaagtaccacatcttaaatactctccagtgttctgagtctattatgggaggagcagtctttgagacgctggaaggaaatacaattgagataggatgtgacggtgacagtataacagtaaatggaatcaaaatggtgaacaaaaaggatattgtgacaaataatggtgtgatccatttgattgatcaggtcctaattcctgattctgccaaacaagttattgagctggctggaaaacagcaaaccaccttcacggatcttgtggcccaattaggcttggcatctgctctgaggccagatggagaatacactttgctggcacctgtgaataatgcattttctgatgatactctcagcatggatcagcgcctccttaaattaattctgcagaatcacatattgaaagtaaaagttggccttaatgagctttacaacgggcaaatactggaaaccatcggaggcaaacagctcagagtcttcgtatatcgtacagctgtctgcattgaaaattcatgcatggagaaagggagtaagcaagggagaaacggtgcgattcacatattccgcgagatcatcaagccagcagagaaatccctccatgaaaagttaaaacaagataagcgctttagcaccttcctcagcctacttgaagctgcagacttgaaagagctcctgacacaacctggagactggacattatttgtgccaaccaatgatgcttttaagggaatgactagtgaagaaaaagaaattctgatacgggacaaaaatgctcttcaaaacatcattctttatcacctgacaccaggagttttcattggaaaaggatttgaacctggtgttactaacattttaaagaccacacaaggaagcaaaatctttctgaaagaagtaaatgatacacttctggtgaatgaattgaaatcaaaagaatctgacatcatgacaacaaatggtgtaattcatgttgtagataaactcctctatccagcagacacacctgttggaaatgatcaactgctggaaatacttaataaattaatcaaatacatccaaattaagtttgttcgtggtagcaccttcaaagaaatccccgtgactgtctataagccaattattaaaaaatacaccaaaatcattgatggagtgcctgtggaaataactgaaaaagagacacgagaagaacgaatcattacaggtcctgaaataaaatacactaggatttctactggaggtggagaaacagaagaaactctgaagaaattgttacaagaagaggtcaccaaggtcaccaaattcattgaaggtggtgatggtcatttatttgaagatgaagaaattaaaagactgcttcagggagacacacccgtgaggaagttgcaagccaacaaaaaagttcaaggatctagaagacgattaagggaaggtcgttctcagtgaaaatccaaaaaccagaaaaaaatgtttatacaaccctaagtcaataacctgaccttagaaaattgtgagagccaagttgacttcaggaactgaaacatcagcacaaagaagcaatcatcaaataattctgaacacaaatttaatatttttttttctgaatgagaaacatgagggaaattgtggagttagcctcctgtggtaaaggaattgaagaaaatataacaccttacaccctttttcatcttgacattaaaagttctggctaactttggaatccattagagaaaaatccttgtcaccagattcattacaattcaaatcgaagagttgtgaactgttatcccattgaaaagaccgagccttgtatgtatgttatggatacataaaatgcacgcaagccattatctctccatgggaagctaagttataaaaataggtgcttggtgtacaaaactttttatatcaaaaggctttgcacatttctatatgagtgggtttactggtaaattatgttattttttacaactaattttgtactctcagaatgtttgtcatatgcttcttgcaatgcatattttttaatctcaaacgtttcaataaaaccatttttcagatataaagagaattacttcaaattgagtaattcagaaaaactcaagatttaagttaaaaagtggtttggacttgggaacaggactt

SEQ ID NO: 164419 - DNA, 3196 bp, Homo sapiens
  Payload ID: 12390
  Gene Symbol: POSTN
  Gene Name: periostin, osteoblast specific factor
  Uniprot ID: Q15063
  ENST ID: ENST00000379743
  CDS Start-End: 25-2454
ctaactgcaacggagagactcaagatgattccctttttacccatgttttctctactattgctgcttattgttaaccctataaacgccaacaatcattatgacaagatcttggctcatagtcgtatcaggggtcgggaccaaggcccaaatgtctgtgcccttcaacagattttgggcaccaaaaagaaatacttcagcacttgtaagaactggtataaaaagtccatctgtggacagaaaacgactgtgttatatgaatgttgccctggttatatgagaatggaaggaatgaaaggctgcccagcagttttgcccattgaccatgtttatggcactctgggcatcgtgggagccaccacaacgcagcgctattctgacgcctcaaaactgagggaggagatcgagggaaagggatccttcacttactttgcaccgagtaatgaggcttgggacaacttggattctgatatccgtagaggtttggagagcaacgtgaatgttgaattactgaatgctttacatagtcacatgattaataagagaatgttgaccaaggacttaaaaaatggcatgattattccttcaatgtataacaatttggggcttttcattaaccattatcctaatggggttgtcactgttaattgtgctcgaatcatccatgggaaccagattgcaacaaatggtgttgtccatgtcattgaccgtgtgcttacacaaattggtacctcaattcaagacttcattgaagcagaagatgacctttcatcttttagagcagctgccatcacatcggacatattggaggcccttggaagagacggtcacttcacactctttgctcccaccaatgaggcttttgagaaacttccacgaggtgtcctagaaaggatcatgggagacaaagtggcttccgaagctcttatgaagtaccacatcttaaatactctccagtgttctgagtctattatgggaggagcagtctttgagacgctggaaggaaatacaattgagataggatgtgacggtgacagtataacagtaaatggaatcaaaatggtgaacaaaaaggatattgtgacaaataatggtgtgatccatttgattgatcaggtcctaattcctgattctgccaaacaagttattgagctggctggaaaacagcaaaccaccttcacggatcttgtggcccaattaggcttggcatctgctctgaggccagatggagaatacactttgctggcacctgtgaataatgcattttctgatgatactctcagcatggatcagcgcctccttaaattaattctgcagaatcacatattgaaagtaaaagttggccttaatgagctttacaacgggcaaatactggaaaccatcggaggcaaacagctcagagtcttcgtatatcgtacagctgtctgcattgaaaattcatgcatggagaaagggagtaagcaagggagaaacggtgcgattcacatattccgcgagatcatcaagccagcagagaaatccctccatgaaaagttaaaacaagataagcgctttagcaccttcctcagcctacttgaagctgcagacttgaaagagctcctgacacaacctggagactggacattatttgtgccaaccaatgatgcttttaagggaatgactagtgaagaaaaagaaattctgatacgggacaaaaatgctcttcaaaacatcattctttatcacctgacaccaggagttttcattggaaaaggatttgaacctggtgttactaacattttaaagaccacacaaggaagcaaaatctttctgaaagaagtaaatgatacacttctggtgaatgaattgaaatcaaaagaatctgacatcatgacaacaaatggtgtaattcatgttgtagataaactcctctatccagcagacacacctgttggaaatgatcaactgctggaaatacttaataaattaatcaaatacatccaaattaagtttgttcgtggtagcaccttcaaagaaatccccgtgactgtctatagacccacactaacaaaagtcaaaattgaaggtgaacctgaattcagactgattaaagaaggtgaaacaataactgaagtgatccatggagagccaattattaaaaaatacaccaaaatcattgatggagtgcctgtggaaataactgaaaaagagacacgagaagaacgaatcattacaggtcctgaaataaaatacactaggatttctactggaggtggagaaacagaagaaactctgaagaaattgttacaagaagaggtcaccaaggtcaccaaattcattgaaggtggtgatggtcatttatttgaagatgaagaaattaaaagactgcttcagggagacacacccgtgaggaagttgcaagccaacaaaaaagttcaaggatctagaagacgattaagggaaggtcgttctcagtgaaaatccaaaaaccagaaaaaaatgtttatacaaccctaagtcaataacctgaccttagaaaattgtgagagccaagttgacttcaggaactgaaacatcagcacaaagaagcaatcatcaaataattctgaacacaaatttaatatttttttttctgaatgagaaacatgagggaaattgtggagttagcctcctgtggtaaaggaattgaagaaaatataacaccttacaccctttttcatcttgacattaaaagttctggctaactttggaatccattagagaaaaatccttgtcaccagattcattacaattcaaatcgaagagttgtgaactgttatcccattgaaaagaccgagccttgtatgtatgttatggatacataaaatgcacgcaagccattatctctccatgggaagctaagttataaaaataggtgcttggtgtacaaaactttttatatcaaaaggctttgcacatttctatatgagtgggtttactggtaaattatgttattttttacaactaattttgtactctcagaatgtttgtcatatgcttcttgcaatgcatattttttaatctcaaacgtttcaataaaaccatttttcagatataaagagaattacttcaaattgagtaattcagaaaaactcaagatttaagttaaaaagtggtttggacttgggaacaggactttatacctcttttactgtaacaagtactcattaaaggaaattga

SEQ ID NO: 164420 - DNA, 3373 bp, Homo sapiens
  Payload ID: 12390
  Gene Symbol: POSTN
  Gene Name: periostin, osteoblast specific factor
  Uniprot ID: Q15063
  ENST ID: ENST00000379747
  CDS Start-End: 119-2629
agactctcaggttgatgcagtgttccctcccacaactctgacatgtatataaattctgagctctccaaagcccactgccagttctcttcggggactaactgcaacggagagactcaagatgattccctttttacccatgttttctctactattgctgcttattgttaaccctataaacgccaacaatcattatgacaagatcttggctcatagtcgtatcaggggtcgggaccaaggcccaaatgtctgtgcccttcaacagattttgggcaccaaaaagaaatacttcagcacttgtaagaactggtataaaaagtccatctgtggacagaaaacgactgtgttatatgaatgttgccctggttatatgagaatggaaggaatgaaaggctgcccagcagttttgcccattgaccatgtttatggcactctgggcatcgtgggagccaccacaacgcagcgctattctgacgcctcaaaactgagggaggagatcgagggaaagggatccttcacttactttgcaccgagtaatgaggcttgggacaacttggattctgatatccgtagaggtttggagagcaacgtgaatgttgaattactgaatgctttacatagtcacatgattaataagagaatgttgaccaaggacttaaaaaatggcatgattattccttcaatgtataacaatttggggcttttcattaaccattatcctaatggggttgtcactgttaattgtgctcgaatcatccatgggaaccagattgcaacaaatggtgttgtccatgtcattgaccgtgtgcttacacaaattggtacctcaattcaagacttcattgaagcagaagatgacctttcatcttttagagcagctgccatcacatcggacatattggaggcccttggaagagacggtcacttcacactctttgctcccaccaatgaggcttttgagaaacttccacgaggtgtcctagaaaggatcatgggagacaaagtggcttccgaagctcttatgaagtaccacatcttaaatactctccagtgttctgagtctattatgggaggagcagtctttgagacgctggaaggaaatacaattgagataggatgtgacggtgacagtataacagtaaatggaatcaaaatggtgaacaaaaaggatattgtgacaaataatggtgtgatccatttgattgatcaggtcctaattcctgattctgccaaacaagttattgagctggctggaaaacagcaaaccaccttcacggatcttgtggcccaattaggcttggcatctgctctgaggccagatggagaatacactttgctggcacctgtgaataatgcattttctgatgatactctcagcatggatcagcgcctccttaaattaattctgcagaatcacatattgaaagtaaaagttggccttaatgagctttacaacgggcaaatactggaaaccatcggaggcaaacagctcagagtcttcgtatatcgtacagctgtctgcattgaaaattcatgcatggagaaagggagtaagcaagggagaaacggtgcgattcacatattccgcgagatcatcaagccagcagagaaatccctccatgaaaagttaaaacaagataagcgctttagcaccttcctcagcctacttgaagctgcagacttgaaagagctcctgacacaacctggagactggacattatttgtgccaaccaatgatgcttttaagggaatgactagtgaagaaaaagaaattctgatacgggacaaaaatgctcttcaaaacatcattctttatcacctgacaccaggagttttcattggaaaaggatttgaacctggtgttactaacattttaaagaccacacaaggaagcaaaatctttctgaaagaagtaaatgatacacttctggtgaatgaattgaaatcaaaagaatctgacatcatgacaacaaatggtgtaattcatgttgtagataaactcctctatccagcagacacacctgttggaaatgatcaactgctggaaatacttaataaattaatcaaatacatccaaattaagtttgttcgtggtagcaccttcaaagaaatccccgtgactgtctatacaactaaaattataaccaaagttgtggaaccaaaaattaaagtgattgaaggcagtcttcagcctattatcaaaactgaaggacccacactaacaaaagtcaaaattgaaggtgaacctgaattcagactgattaaagaaggtgaaacaataactgaagtgatccatggagagccaattattaaaaaatacaccaaaatcattgatggagtgcctgtggaaataactgaaaaagagacacgagaagaacgaatcattacaggtcctgaaataaaatacactaggatttctactggaggtggagaaacagaagaaactctgaagaaattgttacaagaagaggtcaccaaggtcaccaaattcattgaaggtggtgatggtcatttatttgaagatgaagaaattaaaagactgcttcagggagacacacccgtgaggaagttgcaagccaacaaaaaagttcaaggatctagaagacgattaagggaaggtcgttctcagtgaaaatccaaaaaccagaaaaaaatgtttatacaaccctaagtcaataacctgaccttagaaaattgtgagagccaagttgacttcaggaactgaaacatcagcacaaagaagcaatcatcaaataattctgaacacaaatttaatatttttttttctgaatgagaaacatgagggaaattgtggagttagcctcctgtggtaaaggaattgaagaaaatataacaccttacaccctttttcatcttgacattaaaagttctggctaactttggaatccattagagaaaaatccttgtcaccagattcattacaattcaaatcgaagagttgtgaactgttatcccattgaaaagaccgagccttgtatgtatgttatggatacataaaatgcacgcaagccattatctctccatgggaagctaagttataaaaataggtgcttggtgtacaaaactttttatatcaaaaggctttgcacatttctatatgagtgggtttactggtaaattatgttattttttacaactaattttgtactctcagaatgtttgtcatatgcttcttgcaatgcatattttttaatctcaaacgtttcaataaaaccatttttcagatataaagagaattacttcaaattgagtaattcagaaaaactcaagatttaagttaaaaagtggtttggacttgggaacaggactttatacctcttttactgtaacaagtactcattaaaggaaattgaat

SEQ ID NO: 164421 - DNA, 3210 bp, Homo sapiens
  Payload ID: 12390
  Gene Symbol: POSTN
  Gene Name: periostin, osteoblast specific factor
  ENST ID: ENST00000379749
  CDS Start-End: 36-2462
ctcttcggggactaactgcaacggagagactcaagatgattccctttttacccatgttttctctactattgctgcttattgttaaccctataaacgccaacaatcattatgacaagatcttggctcatagtcgtatcaggggtcgggaccaaggcccaaatgtctgtgcccttcaacagattttgggcaccaaaaagaaatacttcagcacttgtaagaactggtataaaaagtccatctgtggacagaaaacgactgtgttatatgaatgttgccctggttatatgagaatggaaggaatgaaaggctgcccagcagttttgcccattgaccatgtttatggcactctgggcatcgtgggagccaccacaacgcagcgctattctgacgcctcaaaactgagggaggagatcgagggaaagggatccttcacttactttgcaccgagtaatgaggcttgggacaacttggattctgatatccgtagaggtttggagagcaacgtgaatgttgaattactgaatgctttacatagtcacatgattaataagagaatgttgaccaaggacttaaaaaatggcatgattattccttcaatgtataacaatttggggcttttcattaaccattatcctaatggggttgtcactgttaattgtgctcgaatcatccatgggaaccagattgcaacaaatggtgttgtccatgtcattgaccgtgtgcttacacaaattggtacctcaattcaagacttcattgaagcagaagatgacctttcatcttttagagcagctgccatcacatcggacatattggaggcccttggaagagacggtcacttcacactctttgctcccaccaatgaggcttttgagaaacttccacgaggtgtcctagaaaggatcatgggagacaaagtggcttccgaagctcttatgaagtaccacatcttaaatactctccagtgttctgagtctattatgggaggagcagtctttgagacgctggaaggaaatacaattgagataggatgtgacggtgacagtataacagtaaatggaatcaaaatggtgaacaaaaaggatattgtgacaaataatggtgtgatccatttgattgatcaggtcctaattcctgattctgccaaacaagttattgagctggctggaaaacagcaaaccaccttcacggatcttgtggcccaattaggcttggcatctgctctgaggccagatggagaatacactttgctggcacctgtgaataatgcattttctgatgatactctcagcatggatcagcgcctccttaaattaattctgcagaatcacatattgaaagtaaaagttggccttaatgagctttacaacgggcaaatactggaaaccatcggaggcaaacagctcagagtcttcgtatatcgtacagctgtctgcattgaaaattcatgcatggagaaagggagtaagcaagggagaaacggtgcgattcacatattccgcgagatcatcaagccagcagagaaatccctccatgaaaagttaaaacaagataagcgctttagcaccttcctcagcctacttgaagctgcagacttgaaagagctcctgacacaacctggagactggacattatttgtgccaaccaatgatgcttttaagggaatgactagtgaagaaaaagaaattctgatacgggacaaaaatgctcttcaaaacatcattctttatcacctgacaccaggagttttcattggaaaaggatttgaacctggtgttactaacattttaaagaccacacaaggaagcaaaatctttctgaaagaagtaaatgatacacttctggtgaatgaattgaaatcaaaagaatctgacatcatgacaacaaatggtgtaattcatgttgtagataaactcctctatccagcagacacacctgttggaaatgatcaactgctggaaatacttaataaattaatcaaatacatccaaattaagtttgttcgtggtagcaccttcaaagaaatccccgtgactgtctatacaactaaaattataaccaaagttgtggaaccaaaaattaaagtgattgaaggcagtcttcagcctattatcaaaactgaaggacccacactaacaaaagtcaaaattgaaggtgaacctgaattcagactgattaaagaaggtgaaacaataactgaagtgatccatggagagccaattattaaaaaatacaccaaaatcattgatggagtgcctgtggaaataactgaaaaagagacacgagaagaacgaatcattacaggtcctgaaataaaatacactaggatttctactggaggtggagaaacagaagaaactctgaagaaattgttacaagaagacacacccgtgaggaagttgcaagccaacaaaaaagttcaaggatctagaagacgattaagggaaggtcgttctcagtgaaaatccaaaaaccagaaaaaaatgtttatacaaccctaagtcaataacctgaccttagaaaattgtgagagccaagttgacttcaggaactgaaacatcagcacaaagaagcaatcatcaaataattctgaacacaaatttaatatttttttttctgaatgagaaacatgagggaaattgtggagttagcctcctgtggtaaaggaattgaagaaaatataacaccttacaccctttttcatcttgacattaaaagttctggctaactttggaatccattagagaaaaatccttgtcaccagattcattacaattcaaatcgaagagttgtgaactgttatcccattgaaaagaccgagccttgtatgtatgttatggatacataaaatgcacgcaagccattatctctccatgggaagctaagttataaaaataggtgcttggtgtacaaaactttttatatcaaaaggctttgcacatttctatatgagtgggtttactggtaaattatgttattttttacaactaattttgtactctcagaatgtttgtcatatgcttcttgcaatgcatattttttaatctcaaacgtttcaataaaaccatttttcagatataaagagaattacttcaaattgagtaattcagaaaaactcaagatttaagttaaaaagtggtttggacttgggaacaggactttatacctcttttactgtaacaagtactcattaaaggaaattgaatgaaa

SEQ ID NO: 164422 - DNA, 3113 bp, Homo sapiens
  Payload ID: 12390
  Gene Symbol: POSTN
  Gene Name: periostin, osteoblast specific factor
  Uniprot ID: Q15063
  ENST ID: ENST00000541481
  CDS Start-End: 119-2368
agactctcaggttgatgcagtgttccctcccacaactctgacatgtatataaattctgagctctccaaagcccactgccagttctcttcggggactaactgcaacggagagactcaagatgattccctttttacccatgttttctctactattgctgcttattgttaaccctataaacgccaacaatcattatgacaagatcttggctcatagtcgtatcaggggtcgggaccaaggcccaaatgtctgtgcccttcaacagattttgggcaccaaaaagaaatacttcagcacttgtaagaactggtataaaaagtccatctgtggacagaaaacgactgtgttatatgaatgttgccctggttatatgagaatggaaggaatgaaaggctgcccagcagttttgcccattgaccatgtttatggcactctgggcatcgtgggagccaccacaacgcagcgctattctgacgcctcaaaactgagggaggagatcgagggaaagggatccttcacttactttgcaccgagtaatgaggcttgggacaacttggattctgatatccgtagaggtttggagagcaacgtgaatgttgaattactgaatgctttacatagtcacatgattaataagagaatgttgaccaaggacttaaaaaatggcatgattattccttcaatgtataacaatttggggcttttcattaaccattatcctaatggggttgtcactgttaattgtgctcgaatcatccatgggaaccagattgcaacaaatggtgttgtccatgtcattgaccgtgtgcttacacaaattggtacctcaattcaagacttcattgaagcagaagatgacctttcatcttttagagcagctgccatcacatcggacatattggaggcccttggaagagacggtcacttcacactctttgctcccaccaatgaggcttttgagaaacttccacgaggtgtcctagaaaggatcatgggagacaaagtggcttccgaagctcttatgaagtaccacatcttaaatactctccagtgttctgagtctattatgggaggagcagtctttgagacgctggaaggaaatacaattgagataggatgtgacggtgacagtataacagtaaatggaatcaaaatggtgaacaaaaaggatattgtgacaaataatggtgtgatccatttgattgatcaggtcctaattcctgattctgccaaacaagttattgagctggctggaaaacagcaaaccaccttcacggatcttgtggcccaattaggcttggcatctgctctgaggccagatggagaatacactttgctggcacctgtgaataatgcattttctgatgatactctcagcatggatcagcgcctccttaaattaattctgcagaatcacatattgaaagtaaaagttggccttaatgagctttacaacgggcaaatactggaaaccatcggaggcaaacagctcagagtcttcgtatatcgtacagctgtctgcattgaaaattcatgcatggagaaagggagtaagcaagggagaaacggtgcgattcacatattccgcgagatcatcaagccagcagagaaatccctccatgaaaagttaaaacaagataagcgctttagcaccttcctcagcctacttgaagctgcagacttgaaagagctcctgacacaacctggagactggacattatttgtgccaaccaatgatgcttttaagggaatgactagtgaagaaaaagaaattctgatacgggacaaaaatgctcttcaaaacatcattctttatcacctgacaccaggagttttcattggaaaaggatttgaacctggtgttactaacattttaaagaccacacaaggaagcaaaatctttctgaaagaagtaaatgatacacttctggtgaatgaattgaaatcaaaagaatctgacatcatgacaacaaatggtgtaattcatgttgtagataaactcctctatccagcagacacacctgttggaaatgatcaactgctggaaatacttaataaattaatcaaatacatccaaattaagtttgttcgtggtagcaccttcaaagaaatccccgtgactgtctatagtcctgaaataaaatacactaggatttctactggaggtggagaaacagaagaaactctgaagaaattgttacaagaagaggtcaccaaggtcaccaaattcattgaaggtggtgatggtcatttatttgaagatgaagaaattaaaagactgcttcagggagacacacccgtgaggaagttgcaagccaacaaaaaagttcaaggatctagaagacgattaagggaaggtcgttctcagtgaaaatccaaaaaccagaaaaaaatgtttatacaaccctaagtcaataacctgaccttagaaaattgtgagagccaagttgacttcaggaactgaaacatcagcacaaagaagcaatcatcaaataattctgaacacaaatttaatatttttttttctgaatgagaaacatgagggaaattgtggagttagcctcctgtggtaaaggaattgaagaaaatataacaccttacaccctttttcatcttgacattaaaagttctggctaactttggaatccattagagaaaaatccttgtcaccagattcattacaattcaaatcgaagagttgtgaactgttatcccattgaaaagaccgagccttgtatgtatgttatggatacataaaatgcacgcaagccattatctctccatgggaagctaagttataaaaataggtgcttggtgtacaaaactttttatatcaaaaggctttgcacatttctatatgagtgggtttactggtaaattatgttattttttacaactaattttgtactctcagaatgtttgtcatatgcttcttgcaatgcatattttttaatctcaaacgtttcaataaaaccatttttcagatataaagagaattacttcaaattgagtaattcagaaaaactcaagatttaagttaaaaagtggtttggacttgggaacaggactttatacctcttttactgtaacaagtactcattaaaggaaattgaatg

SEQ ID NO: 164423 - DNA, 3214 bp, Homo sapiens
  Payload ID: 12390
  Gene Symbol: POSTN
  Gene Name: periostin, osteoblast specific factor
  Uniprot ID: Q15063
  ENST ID: ENST00000541179
  CDS Start-End: 119-2464
agactctcaggttgatgcagtgttccctcccacaactctgacatgtatataaattctgagctctccaaagcccactgccagttctcttcggggactaactgcaacggagagactcaagatgattccctttttacccatgttttctctactattgctgcttattgttaaccctataaacgccaacaatcattatgacaagatcttggctcatagtcgtatcaggggtcgggaccaaggcccaaatgtctgtgcccttcaacagattttgggcaccaaaaagaaatacttcagcacttgtaagaactggtataaaaagtccatctgtggacagaaaacgactgtgttatatgaatgttgccctggttatatgagaatggaaggaatgaaaggctgcccagcagttttgcccattgaccatgtttatggcactctgggcatcgtgggagccaccacaacgcagcgctattctgacgcctcaaaactgagggaggagatcgagggaaagggatccttcacttactttgcaccgagtaatgaggcttgggacaacttggattctgatatccgtagaggtttggagagcaacgtgaatgttgaattactgaatgctttacatagtcacatgattaataagagaatgttgaccaaggacttaaaaaatggcatgattattccttcaatgtataacaatttggggcttttcattaaccattatcctaatggggttgtcactgttaattgtgctcgaatcatccatgggaaccagattgcaacaaatggtgttgtccatgtcattgaccgtgtgcttacacaaattggtacctcaattcaagacttcattgaagcagaagatgacctttcatcttttagagcagctgccatcacatcggacatattggaggcccttggaagagacggtcacttcacactctttgctcccaccaatgaggcttttgagaaacttccacgaggtgtcctagaaaggatcatgggagacaaagtggcttccgaagctcttatgaagtaccacatcttaaatactctccagtgttctgagtctattatgggaggagcagtctttgagacgctggaaggaaatacaattgagataggatgtgacggtgacagtataacagtaaatggaatcaaaatggtgaacaaaaaggatattgtgacaaataatggtgtgatccatttgattgatcaggtcctaattcctgattctgccaaacaagttattgagctggctggaaaacagcaaaccaccttcacggatcttgtggcccaattaggcttggcatctgctctgaggccagatggagaatacactttgctggcacctgtgaataatgcattttctgatgatactctcagcatggatcagcgcctccttaaattaattctgcagaatcacatattgaaagtaaaagttggccttaatgagctttacaacgggcaaatactggaaaccatcggaggcaaacagctcagagtcttcgtatatcgtacagctgtctgcattgaaaattcatgcatggagaaagggagtaagcaagggagaaacggtgcgattcacatattccgcgagatcatcaagccagcagagaaatccctccatgaaaagttaaaacaagataagcgctttagcaccttcctcagcctacttgaagctgcagacttgaaagagctcctgacacaacctggagactggacattatttgtgccaaccaatgatgcttttaagggaatgactagtgaagaaaaagaaattctgatacgggacaaaaatgctcttcaaaacatcattctttatcacctgacaccaggagttttcattggaaaaggatttgaacctggtgttactaacattttaaagaccacacaaggaagcaaaatctttctgaaagaagtaaatgatacacttctggtgaatgaattgaaatcaaaagaatctgacatcatgacaacaaatggtgtaattcatgttgtagataaactcctctatccagcagacacacctgttggaaatgatcaactgctggaaatacttaataaattaatcaaatacatccaaattaagtttgttcgtggtagcaccttcaaagaaatccccgtgactgtctatagacccacactaacaaaagtcaaaattgaaggtgaacctgaattcagactgattaaagaaggtgaaacaataactgaagtgatccatggagagccaattattaaaaaatacaccaaaatcattgatggagtgcctgtggaaataactgaaaaagagacacgagaagaacgaatcattacaggtcctgaaataaaatacactaggatttctactggaggtggagaaacagaagaaactctgaagaaattgttacaagaagacacacccgtgaggaagttgcaagccaacaaaaaagttcaaggatctagaagacgattaagggaaggtcgttctcagtgaaaatccaaaaaccagaaaaaaatgtttatacaaccctaagtcaataacctgaccttagaaaattgtgagagccaagttgacttcaggaactgaaacatcagcacaaagaagcaatcatcaaataattctgaacacaaatttaatatttttttttctgaatgagaaacatgagggaaattgtggagttagcctcctgtggtaaaggaattgaagaaaatataacaccttacaccctttttcatcttgacattaaaagttctggctaactttggaatccattagagaaaaatccttgtcaccagattcattacaattcaaatcgaagagttgtgaactgttatcccattgaaaagaccgagccttgtatgtatgttatggatacataaaatgcacgcaagccattatctctccatgggaagctaagttataaaaataggtgcttggtgtacaaaactttttatatcaaaaggctttgcacatttctatatgagtgggtttactggtaaattatgttattttttacaactaattttgtactctcagaatgtttgtcatatgcttcttgcaatgcatattttttaatctcaaacgtttcaataaaaccatttttcagatataaagagaattacttcaaattgagtaattcagaaaaactcaagatttaagttaaaaagtggtttggacttgggaacaggactttatacctcttttactgtaacaagtactcattaaaggaaattgaatgaaatt

SEQ ID NO: 164424 - DNA, 3608 bp, Homo sapiens
  Payload ID: 12391
  Gene Symbol: PMP2
  Gene Name: peripheral myelin protein 2
  Uniprot ID: P02689
  ENST ID: ENST00000256103
  CDS Start-End: 138-536
acactgcctttccccattgggtctctgtaagagtcacacgctttgggcatccttgaaaagaatcttctgaggcctcagcattttatctgagtcttctgaatcccacttagaactgtgttgagctctcacccatcacgatgagcaacaaattcctgggcacctggaaacttgtctctagtgagaactttgacgattacatgaaagctctgggtgtggggttagccaccagaaaactgggaaatttggccaaacccactgtgatcatcagcaagaaaggagatattataactatacgaactgaaagtacctttaaaaatacagaaatctccttcaagctaggccaggaatttgaagaaaccacagctgacaatagaaagaccaagagcatcgtaaccctgcagagaggatcactgaatcaagtgcagagatgggatggcaaagagacaaccataaagagaaagctagtgaatgggaaaatggtagcggaatgtaaaatgaagggcgtggtgtgcaccagaatctatgagaaggtctgaaaaatcatttcttcattgaagtggctttttatcatttaatgatggaaatcaattgcttccattgacaaaactgaatacactgcaaatatttgtttttgcttttgtcttaatatatcagatatgcaaaggcctaaactgagaattaatctaaaagtcagtgttatttaaacattttcaatgtgcatgcatgtcattattacatcaaagcatatatattggccagacacaaacagttgatgatgtcattcaattaactacaaaattctaatctatgttgaactttgtatacttgaaatgataataaaaaggatataatttcttagtaaaatgaaatcaaagtattgatcagggtagcaaactcaaatgctgacaggggccagaggagatatggggaaggagcatcagaaatgaggcaagctaggagaatgggctattataatgtaaagaattgtagtctcagttaaaaggggtagcctctactccagccaacattttaaaattaatggataatttatagacagttaaatttatagacagttaagtaaaaatggataatttatagacagataatttatagacaggtaaatgtgagttaaatataactcacatcccactcaagacacaaaacattttcttaatcctagtacatttttttctgtcccttcccaatcagtgtccttttctgttccacccctaccaaaagcaagtagtggtttggtttctatcatatagattaattttacctgctcatatgaagggaattgtacatcatgcattcttttctgtttgccttttttaaattcagcatcatgtttttgtgatacatccacattgttgcatgcagctgtagtttgtttctttttattaccaagtactatttcattgtatgaatatatcacagtttatccattctactattaagacaattgagctatttctaattttcggctgctatgaataaagctgctacaaatatttttgtacaagactttttgtaaacataggagtccctttattttaaataaataactagtcatatcattaggtccagtaattgttgacaggcaggaacgggggaccattgcattgtgcccaagtaataataaaactatttcagatgtattatatgattgagcaaatgagaaaacatgttgatgttgatgggagtcaggatgttcactatggaaaaacaaatatacaaatatgaaatgagggaaggcaagaaagaaccatgtggaaatggaatagaattggtataaattcataatttctaaaccatgtatatgtacgtttatatgtattataattgcatacacatgcctccatgcatatatgtgtgtgataatacacatgcatttatgtgcgtgtgtgtatacacatgcatatatttactaatcctatctgccaaaatggcttagacacaaaaacacctcagcagaaatgaatatacctagcactcagatcttcgtgtctaatatagtttgccactaaaaggaaccaaggctacttggaaaaatggatgattccaaagcaagggcaaggtaggaacaagatgagcttgaaatatcttgttatgccagaaagtaatgttaaaaaaaaaaatagaggtatattgccaaaacatagagccagcttgaaggggctcccactggccaaacttgagccaatctgagagcaaaataattgagaaaaataaataacaagataattgagaaaaaaataaaataaattcccaattccattgggaaaaaatagaaatccatgaatccatactgatataatgatagataatcgatagataggtagatgactgacagatgatagatagatatatagatagatagatagatagatagatagatagatagatagatagagaaatgagaaggtttctcttttgcaatagaacgtcatggaccagtgttaaatgtgagtggaaggagttctggaattggaaaaccatcatttttcaaccatcacagtaaatatggctcaggcaagaattatcaatcaatgctaaagctagggggaaatttcgcttaggagcaggatattagggtattagtctgggcttaaagtatctcctcacagattgttgttagtttctggggaaagaatagtaaccatgcaatggaaaaaaatggacaacctcttgactaggttatcaaaattaacctcaccaataaagggtggatgttcaacatgtgccttcaaatgtgacccactgagaaggaaacaacatcactgtaacaacaacaaccagaaacgacagggggttttgactgaattcttcaaaaatgtcaatgtcatagaagacaaagaaaggttgtggaaatgtttcagattaaatgatagtaaaaacacctgacaactaaacatagtaagtaatactagactggattctgtaccagaggtaacataagtgctccaaaggacaatgttaggtcaactggcaaattggaatatagacagtcaatcagataagaagtatactttgattaagtaaaaaaaatccctattcttggaaaatacacaataaagtattttgaggtaaagggccataatgtatgcaatctactctcaaaaaattcagaaacatatatttgtgtgcatttgcatgtgcaacagtacacacaaacatacataaagagagcaattgataaggcaaataaggtaacatttaacaataatctgatacacataaatagagaaagagcaattgataaagtaaatgaggtaaaatttaacaataatctgagcaaaaggtatatgtgttttctttgagacagtctgattcttgcaacttattctgtaagttggaacttatttccaaacatgattgaaaaaaaaccccgcacttggcaacttcttctctttttcagcctagaaatgtctgtgttaagtggttttttatttattgttgttgtttgttgttattgttgttttgttgccaggctccaactcacaaaatacgagtttaaaaactgcgttgttatttttagagatttgtgataatacaacttgttataaaatttattcctcaataaatataatttctctactatgcaaaaa

SEQ ID NO: 164425 - DNA, 1264 bp, Homo sapiens
  Payload ID: 12391
  Gene Symbol: PMP2
  Gene Name: peripheral myelin protein 2
  ENST ID: ENST00000519260
  CDS Start-End: 54-236
atctgagtcttctgaatcccacttagaactgtgttgagctctcacccatcacgatgagcaacaaattcctgggcacctggaaacttgtctctagtgagaactttgacgattacatgaaagctctggagcatcgtaaccctgcagagaggatcactgaatcaagtgcagagatgggatggcaaagagacaaccataaagagaaagctagtgaatgggaaaatggtagcggaatgtaaaatgaagggcgtggtgtgcaccagaatctatgagaaggtctgaaaaatcatttcttcattgaagtggctttttatcatttaatgatggaaatcaattgcttccattgacaaaactgaatacactgcaaatatttgtttttgcttttgtcttaatatatcagatatgcaaaggcctaaactgagaattaatctaaaagtcagtgttatttaaacattttcaatgtgcatgcatgtcattattacatcaaagcatatatattggccagacacaaacagttgatgatgtcattcaattaactacaaaattctaatctatgttgaactttgtatacttgaaatgataataaaaaggatataatttcttagtaaaatgaaatcaaagtattgatcagggtagcaaactcaaatgctgacaggggccagaggagatatggggaaggagcatcagaaatgaggcaagctaggagaatgggctattataatgtaaagaattgtagtctcagttaaaaggggtagcctctactccagccaacattttaaaattaatggataatttatagacagttaaatttatagacagttaagtaaaaatggataatttatagacagataatttatagacaggtaaatgtgagttaaatataactcacatcccactcaagacacaaaacattttcttaatcctagtacatttttttctgtcccttcccaatcagtgtccttttctgttccacccctaccaaaagcaagtagtggtttggtttctatcatatagattaattttacctgctcatatgaagggaattgtacatcatgcattcttttctgtttgccttttttaaattcagcatcatgtttttgtgatacatccacattgttgcatgcagctgtagtttgtttctttttattaccaagtactatttcattgtatgaatatatcacagtttatccattctactattaagacaattgagctatttctaattttcggctgctatgaataaagctgctacaaatatttttgtaca

SEQ ID NO: 164426 - DNA, 1810 bp, Homo sapiens
  Payload ID: 12392
  Gene Symbol: PMP22
  Gene Name: peripheral myelin protein 22
  Uniprot ID: Q01453
  ENST ID: ENST00000312280
  CDS Start-End: 189-671
agggaacatctcggggagcctggttggaagctgcaggcttagtctgtcggctgcgggtctctgactgccctgtggggagggtcttgccttaacatcccttgcatttggctgcaaagaaatctgcttggaagaaggggttacgctgtttggccgggcagaaactccgctgagcagaacttgccgccagaatgctcctcctgttgctgagtatcatcgtcctccacgtcgcggtgctggtgctgctgttcgtctccacgatcgtcagccaatggatcgtgggcaatggacacgcaactgatctctggcagaactgtagcacctcttcctcaggaaatgtccaccactgtttctcatcatcaccaaacgaatggctgcagtctgtccaggccaccatgatcctgtcgatcatcttcagcattctgtctctgttcctgttcttctgccaactcttcaccctcaccaaggggggcaggttttacatcactggaatcttccaaattcttgctggtctgtgcgtgatgagtgctgcggccatctacacggtgaggcacccggagtggcatctcaactcggattactcctacggtttcgcctacatcctggcctgggtggccttccccctggcccttctcagcggtgtcatctatgtgatcttgcggaaacgcgaatgaggcgcccagacggtctgtctgaggctctgagcgtacatagggaagggaggaagggaaaacagaaagcagacaaagaaaaaagagctagcccaaaatcccaaactcaaaccaaaccaaacagaaagcagtggaggtgggggttgctgttgattgaagatgtatataatatctccggtttataaaacctatttataacactttttacatatatgtacatagtattgtttgctttttatgttgaccatcagcctcgtgttgagccttaaagaagtagctaaggaactttacatcctaacagtataatccagctcagtatttttgttttgttttttgtttgtttgttttgttttacccagaaataagataactccatctcgccccttccctttcatctgaaagaagatacctccctcccagtccacctcatttagaaaaccaaagtgtgggtagaaaccccaaatgtccaaaagcccttttctggtgggtgacccagtgcatccaacagaaacagccgctgcccgaacctctgtgtgaagctttacgcgcacacggacaaaatgcccaaactggagcccttgcaaaaacacggcttgtggcattggcatacttgcccttacaggtggagtatcttcgtcacacatctaaatgagaaatcagtgacaacaagtctttgaaatggtgctatggatttaccattccttattatcactaatcatctaaacaactcactggaaatccaattaacaattttacaacataagatagaatggagacctgaataattctgtgtaatataaatggtttataactgcttttgtacctagctaggctgctattattactataatgagtaaatcataaagccttcatcactcccacatttttcttacggtcggagcatcagaacaagcgtctagactccttgggaccgtgagttcctagagcttggctgggtctaggctgttctgtgcctccaaggactgtctggcaatgacttgtattggccaccaactgtagatgtatatatggtgcccttctgatgctaagactccagaccttttgtttttgctttgcattttctgattttataccaactgtgtggactaagatgcattaaaataaacatcagagtaactcac

SEQ ID NO: 164427 - DNA, 816 bp, Homo sapiens
  Payload ID: 12392
  Gene Symbol: PMP22
  Gene Name: peripheral myelin protein 22
  ENST ID: ENST00000395936
  CDS Start-End: 148-504
tcgcgcgcgcgcagccccgcagcgcagctttggcggcgccagcagcggagccaacgcacccgagtttgtgtttgaggccaccctgaggatcgggacagctgttcctttgggctgcagaaactccgctgagcagaacttgccgccagaatgctcctcctgttgctgagtatcatcgtcctccacgtcgcggtgctggtgctgctgttcgtctccacgatcgtcagccaatggatcgtgggcaatggacacgcaactgatctctggcagaactgtagcacctcttcctcaggaaatgtccaccactgtttctcatcatcaccaaacgaatggctgcagtctgtccaggccaccatgatcctgtcgatcatcttcagcattctgtctctgttcctgttcttctgccaactcttcaccctcaccaaggggggcaggttttacatcactggaatcttccaaattcttgctgaatcaaactcaagtcaaatgtgtggttaccgggattaagaacagaaagaatagaggggactcctgagtctgtgcgtgatgagtgctgcggccatctacacggtgaggcacccggagtggcatctcaactcggattactcctacggtttcgcctacatcctggcctgggtggccttccccctggcccttctcagcggtgtcatctatgtgatcttgcggaaacgcgaatgaggcgcccagacggtctgtctgaggctctgagcgtacatagggaagggaggaagggaaaacagaaagcagacaaagaaaaaagagctagcccaaaatcccaaactcaaaccaaaccaaaca

SEQ ID NO: 164428 - DNA, 1817 bp, Homo sapiens
  Payload ID: 12392
  Gene Symbol: PMP22
  Gene Name: peripheral myelin protein 22
  Uniprot ID: Q01453
  ENST ID: ENST00000395938
  CDS Start-End: 196-678
tgttcccgttaaaggggaacgccaggagcctcccactgcccccttgcttcgcgcgcgcgcagccccgcagcgcagctttggcggcgccagcagcggagccaacgcacccgagtttgtgtttgaggccaccctgaggatcgggacagctgttcctttgggctgcagaaactccgctgagcagaacttgccgccagaatgctcctcctgttgctgagtatcatcgtcctccacgtcgcggtgctggtgctgctgttcgtctccacgatcgtcagccaatggatcgtgggcaatggacacgcaactgatctctggcagaactgtagcacctcttcctcaggaaatgtccaccactgtttctcatcatcaccaaacgaatggctgcagtctgtccaggccaccatgatcctgtcgatcatcttcagcattctgtctctgttcctgttcttctgccaactcttcaccctcaccaaggggggcaggttttacatcactggaatcttccaaattcttgctggtctgtgcgtgatgagtgctgcggccatctacacggtgaggcacccggagtggcatctcaactcggattactcctacggtttcgcctacatcctggcctgggtggccttccccctggcccttctcagcggtgtcatctatgtgatcttgcggaaacgcgaatgaggcgcccagacggtctgtctgaggctctgagcgtacatagggaagggaggaagggaaaacagaaagcagacaaagaaaaaagagctagcccaaaatcccaaactcaaaccaaaccaaacagaaagcagtggaggtgggggttgctgttgattgaagatgtatataatatctccggtttataaaacctatttataacactttttacatatatgtacatagtattgtttgctttttatgttgaccatcagcctcgtgttgagccttaaagaagtagctaaggaactttacatcctaacagtataatccagctcagtatttttgttttgttttttgtttgtttgttttgttttacccagaaataagataactccatctcgccccttccctttcatctgaaagaagatacctccctcccagtccacctcatttagaaaaccaaagtgtgggtagaaaccccaaatgtccaaaagcccttttctggtgggtgacccagtgcatccaacagaaacagccgctgcccgaacctctgtgtgaagctttacgcgcacacggacaaaatgcccaaactggagcccttgcaaaaacacggcttgtggcattggcatacttgcccttacaggtggagtatcttcgtcacacatctaaatgagaaatcagtgacaacaagtctttgaaatggtgctatggatttaccattccttattatcactaatcatctaaacaactcactggaaatccaattaacaattttacaacataagatagaatggagacctgaataattctgtgtaatataaatggtttataactgcttttgtacctagctaggctgctattattactataatgagtaaatcataaagccttcatcactcccacatttttcttacggtcggagcatcagaacaagcgtctagactccttgggaccgtgagttcctagagcttggctgggtctaggctgttctgtgcctccaaggactgtctggcaatgacttgtattggccaccaactgtagatgtatatatggtgcccttctgatgctaagactccagaccttttgtttttgctttgcattttctgattttataccaactgtgtggactaagatgcattaaaataaacatcagagtaactcac

SEQ ID NO: 164429 - DNA, 571 bp, Homo sapiens
  Payload ID: 12392
  Gene Symbol: PMP22
  Gene Name: peripheral myelin protein 22
  ENST ID: ENST00000426385
  CDS Start-End: 123-500
agctttggcggcgccagcagcggagccaacgcacccgagtttgtgtttgaggccaccctgaggatcgggacagctgttcctttgggctgcagaaactccgctgagcagaacttgccgccagaatgctcctcctgttgctgagtatcatcgtcctccacgtcgcggtgctggtgctgctgttcgtctccacgatcgtcagccaatggatcgtgggcaatggacacgcaactgatctctggcagaactgtagcacctcttcctcaggaaatgtccaccactgtttctcatcatcaccaaacgaatggctgcagtctgtccaggccaccatgatcctgtcgatcatcttcagcattctgtctctgttcctgttcttctgccaactcttcaccctcaccaaggggggcaggttttacatcactggaatcttccaaattcttgctggtaagttgtggatggtaaagtccatgtggaagcggggtgcatccaagtctgcggaatgattagtttagtagaaggatgtggcctcagaatgactgatgttcatgagtctccccactggatgctttccata

SEQ ID NO: 164430 - DNA, 872 bp, Homo sapiens
  Payload ID: 12392
  Gene Symbol: PMP22
  Gene Name: peripheral myelin protein 22
  ENST ID: ENST00000494511
  CDS Start-End: 168-653
gggagcaccaccagggaacatctcggggagcctggttggaagctgcaggcttagtctgtcggctgcgggtctctgactgccctgtggggagggtcttgccttaacatcccttgcatttggctgcaaagaaatctgcttggaagaaggggttacgctgtttggccggaatggctgcagtctgtccaggccaccatgatcctgtcgatcatcttcagcattctgtctctgttcctgttcttctgccaactcttcaccctcaccaaggggggcaggttttacatcactggaatcttccaaattcttgctggtctgtgcgtgatgagtgctgcggccatctacacggtgaggcacccggagtggcatctcaactcggattactcctacggtttcgcctacatcctggcctgggtggccttccccctggcccttctcagcggtgtcatctatgtgatcttgcggaaacgcgaatgaggcgcccagacggtctgtctgaggctctgagcgtacatagggaagggaggaagggaaaacagaaagcagacaaagaaaaaagagctagcccaaaatcccaaactcaaaccaaaccaaacagaaagcagtggaggtgggggttgctgttgattgaagatgtatataatatctccggtttataaaacctatttataacactttttacatatatgtacatagtattgtttgctttttatgttgaccatcagcctcgtgttgagccttaaagaagtagctaaggaactttacatcctaacagtataatccagctcagtatttttgttttgttttttgtttgtttgttttgttttacccagaaataagataactccatctcgccccttccctttcatctgaaagaa

SEQ ID NO: 164431 - DNA, 428 bp, Homo sapiens
  Payload ID: 12392
  Gene Symbol: PMP22
  Gene Name: peripheral myelin protein 22
  ENST ID: ENST00000580584
  CDS Start-End: 275-428
agttacagggagcaccaccagggaacatctcggggagcctggttggaagctgcaggcttagtctgtcggctgcgggtctctgactgccctgtggggagggtcttgccttaacatcccttgcatttggctgcaaagaaatctgcttggaagaaggggttacgctgtttggccggcaatggatcgtgggcaatggacacgcaactgatctctggcagaactgtagcacctcttcctcaggaaatgtccaccactgtttctcatcatcaccaaacgaatggctgcagtctgtccaggccaccatgatcctgtcgatcatcttcagcattctgtctctgttcctgttcttctgccaactcttcaccctcaccaaggggggcaggttttacatcactggaatcttccaaattcttgctggtctgtgcgtgatg

SEQ ID NO: 164432 - DNA, 1822 bp, Homo sapiens
  Payload ID: 12392
  Gene Symbol: PMP22
  Gene Name: peripheral myelin protein 22
  Uniprot ID: Q01453
  ENST ID: ENST00000612492
  CDS Start-End: 200-682
tgttcccgttaaaggggaacgccaggagcctcccactgcccccttgcttcgcgcgcgcgcagccccgcagcgcagctttggcggcgccagcagcggagccaacgcacccgagtttgtgtttgaggccaccctgaggatcgggacagctgttcctttgggctgtaagcagaaactccgctgagcagaacttgccgccagaatgctcctcctgttgctgagtatcatcgtcctccacgtcgcggtgctggtgctgctgttcgtctccacgatcgtcagccaatggatcgtgggcaatggacacgcaactgatctctggcagaactgtagcacctcttcctcaggaaatgtccaccactgtttctcatcatcaccaaacgaatggctgcagtctgtccaggccaccatgatcctgtcgatcatcttcagcattctgtctctgttcctgttcttctgccaactcttcaccctcaccaaggggggcaggttttacatcactggaatcttccaaattcttgctggtctgtgcgtgatgagtgctgcggccatctacacggtgaggcacccggagtggcatctcaactcggattactcctacggtttcgcctacatcctggcctgggtggccttccccctggcccttctcagcggtgtcatctatgtgatcttgcggaaacgcgaatgaggcgcccagacggtctgtctgaggctctgagcgtacatagggaagggaggaagggaaaacagaaagcagacaaagaaaaaagagctagcccaaaatcccaaactcaaaccaaaccaaacagaaagcagtggaggtgggggttgctgttgattgaagatgtatataatatctccggtttataaaacctatttataacactttttacatatatgtacatagtattgtttgctttttatgttgaccatcagcctcgtgttgagccttaaagaagtagctaaggaactttacatcctaacagtataatccagctcagtatttttgttttgttttttgtttgtttgttttgttttacccagaaataagataactccatctcgccccttccctttcatctgaaagaagatacctccctcccagtccacctcatttagaaaaccaaagtgtgggtagaaaccccaaatgtccaaaagcccttttctggtgggtgacccagtgcatccaacagaaacagccgctgcccgaacctctgtgtgaagctttacgcgcacacggacaaaatgcccaaactggagcccttgcaaaaacacggcttgtggcattggcatacttgcccttacaggtggagtatcttcgtcacacatctaaatgagaaatcagtgacaacaagtctttgaaatggtgctatggatttaccattccttattatcactaatcatctaaacaactcactggaaatccaattaacaattttacaacataagatagaatggagacctgaataattctgtgtaatataaatggtttataactgcttttgtacctagctaggctgctattattactataatgagtaaatcataaagccttcatcactcccacatttttcttacggtcggagcatcagaacaagcgtctagactccttgggaccgtgagttcctagagcttggctgggtctaggctgttctgtgcctccaaggactgtctggcaatgacttgtattggccaccaactgtagatgtatatatggtgcccttctgatgctaagactccagaccttttgtttttgctttgcattttctgattttataccaactgtgtggactaagatgcattaaaataaacatcagagtaactcact

SEQ ID NO: 164433 - DNA, 3245 bp, Homo sapiens
  Payload ID: 12393
  Gene Symbol: PRPH
  Gene Name: peripherin
  Uniprot ID: P41219
  ENST ID: ENST00000257860
  CDS Start-End: 1500-2912
agatgcactctcttgtcctcaggtcccatctgaggcagacctgtctcacaggacagcgctggagtccccagcagcagcagcagccccagccctatggttcctggcaaacccagcagacctcagcaacccggctcctgcagaccatccgagctgcctctgtccactcctgggcaggttgtgcttgcattctggaagctgtttgacatacaaaggccagatatcagccttctcgctaactctggagtaggggagggtgtggtgggatgtgtgattgtgtgtgtatgtgtgtgtatgtagtgtgtgtgcgcatagatatacaaagctgtgtgtatgcatctgtttgcgtgcgcaggtttgtggacctgttctggggccttctctctttcagactgctggggatgggcactttctctttccccatctcttccccatccagccccacccatccctggtacctgcaactcatcaatactggaaaccagctcctgccagtccatccatctctcagccttggcagccgctgttgcccctcagccccctccccttcctacctcaggaatcactctggttcctgtaaagcccatgactgagcagcaattggtgtggggttggggggagggagaatccagtaaaccaagacagaatacaaaaggcccacttagcccagcccgtggcatggggcagaccctcccgagtgggatccagagctgggtccagccaccctcagccccctatgatgtacccacctcattggggcttgttgcggggtaggtctaggtttgggggctgtgtctttaaggctgaaacatcagcagacaacctctgctgggccgtcttcaggggagggggaggggggctggtcagcccattagcagcagagctggcgccaggcaccagcccttcacagggccctggggattagggagagtagctcttccccagcccgatctgcctctgcgcccctgtctcctattcctctctgggtgtggtgaaggaggggtagctgacagcaggtgaaaatagagcctggccttcagggggcaagtcaaggcactagctatggggcctaagccaggtcaactctccctccagctggcctcctccctactcctgtgccagaagcctgccctttaacttcaggtccttctacctcgcaattttcagggactctagttcaagtcaggccttcctaccctaggttctagctttgggtgcttgttgggaggaagtgacccccaccccagcggcaacagggggcaatcaagtgggtagaggcctgcaaccagggaagggaggggaaggcgctcctgctgttccgcaggggtggggcatccccctccccatacaacccccctccagcgggccatcaggccagtgggaggagctgcccgtgccccccctgagaccgcagggctataaagccgcctcgcagcggtctgcggctccttcccagcccccggcctagctctgcgaacggtgactgcccatccttggccgcaatgagccaccacccgtcgggcctccgggccggcttcagctccacctcataccgccgtaccttcggtccaccgccctcactatcccccggggccttctcctactcgtccagctcccgcttctccagcagccgcctgctgggctccgcgtccccgagctcctcggtgcgcctgggcagcttccgtagcccccgagcgggagcgggcgccctcctgcgcctgccctcggagcgcctcgacttctccatggccgaggccctcaaccaggagttcctggccacgcgcagcaacgagaagcaggagctgcaggagctcaacgaccgcttcgccaacttcatcgagaaggtacgctttctggagcagcagaacgcggccctgcgcggggagctgagccaagcccggggccaggagccggcgcgcgccgaccagctgtgccagcaggagctgcgcgagctgcggcgagagctggagctgttgggccgcgagcgtgaccgggtgcaggtggagcgcgacgggctggcggaggacctggcggcgctcaagcagaggttggaggaggagacgcgcaagcgggaggacgcggagcacaacctcgtgctcttccgcaaggacgtggacgatgccactctgtcccgcctggaactagagcgcaagattgagtctctgatggatgagattgagttcctcaagaagctgcacgaggaggagctgcgagacctgcaggtgagtgtggagagccagcaggtgcagcaggtggaggtggaagccacggtgaagcccgagctgacggcagcgctgagggacatccgcgcgcagtacgagagcatcgccgcgaagaacctgcaggaggcggaggagtggtacaagtccaagtacgcggacctgtccgacgctgccaaccggaaccacgaggccctgcgccaggccaagcaggagatgaacgagtcccgacgccagatccagagtctaacgtgcgaggtggacgggctgcgcggcacgaacgaggcgctgctcaggcagttgagagagctggaggagcagttcgccctggaggcggggggctaccaggcgggcgctgcgcggctcgaggaggagctgcgacagctaaaagaggagatggcgcggcacctgagggagtaccaggagctcctcaacgtcaagatggccctggacatcgagatcgccacctaccgcaagctgctggagggcgaggagagccggatctccgtgcccgtccattcttttgcctccttaaatataaagacgactgtgcctgaggtggagcctccccaggacagccacagccggaagacggttctgatcaagaccattgagacccggaatggggaggtggtgacagagtcccagaaggagcagcgcagtgagctggacaagtcttctgcccacagttactgaaccccttggtccggagccttgactctgccctaggcctgctcaaagcccaaaccctaagaccactcctgaattgtctcctctccctctgcatgtgtctaaaaggtggtaccaggcatccctttcctggcttatggccaagccctacccggccagcagtcgctgggcctctccctgccctgacacttgatgtgacctatgtgcttcccttttcatgtcccgataagaagccaatgatcccccctcaggacaaatctactccagccacgatgagaagtgggtgagccagggtctgagtttcacatttgaaccaaataaaatgctgtcaagagaaaa

SEQ ID NO: 164434 - DNA, 704 bp, Homo sapiens
  Payload ID: 12393
  Gene Symbol: PRPH
  Gene Name: peripherin
  ENST ID: ENST00000451891
  CDS Start-End: 83-704
ggtgcgcctgggcagcttccgtagcccccgagcgggagcgggcgccctcctgcgcctgccctcggagcgcctcgacttctccatggccgaggccctcaaccaggagttcctggccacgcgcagcaacgagaagcaggagctgcaggagctcaacgaccgcttcgccaacttcatcgagaaggagctgcgcgagctgcggcgagagctggagctgttgggccgcgagcgtgaccgggtgcaggtggagcgcgacgggctggcggaggacctggcggcgctcaagcagaggttggaggaggagacgcgcaagcgggaggacgcggagcacaacctcgtgctcttccgcaaggacgtggacgatgccactctgtcccgcctggaactagagcgcaagattgagtctctgatggatgagattgagttcctcaagaagctgcacgaggaggagctgcgagacctgcaggtgagtgtggagagccagcaggtgcagcaggtggaggtggaagccacggtgaagcccgagctgacggcagcgctgagggacatccgcgcgcagtacgagagcatcgccgcgaagaacctgcaggaggcggaggagtggtacaagtccaagtacgcggacctgtccgacgctgccaaccggaaccacgaggccctgcgccaggccaagcaggagatgaacgagtcccgacgccagatccaga

SEQ ID NO: 164435 - DNA, 840 bp, Homo sapiens
  Payload ID: 12393
  Gene Symbol: PRPH
  Gene Name: peripherin
  ENST ID: ENST00000532332
  CDS Start-End: 1-601
cgagagcatcgccgcgaagaacctgcaggaggcggaggagtggtacaagtccaagtacgcggacctgtccgacgctgccaaccggaaccacgaggccctgcgccaggccaagcaggagatgaacgagtcccgacgccagatccagagtctaacgtgcgaggtggacgggctgcgcggcacgaacgaggcgctgctcaggcagttgagagagctggaggagcagttcgccctggaggcggggggctaccaggcgggcgctgcgcggctcgaggaggagctgcgacagctaaaagaggagatggcgcggcacctgagggagtaccaggagctcctcaacgtcaagatggccctggacatcgagatcgccacctaccgcaagctgctggagggcgaggagagccggatctccgtgcccgtccattcttttgcctccttaaatataaagacgactgtgcctgaggtggagcctccccaggacagccacagccggaagacggttctgatcaagaccattgagacccggaatggggagcaggtggtgacagagtcccagaaggagcagcgcagtgagctggacaagtcttctgcccacagttactgaaccccttggtccggagccttgactctgccctaggcctgctcaaagcccaaaccctaagaccactcctgaattgtctcctctccctctgcatgtgtctaaaaggtggtaccaggcatccctttcctggcttatggccaagccctacccggccagcagtcgctgggcctctccctgccctgacacttgatgtgacctatgtgcttcccttttcatgtcccgataagaagccaatgatcccc

SEQ ID NO: 164436 - DNA, 2976 bp, Homo sapiens
  Payload ID: 12394
  Gene Symbol: PRPH2
  Gene Name: peripherin 2 (retinal degeneration, slow)
  Uniprot ID: P23942
  ENST ID: ENST00000230381
  CDS Start-End: 241-1281
caacgcccaggaccaggactatcccctgctcaagctgtgattccgagacccctgccaccactactgcattcacggggatcccaggctagtgggactcgacatgggtagcccccagggcagctccctacagcttgggccatctgcacttttcccaaggccctaagtctccgcctctgggctcgttaaggtttggggtgggagctgtgctgtgggaagcaacccggactacacttggcaagcatggcgctactgaaagtcaagtttgaccagaagaagcgggtcaagttggcccaagggctctggctcatgaactggttctccgtgttggctggcatcatcatcttcagcctaggactgttcctgaagattgaactccgaaagaggagcgatgtgatgaataattctgagagccattttgtgcccaactcattgatagggatgggggtgctatcctgtgtcttcaactcgctggctgggaagatctgctacgacgccctggacccagccaagtatgccagatggaagccctggctgaagccgtacctggctatctgtgttctcttcaacatcatcctcttccttgtggctctctgctgctttctgcttcggggctcgctggagaacaccctgggccaagggctcaagaacggcatgaagtactaccgggacacagacacccctggcaggtgtttcatgaagaagaccatcgacatgctgcagatcgagttcaaatgctgcggcaacaacggttttcgggactggtttgagattcagtggatcagcaatcgctacctggacttttcctccaaagaagtcaaagatcgaatcaagagcaacgtggatgggcggtacctggtggacggcgtccctttcagctgctgcaatcctagctcgccacggccctgcatccagtatcagatcaccaacaactcagcacactacagttacgaccaccagacggaggagctcaacctgtgggtgcgtggctgcagggctgccctgctgagctactacagcagcctcatgaactccatgggtgtcgtcacgctcctcatttggctcttcgaggtgaccattacaattgggctgcgctacctacagacgtcgctggatggtgtgtccaaccccgaggaatctgagagcgagagccagggctggctgctggagaggagcgtgccggagacctggaaggcctttctggagagtgtgaagaagctgggcaagggcaaccaggtggaagccgagggcgcagacgcaggccaggccccagaggctggctgagggccctggggcccctcccctcccgaacactgagaaatagtgcactccaagaaacgtggatctccccctcatccaactccgaaagtctgaatctcccaaggagggcaccatcttacagagactctccctgacggtggaatttaagtttagggtccctaaaagcatttgacacacagttgttgaatgactgacccaaaatgtgaatgaagctaatgtgaatgtgagtgaagctcccttcaggcccgctgccctaggatatgccctcctggtgactcgggggctgtctcagacgactagcccaggacccatctttctcacacggatttagtcccaccctatggccactggccgtatctgagggctgctccccttttagaatttacctcttatgagctccatgttgcttcactctatccaaagtgtcacttggtgcataagcacagaaatctgaaaaatggccatgttgtcttttttttttttttttaatgccaagattgacaggttggccgtttgcttaatgccagaagttgggggaaagttacgcttttctaagaataatggactcttaaggcattgagggctctaaacaggattctttaatcatggagcaagagaatttcaaggcaggggattttatcccccaccaaaaacacagtgaaaggcctgcttttgtgtcccattcacatgccctcggtcactgagtctggagtgaaccacgggttgaggaagtcaggctgttggcgtgtcccagcaccacaccacccctaaagtgccaggtgatctcctgtggctcatcggtggaagcagtggggtaggctgctgccctgctgtggaagaggagcaacaatcagacatgagtccaccctttggagaccaggcctcagctcttggtgggcccagggacacccacacaggtggccatcacagccccatggacaacactaattgtccacagcaaagggcaaggaatcctctgggagcttcttccgtttcttccccccagatacccatcttgaaaaacactatttctggaatgcttctgcatcaaaggagattctttgagatagcccatcttcctgagctagcaaatacaggagttttcactttctttaggaaagagaagctttcaggggaaggagagaatgattttgctgacttcccaagccctggtgaccagaccaaggcagggcccagcataattcctccagttggatgaacattcaagagagctcgttcctacctggctggagaccgaggccagaaggcaaaaaccagaaagggaacagtccataacttacctctgcttctgaccgatggtgtttgggaataggttactttggactgagtttgggttctctgctgtcctaagaacttcagtgtagagaaaataagacttctggtgctgctggggtatgttctgggcttaattcccccaagcagaagaccagatccaagatgtttggacaccctgtcagacgttggtcccaagtttaattagatttctgaatctcgttgaggccaaggaatgatccatactgaaaaaatgctgagccagccatctttggcaaaggtccctgagctcttgctatctctcaagagtgctgagaaccacggtgaaagtgctgctctaggcccacaagtgtaactatgctgttaacagctgtcaatagataattaaaattcatactgtatgaa

SEQ ID NO: 164437 - DNA, 1820 bp, Homo sapiens
  Payload ID: 12395
  Gene Symbol: PPHLN1
  Gene Name: periphilin 1
  ENST ID: ENST00000256678
  CDS Start-End: 182-1273
acctgggataacggcggcgagcggacggctgcatttacggggtctcccggagggccagagtcggtgggacgagagactgagaaaagaaataagacacagagacaaagtatagagaaagaacagtgggcccaggagaccaacacttagcatatggaggacctgcaccggcaccagtctggacatgagagatggctttagaagaaaaagtttctactcttcccattatgcgagagagcggtctccttataaaagggacaatacttttttcagagaatcacctgttggccgaaaggattctccacacagcagatctggttccagtgtcagtagcagaagctactctccagaaaggagcaaatcatactctttccatcagtctcaacatagaaataaagagaggcctgtccagtctttgaaaacatcaagagatacttcaccctcaagtggttcagcagtttcttcatcaaaggtgttagacaaacccagtaggctaactgaaaaggaacttgctgaggctgcaagcaagtgggctgctgaaaagctagagaaatcagatgaaagtaacttgcctgaaatttctgagtatgaggcgggatccacagcaccattgtttactgaccagccagaggaacctgagtcaaacacaacacatgggatagaattatttgaagatagtcagctaaccactcgctctaaagcaatagcatcaaaaaccaaagagattgaacaggtttaccgacaagactgtgaaactttcgggatggtggtgaaaatgctgattgaaaaagatccttcattagaaaagtctatacagtttgcattgaggcagaatttacatgaaatagagtctgcaggacagacttggcagcaggtaccccctgtgaggaacactgaaatggatcacgacggaacccccgaaaacgaaggcgaagagactgcgcagtcacacgacgcatcaaaccataccatagtggggctaggacccaaccaagtaccagaaatgaaggaaacgaccctgcaggccccgcagcccccgcaggccccgcagcccctgcagccccggaagaaacgggttcgtcggacgacacagcttcgtcggacgacaggagccccagacattacctgggggatgctgaagaagacaactcaggaggctgagaggatcctgctccgaacacagacaccattcactccagaaaatttgttccttgctatgctctctgttgtacattgcaactcacgcaaggatgtaaagccagaaaacaagcagtaactgctatgcctgacaaaactgttgctgcacacatctgtactcgtcaatcaacaaaacctgatgcaaaaaacagaaaaggggtgatgtaggagatggtcaggttggtaggagaagctataaggaaagacgcaattggaaggtcgggaggttttccaaagcttcaggagagaataaagctgaaggcagctttattaattaattctcttaccctgaggctgagggcgaacagtaggtagcaagggagtgtaaaggaatttatctagataagtttgtttacttatgccctccggaaatcatgcaagactgctccctgcaaaggggggcgacaatgttcattactcacaaattgtgttggcttcaggcctttggtattctgtctctactgaataaatacaaatggttccagcctatcaggactgcactctcttctcggctgcactaaagctggcactcccccagccgttctcatgcaaaatacctgtgtcagaatactcctttcatccatcactcagccagagtcttcaggacagactccgcatgggacttg

SEQ ID NO: 164438 - DNA, 1359 bp, Homo sapiens
  Payload ID: 12395
  Gene Symbol: PPHLN1
  Gene Name: periphilin 1
  ENST ID: ENST00000317560
  CDS Start-End: 99-1010
ataacggcggcgagcggacggctgcatttacggggtctcccggagggccagagtcggaaattgttgaaaacgttaaatttgattcctaaaaggactcaatggcttacagaagagacgaaatgtggtctgagggacgatatgaatatgaaagaattccgagagaacgagcacctcctcgaagtcatcccagtgatgaatctggttatagatggacaagagacgatcattctgcaagcaggcaacctgaatacagggacatgagagatggctttagaagaaaaagtttctactcttcccattatgcgagagagcggtctccttataaaagggacaatacttttttcagagaatcacctgttggccgaaaggattctccacacagcagatctggttccagtgtcagtagcagaagctactctccagaaaggagcaaatcatactctttccatcagtctcaacatagaaataaagagaggcctgtccagtctttgaaaacatcaagagatacttcaccctcaagtggttcagcagtttcttcatcaaaggtgttagacaaacccagtaggctaactgaaaaggaacttgctgaggctgcaagcaagtgggctgctgaaaagctagagaaatcagatgaaagtaacttgcctgaaatttctgagtatgaggcgggatccacagcaccattgtttactgaccagccagaggaacctgagtcaaacacaacacatgggatagaattatttgaagatagtcagctaaccactcgctctaaagcaatagcatcaaaaaccaaagagattgaacaggtttaccgacaagactgtgaaactttcgggatggtggtgaaaatgctgattgaaaaagatccttcattagaaaagtctatacagtttgcattgaggcagaatttacatgaaatagctggcgctgatacaatacaatgtttacctggccaaagagggttcgaggggacaagctggcctcacaataagatgcacagtgttagctaggtcatcgtgacaggcatgcctcacaccaagacggactatcaagacctgagccgacctgacttacataaatgacaaacactagtgctttacaaaggtggctggagttctccatcttctaaaatcaacatccaatccccttcagtcagcatcttcagtattcccttgaggactggaaaaccaaagcagctacgtccatctgtaacgcacccgcaccggacaggcacgagatgtcacgtccacctggcaccatccaaagagggtaaattggagaaatcacacctttcaaatgttaatctgacactgtaaacagcagttgagttctcatttacatgggcaaagaaagcacttt

SEQ ID NO: 164439 - DNA, 1465 bp, Homo sapiens
  Payload ID: 12395
  Gene Symbol: PPHLN1
  Gene Name: periphilin 1
  ENST ID: ENST00000337898
  CDS Start-End: 106-1128
attgcgcgcgccggaagtacctacctgggataacggcggcgagcggacggctgcatttacggggtctcccggagggccagagtcgtggcttacagaagagacgaaatgtggtctgagggacgatatgaatatgaaagaattccgagagaacgagcacctcctcgaagtcatcccagtgatgaatctggttatagatggacaagagacgatcattctgcaagcaggcaacctgaatacagggacatgagagatggctttagaagaaaaagtttctactcttcccattatgcgagagagcggtctccttataaaagggacaatacttttttcagagaatcacctgttggccgaaaggattctccacacagcagatctggttccagtgtcagtagcagaagctactctccagaaaggagcaaatcatactctttccatcagtctcaacatagaaagtccgtgcgtcctggtgcctcctacaaacggcagaatgaaggaaatcctgaaagagataaagagaggcctgtccagtctttgaaaacatcaagagatacttcaccctcaagtggttcagcagtttcttcatcaaaggtgttagacaaacccagtaggctaactgaaaaggaacttgctgaggctgcaagcaagtgggctgctgaaaagctagagaaatcagatgaaagtaacttgcctgaaatttctgagtatgaggcgggatccacagcaccattgtttactgaccagccagaggaacctgagtcaaacacaacacatgggatagaattatttgaagatagtcagctaaccactcgctctaaagcaatagcatcaaaaaccaaagagattgaacaggtttaccgacaagactgtgaaactttcgggatggtggtgaaaatgctgattgaaaaagatccttcattagaaaagtctatacagtttgcattgaggcagaatttacatgaaatagagtctgcaggacagacttggcagcaggtaccccctgtgaggaacactgaaatggatcacgacggaacccccgaaaacgaaggcgaagagactgcgcagtcaaaccttgaaacagccctcattaagtctactctcgagccggccctgtgtgccttttttctttgacttcagtaattgctaaatcaatgtacacattctatttttatcacacatatttgagcccacagctcactgcctgacccactggcttatggcaatgatcaagcagacctgcaggttatgatgtcactgcttaaccaagccacccaatcacatcaatttttccaccaaaattagagaaacttaactaaacaatgtcaacttacccagagactagctaaacaaattatcctgcaatgcccagattgccagctcacaggcacgtcccctccttcaacaggtgttaaccctagaggactagaacctaatcagttatggcaaacagatgttacacatgtccctg

SEQ ID NO: 164440 - DNA, 1643 bp, Homo sapiens
  Payload ID: 12395
  Gene Symbol: PPHLN1
  Gene Name: periphilin 1
  Uniprot ID: Q8NEY8
  ENST ID: ENST00000358314
  CDS Start-End: 94-1197
ggaagtacctacctgggataacggcggcgagcggacggctgcatttacggggtctcccggagggccagagtcgtggcttacagaagagacgaaatgtggtctgagggacgatatgaatatgaaagaattccgagagaacgagcacctcctcgaagtcatcccagtgatggctacaatagactagttaatattgtgccaaagaaaccaccactgctagacagacctggtgaaggaagctacaatagatattacagtcatgttgattaccgagactatgacgagggccgcagtttttctcatgatcgaagaagtggtccacctcacagaggagatgaatctggttatagatggacaagagacgatcattctgcaagcaggcaacctgaatacagggacatgagagatggctttagaagaaaaagtttctactcttcccattatgcgagagagcggtctccttataaaagggacaatacttttttcagagaatcacctgttggccgaaaggattctccacacagcagatctggttccagtgtcagtagcagaagctactctccagaaaggagcaaatcatactctttccatcagtctcaacatagaaagtccgtgcgtcctggtgcctcctacaaacggcagaatgaaggaaatcctgaaagagataaagagaggcctgtccagtctttgaaaacatcaagagatacttcaccctcaagtggttcagcagtttcttcatcaaaggtgttagacaaacccagtaggctaactgaaaaggaacttgctgaggctgcaagcaagtgggctgctgaaaagctagagaaatcagatgaaagtaacttgcctgaaatttctgagtatgaggcgggatccacagcaccattgtttactgaccagccagaggaacctgagtcaaacacaacacatgggatagaattatttgaagatagtcagctaaccactcgctctaaagcaatagcatcaaaaaccaaagagattgaacaggtttaccgacaagactgtgaaactttcgggatggtggtgaaaatgctgattgaaaaagatccttcattagaaaagtctatacagtttgcattgaggcagaatttacatgaaataggtgagcggtgtgttgaagaactcaagcatttcattgcagagtatgatacttccactcaagattttggagagcctttttagatttttctgctcaggctaaaaaaaaaaaaaaacagtttctaaaaattttttttcctggattgtgtaaatccttaatatatggaatttttgtgatgcagagaaatactttatgatagttgacaacatttcagtattaaataaacatctaaaatagtctgtttaaaatgtttgattcaaatttttgtattttttgtagagatggggttcaccatgttggccaggctagtctctaactcctggcctcaagtgatctgcctgcctcagcctctcaaagtgttgagattacaggcgtgagccaccgctccctgcccaacacatataccatctgaaaatgttagaattctgagttgtgattttattgacttgttgcttgctttttcttaggctttgtaacttgtaatatgttaaagtgtactatcctaataaactgaatactttggtatctt

SEQ ID NO: 164441 - DNA, 2170 bp, Homo sapiens
  Payload ID: 12395
  Gene Symbol: PPHLN1
  Gene Name: periphilin 1
  Uniprot ID: Q8NEY8
  ENST ID: ENST00000395568
  CDS Start-End: 85-1461
tacctgggataacggcggcgagcggacggctgcatttacggggtctcccggagggccagagtcgtggcttacagaagagacgaaatgtggtctgagggacgatatgaatatgaaagaattccgagagaacgagcacctcctcgaagtcatcccagtgatggctacaatagactagttaatattgtgccaaagaaaccaccactgctagacagacctggtgaaggaagctacaatagatattacagtcatgttgattaccgagactatgacgagggccgcagtttttctcatgatcgaagaagtggtccacctcacagaggagatgaatctggttatagatggacaagagacgatcattctgcaagcaggcaacctgaatacagggacatgagagatggctttagaagaaaaagtttctactcttcccattatgcgagagagcggtctccttataaaagggacaatacttttttcagagaatcacctgttggccgaaaggattctccacacagcagatctggttccagtgtcagtagcagaagctactctccagaaaggagcaaatcatactctttccatcagtctcaacatagaaagtccgtgcgtcctggtgcctcctacaaacggcagaatgaaggaaatcctgaaagagataaagagaggcctgtccagtctttgaaaacatcaagagatacttcaccctcaagtggttcagcagtttcttcatcaaaggtgttagacaaacccagtaggctaactgaaaaggaacttgctgaggctgcaagcaagtgggctgctgaaaagctagagaaatcagatgaaagtaacttgcctgaaatttctgagtatgaggcgggatccacagcaccattgtttactgaccagccagaggaacctgagtcaaacacaacacatgggatagaattatttgaagatagtcagctaaccactcgctctaaagcaatagcatcaaaaaccaaagagattgaacaggtttaccgacaagactgtgaaactttcgggatggtggtgaaaatgctgattgaaaaagatccttcattagaaaagtctatacagtttgcattgaggcagaatttacatgaaatagagtctgcaggacagacttggcagcaggtaccccctgtgaggaacactgaaatggatcacgacggaacccccgaaaacgaaggcgaagagactgcgcagtcagccccgcagcccccgcaggccccgcagcccctgcagccccggaagaaacgggttcgtcggacgacacagcttcgtcggacgacaggagccccagacattacctgggggatgctgaagaagacaactcaggaggctgagaggatcctgctccgaacacagacaccattcactccagaaaatttgttccttgctatgctctctgttgtacattgcaactcacgcaaggatgtaaagccagaaaacaagcagtaactgctatgcctgacaaaactgttgctgcacacatctgtactcgtcaatcaacaaaacctgatgcaaaaaacagaaaaggggtgatgtaggagatggtcaggttggtaggagaagctataaggaaagacgcaattggaaggtcgggaggttttccaaagcttcaggagagaataaagctgaaggcagctttattaattaattctcttaccctgaggctgagggcgaacagtaggtagcaagggagtgtaaaggaatttatctagataagtttgtttacttatgccctccggaaatcatgcaagactgctccctgcaaaggggggcgacaatgttcattactcacaaattgtgttggcttcaggcctttggtattctgtctctactgaataaatacaaatggttccagcctatcaggactgcactctcttctcggctgcactaaagctggcactcccccagccgttctcatgcaaaatacctgtgtcagaatactcctttcatccatcactcagccagagtcttcaggacagactccgcatgggacttgtccaaaaaaactctaatcaaaagaggaaaattttggaatatgccaggaatagtggaattttattttttaaatttttttataggcccatatgctctatctcaagaaacaagatgattgtaacatgtccatgattaaactattggcagattattgctgtgttaa

SEQ ID NO: 164442 - DNA, 1693 bp, Homo sapiens
  Payload ID: 12395
  Gene Symbol: PPHLN1
  Gene Name: periphilin 1
  Uniprot ID: Q8NEY8
  ENST ID: ENST00000395580
  CDS Start-End: 128-1252
attgcgcgcgccggaagtacctacctgggataacggcggcgagcggacggctgcatttacggggtctcccggagggccagagtcggaaattgttgaaaacgttaaatttgattcctaaaaggactcaatggcttacagaagagacgaaatgtggtctgagggacgatatgaatatgaaagaattccgagagaacgagcacctcctcgaagtcatcccagtgatggctacaatagactagttaatattgtgccaaagaaaccaccactgctagacagacctggtgaaggaagctacaatagatattacagtcatgttgattaccgagactatgacgagggccgcagtttttctcatgatcgaagaagtggtccacctcacagaggagatgaatctggttatagatggacaagagacgatcattctgcaagcaggcaacctgaatacagggacatgagagatggctttagaagaaaaagtttctactcttcccattatgcgagagagcggtctccttataaaagggacaatacttttttcagagaatcacctgttggccgaaaggattctccacacagcagatctggttccagtgtcagtagcagaagctactctccagaaaggagcaaatcatactctttccatcagtctcaacatagaaagtccgtgcgtcctggtgcctcctacaaacggcagaatgaaggaaatcctgaaagagataaagagaggcctgtccagtctttgaaaacatcaagagatacttcaccctcaagtggttcagcagtttcttcatcaaaggtgttagacaaacccagtaggctaactgaaaaggaacttgctgaggctgcaagcaagtgggctgctgaaaagctagagaaatcagatgaaagtaacttgcctgaaatttctgagtatgaggcgggatccacagcaccattgtttactgaccagccagaggaacctgagtcaaacacaacacatgggatagaattatttgaagatagtcagctaaccactcgctctaaagcaatagcatcaaaaaccaaagagattgaacaggtttaccgacaagactgtgaaactttcgggatggtggtgaaaatgctgattgaaaaagatccttcattagaaaagtctatacagtttgcattgaggcagaatttacatgaaataggtgagcggtgtgttgaagaactcaagcatttcattgcagagtatgatacttccactcaagattttggagagcctttttagatttttctgctcaggctaaaaaaaaaaaaaaacagtttctaaaaattttttttcctggattgtgtaaatccttaatatatggaatttttgtgatgcagagaaatactttatgatagttgacaacatttcagtattaaataaacatctaaaatagtctgtttaaaatgtttgattcaaatttttgtattttttgtagagatggggttcaccatgttggccaggctagtctctaactcctggcctcaagtgatctgcctgcctcagcctctcaaagtgttgagattacaggcgtgagccaccgctccctgcccaacacatataccatctgaaaatgttagaattctgagttgtgattttattgacttgttgcttgctttttcttaggctttgtaacttgtaatatgttaaagtgtactatcctaataaactgaatactttggt

SEQ ID NO: 164443 - DNA, 1583 bp, Homo sapiens
  Payload ID: 12395
  Gene Symbol: PPHLN1
  Gene Name: periphilin 1
  Uniprot ID: Q8NEY8
  ENST ID: ENST00000449194
  CDS Start-End: 83-1129
cctgggataacggcggcgagcggacggctgcatttacggggtctcccggagggccagagtcgtggcttacagaagagacgaaatgtggtctgagggacgatatgaatatgaaagaattccgagagaacgagcacctcctcgaagtcatcccagtgatggctacaatagactagttaatattgtgccaaagaaaccaccactgctagacagacctggtgaaggaagctacaatagatattacagtcatgttgattaccgagactatgacgagggccgcagtttttctcatgatcgaagaagtggtccacctcacagaggagatgaatctggttatagatggacaagagacgatcattctgcaagcaggcaacctgaatacagggacatgagagatggctttagaagaaaaagtttctactcttcccattatgcgagagagcggtctccttataaaagggacaatacttttttcagagaatcacctgttggccgaaaggattctccacacagcagatctggttccagtgtcagtagcagaagctactctccagaaaggagcaaatcatactctttccatcagtctcaacatagaaataaagagaggcctgtccagtctttgaaaacatcaagagatacttcaccctcaagtggttcagcagtttcttcatcaaaggtgttagacaaacccagtaggctaactgaaaaggaacttgctgaggctgcaagcaagtgggctgctgaaaagctagagaaatcagatgaaagtaacttgcctgaaatttctgagtatgaggcgggatccacagcaccattgtttactgaccagccagaggaacctgagtcaaacacaacacatgggatagaattatttgaagatagtcagctaaccactcgctctaaagcaatagcatcaaaaaccaaagagattgaacaggtttaccgacaagactgtgaaactttcgggatggtggtgaaaatgctgattgaaaaagatccttcattagaaaagtctatacagtttgcattgaggcagaatttacatgaaataggtgagcggtgtgttgaagaactcaagcatttcattgcagagtatgatacttccactcaagattttggagagcctttttagatttttctgctcaggctaaaaaaaaaaaaaaacagtttctaaaaattttttttcctggattgtgtaaatccttaatatatggaatttttgtgatgcagagaaatactttatgatagttgacaacatttcagtattaaataaacatctaaaatagtctgtttaaaatgtttgattcaaatttttgtattttttgtagagatggggttcaccatgttggccaggctagtctctaactcctggcctcaagtgatctgcctgcctcagcctctcaaagtgttgagattacaggcgtgagccaccgctccctgcccaacacatataccatctgaaaatgttagaattctgagttgtgattttattgacttgttgcttgctttttcttaggctttgtaacttgtaatatgttaaagtgtactatcctaataaactgaatactttggtatcttagagaata

SEQ ID NO: 164444 - DNA, 3377 bp, Homo sapiens
  Payload ID: 12395
  Gene Symbol: PPHLN1
  Gene Name: periphilin 1
  Uniprot ID: Q8NEY8
  ENST ID: ENST00000432191
  CDS Start-End: 73-1377
cggcggcgagcggacggctgcatttacggggtctcccggagggccagagtcgtggcttacagaagagacgaaatgtggtctgagggacgatatgaatatgaaagaattccgagagaacgagcacctcctcgaagtcatcccagtgatgaatctggttatagatggacaagagacgatcattctgcaagcaggcaacctgaatacagggacatgagagatggctttagaagaaaaagtttctactcttcccattatgcgagagagcggtctccttataaaagggacaatacttttttcagagaatcacctgttggccgaaaggattctccacacagcagatctggttccagtgtcagtagcagaagctactctccagaaaggagcaaatcatactctttccatcagtctcaacatagaaagtccgtgcgtcctggtgcctcctacaaacggcagaatgaaggaaatcctgaaagagataaagagaggcctgtccagtctttgaaaacatcaagagatacttcaccctcaagtggttcagcagtttcttcatcaaaggtgttagacaaacccagtaggctaactgaaaaggaacttgctgaggctgcaagcaagtgggctgctgaaaagctagagaaatcagatgaaagtaacttgcctgaaatttctgagtatgaggcgggatccacagcaccattgtttactgaccagccagaggaacctgagtcaaacacaacacatgggatagaattatttgaagatagtcagctaaccactcgctctaaagcaatagcatcaaaaaccaaagagattgaacaggtttaccgacaagactgtgaaactttcgggatggtggtgaaaatgctgattgaaaaagatccttcattagaaaagtctatacagtttgcattgaggcagaatttacatgaaatagagtctgcaggacagacttggcagcaggtaccccctgtgaggaacactgaaatggatcacgacggaacccccgaaaacgaaggcgaagagactgcgcagtcagccctctttggattccagcacgacgcatcaaaccataccatagtggggctaggacccaaccaagtaccagaaatgaaggaaacgaccctgcaggccccgcagcccccgcaggccccgcagcccctgcagccccggaagaaacgggttcgtcggacgacacagcttcgtcggacgacaggagccccagacattacctgggggatgctgaagaagacaactcaggaggctgagaggatcctgctccgaacacagacaccattcactccagaaaatttgttccttgctatgctctctgttgtacattgcaactcacgcaaggatgtaaagccagaaaacaagcagtaactgctatgcctgacaaaactgttgctgcacacatctgtactcgtcaatcaacaaaacctgatgcaaaaaacagaaaaggggtgatgtaggagatggtcaggttggtaggagaagctataaggaaagacgcaattggaaggtcgggaggttttccaaagcttcaggagagaataaagctgaaggcagctttattaattaattctcttaccctgaggctgagggcgaacagtaggtagcaagggagtgtaaaggaatttatctagataagtttgtttacttatgccctccggaaatcatgcaagactgctccctgcaaaggggggcgacaatgttcattactcacaaattgtgttggcttcaggcctttggtattctgtctctactgaataaatacaaatggttccagcctatcaggactgcactctcttctcggctgcactaaagctggcactcccccagccgttctcatgcaaaatacctgtgtcagaatactcctttcatccatcactcagccagagtcttcaggacagactccgcatgggacttgtccaaaaaaactctaatcaaaagaggaaaattttggaatatgccaggaatagtggaattttattttttaaatttttttataggcccatatgctctatctcaagaaacaagatgattgtaacatgtccatgattaaactattggcagattattgctgtgttaatctctgtagtctaatgagttctttgttctgttctgctgccttttacgttttcttgtcctttcaaaagtgttcttgaaagaaacaaagcgaataggcagttagcacagcacagctaccccttaccaagcagtctatggaaacaacccctcatccaaatcatgggttagttaagaatctaactggggcaattaagatgaattccactcacttcctggtcacttcagcagcccagcggcattgagccaaaatatacaattctgtgttattagtgaggaaactttaaaactcatgtttgttattacttactacccaatttcattatcctcccttcctctttccatttctattctctctcacttgaattctggcattatttttagtggcctctactgataatacctaccctagagtacataaaaattatattaaaagaggaagtagcagtatgcataattttaacagattctataatgggtgcctcaaaatatgtattgtgccattccgcaaatttaaaagctaattgaggacaatttttttttaatttcctaaatgagaccaccttggatttttatttttgccatttagatgtttatacttatttagcttttataaaacataagccaagctaaatcccacataacaactctggtattcttccctcatatgagcagtgattttatttgttacccaccttagatagactaagaaagttctagtcttgtttctccttctccccgcttccctggggtttttccttaccataagtattctggtccgagggttcagttcctttagtcaagatgtcacaagtttaaaaacaaaacttgagaaactaccaaaggctcaggagttgtccactttgttgaaatccattaaattagagaagtctcactaacagatgtatttaaatataggtacaacaaataatttctttttctccccttccccaaattacagtcagcatttaaagctgtttatggcttgccatcagcattattctggtaggcttgttagtgttaaaatctatttgattttttttttttttttttgcctcttaaagtctaattttaggatggatgaattcagatgtttaccagagtgtgtattttacataatgttcttgattaaaaagacttgtttgtaaattatccgttgtttttgcatatgcccagttgatgtgataaaattttcattgtcttgccatataaagccttggttatcaacaggtggaatgtagatattgtaaagctttttgtgaattaaaagtgcaaaataaagcaaccacatttaa

SEQ ID NO: 164445 - DNA, 1777 bp, Homo sapiens
  Payload ID: 12395
  Gene Symbol: PPHLN1
  Gene Name: periphilin 1
  ENST ID: ENST00000549190
  CDS Start-End: 182-1339
ggcgagttagccggcgggcggtgcgggggtggccgcggtggccgcggctgcctcgggcgccggcgccgcctctccgcgctgttcccccgttgcccccttggtacccccggctgccggggactgcctcgcgctccagagcccctctgaggaggaaaacgtctgtcccaccgactggcaggggatgctccgtcatcccgtgcgaagcctggtccaagtggcttacagaagagacgaaatgtggtctgagggacgatatgaatatgaaagaattccgagagaacgagcacctcctcgaagtcatcccagtgatggctacaatagactagttaatattgtgccaaagaaaccaccactgctagacagacctggtgaaggaagctacaatagatattacagtcatgttgattaccgagactatgacgagggccgcagtttttctcatgatcgaagaagtggtccacctcacagaggagatgaatctggttatagatggacaagagacgatcattctgcaagcaggcaacctgaatacagggacatgagagatggctttagaagaaaaagtttctactcttcccattatgcgagagagcggtctccttataaaagggacaatacttttttcagagaatcacctgttggccgaaaggattctccacacagcagatctggttccagtgtcagtagcagaagctactctccagaaaggagcaaatcatactctttccatcagtctcaacatagaaagtccgtgcgtcctggtgcctcctacaaacggcagaatgaaggaaatcctgaaagagataaagagaggcctgtccagtctttgaaaacatcaagagatacttcaccctcaagtggttcagcagtttcttcatcaaaggtgttagacaaacccagtaggctaactgaaaaggaacttgctgaggctgcaagcaagtgggctgctgaaaagctagagaaatcagatgaaagtaacttgcctgaaatttctgagtatgaggcgggatccacagcaccattgtttactgaccagccagaggaacctgagtcaaacacaacacatgggatagaattatttgaagatagtcagctaaccactcgctctaaagcaatagcatcaaaaaccaaagagattgaacaggtttaccgacaagactgtgaaactttcgggatggtggtgaaaatgctgattgaaaaagatccttcattagaaaagtctatacagtttgcattgaggcagaatttacatgaaataggtgagcggtgtgttgaagaactcaagcatttcattgcagagtatgatacttccactcaagattttggagagcctttttagatttttctgctcaggctaaaaaaaaaaaaaaacagtttctaaaaattttttttcctggattgtgtaaatccttaatatatggaatttttgtgatgcagagaaatactttatgatagttgacaacatttcagtattaaataaacatctaaaatagtctgtttaaaatgtttgattcaaatttttgtattttttgtagagatggggttcaccatgttggccaggctagtctctaactcctggcctcaagtgatctgcctgcctcagcctctcaaagtgttgagattacaggcgtgagccaccgctccctgcccaacacatataccatctgaaaatgttagaattctgagttgtgattttattgacttgttgcttgctttttcttaggctttgtaacttgtaatatgttaaagtgtactatcctaataaactgaatacttt

SEQ ID NO: 164446 - DNA, 560 bp, Homo sapiens
  Payload ID: 12395
  Gene Symbol: PPHLN1
  Gene Name: periphilin 1
  ENST ID: ENST00000552429
  CDS Start-End: 86-409
ctacctgggataacggcggcgagcggacggctgcatttacggggtctcccggagggccagagtcgtggcttacagaagagacgaaatgtggtctgagggacgatatgaatatgaaagaattccgagagaacgagcacctcctcgaagtcatcccagtgatggctacaatagactagttaatattgtgccaaagaaaccaccactgctagacagacctggtgaaggaagctacaatagatattacagtcatgttgattaccgagactatgacgagggccgcagtttttctcatgatcgaagaagtggtccacctcacagaggagatgaatctggttatagatggacaagagacgatcattctgcaagcaggcaacctgaatacagtagagatggggtttcgccgtgttagccaggatggtctccatctcctgacctcgtgatctgcccgtctcggcctcccaaagtgctgggattacaggcggacatgagagatggctttagaagaaaaagtttctactcttcccattatgcgagagagcggtctccttataaaagggaca

SEQ ID NO: 164447 - DNA, 176 bp, Homo sapiens
  Payload ID: 12395
  Gene Symbol: PPHLN1
  Gene Name: periphilin 1
  ENST ID: ENST00000551658
  CDS Start-End: 66-176
ccttagctctctgggtcgataccagtttttatgtttttgacacactgtcaccaaaagacgttggaatgactcagaaacaccaatatttcattcaagaatcagatggctacaatagactagttaatattgtgccaaagaaaccaccactgctagacagacctggtgaaggaagctac

SEQ ID NO: 164448 - DNA, 1095 bp, Homo sapiens
  Payload ID: 12395
  Gene Symbol: PPHLN1
  Gene Name: periphilin 1
  Uniprot ID: Q8NEY8
  ENST ID: ENST00000552761
  CDS Start-End: 102-1061
gggataacggcggcgagcggacggctgcatttacggggtctcccggagggccagagtcggaaattgttgaaaacgttaaatttgattcctaaaaggactcaatggcttacagaagagacgaaatgtggtctgagggacgatatgaatatgaaagaattccgagagaacgagcacctcctcgaagtcatcccagtgatgaatctggttatagatggacaagagacgatcattctgcaagcaggcaacctgaatacagggacatgagagatggctttagaagaaaaagtttctactcttcccattatgcgagagagcggtctccttataaaagggacaatacttttttcagagaatcacctgttggccgaaaggattctccacacagcagatctggttccagtgtcagtagcagaagctactctccagaaaggagcaaatcatactctttccatcagtctcaacatagaaagtccgtgcgtcctggtgcctcctacaaacggcagaatgaaggaaatcctgaaagagataaagagaggcctgtccagtctttgaaaacatcaagagatacttcaccctcaagtggttcagcagtttcttcatcaaaggtgttagacaaacccagtaggctaactgaaaaggaacttgctgaggctgcaagcaagtgggctgctgaaaagctagagaaatcagatgaaagtaacttgcctgaaatttctgagtatgaggcgggatccacagcaccattgtttactgaccagccagaggaacctgagtcaaacacaacacatgggatagaattatttgaagatagtcagctaaccactcgctctaaagcaatagcatcaaaaaccaaagagattgaacaggtttaccgacaagactgtgaaactttcgggatggtggtgaaaatgctgattgaaaaagatccttcattagaaaagtctatacagtttgcattgaggcagaatttacatgaaataggtgagcggtgtgttgaagaactcaagcatttcattgcagagtatgatacttccactcaagattttggagagcctttttagatttttctgctcaggctaaaaaaaaaaaaaaaca

SEQ ID NO: 164449 - DNA, 576 bp, Homo sapiens
  Payload ID: 12395
  Gene Symbol: PPHLN1
  Gene Name: periphilin 1
  ENST ID: ENST00000547847
  CDS Start-End: 72-576
agtaccatcgaaactgcactgatatgaggagatgtagtgatgatgtggcagtggcttacagaagagacgaaatgtggtctgagggacgatatgaatatgaaagaattccgagagaacgagcacctcctcgaagtcatcccagtgatggctacaatagactagttaatattgtgccaaagaaaccaccactgctagacagacctggtgaaggaagctacaatagatattacagtcatgttgattaccgagactatgacgagggccgcagtttttctcatgatcgaagaagtggtccacctcacagaggagatgaatctggttatagatggacaagagacgatcattctgcaagcaggcaacctgaatacagggacatgagagatggctttagaagaaaaagtttctactcttcccattatgcgagagagcggtctccttataaaagggacaatacttttttcagagaatcacctgttggccgaaaggattctccacacagcagatctggttccagtgtcagtagcagaagctactctccagaaaggagcaaatcatactctttccatcagtctcaac

SEQ ID NO: 164450 - DNA, 588 bp, Homo sapiens
  Payload ID: 12395
  Gene Symbol: PPHLN1
  Gene Name: periphilin 1
  ENST ID: ENST00000546750
  CDS Start-End: 105-588
aacttttctggagtaccatcgaaactgcactgatatgaggagatgtagtgatgatgtggcaggaaattgttgaaaacgttaaatttgattcctaaaaggactcaatggcttacagaagagacgaaatgtggtctgagggacgatatgaatatgaaagaattccgagagaacgagcacctcctcgaagtcatcccagtgatggctacaatagactagttaatattgtgccaaagaaaccaccactgctagacagacctggtgaaggaagctacaatagatattacagtcatgttgattaccgagactatgacgagggccgcagtttttctcatgatcgaagaagtggtccacctcacagaggagatgaatctggttatagatggacaagagacgatcattctgcaagcaggcaacctgaatacagggacatgagagatggctttagaagaaaaagtttctactcttcccattatgcgagagagcggtctccttataaaagggacaatacttttttcagagaatcacctgttggccgaaaggattctccacacagcagatctggttccagtgtcagtagcagaagctact

SEQ ID NO: 164451 - DNA, 415 bp, Homo sapiens
  Payload ID: 12395
  Gene Symbol: PPHLN1
  Gene Name: periphilin 1
  ENST ID: ENST00000551723
  CDS Start-End: 110-268
acctacctgggataacggcggcgagcggacggctgcatttacggggtctcccggagggccagagtcggaaattgttgaaaacgttaaatttgattcctaaaaggactcaatggcttacagaagagacgaaatgtggtctgagggacgatatgaatatgaaagaattccgagagaacgagcacctcctcgaagtcatcccagtgatgaatctggttatagatggacaagagacgatcattctgcaagcaggcaacctgaatacagataaagagaggcctgtccagtctttgaaaacatcaagagatacttcaccctcaagtggttcagcagtttcttcatcaaaggtgttagacaaacccagtaggctaactgaaaaggaacttgctgaggctgcaagcaagtgggctgctgaaaa

SEQ ID NO: 164452 - DNA, 1449 bp, Homo sapiens
  Payload ID: 12395
  Gene Symbol: PPHLN1
  Gene Name: periphilin 1
  Uniprot ID: Q8NEY8
  ENST ID: ENST00000619544
  CDS Start-End: 145-1449
cgcgcgccggaagtacctacctgggataacggcggcgagcggacggctgcatttacggggtctcccggagggccagagtcggaaattgttgaaaacgttaaatttgattcctaaaaggactcaatggcttacagaagagacgaaatgtggtctgagggacgatatgaatatgaaagaattccgagagaacgagcacctcctcgaagtcatcccagtgatgaatctggttatagatggacaagagacgatcattctgcaagcaggcaacctgaatacagggacatgagagatggctttagaagaaaaagtttctactcttcccattatgcgagagagcggtctccttataaaagggacaatacttttttcagagaatcacctgttggccgaaaggattctccacacagcagatctggttccagtgtcagtagcagaagctactctccagaaaggagcaaatcatactctttccatcagtctcaacatagaaagtccgtgcgtcctggtgcctcctacaaacggcagaatgaaggaaatcctgaaagagataaagagaggcctgtccagtctttgaaaacatcaagagatacttcaccctcaagtggttcagcagtttcttcatcaaaggtgttagacaaacccagtaggctaactgaaaaggaacttgctgaggctgcaagcaagtgggctgctgaaaagctagagaaatcagatgaaagtaacttgcctgaaatttctgagtatgaggcgggatccacagcaccattgtttactgaccagccagaggaacctgagtcaaacacaacacatgggatagaattatttgaagatagtcagctaaccactcgctctaaagcaatagcatcaaaaaccaaagagattgaacaggtttaccgacaagactgtgaaactttcgggatggtggtgaaaatgctgattgaaaaagatccttcattagaaaagtctatacagtttgcattgaggcagaatttacatgaaatagagtctgcaggacagacttggcagcaggtaccccctgtgaggaacactgaaatggatcacgacggaacccccgaaaacgaaggcgaagagactgcgcagtcagccctctttggattccagcacgacgcatcaaaccataccatagtggggctaggacccaaccaagtaccagaaatgaaggaaacgaccctgcaggccccgcagcccccgcaggccccgcagcccctgcagccccggaagaaacgggttcgtcggacgacacagcttcgtcggacgacaggagccccagacattacctgggggatgctgaagaagacaactcaggaggctgagaggatcctgctccgaacacagacaccattcactccagaaaatttgttccttgctatgctctctgttgtacattgcaactcacgcaaggatgtaaagccagaaaacaagcagtaa

SEQ ID NO: 164453 - DNA, 1863 bp, Homo sapiens
  Payload ID: 12395
  Gene Symbol: PPHLN1
  Gene Name: periphilin 1
  Uniprot ID: Q8NEY8
  ENST ID: ENST00000613154
  CDS Start-End: 145-1191
cgcgcgccggaagtacctacctgggataacggcggcgagcggacggctgcatttacggggtctcccggagggccagagtcggaaattgttgaaaacgttaaatttgattcctaaaaggactcaatggcttacagaagagacgaaatgtggtctgagggacgatatgaatatgaaagaattccgagagaacgagcacctcctcgaagtcatcccagtgatggctacaatagactagttaatattgtgccaaagaaaccaccactgctagacagacctggtgaaggaagctacaatagatattacagtcatgttgattaccgagactatgacgagggccgcagtttttctcatgatcgaagaagtggtccacctcacagaggagatgaatctggttatagatggacaagagacgatcattctgcaagcaggcaacctgaatacagggacatgagagatggctttagaagaaaaagtttctactcttcccattatgcgagagagcggtctccttataaaagggacaatacttttttcagagaatcacctgttggccgaaaggattctccacacagcagatctggttccagtgtcagtagcagaagctactctccagaaaggagcaaatcatactctttccatcagtctcaacatagaaataaagagaggcctgtccagtctttgaaaacatcaagagatacttcaccctcaagtggttcagcagtttcttcatcaaaggtgttagacaaacccagtaggctaactgaaaaggaacttgctgaggctgcaagcaagtgggctgctgaaaagctagagaaatcagatgaaagtaacttgcctgaaatttctgagtatgaggcgggatccacagcaccattgtttactgaccagccagaggaacctgagtcaaacacaacacatgggatagaattatttgaagatagtcagctaaccactcgctctaaagcaatagcatcaaaaaccaaagagattgaacaggtttaccgacaagactgtgaaactttcgggatggtggtgaaaatgctgattgaaaaagatccttcattagaaaagtctatacagtttgcattgaggcagaatttacatgaaataggtgagcggtgtgttgaagaactcaagcatttcattgcagagtatgatacttccactcaagattttggagagcctttttagatttttctgctcaggctaaaaaaaaaaaaaaacagtttctaaaaattttttttcctggattgtgtaaatccttaatatatggaatttttgtgatgcagagaaatactttatgatagttgacaacatttcagtattaaataaacatctaaaatagtctgtttaaaatgtttgattcaaatttttgtattttttgtagagatggggttcaccatgttggccaggctagtctctaactcctggcctcaagtgatctgcctgcctcagcctctcaaagtgttgagattacaggcgtgagccaccgctccctgcccaacacatataccatctgaaaatgttagaattctgagttgtgattttattgacttgttgcttgctttttcttaggctttgtaacttgtaatatgttaaagtgtactatcctaataaactgaatactttggtatcttagagaatatttgctttgagagtaattctcattcaatgataaaatagagcacttaaatctctgagagatacctcagaaaaaaatccgtttttccaagtaatgaactcagtgtcttctattacaataatcctgaaactcctgactctctcactgatgtatgagtcttaaataatatcatatacaagactaataaatagaagatgcagtttgaggtggaaggtgaggga

SEQ ID NO: 164454 - DNA, 1521 bp, Homo sapiens
  Payload ID: 12395
  Gene Symbol: PPHLN1
  Gene Name: periphilin 1
  Uniprot ID: Q8NEY8
  ENST ID: ENST00000610488
  CDS Start-End: 145-1521
cgcgcgccggaagtacctacctgggataacggcggcgagcggacggctgcatttacggggtctcccggagggccagagtcggaaattgttgaaaacgttaaatttgattcctaaaaggactcaatggcttacagaagagacgaaatgtggtctgagggacgatatgaatatgaaagaattccgagagaacgagcacctcctcgaagtcatcccagtgatggctacaatagactagttaatattgtgccaaagaaaccaccactgctagacagacctggtgaaggaagctacaatagatattacagtcatgttgattaccgagactatgacgagggccgcagtttttctcatgatcgaagaagtggtccacctcacagaggagatgaatctggttatagatggacaagagacgatcattctgcaagcaggcaacctgaatacagggacatgagagatggctttagaagaaaaagtttctactcttcccattatgcgagagagcggtctccttataaaagggacaatacttttttcagagaatcacctgttggccgaaaggattctccacacagcagatctggttccagtgtcagtagcagaagctactctccagaaaggagcaaatcatactctttccatcagtctcaacatagaaagtccgtgcgtcctggtgcctcctacaaacggcagaatgaaggaaatcctgaaagagataaagagaggcctgtccagtctttgaaaacatcaagagatacttcaccctcaagtggttcagcagtttcttcatcaaaggtgttagacaaacccagtaggctaactgaaaaggaacttgctgaggctgcaagcaagtgggctgctgaaaagctagagaaatcagatgaaagtaacttgcctgaaatttctgagtatgaggcgggatccacagcaccattgtttactgaccagccagaggaacctgagtcaaacacaacacatgggatagaattatttgaagatagtcagctaaccactcgctctaaagcaatagcatcaaaaaccaaagagattgaacaggtttaccgacaagactgtgaaactttcgggatggtggtgaaaatgctgattgaaaaagatccttcattagaaaagtctatacagtttgcattgaggcagaatttacatgaaatagagtctgcaggacagacttggcagcaggtaccccctgtgaggaacactgaaatggatcacgacggaacccccgaaaacgaaggcgaagagactgcgcagtcagccccgcagcccccgcaggccccgcagcccctgcagccccggaagaaacgggttcgtcggacgacacagcttcgtcggacgacaggagccccagacattacctgggggatgctgaagaagacaactcaggaggctgagaggatcctgctccgaacacagacaccattcactccagaaaatttgttccttgctatgctctctgttgtacattgcaactcacgcaaggatgtaaagccagaaaacaagcagtaa

SEQ ID NO: 164455 - DNA, 6238 bp, Homo sapiens
  Payload ID: 12396
  Gene Symbol: PPL
  Gene Name: periplakin
  Uniprot ID: O60437
  ENST ID: ENST00000345988
  CDS Start-End: 91-5361
cgcgccgccgctcgctcacctgcgctcccgcccgcccctcggtgcgcgcccggcccgccagccgccgccgcccgcaccccgagcgccaccatgaactcgctcttcaggaagagaaacaaaggcaaatacagccccactgtgcagacccggagcatctctaacaaggagctctcggagctgatcgagcagctgcagaagaatgccgaccaggtggagaagaacatcgtggacacagaggccaagatgcagagtgacctggctcggctgcaggagggtcggcagcctgagcaccgggacgtgaccctgcagaaggtgttggactctgagaagctgctctatgtgctagaggcggatgcggccattgccaagcacatgaagcacccacagggggacatgatcgccgaggatatccgccagctgaaggagcgtgtgaccaacctgcgcgggaaacacaagcagatctacaggctggcggtgaaggaagtggatccacaggtcaactgggcggcactggtggaggagaagctggacaagctgaacaaccagagctttgggactgacctgccgctggtggaccaccaagtggaggagcataacatcttccacaatgaggtcaaggccatcgggccccacctggccaaggacggggacaaggagcagaacagcgaactccgggccaagtaccagaaactgctggcagcatcacaggcccggcagcagcacctgagttcgctgcaggactacatgcagcgctgcaccaatgagctgtactggctggaccagcaggccaagggccgcatgcagtacgactggagtgaccgcaacctcgactaccccagccgccggcgccagtatgagaatttcatcaaccggaacctggaggccaaagaggagagaatcaacaaactgcacagcgagggcgaccagctgctggcggccgagcaccccgggaggaactccattgaggcgcacatggaggctgtgcacgcagactggaaggagtacctgaacctgctcatctgcgaggagagccacctcaagtacatggaggactaccaccagtttcacgaagacgtgaaggacgctcaggagctgctgcgcaaggtggactcggacctgaaccagaagtatggccctgacttcaaggaccggtaccagattgagctgctgctgcgggagctggatgaccaggagaaggtgctggacaagtatgaggacgtggtgcaggggctgcagaagcgaggccagcaggtggtgcccctcaagtaccgccgggagactccgctcaagcccatccccgtggaggcactctgtgactttgagggggagcagggcctgatctcgcggggctacagctacaccctgcagaagaacaacggggagagctgggagctcatggacagcgctgggaacaagctgattgctccggccgtgtgttttgtgatcccccccacagaccctgaggccctggctctggctgacagcctgggcagccagtaccggagcgtgcggcagaaggcagctgggagcaaacgcacgctgcagcagcggtatgaggtgctgaagaccgagaatcccggagatgcctctgacctacaggggcggcagctgctggctggcttggacaaggtggccagcgacctggaccggcaggagaaggccatcacagggatcctgcggccaccactggagcaaggccgggctgtgcaggacagtgccgagcgggccaaggacctcaagaacatcaccaacgagctactgcggattgaacctgagaagacgcggagcacggctgagggcgaagccttcatccaggccctcccaggcagtggcaccacacccctgctgaggacccgggtggaggacaccaaccggaaatacgagcacctcctgcagctgctggacttggcccaggagaaggttgatgtggccaaccgcctggagaagagcctgcagcagagctgggagttgctggccacacacgagaaccatctgaatcaggatgacacagtgcctgagagcagccgtgtcctggacagcaaggggcaggagctggcggccatggcctgtgagttacaggcccagaagtccctcctgggtgaggtggagcagaacttgcaggcggccaagcagtgctcgagcacactggccagccgcttccaggagcactgtccggacctggagcgccaggaggccgaggtgcacaagctgggccagcgtttcaacaacctgcgccagcaggtggaacgcagggcgcagagcctacagagcgccaaggcagcctacgagcacttccaccgcggccatgaccacgtgctgcagttcctagtcagcatccccagttacgagccccaggagacagacagcctcagccagatggagaccaagctgaagaaccagaagaacctgctagatgagatagcaagtagggagcaggaagtacagaagatctgtgccaattcccagcagtaccagcaagctgtaaaggactatgagttagaagcagaaaaactaaggtctcttctcgacttggagaatggaaggagaagccacgtgagcaagagagccaggctccaatctcctgccaccaaagtgaaggaagaggaagcagcacttgccgccaagttcactgaagtttatgccatcaacagacagaggctgcagaatctggagtttgctctgaatctcctcagacagcagccggaagtagaagtgacccatgagaccctgcaaaggaataggccggactctggagtggaggaggcgtggaagatcaggaaggaactggatgaggagactgagcggaggcggcagctggagaacgaggtcaagagcacccaggaagaaatctggaccttgaggaatcaggggcctcaggaatcggtggtgaggaaggaggtgctcaagaaggtgccggatcccgtgctggaggagagcttccagcagctgcagcggacgctggcagaggagcagcacaagaaccagctgctgcaggaggagctggaggcactgcagctgcagctgcgtgccctggagcaggagaccagagacggggggcaggagtacgtggtcaaggaggtcctgcgcatcgagcctgacagggcccaggcggatgaggtcttgcagctgcgggaggagctggaggcactgaggcggcagaagggcgcccgggaggcagaggtgctcctcctgcagcagcgtgtggccgccctggctgaagagaagagccgggcgcaggagaaggtcacagagaaagaggtggtgaaactgcagaatgacccccagctggaggcagagtaccagcagctgcaggaggaccaccagcgccaggaccagctcagggagaagcaggaggaggagctgagcttcctccaggacaagctcaagaggctagagaaggagcgggccatggccgagggcaagatcaccgtcaaggaggtgctcaaggtggagaaggacgcggccaccgagagggaggtcagcgatctcacccgccaatatgaggacgaggctgccaaggctcgcgctagccagagggagaagacggagctgctccgaaagatatgggccttggaggaggagaacgccaaagtggtggtgcaggagaaggtgcgggagatcgtgcggccagaccccaaggcggaaagtgaagtggcgaacctccgcctggagcttgtggagcaggagcgaaagtaccggggtgccgaggagcagctccggagctaccagagtgagctggaggccctcaggaggcgaggcccccaggtggaagtcaaagaggtgactaaggaagtcattaagtacaagactgaccctgagatggagaaggagcttcagcggctcagggaggagatcgtggacaagaccagactgatcgaaaggtgtgatttagagatctaccagctgaaaaaggaaatccaggccctgaaagacaccaaaccccaggtccagaccaaagaggtggtccaggagatcctccaattccaagaagaccctcaaaccaaggaggaggtggcgtctctgagggcaaagctctcagaggagcagaagaaacaagtggatctggagagggaaagagcttcccaggaagagcagatcgcccggaaagaggaggagctctcgcgggtgaaggaaagggtggtgcagcaggaggtggtcaggtatgaggaggagccaggcctgcgggccgaggcgagcgcctttgccgagagcatcgatgtggagctgcggcagattgacaagctgcgggcagagctgcggcggctgcagcgccggcgcaccgagcttgagcggcagctggaggagctagagcgcgagcggcaggcccgcagggaggccgagcgcgaggtacagcggttgcagcagcggctggcagcgctggagcaggaagaagctgaggcccgtgagaaggtaacccatacgcagaaggtggtgctgcagcaggacccgcagcaggcgcgagagcatgccctgctccgactccagctggaagaagagcagcaccggcggcagctcctggagggggagctcgagaccctccggaggaaactggctgcactggagaaggcggaggtcaaggagaaggtggtgctctccgagagtgtccaggtggagaagggcgacaccgagcaagagatccagaggctcaagagcagcctggaggaggagagccgcagcaagcgcgagctggacgtcgaggtgagccggctggaagccaggctttcggagctggaattccataactccaagtcatccaaggaactagactttctgagggaagagaaccacaaattacagctggagaggcaaaacctgcagctggagacccgaaggctccaatcggaaatcaacatggcagcgacggaaacacgagacctgcggaacatgaccgtggcggactctgggaccaaccatgactccagactgtggtccctggagagggaactggatgacctcaagaggctctccaaggacaaagacctcgagatcgacgagctgcagaagcgcctgggctccgtggccgtcaagcgggagcagcgggagaaccacctgcggcgctccatcgtagtcatccaccctgacacaggccgcgagctgtccccggaggaagcccaccgtgccgggctcattgactggaacatgttcgtgaaactcagaagccaggagtgcgactgggaggagatctcagtgaagggtcccaatggggagtcctcagtgatacacgacaggaagtctggcaagaagttctccatcgaagaggccctgcagagtggcaggctgacccctgctcagtatgaccgctatgtcaacaaggatatgtccatccaggagctggcggtcttggtatctgggcagaagtaggcacagctcttgcaactcttcgtaacggcagacgctggccctctcctacgacgcagtgacctccttggtgtcgtcctctcccttgccctggtgcaggccaagcattttatacataccctcgctgccaggctgctcagagtcccgcccacatatgagacaggcactggctgaagacaggcaactctcgtcccaaccatcattcaccctgagtgacgtacttcatcctccaatgactggacaactgcgatgccttttcctcccttttcctgtacactcccagcaacaaactcctcatgataactgcacacaatctgaaaaccactgaaggacaagccaaccacagcagccaagcccactccttgcagcatgggtactggtggcacaccagacagtgacactgccccacaaaggcctgggcccgtgggggctgctgcctggcatgacatctctccagatttctggcttaaaaccaactttccatccgagaagcctcctcagtagttactctgctcatgagacagatctgggctccaagccaggaaaggtgaacagaaaccacaagtgtccagccctcggtgctggagtggacgttaattgtcagccaccagactgtcccggcacctacagagaatgtttcacagttctggcatttaaatcctttgatagtggattgtgctgctgttagccttagtttcagtgctttacaagtctcgcttattatctcactggtatttaggtatacaaaacagttgattattcaccacgccaatatctgggtctctgtatctcatgtagaacataagaaaatgggaactaatagggaaatttatttatagcatgaaaataaacctggtggctggagtctgcttgtacggtc

SEQ ID NO: 164456 - DNA, 5845 bp, Homo sapiens
  Payload ID: 12396
  Gene Symbol: PPL
  Gene Name: periplakin
  ENST ID: ENST00000590782
  CDS Start-End: 20-5284
ccgcaccccgagcgccaccatgaactcgctcttcaggaagagaaacaaaggcaaatacagccccactgtgcagacccggagcatctctaacaaggagctctcggagctgatcgagcagctgcagaagaatgccgaccaggtggagaagaacatcgtggacacagaggccaagatgcagagtgacctggctcggctgcaggagggtcggcagcctgagcaccgggacgtgaccctgcagaaggtgttggactctgagaagctgctctatgtgctagaggcggatgcggccattgccaagcacatgaagcacccacagggggacatgatcgccgaggatatccgccagctgaaggagcgtgtgaccaacctgcgcgggaaacacaagcagatctacaggctggcggtgaaggaagtggatccacaggtcaactgggcggcactggtggaggagaagctggacaagctgaacaaccagagctttgggactgacctgccgctggtggaccaccaagtggaggagcataacatcttccacaatgaggtcaaggccatcgggccccacctggccaaggacggggacaagaacagcgaactccgggccaagtaccagaaactgctggcagcatcacaggcccggcagcagcacctgagttcgctgcaggactacatgcagcgctgcaccaatgagctgtactggctggaccagcaggccaagggccgcatgcagtacgactggagtgaccgcaacctcgactaccccagccgccggcgccagtatgagaatttcatcaaccggaacctggaggccaaagaggagagaatcaacaaactgcacagcgagggcgaccagctgctggcggccgagcaccccgggaggaactccattgaggcgcacatggaggctgtgcacgcagactggaaggagtacctgaacctgctcatctgcgaggagagccacctcaagtacatggaggactaccaccagtttcacgaagacgtgaaggacgctcaggagctgctgcgcaaggtggactcggacctgaaccagaagtatggccctgacttcaaggaccggtaccagattgagctgctgctgcgggagctggatgaccaggagaaggtgctggacaagtatgaggacgtggtgcaggggctgcagaagcgaggccagcaggtggtgcccctcaagtaccgccgggagactccgctcaagcccatccccgtggaggcactctgtgactttgagggggagcagggcctgatctcgcggggctacagctacaccctgcagaagaacaacggggagagctgggagctcatggacagcgctgggaacaagctgattgctccggccgtgtgttttgtgatcccccccacagaccctgaggccctggctctggctgacagcctgggcagccagtaccggagcgtgcggcagaaggcagctgggagcaaacgcacgctgcagcagcggtatgaggtgctgaagaccgagaatcccggagatgcctctgacctacaggggcggcagctgctggctggcttggacaaggtggccagcgacctggaccggcaggagaaggccatcacagggatcctgcggccaccactggagcaaggccgggctgtgcaggacagtgccgagcgggccaaggacctcaagaacatcaccaacgagctactgcggattgaacctgagaagacgcggagcacggctgagggcgaagccttcatccaggccctcccaggcagtggcaccacacccctgctgaggacccgggtggaggacaccaaccggaaatacgagcacctcctgcagctgctggacttggcccaggagaaggttgatgtggccaaccgcctggagaagagcctgcagcagagctgggagttgctggccacacacgagaaccatctgaatcaggatgacacagtgcctgagagcagccgtgtcctggacagcaaggggcaggagctggcggccatggcctgtgagttacaggcccagaagtccctcctgggtgaggtggagcagaacttgcaggcggccaagcagtgctcgagcacactggccagccgcttccaggagcactgtccggacctggagcgccaggaggccgaggtgcacaagctgggccagcgtttcaacaacctgcgccagcaggtggaacgcagggcgcagagcctacagagcgccaaggcagcctacgagcacttccaccgcggccatgaccacgtgctgcagttcctagtcagcatccccagttacgagccccaggagacagacagcctcagccagatggagaccaagctgaagaaccagaagaacctgctagatgagatagcaagtagggagcaggaagtacagaagatctgtgccaattcccagcagtaccagcaagctgtaaaggactatgagttagaagcagaaaaactaaggtctcttctcgacttggagaatggaaggagaagccacgtgagcaagagagccaggctccaatctcctgccaccaaagtgaaggaagaggaagcagcacttgccgccaagttcactgaagtttatgccatcaacagacagaggctgcagaatctggagtttgctctgaatctcctcagacagcagccggaagtagaagtgacccatgagaccctgcaaaggaataggccggactctggagtggaggaggcgtggaagatcaggaaggaactggatgaggagactgagcggaggcggcagctggagaacgaggtcaagagcacccaggaagaaatctggaccttgaggaatcaggggcctcaggaatcggtggtgaggaaggaggtgctcaagaaggtgccggatcccgtgctggaggagagcttccagcagctgcagcggacgctggcagaggagcagcacaagaaccagctgctgcaggaggagctggaggcactgcagctgcagctgcgtgccctggagcaggagaccagagacggggggcaggagtacgtggtcaaggaggtcctgcgcatcgagcctgacagggcccaggcggatgaggtcttgcagctgcgggaggagctggaggcactgaggcggcagaagggcgcccgggaggcagaggtgctcctcctgcagcagcgtgtggccgccctggctgaagagaagagccgggcgcaggagaaggtcacagagaaagaggtggtgaaactgcagaatgacccccagctggaggcagagtaccagcagctgcaggaggaccaccagcgccaggaccagctcagggagaagcaggaggaggagctgagcttcctccaggacaagctcaagaggctagagaaggagcgggccatggccgagggcaagatcaccgtcaaggaggtgctcaaggtggagaaggacgcggccaccgagagggaggtcagcgatctcacccgccaatatgaggacgaggctgccaaggctcgcgctagccagagggagaagacggagctgctccgaaagatatgggccttggaggaggagaacgccaaagtggtggtgcaggagaaggtgcgggagatcgtgcggccagaccccaaggcggaaagtgaagtggcgaacctccgcctggagcttgtggagcaggagcgaaagtaccggggtgccgaggagcagctccggagctaccagagtgagctggaggccctcaggaggcgaggcccccaggtggaagtcaaagaggtgactaaggaagtcattaagtacaagactgaccctgagatggagaaggagcttcagcggctcagggaggagatcgtggacaagaccagactgatcgaaaggtgtgatttagagatctaccagctgaaaaaggaaatccaggccctgaaagacaccaaaccccaggtccagaccaaagaggtggtccaggagatcctccaattccaagaagaccctcaaaccaaggaggaggtggcgtctctgagggcaaagctctcagaggagcagaagaaacaagtggatctggagagggaaagagcttcccaggaagagcagatcgcccggaaagaggaggagctctcgcgggtgaaggaaagggtggtgcagcaggaggtggtcaggtatgaggaggagccaggcctgcgggccgaggcgagcgcctttgccgagagcatcgatgtggagctgcggcagattgacaagctgcgggcagagctgcggcggctgcagcgccggcgcaccgagcttgagcggcagctggaggagctagagcgcgagcggcaggcccgcagggaggccgagcgcgaggtacagcggttgcagcagcggctggcagcgctggagcaggaagaagctgaggcccgtgagaaggtaacccatacgcagaaggtggtgctgcagcaggacccgcagcaggcgcgagagcatgccctgctccgactccagctggaagaagagcagcaccggcggcagctcctggagggggagctcgagaccctccggaggaaactggctgcactggagaaggcggaggtcaaggagaaggtggtgctctccgagagtgtccaggtggagaagggcgacaccgagcaagagatccagaggctcaagagcagcctggaggaggagagccgcagcaagcgcgagctggacgtcgaggtgagccggctggaagccaggctttcggagctggaattccataactccaagtcatccaaggaactagactttctgagggaagagaaccacaaattacagctggagaggcaaaacctgcagctggagacccgaaggctccaatcggaaatcaacatggcagcgacggaaacacgagacctgcggaacatgaccgtggcggactctgggaccaaccatgactccagactgtggtccctggagagggaactggatgacctcaagaggctctccaaggacaaagacctcgagatcgacgagctgcagaagcgcctgggctccgtggccgtcaagcgggagcagcgggagaaccacctgcggcgctccatcgtagtcatccaccctgacacaggccgcgagctgtccccggaggaagcccaccgtgccgggctcattgactggaacatgttcgtgaaactcagaagccaggagtgcgactgggaggagatctcagtgaagggtcccaatggggagtcctcagtgatacacgacaggaagtctggcaagaagttctccatcgaagaggccctgcagagtggcaggctgacccctgctcagtatgaccgctatgtcaacaaggatatgtccatccaggagctggcggtcttggtatctgggcagaagtaggcacagctcttgcaactcttcgtaacggcagacgctggccctctcctacgacgcagtgacctccttggtgtcgtcctctcccttgccctggtgcaggccaagcattttatacataccctcgctgccaggctgctcagagtcccgcccacatatgagacaggcactggctgaagacaggcaactctcgtcccaaccatcattcaccctgagtgacgtacttcatcctccaatgactggacaactgcgatgccttttcctcccttttcctgtacactcccagcaacaaactcctcatgataactgcacacaatctgaaaaccactgaaggacaagccaaccacagcagccaagcccactccttgcagcatgggtactggtggcacaccagacagtgacactgccccacaaaggcctgggcccgtgggggctgctgcctggcatgacatctctccagatttctggcttaaaaccaactttccatccgagaagcctcctcagtagttactctgctcatgagacagatctgggctccaagccaggaaaggtgaacagaaaccacaa

SEQ ID NO: 164457 - DNA, 3615 bp, Homo sapiens
  Payload ID: 12396
  Gene Symbol: PPL
  Gene Name: periplakin
  ENST ID: ENST00000592772
  CDS Start-End: 270-3615
atgacaccaggatttggaagccaggagattcccattggtgatggggagtggaggctcatggaggtgaagtgacttgccccacagtcactcagctcgtcaattggggagctagaatatgaccctaagccagttcctgcctctttgctgtcctagaaccatctgcctgtaacagcacaagcatctctaacaaggagctctcggagctgatcgagcagctgcagaagaatgccgaccaggtggagaagaacatcgtggacacagaggccaagatgcagagtgacctggctcggctgcaggagggtcggcagcctgagcaccgggacgtgaccctgcagaaggtgttggactctgagaagctgctctatgtgctagaggcggatgcggccattgccaagcacatgaagcacccacagggggacatgatcgccgaggatatccgccagctgaaggagcgtgtgaccaacctgcgcgggaaacacaagcagatctacaggctggcggtgaaggaagtggatccacaggcccagaagtccctcctgggtgaggtggagcagaacttgcaggcggccaagcagtgctcgagcacactggccagccgcttccaggagcactgtccggacctggagcgccaggaggccgaggtgcacaagctgggccagcgtttcaacaacctgcgccagcaggtggaacgcagggcgcagagcctacagagcgccaaggcagcctacgagcacttccaccgcggccatgaccacgtgctgcagttcctagtcagcatccccagttacgagccccaggagacagacagcctcagccagatggagaccaagctgaagaaccagaagaacctgctagatgagatagcaagtagggagcaggaagtacagaagatctgtgccaattcccagcagtaccagcaagctgtaaaggactatgagttagaagcagaaaaactaaggtctcttctcgacttggagaatggaaggagaagccacgtgagcaagagagccaggctccaatctcctgccaccaaagtgaaggaagaggaagcagcacttgccgccaagttcactgaagtttatgccatcaacagacagaggctgcagaatctggagtttgctctgaatctcctcagacagcagccggaagtagaagtgacccatgagaccctgcaaaggaataggccggactctggagtggaggaggcgtggaagatcaggaaggaactggatgaggagactgagcggaggcggcagctggagaacgaggtcaagagcacccaggaagaaatctggaccttgaggaatcaggggcctcaggaatcggtggtgaggaaggaggtgctcaagaaggtgccggatcccgtgctggaggagagcttccagcagctgcagcggacgctggcagaggagcagcacaagaaccagctgctgcaggaggagctggaggcactgcagctgcagctgcgtgccctggagcaggagaccagagacggggggcaggagtacgtggtcaaggaggtcctgcgcatcgagcctgacagggcccaggcggatgaggtcttgcagctgcgggaggagctggaggcactgaggcggcagaagggcgcccgggaggcagaggtgctcctcctgcagcagcgtgtggccgccctggctgaagagaagagccgggcgcaggagaaggtcacagagaaagaggtggtgaaactgcagaatgacccccagctggaggcagagtaccagcagctgcaggaggaccaccagcgccaggaccagctcagggagaagcaggaggaggagctgagcttcctccaggacaagctcaagaggctagagaaggagcgggccatggccgagggcaagatcaccgtcaaggaggtgctcaaggtggagaaggacgcggccaccgagagggaggtcagcgatctcacccgccaatatgaggacgaggctgccaaggctcgcgctagccagagggagaagacggagctgctccgaaagatatgggccttggaggaggagaacgccaaagtggtggtgcaggagaaggtgcgggagatcgtgcggccagaccccaaggcggaaagtgaagtggcgaacctccgcctggagcttgtggagcaggagcgaaagtaccggggtgccgaggagcagctccggagctaccagagtgagctggaggccctcaggaggcgaggcccccaggtggaagtcaaagaggtgactaaggaagtcattaagtacaagactgaccctgagatggagaaggagcttcagcggctcagggaggagatcgtggacaagaccagactgatcgaaaggtgtgatttagagatctaccagctgaaaaaggaaatccaggccctgaaagacaccaaaccccaggtccagaccaaagaggtggtccaggagatcctccaattccaagaagaccctcaaaccaaggaggaggtggcgtctctgagggcaaagctctcagaggagcagaagaaacaagtggatctggagagggaaagagcttcccaggaagagcagatcgcccggaaagaggaggagctctcgcgggtgaaggaaagggtggtgcagcaggaggtggtcaggtatgaggaggagccaggcctgcgggccgaggcgagcgcctttgccgagagcatcgatgtggagctgcggcagattgacaagctgcgggcagagctgcggcggctgcagcgccggcgcaccgagcttgagcggcagctggaggagctagagcgcgagcggcaggcccgcagggaggccgagcgcgaggtacagcggttgcagcagcggctggcagcgctggagcaggaagaagctgaggcccgtgagaaggtaacccatacgcagaaggtggtgctgcagcaggacccgcagcaggcgcgagagcatgccctgctccgactccagctggaagaagagcagcaccggcggcagctcctggagggggagctcgagaccctccggaggaaactggctgcactggagaaggcggaggtcaaggagaaggtggtgctctccgagagtgtccaggtggagaagggcgacaccgagcaagagatccagaggctcaagagcagcctggaggaggagagccgcagcaagcgcgagctggacgtcgaggtgagccggctggaagccaggctttcggagctggaattccataactccaagtcatccaaggaactagactttctgagggaagagaaccacaaattacagctggagaggcaaaacctgcagctggagacccgaaggctccaatcggaaatcaacatggcagcgacggaaacacgagacctgcggaacatgaccgtggcggactctgggaccaaccatgactccagactgtggtccctggagagggaactggatgacctcaagaggctctccaaggacaaagacctcgagatcgacgagctgcagaagcgcctgggctccgtggccgtcaagcgggagcagcgggagaaccacctgcggcgctccatcgtagtcatccaccctgacacaggccgcgagctgtccccggaggaagcccaccgtgccgggctcattgactggaacatgttcgtgaaactcagaagccaggagtgcgact

SEQ ID NO: 164458 - DNA, 6808 bp, Homo sapiens
  Payload ID: 12397
  Gene Symbol: PXDN
  Gene Name: peroxidasin
  Uniprot ID: Q92626
  ENST ID: ENST00000252804
  CDS Start-End: 52-4491
agccggccgtggtggctccgtgcgtccgagcgtccgtccgcgccgtcggccatggccaagcgctccaggggccccgggcgccgctgcctgttggcgctcgtgctgttctgcgcctgggggacgctggccgtggtggcccagaagccgggcgcagggtgtccgagccgctgcctgtgcttccgcaccaccgtgcgctgcatgcatctgctgctggaggccgtgcccgccgtggcgccgcagacctccatcctagatcttcgctttaacagaatcagagagatccaacctggggcattcaggcggctgaggaacttgaacacattgcttctcaataataatcagatcaagaggatacctagtggagcatttgaagacttggaaaatttaaaatatctctatctgtacaagaatgagatccagtcaattgacaggcaagcatttaagggacttgcctctctagagcaactatacctgcactttaatcagatagaaactttggacccagattcgttccagcatctcccgaagctcgagaggctatttttgcataacaaccggattacacatttagttccagggacatttaatcacttggaatctatgaagagattgcgactggactcaaacacacttcactgcgactgtgaaatcctgtggttggcggatttgctgaaaacctacgcggagtcggggaacgcgcaggcagcggccatctgtgaatatcccagacgcatccagggacgctcagtggcaaccatcaccccggaagagctgaactgtgaaaggccccggatcacctccgagccccaggacgcagatgtgacctcggggaacaccgtgtacttcacctgcagagccgaaggcaaccccaagcctgagatcatctggctgcgaaacaataatgagctgagcatgaagacagattcccgcctaaacttgctggacgatgggaccctgatgatccagaacacacaggagacagaccagggtatctaccagtgcatggcaaagaacgtggccggagaggtgaagacgcaagaggtgaccctcaggtacttcgggtctccagctcgacccacttttgtaatccagccacagaatacagaggtgctggttggggagagcgtcacgctggagtgcagcgccacaggccaccccccgccgcggatctcctggacgagaggtgaccgcacacccttgccagttgacccgcgggtgaacatcacgccttctggcgggctttacatacagaacgtcgtacagggggacagcggagagtatgcgtgctctgcgaccaacaacattgacagcgtccatgccaccgctttcatcatcgtccaggctcttcctcagttcactgtgacgcctcaggacagagtcgttattgagggccagaccgtggatttccagtgtgaagccaagggcaacccgccgcccgtcatcgcctggaccaagggagggagccagctctccgtggaccggcggcacctggtcctgtcatcgggaacacttagaatctctggtgttgccctccacgaccagggccagtacgaatgccaggctgtcaacatcatcggctcccagaaggtcgtggcccacctgactgtgcagcccagagtcaccccagtgtttgccagcattcccagcgacacaacagtggaggtgggcgccaatgtgcagctcccgtgcagctcccagggcgagcccgagccagccatcacctggaacaaggatggggttcaggtgacagaaagtggaaaatttcacatcagccctgaaggattcttgaccatcaatgacgttggccctgcagacgcaggtcgctatgagtgtgtggcccggaacaccattgggtcggcctcggtgagcatggtgctcagtgtgaatgttcctgacgtcagtcgaaatggagatccgtttgtagctacctccatcgtggaagcgattgcgactgttgacagagctataaactcaacccgaacacatttgtttgacagccgtcctcgttctccaaatgatttgctggccttgttccggtatccgagggatccttacacagttgaacaggcacgggcgggagaaatctttgaacggacattgcagctcattcaggagcatgtacagcatggcttgatggtcgacctcaacggaacaagttaccactacaacgacctggtgtctccacagtacctgaacctcatcgcaaacctgtcgggctgtaccgcccaccggcgcgtgaacaactgctcggacatgtgcttccaccagaagtaccggacgcacgacggcacctgtaacaacctgcagcaccccatgtggggcgcctcgctgaccgccttcgagcgcctgctgaaatccgtgtacgagaatggcttcaacacccctcggggcatcaacccccaccgactgtacaacgggcacgcccttcccatgccgcgcctggtgtccaccaccctgatcgggacggagaccgtcacacccgacgagcagttcacccacatgctgatgcagtggggccagttcctggaccacgacctcgactccacggtggtggccctgagccaggcacgcttctccgacggacagcactgcagcaacgtgtgcagcaacgaccccccctgcttctctgtcatgatcccccccaatgactcccgggccaggagcggggcccgctgcatgttcttcgtgcgctccagccctgtgtgcggcagcggcatgacttcgctgctcatgaactccgtgtacccgcgggagcagatcaaccagctcacctcctacatagacgcatccaacgtgtacgggagcacggagcatgaggcccgcagcatccgcgacctggccagccaccgcggcctgctgcggcagggcatcgtgcagcggtccgggaagccgctgctccccttcgccaccgggccgcccacggagtgcatgcgggacgagaacgagagccccatcccctgcttcctggccggggaccaccgcgccaacgagcagctgggcctgaccagcatgcacacgctgtggttccgcgagcacaaccgcattgccacggagctgctcaagctgaacccgcactgggacggcgacaccatctactatgagaccaggaagatcgtgggtgcggagatccagcacatcacctaccagcactggctcccgaagatcctgggggaggtgggcatgaggacgctgggagagtaccacggctacgaccccggcatcaatgctggcatcttcaacgccttcgccaccgcggccttcaggtttggccacacgcttgtcaacccactgctttaccggctggacgagaacttccagcccattgcacaagatcacctcccccttcacaaagctttcttctctcccttccggattgtgaatgagggcggcatcgatccgcttctcagggggctgttcggggtggcggggaaaatgcgtgtgccctcgcagctgctgaacacggagctcacggagcggctgttctccatggcacacacggtggctctggacctggcggccatcaacatccagcggggccgggaccacgggatcccaccctaccacgactacagggtctactgcaatctatcggcggcacacacgttcgaggacctgaaaaatgagattaaaaaccctgagatccgggagaaactgaaaaggttgtatggctcgacactcaacatcgacctgtttccggcgctcgtggtggaggacctggtgcctggcagccggctgggccccaccctgatgtgtcttctcagcacacagttcaagcgcctgcgagatggggacaggttgtggtatgagaaccctggggtgttctccccggcccagctgactcagatcaagcagacgtcgctggccaggatcctatgcgacaacgcggacaacatcacccgggtgcagagcgacgtgttcagggtggcggagttccctcacggctacggcagctgtgacgagatccccagggtagacctccgggtgtggcaggactgctgtgaagactgtaggaccagggggcagttcaatgccttttcctatcatttccgaggcagacggtctcttgagttcagctaccaggaggacaagccgaccaagaaaacaagaccacggaaaatacccagtgttgggagacagggggaacatctcagcaacagcacctcagccttcagcacacgctcagatgcatctgggacaaatgacttcagagagtttgttctggaaatgcagaagaccatcacagacctcagaacacagataaagaaacttgaatcacggctcagtaccacagagtgcgtggatgccgggggcgaatctcacgccaacaacaccaagtggaaaaaagatgcatgcaccatttgtgaatgcaaagacgggcaggtcacctgcttcgtggaagcttgcccccctgccacctgtgctgtccccgtgaacatcccaggggcctgctgtccagtctgcttacagaagagggcggaggaaaagccctaggctcctgggaggctcctcagagtttgtctgctgtgccatcgtgagatcgggtggccgatggcagggagctgcggactgcagaccaggaaacacccagaactcgtgacatttcatgacaacgtccagctggtgctgttacagaaggcagtgcaggaggcttccaaccagagcatctgcggagaaggaggcacagcaggtgcctgaagggaagcaggcaggagtcctagcttcacgttagacttctcaggtttttatttaattcttttaaaatgaaaaattggtgctactattaaattgcacagttgaatcatttaggcgcctaaattgattttgcctcccaacaccatttctttttaaataaagcaggatacctctatatgtcagccttgccttgttcagatgccaggagccggcagacctgtcacccgcaggtggggtgagtcttggagctgccagaggggctcaccgaaatcggggttccatcacaagctatgtttaaaaagaaaattggtgtttggcaaacggaacagaacctttgatgagagcgttcacagggacactgtctgggggtgcagtgcaagcccccggcctcttccctgggaacctctgaactcctccttcctctgggctctctgtaacatttcaccacacgtcagcatctaatcccaagacaaacattcccgctgctcgaagcagctgtatagcctgtgactctccgtgtgtcagctccttccacacctgattagaacattcataagccacatttagaaacaggtttgctttcagctgtcacttgcacacatactgcctagttgtgaaccaaatgtgaaaaaacctccttcatcccattgtgtatctgatacctgccgagggccaagggtgtgtgttgacaacgccgctcccagccggccctggttgcgtccacgtcctgaacaagagccgcttccggatggctcttcccaagggaggaggagctcaagtgtcgggaactgtctaacttcaggttgtgtgagtgcgttaaaaaaaaaaaaaaaaaagaatccctatacctcatttgtatttttaaaatgcgtgatgttttatgaaattgtgtccattttttaggtattagatatggcagaaaaaccatttccactatgcaaagttcttttagacgtcagtgaaaatcaactctcatacctcatggtctctctttaattgaccaaaaccttccatttttctctaaatacaaagcgatctgtgttctgagcaacctttccccgaacacacagcttcagtgcagcacgctgacctgagtatccaccatgtgccaggcacagtgctgggcacacgaggcaccaaggtccgggccacctgcccgcagcaaggcccagctgaggtggtggagggagcccctgaggtcaggggccgtttcggttcagggtggcaggtgtccagcactggggtatggcgtcgaggcttccatggggtgggggaggccagcttccttctgacaggatgggcgcatacagtgcctggtgtgatttgtgcacaacccgtgttccaggtgcacatcctcccaaggagacacccagacccttccagcacgggccggccaagttgctgcggcggaggcagcatttcagctgtgaggaaggtcattggattcatgtgttttatctgtaaaaatggttgtcttaacttcttaacctcatattggtaagtgattgataaaaattggttggtgtttcatgacatgtggacttcttttgaaatagcaagtcaaatgtagtgaccaaattgtggaagagatttctgtcaaataggaaatgtgtaagttcgtctaaaagctgatggttatgtaagttgctcaggcactcagatgacagcagattctgggttctgggagtgttctgtgcctcttacatgccctggaggcctcatggtctcagtgctgaggcggcacacctgtagcacacctgcgtaatgtgcggtctgggccagtcacaaggaattgtgttgtctaagccaaagggggaagctgactgtgatttaccaaaaaaaattctgtaattcaaaccaaaatgtctgcggaatcaccagtttgatactctctgtaatcagaacagtgggcagtgcctgggtgaacgtgtctagcagccactgtgcgggatcgctgtaacaggagtggaatgtacatatttatttacttttctaactgctccaacagccaaatgccttttttatgaccattgtattcagttcattaccaaagaaatgtttgcactttgtaatgatgcctttcagttcaaataaatgggtcacattttcaaatgga

SEQ ID NO: 164459 - DNA, 720 bp, Homo sapiens
  Payload ID: 12397
  Gene Symbol: PXDN
  Gene Name: peroxidasin
  ENST ID: ENST00000425171
  CDS Start-End: 48-720
ggccgtggtggctccgtgcgtccgagcgtccgtccgcgccgtcggccatggccaagcgctccaggggccccgggcgccgctgcctgttggcgctcgtgctgttctgcgcctgggggacgctggccgtggtggcccagaagccgggcgcagggtgtccgagccgctgcctgtgcttccgcaccaccgtgcgctgcatgcatctgctgctggaggccgtgcccgccgtggcgccgcagacctccatcctagatcttcgctttaacagaatcagagagatccaacctggggcattcaggcggctgaggaacttgaacacattgcttctcaataataatcagatcaagaggatacctagtggagcatttgaagacttggaaaatttaaaatatctatacctgcactttaatcagatagaaactttggacccagattcgttccagcatctcccgaagctcgagaggctatttttgcataacaaccggattacacatttagttccagggacatttaatcacttggaatctatgaagagattgcgactggactcaaacacacttcactgcgactgtgaaatcctgtggttggcggatttgctgaaaacctacgcggagtcggggaacgcgcaggcagcggccatctgtgaatatcccagacgcatccagggacgctcagtggcaaccatcaccccggaagagctgaactgtgaaaggccccggatca

SEQ ID NO: 164460 - DNA, 2643 bp, Homo sapiens
  Payload ID: 12397
  Gene Symbol: PXDN
  Gene Name: peroxidasin
  ENST ID: ENST00000433670
  CDS Start-End: 1-2171
ccaggggccccgggcgccgctgcctgttggcgctcgtgctgttctgcgcctgggggacgctggccgtggtggcccagaagccgggcgcagggtgtccgagccgctgcctgtgcttccgcaccaccgtgcgctgcatgcatctgctgctggaggccgtgcccgccgtggcgccgcagacctccatcctagatcttcgctttaacagaatcagagagatccaacctggggcattcaggcggctgaggaacttgaacacattgcttctcaataataatcagatcaagaggatacctagtggagcatttgaagacttggaaaatttaaaatatctctatctgtacaagaatgagatccagtcaattgacaggcaagcatttaagggacttgcctctctagagcaactatacctgcactttaatcagatagaaactttggacccagattcgttccagcatctcccgaagctcgagaggctatttttgcataacaaccggattacacatttagttccagggacatttaatcacttggaatctatgaagagattgcgactggactcaaacacacttcactgcgactgtgaaatcctgtggttggcggatttgctgaaaacctacgcggagtcggggaacgcgcaggcagcggccatctgtgaatatcccagacgcatccagggacgctcagtggcaaccatcaccccggaagagctgaactgtgaaaggccccggatcacctccgagccccaggacgcagatgtgacctcggggaacaccgtgtacttcacctgcagagccgaaggcaaccccaagcctgagatcatctggctgcgaaacaataatgagctgagcatgaagacagattcccgcctaaacttgctggacgatgggaccctgatgatccagaacacacaggagacagaccagggtatctaccagtgcatggcaaagaacgtggccggagaggtgaagacgcaagaggtgaccctcaggtacttcgggtctccagctcgacccacttttgtaatccagccacagaatacagaggtgctggttggggagagcgtcacgctggagtgcagcgccacaggccaccccccgccgcggatctcctggacgagaggtgaccgcacacccttgccagttgacccgcgggtgaacatcacgccttctggcgggctttacatacagaacgtcgtacagggggacagcggagagtatgcgtgctctgcgaccaacaacattgacagcgtccatgccaccgctttcatcatcgtccaggctcttcctcagttcactgtgacgcctcaggacagagtcgttattgagggccagaccgtggatttccagtgtgaagccaagggcaacccgccgcccgtcatcgcctggaccaagggagggagccagctctccgtggaccggcggcacctggtcctgtcatcgggaacacttagaatctctggtgttgccctccacgaccagggccagtacgaatgccaggctgtcaacatcatcggctcccagaaggtcgtggcccacctgactgtgcagcccagagtcaccccagtgtttgccagcattcccagcgacacaacagtggaggtgggcgccaatgtgcagctcccgtgcagctcccagggcgagcccgagccagccatcacctggaacaaggatggggttcaggtgacagaaagtggaaaatttcacatcagccctgaaggattcttgaccatcaatgacgttggccctgcagacgcaggtcgctatgagtgtgtggcccggaacaccattgggtcggcctcggtgagcatggtgctcagtgtgaatgttcctgacgtcagtcgaaatggagatccgtttgtagctacctccatcgtggaagcgattgcgactgttgacagagctataaactcaacccgaacacatttgtttgacagccgtcctcgttctccaaatgatttgctggccttgttccggtatccgagggatccttacacagttgaacaggcacgggcgggagaaatctttgaacggacattgcagctcattcaggagcatgtacagcatggcttgatggtcgacctcaacggaacaagtcagtgccaaagccttttcttcctcctccatggcctgagtaacggggttgaacacgcctcagttaagtcacattcctagggaagagttccagcattttctttcccactgtgcttatgaactgtgaaattatttccttaaactgtgattcctcttgagccctacagccctgtcgctctcactttggtttaataggaatctctgggggacgtgaagtcccttggagtgctgatcaggctacagcaggtccacctgccctgagtgggttatgccatcctggccagggtgggttatgcaagcccagtccctctgcaacaaatgagccataagggaggacttggcagcgtgcttgctccctgagtgacgttgtgtcctgggaatgcggtgccacgcgtattaggagggttgttttggaagagtcccgggtctgtgaaaccagctgatgagatcacctcgggctggtgtggagatgctgttgggggaggtatgtcccccactcactctgctctggcactttgccgttgcccagtaaataacagatgcctttacatgt

SEQ ID NO: 164461 - DNA, 588 bp, Homo sapiens
  Payload ID: 12397
  Gene Symbol: PXDN
  Gene Name: peroxidasin
  ENST ID: ENST00000447941
  CDS Start-End: 1-588
tggaagctggttcccttctgcaccaggactgagcacaacggtgcttctcaataataatcagatcaagaggatacctagtggagcatttgaagacttggaaaatttaaaatatctctatctgtacaagaatgagatccagtcaattgacaggcaagcatttaagggacttgcctctctagagcaactatacctgcactttaatcagatagaaactttggacccagattcgttccagcatctcccgaagctcgagaggctatttttgcataacaaccggattacacatttagttccagggacatttaatcacttggaatctatgaagagattgcgactggactcaaacacacttcactgcgactgtgaaatcctgtggttggcggatttgctgaaaacctacgcggagtcggggaacgcgcaggcagcggccatctgtgaatatcccagacgcatccagggacgctcagtggcaaccatcaccccggaagagctgaactgtgaaaggccccggatcacctccgagccccaggacgcagatgtgacctcggggaacaccgtgtacttcacctgcagagccgaaggcaaccc

SEQ ID NO: 164462 - DNA, 740 bp, Homo sapiens
  Payload ID: 12397
  Gene Symbol: PXDN
  Gene Name: peroxidasin
  ENST ID: ENST00000453308
  CDS Start-End: 1-229
ggtgcagagcgacgtgttcagggtggcggagttccctcacggctacggcagctgtgacgagatccccagggtagacctccgggtgtggcaggactgctgtgaagactgtaggaccagggggcagttcaatgccttttcctatcatttccgaggcagacggtctcttgagttcagctaccaggaggacaagccgaccaagaaaacaagaccacggaaaatacccagataaagaaacttgaatcacggctcagtaccacagagtgcgtggatgccgggggcgaatctcacgccaacaacaccaagtggaaaaaagatgcatgcaccatttgtgaatgcaaagacgggcaggtcacctgcttcgtggaagcttgcccccctgccacctgtgctgtccccgtgaacatcccaggggcctgctgtccagtctgcttacagaagagggcggaggaaaagccctaggctcctgggaggctcctcagagtttgtctgctgtgccatcgtgagatcgggtggccgatggcagggagctgcggactgcagaccaggaaacacccagaactcgtgacatttcatgacaacgtccagctggtgctgttacagaaggcagtgcaggaggcttccaaccagagcatctgcggagaaggaggcacagcaggtgcctgaagggaagcaggcaggagtcctagcttcacgttagacttctcaggtttttatttaattcttttaaaatgaaaaattgg

SEQ ID NO: 164463 - DNA, 4805 bp, Homo sapiens
  Payload ID: 12398
  Gene Symbol: PXDNL
  Gene Name: peroxidasin-like
  Uniprot ID: A1KZ92
  ENST ID: ENST00000356297
  CDS Start-End: 102-4493
agtccagcagccaccatcaccaccactgcggttgctgctgcagctgcagctgctgctctccctccggctgcttcttcgcgtggccagcagcgaatggagcgatggagcccagactgttctgctggaccactctctttctcctggccgggtggtgcctgccagggttgccctgccccagccggtgcctttgctttaagagcaccgtccgctgcatgcacttgatgctggaccacattcctcaggtaccacagcagaccacagttctagacttgaggtttaacagaataagagaaattccagggagcgccttcaagaaactcaagaatttgaacacacttctgctgaacaacaaccacatcagaaagatttccagaaatgcttttgaaggacttgaaaatttgctatatctgtacctgtataagaatgaaatccatgcactagataagcaaacatttaaaggactcatatctttggaacatctgtatattcatttcaaccaactagaaatgctacagccagagacctttggagaccttctgagattagagcgactatttttgcataacaacaaattatctaaaattccagctgggagcttttctaatctggattcattaaaaagattgcgtctggattccaacgccctggtttgtgactgtgatctgatgtggctgggggagcttttacaaggctttgcccaacacggccacacccaggctgcggctacctgcgaatatcccaggagactccatgggcgtgcagttgcttcagtaacagtagaggaattcaattgccagagcccccgaattacttttgagccgcaggatgtggaggtaccatcaggaaataccgtctacttcacctgccgggcggaaggaaaccccaaacctgagattatttggatacacaacaaccactcattggatttggaagatgatactcgacttaatgtgtttgatgatggcacactcatgatccgaaacaccagagagtcagaccaaggtgtctatcagtgcatggccagaaattccgctggggaagccaagacacagagtgccatgctcagatactccagtcttccagccaaaccaagctttgtaatccagcctcaggacacagaggttttaattggcaccagcacaactttggaatgtatggccacaggccacccacaccctcttatcacttggaccagggacaatggattggagctggatggatccaggcacgtggcaacgtccagtggactttacttacagaacatcacacaacgggatcatggtcgatttacctgtcatgccaacaatagccacggcactgttcaagctgcagcaaacataattgtacaagctcctccacaatttacagtaacccccaaggatcaagtggtgctggaagaacatgctgtagagtggctctgtgaagctgacggcaacccacctcctgttattgtctggacaaaaacaggagggcagctccctgtggaaggccagcatacagttctctcctctggcactttgagaattgaccgtgcagcacagcacgatcaaggccaatatgaatgtcaagcagtcagttcgttgggggtgaaaaaggtgtctgtgcagctgactgtaaaacccaaagctcttgcagtgtttactcaacttcctcaggatacaagtgtcgaggttggaaagaatataaacatttcatgtcatgctcaaggagaaccacagcccataattacttggaataaggaaggtgtgcagattactgagagtggtaaattccatgtggatgatgaaggcacgctgactatctacgacgcagggttccctgaccagggaagatatgaatgtgtggctcggaattcttttggccttgctgtgaccaacatgtttcttacagtcacggctatacagggtagacaagctggcgatgactttgttgaatcttccattcttgatgctgtacagagagttgacagtgcaattaactccacacgaagacatttgttttcacaaaaacctcacacctccagtgacctgctggctcaatttcattacccgcgtgacccactgattgtggaaatggcaagagcaggggagatttttgagcacacgctgcagctgatacgggaacgtgtgaagcaggggctcactgtggacttggaaggcaaagaattccggtacaatgacttggtgtccccgcgctccctcagcctcatcgccaatttatctggatgcacagctcgcaggcctctgccaaactgctccaaccggtgtttccatgcgaagtaccgcgcccacgacggcacgtgcaacaacctgcagcagcccacgtggggcgcggcgctgaccgccttcgcgcgcctgctgcagccagcctaccgggacggcatccgcgcgccccgcgggctcggccttcctgtgggctcccgccagcccctcccgccgccccggctggtcgccacagtgtgggcgcgcgcggcggccgtcacccccgaccacagctacacgcgcatgctcatgcactggggctggtttctagagcacgacttggaccacacagtgcctgcgctgagcacagcccgcttctcggatgggcggccgtgcagctccgtctgcaccaacgaccctccttgtttccccatgaacacccggcacgccgacccccggggcacccacgcgccctgcatgctcttcgcgcgctccagccccgcgtgtgccagcggccgtccctctgcgacggtggattcagtctatgcacgagagcagatcaaccagcaaacagcctacatcgatggctccaacgtttacgggagctcggagcgggaatcccaggctctcagagacccttcggtgcctcggggtctcctgaagacaggctttccttggcctccctccggaaagcccttattgcccttttctacaggcccacccaccgagtgcgcgcgacaggagcaggagagcccctgtttcctggccggggaccaccgggccaacgagcatctggctctggccgccatgcacaccctgtggttccgggaacacaacaggatggccacggagctgtccgccctgaacccccactgggagggaaacacggtttaccaggaagccaggaagatcgtgggcgcggagctgcagcacatcacctacagccactggctgcctaaggtcctgggggaccctggcactaggatgctgaggggttaccgaggctacaaccccaacgtgaatgcaggcatcattaactcttttgctactgcagcctttagatttggccacacattaatcaatcctattctttaccgactgaatgccaccttaggtgaaatttccgaaggccaccttccgttccataaagcgctcttttcaccgtccagaataatcaaggaaggtgggatagacccggttctccgggggctgtttggcgtggctgctaaatggcgggcaccctcctaccttctcagtcctgagctgacccagaggctcttctccgcggcttattctgcggccgtggattcggctgccaccatcattcaaaggggtagagaccacgggatcccaccatatgttgacttcagagttttctgtaatttgacttcagttaagaactttgaggatcttcaaaatgaaattaaagattcagagattagacaaaaactgagaaagttgtacggctctccaggtgacattgacctctggcccgcccttatggttgaagacctgattcctggtacaagagtgggaccaacacttatgtgcctgtttgttacccagtttcagcggctaagagatggagataggttctggtatgaaaaccctggagtatttaccccggcacaactcactcagctgaagcaggcgtccctgagccgggtgctttgtgacaatggtgacagcattcagcaagtgcaggctgatgtctttgtaaaggcagaatacccacaggattacctgaactgcagcgagatcccgaaggtggacctgcgagtgtggcaagactgctgtgcagactgtaggagtagaggacagttcagagcagtgacgcaagagtctcaaaagaaacgctcagctcaatacagctatcctgttgataaggatatggagttaagtcatctaagaagtaggcaacaagataaaatatatgtgggtgaagatgctagaaatgtgacagttctggcaaaaacaaagttctcccaagatttcagcacgtttgcagcggaaattcaggaaaccatcacagcactcagagagcagataaacaagctggaggcacgcctgaggcaggcagggtgtacagatgttagaggggttccaaggaaggccgaggagcgctggatgaaagaagactgcactcactgcatttgtgagagtggccaggtcacctgtgtggtggagatttgtcccccggctccctgtcccagtcctgaattggtgaaaggaacctgctgtccagtttgcagagaccgaggaatgccaagtgattccccagagaagcgctaataaaagttttgtgctgttgagccccaaatgggaaatttctcaggaagagacatttaggacttcagaacttttaacttgtagtcacattgttgatatggaaaccactgacttaagcaacttagttcatctaatcttacatatacttacgatcttttattttttcattttctaacataccttgaaataattcaaaactaaaagcaataaagtgcatatgaagtgtttgatcataagaaatatttcttactgtaagctgtcagttttatatgccacacctggaaataaaaagaatatcatggaatatttaaaaaa

SEQ ID NO: 164464 - DNA, 1925 bp, Homo sapiens
  Payload ID: 12398
  Gene Symbol: PXDNL
  Gene Name: peroxidasin-like
  ENST ID: ENST00000522933
  CDS Start-End: 1-1613
atgcacgagagcagatcaaccagcaaacagcctacatcgatggctccaacgtttacgggagctcggagcgggaatcccaggctctcagagacccttcggtgcctcggggtctcctgaagacaggctttccttggcctccctccggaaagcccttattgcccttttctacaggcccacccaccgagtgcgcgcgacaggagcaggagagcccctgtttcctggccggggaccaccgggccaacgagcatctggctctggccgccatgcacaccctgtggttccgggaacacaacaggatggccacggagctgtccgccctgaacccccactgggagggaaacacggtttaccaggaagccaggaagatcgtgggcgcggagctgcagcacatcacctacagccactggctgcctaaggtcctgggggaccctggcactaggatgctgaggggttaccgaggctacaaccccaacgtgaatgcaggcatcattaactcttttgctactgcagcctttagatttggccacacattaatcaatcctattctttaccgactgaatgccaccttaggtgaaatttccgaaggccaccttccgttccataaagcgctcttttcaccgtccagaataatcaaggaaggtgggatagacccggttctccgggggctgtttggcgtggctgctaaatggcgggcaccctcctaccttctcagtcctgagctgacccagaggctcttctccgcggcttattctgcggccgtggattcggctgccaccatcattcaaaggggtagagaccacgggatcccaccatatgttgacttcagagttttctgtaatttgacttcagttaagaactttgaggatcttcaaaatgaaattaaagattcagagattagacaaaaactgagaaagttctggtatgaaaaccctggagtatttaccccggcacaactcactcagctgaagcaggcgtccctgagccgggtgctttgtgacaatggtgacagcattcagcaagtgcaggctgatgtctttgtaaaggcagaatacccacaggattacctgaactgcagcgagatcccgaaggtggacctgcgagtgtggcaagactgctgtgcagactgtaggagtagaggacagttcagagcagtgacgcaagagtctcaaaagaaacgctcagctcaatacagctatcctgttgataaggatatggagttaagtcatctaagaagtaggcaacaagataaaatatatgtgggtgaagatgctagaaatgtgacagttctggcaaaaacaaagttctcccaagatttcagcacgtttgcagcggaaattcaggaaaccatcacagcactcagagagcagataaacaagctggaggcacgcctgaggcaggcagggtgtacagatgttagaggggttccaaggaaggccgaggagcgctggatgaaagaagactgcactcactgcatttgtgagagtggccaggtcacctgtgtggtggagatttgtcccccggctccctgtcccagtcctgaattggtgaaaggaacctgctgtccagtttgcagagaccgaggaatgccaagtgattccccagagaagcgctaataaaagttttgtgctgttgagccccaaatgggaaatttctcaggaagagacatttaggacttcagaacttttaacttgtagtcacattgttgatatggaaaccactgacttaagcaacttagttcatctaatcttacatatacttacgatcttttattttttcattttctaacataccttgaaataattcaaaactaaaagcaataaagtgcatatgaagtgtttgatcataagaaatatttcttactgtaagctgtcagttttatatgccacacctggaaataaaaagaatatcatggaatatttaaaaaa

SEQ ID NO: 164465 - DNA, 2258 bp, Homo sapiens
  Payload ID: 12398
  Gene Symbol: PXDNL
  Gene Name: peroxidasin-like
  ENST ID: ENST00000522628
  CDS Start-End: 1-1749
aacaacctgcagcagcccacgtggggcgcggcgctgaccgccttcgcgcgcctgctgcagccagcctaccgggacggcatccgcgcgccccgcgggctcggccttcctgtgggctcccgccagcccctcccgccgccccggctggtcgccacagtgtgggcgcgcgcggcggccgtcacccccgaccacagctacacgcgcatgctcatgcactggggctggtttctagagcacgacttggaccacacagtgcctgcgctgagcacagcccgcttctcggatgggcggccgtgcagctccgtctgcaccaacgaccctccttgtttccccatgaacacccggcacgccgacccccggggcacccacgcgccctgcatgctcttcgcgcgctccagccccgcgtgtgccagcggccgtccctctgcgacggtggattcagtctatgcacgagagcagatcaaccagcaaacagcctacatcgatggctccaacgtttacgggagctcggagcgggaatcccaggctctcagagacccttcggtgcctcggggtctcctgaagacaggctttccttggcctccctccggaaagcccttattgcccttttctacaggcccacccaccgagtgcgcgcgacaggagcaggagagcccctgtttcctggccggggaccaccgggccaacgagcatctggctctggccgccatgcacaccctgtggttccgggaacacaacaggatggccacggagctgtccgccctgaacccccactgggagggaaacacggtttaccaggaagccaggaagatcgtgggcgcggagctgcagcacatcacctacagccactggctgcctaaggtcctgggggaccctggcactaggatgctgaggggttaccgaggctacaaccccaacgtgaatgcaggcatcattaactcttttgctactgcagcctttagatttggccacacattaatcaatcctattctttaccgactgaatgccaccttaggtgaaatttccgaaggccaccttccgttccataaagcgctcttttcaccgtccagaataatcaaggaaggtgggatagacccggttctccgggggctgtttggcgtggctgctaaatggcgggcaccctcctaccttctcagtcctgagctgacccagaggctcttctccgcggcttattctgcggccgtggattcggctgccaccatcattcaaaggggtagagaccacgggatcccaccatatgttgacttcagagttttctgtaatttgacttcagttaagaactttgaggatcttcaaaatgaaattaaagattcagagattagacaaaaactgagaaagttgtacggctctccaggtgacattgacctctggcccgcccttatggttgaagacctgattcctggtacaagagtgggaccaacacttatgtgcctgtttgttacccagtttcagcggctaagagatggagataggttctggtatgaaaaccctggagtatttaccccggcacaactcactcagctgaagcaggcgtccctgagccgggtgctttgtgacaatggtgacagcattcagcaagtgcaggctgatgtctttgtaaaggcagaatacccacaggattacctgaactgcagcgagatcccgaaggtggacctgcgagtgtggcaagactgctgtgcagataaacaagctggaggcacgcctgaggcaggcagggtgtacagatgttagaggggttccaaggaaggccgaggagcgctggatgaaagaagactgcactcactgcatttgtgagagtggccaggtcacctgtgtggtggagatttgtcccccggctccctgtcccagtcctgaattggtgaaaggaacctgctgtccagtttgcagagaccgaggaatgccaagtgattccccagagaagcgctaataaaagttttgtgctgttgagccccaaatgggaaatttctcaggaagagacatttaggacttcagaacttttaacttgtagtcacattgttgatatggaaaccactgacttaagcaacttagttcatctaatcttacatatacttacgatcttttattttttcattttctaacataccttgaaataattcaaaactaaaagcaataaagtgcatatgaagtgtttgatcataagaaatatttcttactgtaagctgtcagttttatatgccacacctggaaataaaaagaatatcatggaatatttaaaaaat

SEQ ID NO: 164466 - DNA, 1234 bp, Homo sapiens
  Payload ID: 12399
  Gene Symbol: PRDX1
  Gene Name: peroxiredoxin 1
  Uniprot ID: Q06830
  ENST ID: ENST00000262746
  CDS Start-End: 342-941
gactctcgcgagatccctactggctataaaggcagcgccccggagagctcttgcgcgtcttgttcttgcctggtgtcggtggttagtttctgcgacttgtgttgggactggtgagtgtgggcagtgcggcccctgcggagtgaggcgcggcgcgcccttcttgcctgttgcctcttcctcctcctgtccggggcccgcccgcgctcgggtgggggtgctgtgatgcgtgaggcagccgggggaggcccggagtccgagactgcttgagcgctgcgcacacccctctcgtgggccccccacgtaggtgcgggaacctggttgaaccccaagctgataggaagatgtcttcaggaaatgctaaaattgggcaccctgcccccaacttcaaagccacagctgttatgccagatggtcagtttaaagatatcagcctgtctgactacaaaggaaaatatgttgtgttcttcttttaccctcttgacttcacctttgtgtgccccacggagatcattgctttcagtgatagggcagaagaatttaagaaactcaactgccaagtgattggtgcttctgtggattctcacttctgtcatctagcatgggtcaatacacctaagaaacaaggaggactgggacccatgaacattcctttggtatcagacccgaagcgcaccattgctcaggattatggggtcttaaaggctgatgaaggcatctcgttcaggggcctttttatcattgatgataagggtattcttcggcagatcactgtaaatgacctccctgttggccgctctgtggatgagactttgagactagttcaggccttccagttcactgacaaacatggggaagtgtgcccagctggctggaaacctggcagtgataccatcaagcctgatgtccaaaagagcaaagaatatttctccaagcagaagtgagcgctgggctgttttagtgccaggctgcggtgggcagccatgagaacaaaacctcttctgtattttttttttccattagtaaaacacaagacttcagattcagccgaattgtggtgtcttacaaggcaggcctttcctacagggggtggagagaccagcctttcttcctttggtaggaatggcctgagttggcgttgtgggcaggctactggtttgtatgatgtattagtagagcaacccattaatcttttgtagtttgtattaaacttgaactgagaccttgatgagtcttt

SEQ ID NO: 164467 - DNA, 609 bp, Homo sapiens
  Payload ID: 12399
  Gene Symbol: PRDX1
  Gene Name: peroxiredoxin 1
  ENST ID: ENST00000372079
  CDS Start-End: 38-331
agtttctgcgacttgtgttgggactgctgataggaagatgtcttcaggaaatgctaaaattgggcaccctgcccccaacttcaaagccacagctgatgaaggcatctcgttcaggggcctttttatcattgatgataagggtattcttcggcagatcactgtaaatgacctccctgttggccgctctgtggatgagactttgagactagttcaggccttccagttcactgacaaacatggggaagtgtgcccagctggctggaaacctggcagtgataccatcaagcctgatgtccaaaagagcaaagaatatttctccaagcagaagtgagcgctgggctgttttagtgccaggctgcggtgggcagccatgagaacaaaacctcttctgtattttttttttccattagtaaaacacaagacttcagattcagccgaattgtggtgtcttacaaggcaggcctttcctacagggggtggagagaccagcctttcttcctttggtaggaatggcctgagttggcgttgtgggcaggctactggtttgtatgatgtattagtagagcaacccattaatcttttgtagtttgtattaaacttgaactgaga

SEQ ID NO: 164468 - DNA, 1021 bp, Homo sapiens
  Payload ID: 12399
  Gene Symbol: PRDX1
  Gene Name: peroxiredoxin 1
  Uniprot ID: Q06830
  ENST ID: ENST00000319248
  CDS Start-End: 140-739
ggcacccccgtccgttccgactctcgcgagatccctactggctataaaggcagcgccccggagagctcttgcgcgtcttgttcttgcctggtgtcggtggttagtttctgcgacttgtgttgggactgctgataggaagatgtcttcaggaaatgctaaaattgggcaccctgcccccaacttcaaagccacagctgttatgccagatggtcagtttaaagatatcagcctgtctgactacaaaggaaaatatgttgtgttcttcttttaccctcttgacttcacctttgtgtgccccacggagatcattgctttcagtgatagggcagaagaatttaagaaactcaactgccaagtgattggtgcttctgtggattctcacttctgtcatctagcatgggtcaatacacctaagaaacaaggaggactgggacccatgaacattcctttggtatcagacccgaagcgcaccattgctcaggattatggggtcttaaaggctgatgaaggcatctcgttcaggggcctttttatcattgatgataagggtattcttcggcagatcactgtaaatgacctccctgttggccgctctgtggatgagactttgagactagttcaggccttccagttcactgacaaacatggggaagtgtgcccagctggctggaaacctggcagtgataccatcaagcctgatgtccaaaagagcaaagaatatttctccaagcagaagtgagcgctgggctgttttagtgccaggctgcggtgggcagccatgagaacaaaacctcttctgtattttttttttccattagtaaaacacaagacttcagattcagccgaattgtggtgtcttacaaggcaggcctttcctacagggggtggagagaccagcctttcttcctttggtaggaatggcctgagttggcgttgtgggcaggctactggtttgtatgatgtattagtagagcaacccattaatcttttgtagtttgtattaaacttgaactgagacctt

SEQ ID NO: 164469 - DNA, 795 bp, Homo sapiens
  Payload ID: 12399
  Gene Symbol: PRDX1
  Gene Name: peroxiredoxin 1
  ENST ID: ENST00000424390
  CDS Start-End: 282-795
agaggccaggtgcggtggctcgcgcttacattcctagcactttgggaggccaaggcgggcggatcacctgaggtcaggcgttggagaccagcctagccaacatgatgaaacctcgtctctactaaaaatacaaaaaattagctgggcgtggtggtgcgtgcttgtagtcccagacactccggaggtgaggcgggagaatcgcttgagcccgggaggtggaggttgcagtaagccaacaccgtgccactgcactacagcctgggcgacaggctgataggaagatgtcttcaggaaatgctaaaattgggcaccctgcccccaacttcaaagccacagctgttatgccagatggtcagtttaaagatatcagcctgtctgactacaaaggaaaatatgttgtgttcttcttttaccctcttgacttcacctttgtgtgccccacggagatcattgctttcagtgatagggcagaagaatttaagaaactcaactgccaagtgattggtgcttctgtggattctcacttctgtcatctagcatgggtcaatacacctaagaaacaaggaggactgggacccatgaacattcctttggtatcagacccgaagcgcaccattgctcaggattatggggtcttaaaggctgatgaaggcatctcgttcaggggcctttttatcattgatgataagggtattcttcggcagatcactgtaaatgacctccctgttggccgctctgtggatgagactttgagactagttcaggccttccagttcactgacaaacatggggaag

SEQ ID NO: 164470 - DNA, 606 bp, Homo sapiens
  Payload ID: 12399
  Gene Symbol: PRDX1
  Gene Name: peroxiredoxin 1
  ENST ID: ENST00000447184
  CDS Start-End: 93-606
gactctcgcgagatccctactggctataaaggcagcgccccggagagctcttgcgcgtcttgttcttgcctggtgtcggtgctgataggaagatgtcttcaggaaatgctaaaattgggcaccctgcccccaacttcaaagccacagctgttatgccagatggtcagtttaaagatatcagcctgtctgactacaaaggaaaatatgttgtgttcttcttttaccctcttgacttcacctttgtgtgccccacggagatcattgctttcagtgatagggcagaagaatttaagaaactcaactgccaagtgattggtgcttctgtggattctcacttctgtcatctagcatgggtcaatacacctaagaaacaaggaggactgggacccatgaacattcctttggtatcagacccgaagcgcaccattgctcaggattatggggtcttaaaggctgatgaaggcatctcgttcaggggcctttttatcattgatgataagggtattcttcggcagatcactgtaaatgacctccctgttggccgctctgtggatgagactttgagactagttcaggccttccagttcactgacaaacatggggaag

SEQ ID NO: 164471 - DNA, 987 bp, Homo sapiens
  Payload ID: 12400
  Gene Symbol: PRDX2
  Gene Name: peroxiredoxin 2
  Uniprot ID: P32119
  ENST ID: ENST00000301522
  CDS Start-End: 130-726
cgccgtgcacgtcttggttcgggccgggcataaaaggcttcgcggcccagggctcacttggcgctgagaacgcgggtccacgcgtgtgatcgtccgtgcgtctagcctttgcccacgcagctttcagtcatggcctccggtaacgcgcgcatcggaaagccagcccctgacttcaaggccacagcggtggttgatggcgccttcaaagaggtgaagctgtcggactacaaagggaagtacgtggtcctctttttctaccctctggacttcacttttgtgtgccccaccgagatcatcgcgttcagcaaccgtgcagaggacttccgcaagctgggctgtgaagtgctgggcgtctcggtggactctcagttcacccacctggcttggatcaacaccccccggaaagagggaggcttgggccccctgaacatccccctgcttgctgacgtgaccagacgcttgtctgaggattacggcgtgctgaaaacagatgagggcattgcctacaggggcctctttatcatcgatggcaagggtgtccttcgccagatcactgttaatgatttgcctgtgggacgctccgtggatgaggctctgcggctggtccaggccttccagtacacagacgagcatggggaagtttgtcccgctggctggaagcctggcagtgacacgattaagcccaacgtggatgacagcaaggaatatttctccaaacacaattaggctggctaacggatagtgagcttgtgcccctgcctaggtgcctgtgctgggtgtccacctgtgcccccacctgggtgccctatgctgacccaggaaaggccagacctgcccctccaaactccacagtatgggaccctggagggctaggccaaggccttctcatgcctccacctagaagctgaatagtgacgccctcccccaagcccacccagccgcacacaggcctagaggtaaccaataaagtattagggaaaggtgtga

SEQ ID NO: 164472 - DNA, 784 bp, Homo sapiens
  Payload ID: 12400
  Gene Symbol: PRDX2
  Gene Name: peroxiredoxin 2
  ENST ID: ENST00000334482
  CDS Start-End: 58-468
cgggtccacgcgtgtgatcgtccgtgcgtctagcctttgcccacgcagctttcagtcatggcctccggtaacgcgcgcatcggaaagccagcccctgacttcaaggccacagcggtggttgatggcgccttcaaagaggtgaagctgtcggactacaaagggaagtacgtggtcctctttttctaccctctggacttcacttttgtgtgccccaccgagatcatcgcgttcagcaaccgtgcagaggacttccgcaagctgggctgtgaagtgctgggcgtctcggtggactctcagttcacccacctggcttggatcaacaccccccggaaagagggaggcttgggccccctgaacatccccctgcttgctgacgtgaccagacgcttgtctgaggattacggcgtgctgaaaacagatgagggcattgcctacagtttgtcccgctggctggaagcctggcagtgacacgattaagcccaacgtggatgacagcaaggaatatttctccaaacacaattaggctggctaacggatagtgagcttgtgcccctgcctaggtgcctgtgctgggtgtccacctgtgcccccacctgggtgccctatgctgacccaggaaaggccagacctgcccctccaaactccacagtatgggaccctggagggctaggccaaggccttctcatgcctccacctagaagctgaatagtgacgccctcccccaagcccacccagccgcacacaggcctagaggtaaccaataaagtattagggaaaggtgtga

SEQ ID NO: 164473 - DNA, 1591 bp, Homo sapiens
  Payload ID: 12401
  Gene Symbol: PRDX3
  Gene Name: peroxiredoxin 3
  Uniprot ID: P30048
  ENST ID: ENST00000298510
  CDS Start-End: 44-814
ccctgcgtctctgcccgccccgtggcgcccgagtgcactgaagatggcggctgctgtaggacggttgctccgagcgtcggttgcccgacatgtgagtgccattccttggggcatttctgccactgcagccctcaggcctgctgcatgtggaagaacgagcttgacaaatttattgtgttctggttccagtcaagcaaaattattcagcaccagttcctcatgccatgcacctgctgtcacccagcatgcaccctattttaagggtacagccgttgtcaatggagagttcaaagacctaagccttgatgactttaaggggaaatatttggtgcttttcttctatcctttggatttcacctttgtgtgtcctacagaaattgttgcttttagtgacaaagctaacgaatttcacgacgtgaactgtgaagttgtcgcagtctcagtggattcccactttagccatcttgcctggataaatacaccaagaaagaatggtggtttgggccacatgaacatcgcactcttgtcagacttaactaagcagatttcccgagactacggtgtgctgttagaaggttctggtcttgcactaagaggtctcttcataattgaccccaatggagtcatcaagcatttgagcgtcaacgatctcccagtgggccgaagcgtggaagaaaccctccgcttggtgaaggcgttccagtatgtagaaacacatggagaagtctgcccagcgaactggacaccggattctcctacgatcaagccaagtccagctgcttccaaagagtactttcagaaggtaaatcagtagatcacccatgtgtatctgcaccttctcaactgagagaagaaccacagttgaaacctgcttttatcattttcaagatggttatttgtagaaggcaaggaaccaattatgcttgtattcataagtattactctaaatgttttgtttttgtaattctggctaagaccttttaaacatggttagttgctagtacaaggaatcctttattggtaacatcttggtggctggctagctagtttctacagaacataatttgcctctatagaaggctattcttagatcatgtctcaatggaaacactcttctttcttagccttacttgaatcttgcctataataaagtagagcaacacacattgaaagcttctgatcaacggtcctgaaattttcatcttgaatgtctttgtattaaactgaattttcttttaagctaacaaagatcataattttcaatgattagccgtgtaactcctgcaatgaatgtttatgtgattgaagcaaatgtgaatcgtattattttaaaaagtggcagagtgacttaactgatcatgcatgatccctcatccctgaaattgagtttatgtagtcattttacttattttattcattagctaactttgtctatgtatatttctagatattgattagtgtaatcgattataaaggatatttatcaaatccagggattgcattttgaaattataattattttctttgctgaagtattcattgtaaaacatacaaaataaacatattttaaaacatttgcattttaccacca

SEQ ID NO: 164474 - DNA, 852 bp, Homo sapiens
  Payload ID: 12402
  Gene Symbol: PRDX4
  Gene Name: peroxiredoxin 4
  ENST ID: ENST00000379331
  CDS Start-End: 21-581
gtttctgcgctcgcgtggtcatggaggcgctgccgctgctagccgcgacaactccggaccacggccgccaccgaaggctgcttctgctgccgctactgctgttcctgctgccggctggagctgtgcagggctgggagacagaggagaggccccggactcgcgaagaggagtgccacttctacgcgggtggacaagtgtacccgggagaggcatcccgggtatcggtcgccgaccactccctgcacctaagcaaagcgaagatttccaagccagcgccctactgggaaggaacagctgtgatcgatggagaatttaaggagctgaagttaactgattatcgtgggaaatacttggttttcttcttctacccacttgatttcacatttgtgtgtccaactgaaattatcgcttttggcgacagacttgaagaattcagatctataaatactgaagtggtagcatgctctgttgattcacagtttacccatttggcctggtcagtatcttacacttatattcgtagaaaaaaaagaatggatttactcttaaagcatggacagataactcttgatatgatataagaatatagtcatttatcagacaattcaggaatagctttatctaagagtaatacatgtaactacacattttccaggttaaaaaaagagagaagagtaatataatcagctgctataataaaaatgcttaaggattttataggacatttcaaaataaggggaaaagttaaatgcaatagatgtgatttctatagcgaaaaccactgaattatatgcttatgataaattgggttaccataatctggaggaaaaaaatctttaaaatatgccattt

SEQ ID NO: 164475 - DNA, 1005 bp, Homo sapiens
  Payload ID: 12402
  Gene Symbol: PRDX4
  Gene Name: peroxiredoxin 4
  Uniprot ID: Q13162
  ENST ID: ENST00000379341
  CDS Start-End: 126-941
gggaggagctggtctcgcgaggccgcgccccggttcgcgcgggcgtcgtgcacgcggttgtagctgcccggcggcggcagaagcggcgctcgcgccaagggacgtgtttctgcgctcgcgtggtcatggaggcgctgccgctgctagccgcgacaactccggaccacggccgccaccgaaggctgcttctgctgccgctactgctgttcctgctgccggctggagctgtgcagggctgggagacagaggagaggccccggactcgcgaagaggagtgccacttctacgcgggtggacaagtgtacccgggagaggcatcccgggtatcggtcgccgaccactccctgcacctaagcaaagcgaagatttccaagccagcgccctactgggaaggaacagctgtgatcgatggagaatttaaggagctgaagttaactgattatcgtgggaaatacttggttttcttcttctacccacttgatttcacatttgtgtgtccaactgaaattatcgcttttggcgacagacttgaagaattcagatctataaatactgaagtggtagcatgctctgttgattcacagtttacccatttggcctggattaatacccctcgaagacaaggaggacttgggccaataaggattccacttctttcagatttgacccatcagatctcaaaggactatggtgtatacctagaggactcaggccacactcttagaggtctcttcattattgatgacaaaggaatcctaagacaaattactctgaatgatcttcctgtgggtagatcagtggatgagacactacgtttggttcaagcattccagtacactgacaaacacggagaagtctgccctgctggctggaaacctggtagtgaaacaataatcccagatccagctggaaagctgaagtatttcgataaactgaattgagaaatacttcttcaagttatgatgcttgaaagttctcaataaagttcacggtttcattaccaca

SEQ ID NO: 164476 - DNA, 815 bp, Homo sapiens
  Payload ID: 12402
  Gene Symbol: PRDX4
  Gene Name: peroxiredoxin 4
  ENST ID: ENST00000379349
  CDS Start-End: 259-815
agggagctccaacagaactgagggacgaacagtaggtgcctgagagctggccgatctggtcactctctccagtgggccacaggggcccacttggtgggcagtctctgctgccagctagggcatctcagctcagcccagagcaaagacgtgtagggacataacgctttcctcaagcttcctttcccaggtccaaacttagaggcccagttttgggcctagaattcactgaggtttgtggctgtttgtccaacagtcaccatggatcaccgaagccgactacggggcacaggcctgaaccgaatccctgggactcagtcccgagccccccgagtcccactccccttccacgtgcaacaggaggccagggaaggagaagactgggagcgagagccacctcgtcagaggcctcctatctatgagccaccagaaagtgaagagctgccagataatgttatggtttccaagccagcgccctactgggaaggaacagctgtgatcgatggagaatttaaggagctgaagttaactgattatcgtgggaaatacttggttttcttcttctacccacttgatttcacatttgtgtgtccaactgaaattatcgcttttggcgacagacttgaagaattcagatctataaatactgaagtggtagcatgctctgttgattcacagtttacccatttggcctggattaatacccctcgaagacaaggaggacttgggccaataaggattccacttctttcagatttgacccatcagatctcaaaggactatggtgtatacctagaggactcaggccacactcttag

SEQ ID NO: 164477 - DNA, 554 bp, Homo sapiens
  Payload ID: 12402
  Gene Symbol: PRDX4
  Gene Name: peroxiredoxin 4
  ENST ID: ENST00000439422
  CDS Start-End: 1-484
gtgtccaactgaaattatcgcttttggcgacagacttgaagaattcagatctataaatactgaagtggtagcatgctctgttgattcacagtttacccatttggcctggattaatacccctcgaagacaaggaggacttgggccaataaggattccacttctttcagatttgacccatcagatctcaaaggactatggtgtatacctagaggactcaggccacactcttagaggtctcttcattattgatgacaaaggaatcctaagacaaattactctgaatgatcttcctgtgggtagatcagtggatgagacactacgtttggttcaagcattccagtacactgacaaacacggagaagtctgccctgctggctggaaacctggtagtgaaacaatcaaacctgaagataccatgaaagcctggtggccaagagagagctataatcccagatccagctggaaagctgaagtatttcgataaactgaattgagaaatacttcttcaagttatgatgcttgaaagttctcaataaagttcacggtttcattac

SEQ ID NO: 164478 - DNA, 893 bp, Homo sapiens
  Payload ID: 12403
  Gene Symbol: PRDX5
  Gene Name: peroxiredoxin 5
  Uniprot ID: P30044
  ENST ID: ENST00000265462
  CDS Start-End: 129-773
cgcgcctgcgcagtggaggcggcccaggcccgccttccgcagggtgtcgccgctgtgccgctagcggtgccccgcctgctgcggtggcaccagccaggaggcggagtggaagtggccgtggggcgggtatgggactagctggcgtgtgcgccctgagacgctcagcgggctatatactcgtcggtggggccggcggtcagtctgcggcagcggcagcaagacggtacagtgaaggagagtgggcgtctggcggggtccgcagtttcagcagagccgctgcagccatggccccaatcaaggtgggagatgccatcccagcagtggaggtgtttgaaggggagccagggaacaaggtgaacctggcagagctgttcaagggcaagaagggtgtgctgtttggagttcctggggccttcacccctggatgttccaagacacacctgccagggtttgtggagcaggctgaggctctgaaggccaagggagtccaggtggtggcctgtctgagtgttaatgatgcctttgtgactggcgagtggggccgagcccacaaggcggaaggcaaggttcggctcctggctgatcccactggggcctttgggaaggagacagacttattactagatgattcgctggtgtccatctttgggaatcgacgtctcaagaggttctccatggtggtacaggatggcatagtgaaggccctgaatgtggaaccagatggcacaggcctcacctgcagcctggcacccaatatcatctcacagctctgaggccctgggccagattacttcctccacccctccctatctcacctgcccagccctgtgctggggccctgcaattggaatgttggccagatttctgcaataaacacttgtggtttgcggcca

SEQ ID NO: 164479 - DNA, 596 bp, Homo sapiens
  Payload ID: 12403
  Gene Symbol: PRDX5
  Gene Name: peroxiredoxin 5
  Uniprot ID: P30044
  ENST ID: ENST00000352435
  CDS Start-End: 35-547
caggaggcggagtggaagtggccgtggggcgggtatgggactagctggcgtgtgcgccctgagacgctcagcgggctatatactcgtcggtggggccggcggtcagtctgcggcagcggcagcaagacggtacagtgaaggagagtgggcgtctggcggggtccgcagtttcagcagagccgctgcagccatggccccaatcaaggtgggagatgccatcccagcagtggaggtgtttgaaggggagccagggaacaaggtgaacctggcagagctgttcaagggcaagaagggtgtgctgtttggagttcctggggccttcacccctggatgttccaaggttcggctcctggctgatcccactggggcctttgggaaggagacagacttattactagatgattcgctggtgtccatctttgggaatcgacgtctcaagaggttctccatggtggtacaggatggcatagtgaaggccctgaatgtggaaccagatggcacaggcctcacctgcagcctggcacccaatatcatctcacagctctgaggccctgggccagattacttcctccacccctccctatctcacctgccca

SEQ ID NO: 164480 - DNA, 463 bp, Homo sapiens
  Payload ID: 12403
  Gene Symbol: PRDX5
  Gene Name: peroxiredoxin 5
  Uniprot ID: P30044
  ENST ID: ENST00000347941
  CDS Start-End: 35-412
caggaggcggagtggaagtggccgtggggcgggtatgggactagctggcgtgtgcgccctgagacgctcagcgggctatatactcgtcggtggggccggcggtcagtctgcggcagcggcagcaagacggtacagtgaaggagagtgggcgtctggcggggtccgcagtttcagcagagccgctgcagccatggccccaatcaaggttcggctcctggctgatcccactggggcctttgggaaggagacagacttattactagatgattcgctggtgtccatctttgggaatcgacgtctcaagaggttctccatggtggtacaggatggcatagtgaaggccctgaatgtggaaccagatggcacaggcctcacctgcagcctggcacccaatatcatctcacagctctgaggccctgggccagattacttcctccacccctccctatctcacctgcccagc

SEQ ID NO: 164481 - DNA, 1751 bp, Homo sapiens
  Payload ID: 12404
  Gene Symbol: PRDX6
  Gene Name: peroxiredoxin 6
  Uniprot ID: P30041
  ENST ID: ENST00000340385
  CDS Start-End: 133-807
ccccgcccccgccgccccagtccccgcccctcgcgccttcgtttattcctccgcgcgctgggacaggctgcttcttcgccagaaccaaccggttgcttgctgtcccagcggcgccccctcatcaccgtcgccatgcccggaggtctgcttctcggggacgtggctcccaactttgaggccaataccaccgtcggccgcatccgtttccacgactttctgggagactcatggggcattctcttctcccaccctcgggactttaccccagtgtgcaccacagagcttggcagagctgcaaagctggcaccagaatttgccaagaggaatgttaagttgattgccctttcaatagacagtgttgaggaccatcttgcctggagcaaggatatcaatgcttacaattgtgaagagcccacagaaaagttaccttttcccatcatcgatgataggaatcgggagcttgccatcctgttgggcatgctggatccagcagagaaggatgaaaagggcatgcctgtgacagctcgtgtggtgtttgtttttggtcctgataagaagctgaagctgtctatcctctacccagctaccactggcaggaactttgatgagattctcagggtagtcatctctctccagctgacagcagaaaaaagggttgccaccccagttgattggaaggatggggatagtgtgatggtccttccaaccatccctgaagaagaagccaaaaaacttttcccgaaaggagtcttcaccaaagagctcccatctggcaagaaatacctccgctacacaccccagccttaagtctcttggagaagctggtgctgtgagccagaggatgtcagctgccaattgtgttttcctgcagcaattccataaacacatcctggtgtcatcacagccaaggtttttaggttgctataccaatggcttattaaatgaaaatggcactaaaagtttcttgagattctttatactctctgccttcagcaatcaattccattcatacatcagcactctgctggttctgtttgaaatatgttctgtatttaaaactcaaatcttgttggatctctgcagggcttgtgaccaatgaagtcatatttgttgatggttgacaaagcttgcttcactccatcagagaatgactatcaatttttttttaactgtcctatcacgtcctctcctgtcacccattttgaagagtggcagaacttgaagttcaacttcctctgtaaatatccaagtataaagcccaggaacttctagaataacccagatgcgctttaattttttttaatatgttttgatcacagaacttctagaataacccagatgctctttcatattcttttaatacatcttgatcacagctgggggaaaaaaagctttttaattctataccttcctagtagataagtgaagagcagggaaagagacctttaaatattttgctataaaaaaatttgtgataagtttctatcaaaatggggagattgcagaaaaggcttcccttggctcccaaggaggtgtagcaggtgtgagcaatattagtgccatgtgcctttcacacagggtttgcatttatcagtctgttttccgatgatgtgtacatgaaagagtacaccatgtgaagagaagagagaatgattgaaaatgttttagtatagaactcttcttgcagtgggttgctattttctagattttactttttagggaacaaaataaaatcctttgttaaaactggg

SEQ ID NO: 164482 - DNA, 4385 bp, Homo sapiens
  Payload ID: 12405
  Gene Symbol: PEX1
  Gene Name: peroxisomal biogenesis factor 1
  Uniprot ID: O43933
  ENST ID: ENST00000248633
  CDS Start-End: 97-3948
cgatcgatctcctccggctccgacgtcctcggcctgccgggtcccgggtcctttgcggcgctagggtgggcgaacccagagcgacgctccgggacgatgtggggcagcgatcgcctggcgggtgctgggggaggcggggcggcagtgactgtggccttcaccaacgctcgcgactgcttcctccacctgccgcggcgtctcgtggcccagctgcatctgctgcagaatcaagctatagaagtggtctggagtcaccagcctgcattcttgagctgggtggaaggcaggcattttagtgatcaaggtgaaaatgtggctgaaattaacagacaagttggtcaaaaacttggactctcaaatgggggacaggtatttctcaagccatgttcccatgtggtatcttgtcaacaagttgaggtggaacccctctcagcagatgattgggagatactggagctgcatgctgtttcccttgaacaacatcttctagatcaaattcgaatagtttttccaaaagccatttttcctgtttgggttgatcaacaaacgtacatatttatccaaattgttgcactaataccagctgcctcttatggaaggctggaaactgacaccaaactccttattcagccaaagacacgccgagccaaagagaatacattttcaaaagctgatgctgaatataaaaaacttcatagttatggaagagaccagaaaggaatgatgaaagaacttcaaaccaagcaacttcagtcaaatactgtgggaatcactgaatctaatgaaaacgagtcagagattccagttgactcatcatcagtagcaagtttatggactatgataggaagcattttttcctttcaatctgagaagaaacaagagacatcttggggtttaactgaaatcaatgcattcaaaaatatgcagtcaaaggttgttcctctagacaatattttcagagtatgcaaatctcaacctcctagtatatataacgcgtcagcaacctctgtttttcataaacactgtgccattcatgtatttccatgggaccaggaatattttgatgtagagcccagctttactgtgacatatggaaagctagttaagctactttctccaaagcaacagcaaagtaaaacaaaacaaaatgtgttatcacctgaaaaagagaagcagatgtcagagccactagatcaaaaaaaaattaggtcagatcataatgaagaagatgagaaggcctgtgtgctacaagtagtctggaatggacttgaagaattgaacaatgccatcaaatataccaaaaatgtagaagttctccatcttgggaaagtctggattccagatgacctgaggaagagactaaatatagaaatgcatgccgtagtcaggataactccagtggaagttacccctaaaattccaagatctctaaagttacaacctagagagaatttacctaaagacataagtgaagaagacataaaaactgtattttattcatggctacagcagtctactaccaccatgcttcctttggtaatatcagaggaagaatttattaagctggaaactaaagatggactgaaggaattttctctgagtatagttcattcttgggaaaaagaaaaagataaaaatatttttctgttgagtcccaatttgctgcagaagactacaatacaagtccttctagatcctatggtaaaagaagaaaacagtgaggaaattgactttattcttccttttttaaagctgagctctttgggaggagtgaattccttaggcgtatcctccttggagcacatcactcacagcctcctgggacgccctttgtctcggcagctgatgtctcttgttgcaggacttaggaatggagctcttttactcacaggaggaaagggaagtggaaaatcaactttagccaaagcaatctgtaaagaagcatttgacaaactggatgcccatgtggagagagttgactgtaaagctttacgaggaaaaaggcttgaaaacatacaaaaaaccctagaggtggctttctcagaggcagtgtggatgcagccatctgttgtcctgctggatgaccttgacctcattgctggactgcctgctgtcccggaacatgagcacagtcctgatgcggtgcagagccagcggcttgctcatgctttgaatgatatgataaaagagtttatctccatgggaagtttggttgcactgattgccacaagtcagtctcagcaatctctacatcctttacttgtttctgctcaaggagttcacatatttcagtgcgtccaacacattcagcctcctaatcaggaacaaagatgtgaaattctgtgtaatgtaataaaaaataaattggactgtgatataaacaagttcaccgatcttgacctgcagcatgtagctaaagaaactggcgggtttgtggctagagattttacagtacttgtggatcgagccatacattctcgactctctcgtcagagtatatccaccagagaaaaattagttttaacaacattggacttccaaaaggctctccgcggatttcttcctgcgtctttgcgaagtgtcaacctgcataaacctagagacctgggttgggacaagattggtgggttacatgaagttaggcagatactcatggatactatccagttacctgccaagtatccagaattatttgcaaacttgcccatacgacaaagaacaggaatactgttgtatggtccgcctggaacaggaaaaaccttactagctggggtaattgcacgagagagtagaatgaattttataagtgtcaaggggccagagttactcagcaaatacattggagcaagtgaacaagctgttcgggatatttttattagagcacaggctgcaaagccctgcattcttttctttgatgaatttgaatccattgctcctcggcggggtcatgataatacaggagttacagaccgagtagttaaccagttgctgactcagttggatggagtagaaggcttacagggtgtttatgtattggctgctactagtcgccctgacttgattgaccctgccctgcttaggcctggtcgactagataaatgtgtatactgtcctcctcctgatcaggtgtcacgtcttgaaattttaaatgtcctcagtgactctctacctctggcagatgatgttgaccttcagcatgtagcatcagtaactgactcctttactggagctgatctgaaagctttactttacaatgcccaattggaggccttacatggaatgctgctctcgagtggactccaggatggaagttccagctctgatagtgacctaagtctgtcttcaatggtctttcttaaccatagcagtggctctgacgattcagctggagatggagaatgtggcttagatcagtcccttgtttctttagagatgtccgagatccttccagatgaatcaaaattcaatatgtaccggctctactttggaagctcttatgaatcagaacttggaaatggaacctcttctgatttgagctcacaatgtctctctgcaccaagctccatgactcaggatttgcctggagttcctgggaaagaccagttgttttcacagcctccagtgttaaggacagcttcacaagagggttgccaagaacttacacaagaacaaagagatcaactgagggcagatatcagtattatcaaaggcagataccggagccaaagtggagaggacgaatccatgaaccaaccaggaccaatcaaaaccagactggctattagtcagtcacatttaatgactgcacttggtcacacaagaccatccattagtgaagatgactggaagaattttgctgagctatatgaaagctttcaaaatccaaagaggagaaaaaatcaaagtggaacaatgtttcgacctggacagaaagtaactttagcataaaatatacttctttttgatttggttctgttaagttttttgatggcttttccatatgttgtaacaggaaaaaaatggtgtctatgaatttcttcttaatttaacaaatttggttaatttataaaatcacagattggtaaatgctataattatgtaatgatcaggattgagattaatactgtagtataaattgggacattataacagattccatattttatttcctaaaatctaaattcagtctttaatgaaataatattagccaaatggtggaactaatttatttcttttgaggaaaagataataaagaatgtaattaaatttaaatttcttggaattcccagttgtatattcatcacctttgtagcatttgacaaattttatgcttagcagcttcttcactgttttgaaataaaatatcctattacctactgatacaa

SEQ ID NO: 164483 - DNA, 734 bp, Homo sapiens
  Payload ID: 12405
  Gene Symbol: PEX1
  Gene Name: peroxisomal biogenesis factor 1
  ENST ID: ENST00000422866
  CDS Start-End: 1-590
aaaaaaaaattaggtcagatcataatgaagaagatgagaaggcctgtgtgctacaagtagtctggaatggacttgaagaattgaacaatgccatcaaatataccaaaaatgtagaagttctccatcttgggaaagtctggattccagatgacctgaggaagagactaaatatagaaatgcatgccgtagtcaggataactccagtggaagttacccctaaaattccaagatctctaaagttacaacctagagagaatttacctaaagacataagtgaagaagacataaaaactgtattttattcatggctacagcagtctactaccaccatgcttcctttggtaatatcagaggaagaatttattaagctggaaactaaagatggactgaaggaattttctctgagtatagttcattcttgggaaaaagaaaaagataaaaatatttttctgttgagtcccaatttgctgcagaagactacaatacaaaggagtgaattccttaggcgtatcctccttggagcacatcactcacagcctcctgggacgccctttgtctcggcagctgatgtctcttgttgcaggacttaggaatggagctcttttactcacaggaggaaagggaagtggaaaatcaactttagccaaagcaatctgtaaagaagcatttgacaaactggatgcccatgtggagagagttgactgtaaagctttacgaggaaaaaggcttgaaaa

SEQ ID NO: 164484 - DNA, 3681 bp, Homo sapiens
  Payload ID: 12405
  Gene Symbol: PEX1
  Gene Name: peroxisomal biogenesis factor 1
  ENST ID: ENST00000428214
  CDS Start-End: 1-3681
atgtggggcagcgatcgcctggcgggtgctgggggaggcggggcggcagtgactgtggccttcaccaacgctcgcgactgcttcctccacctgccgcggcgtctcgtggcccagctgcatctgctgcagaatcaagctatagaagtggtctggagtcaccagcctgcattcttgagctgggtggaaggcaggcattttagtgatcaaggtgaaaatgtggctgaaattaacagacaagttggtcaaaaacttggactctcaaatgggggacaggtatttctcaagccatgttcccatgtggtatcttgtcaacaagttgaggtggaacccctctcagcagatgattgggagatactggagctgcatgctgtttcccttgaacaacatcttctagatcaaattcgaatagtttttccaaaagccatttttcctgtttgggttgatcaacaaacgtacatatttatccaaattgttgcactaataccagctgcctcttatggaaggctggaaactgacaccaaactccttattcagccaaagacacgccgagccaaagagaatacattttcaaaagctgatgctgaatataaaaaacttcatagttatggaagagaccagaaaggaatgatgaaagaacttcaaaccaagcaacttcagtcaaatactgtgggaatcactgaatctaatgaaaacgagtcagagattccagttgactcatcatcagtagcaagtttatggactatgataggaagcattttttcctttcaatctgagaagaaacaagagacatcttggggtttaactgaaatcaatgcattcaaaaatatgcagtcaaaggttgttcctctagacaatattttcagagtatgcaaatctcaacctcctagtatatataacgcgtcagcaacctctgtttttcataaacactgtgccattcatgtatttccatgggaccaggaatattttgatgtagagcccagctttactgtgacatatggaaagctagttaagctactttctccaaagcaacagcaaagtaaaacaaaacaaaatgtgttatcacctgaaaaagagaagcagatgtcagagccactagatcaaaaaaaaattaggtcagatcataatgaagaagatgagaaggcctgtgtgctacaagtagtctggaatggacttgaagaattgaacaatgccatcaaatataccaaaaatgtagaagttctccatcttgggaaagtctggattccagatgacctgaggaagagactaaatatagaaatgcatgccgtagtcaggataactccagtggaagttacccctaaaattccaagatctctaaagttacaacctagagagaatttacctaaagacataagtgaagaagacataaaaactgtattttattcatggctacagcagtctactaccaccatgcttcctttggtaatatcagaggaagaatttattaagctggaaactaaagatggactgaaggaattttctctgagtatagttcattcttgggaaaaagaaaaagataaaaatatttttctgttgagtcccaatttgctgcagaagactacaatacaagtccttctagatcctatggtaaaagaagaaaacagtgaggaaattgactttattcttccttttttaaagctgagctctttgggaggagtgaattccttaggcgtatcctccttggagcacatcactcacagcctcctgggacgccctttgtctcggcagctgatgtctcttgttgcaggacttaggaatggagctcttttactcacaggaggaaagggaagtggaaaatcaactttagccaaagcaatctgtaaagaagcatttgacaaactggatgcccatgtggagagagttgactgtaaagctttacgagctttgaatgatatgataaaagagtttatctccatgggaagtttggttgcactgattgccacaagtcagtctcagcaatctctacatcctttacttgtttctgctcaaggagttcacatatttcagtgcgtccaacacattcagcctcctaatcaggaacaaagatgtgaaattctgtgtaatgtaataaaaaataaattggactgtgatataaacaagttcaccgatcttgacctgcagcatgtagctaaagaaactggcgggtttgtggctagagattttacagtacttgtggatcgagccatacattctcgactctctcgtcagagtatatccaccagagaaaaattagttttaacaacattggacttccaaaaggctctccgcggatttcttcctgcgtctttgcgaagtgtcaacctgcataaacctagagacctgggttgggacaagattggtgggttacatgaagttaggcagatactcatggatactatccagttacctgccaagtatccagaattatttgcaaacttgcccatacgacaaagaacaggaatactgttgtatggtccgcctggaacaggaaaaaccttactagctggggtaattgcacgagagagtagaatgaattttataagtgtcaaggggccagagttactcagcaaatacattggagcaagtgaacaagctgttcgggatatttttattagagcacaggctgcaaagccctgcattcttttctttgatgaatttgaatccattgctcctcggcggggtcatgataatacaggagttacagaccgagtagttaaccagttgctgactcagttggatggagtagaaggcttacagggtgtttatgtattggctgctactagtcgccctgacttgattgaccctgccctgcttaggcctggtcgactagataaatgtgtatactgtcctcctcctgatcaggtgtcacgtcttgaaattttaaatgtcctcagtgactctctacctctggcagatgatgttgaccttcagcatgtagcatcagtaactgactcctttactggagctgatctgaaagctttactttacaatgcccaattggaggccttacatggaatgctgctctcgagtggactccaggatggaagttccagctctgatagtgacctaagtctgtcttcaatggtctttcttaaccatagcagtggctctgacgattcagctggagatggagaatgtggcttagatcagtcccttgtttctttagagatgtccgagatccttccagatgaatcaaaattcaatatgtaccggctctactttggaagctcttatgaatcagaacttggaaatggaacctcttctgatttgagctcacaatgtctctctgcaccaagctccatgactcaggatttgcctggagttcctgggaaagaccagttgttttcacagcctccagtgttaaggacagcttcacaagagggttgccaagaacttacacaagaacaaagagatcaactgagggcagatatcagtattatcaaaggcagataccggagccaaagtggagaggacgaatccatgaaccaaccaggaccaatcaaaaccagactggctattagtcagtcacatttaatgactgcacttggtcacacaagaccatccattagtgaagatgactggaagaattttgctgagctatatgaaagctttcaaaatccaaagaggagaaaaaatcaaagtggaacaatgtttcgacctggacagaaagtaactttagcataa

SEQ ID NO: 164485 - DNA, 3329 bp, Homo sapiens
  Payload ID: 12405
  Gene Symbol: PEX1
  Gene Name: peroxisomal biogenesis factor 1
  Uniprot ID: O43933
  ENST ID: ENST00000438045
  CDS Start-End: 7-2892
gggacgatgtggggcagcgatcgcctggcgggtgctgggggaggcggggcggcagtgactgtggccttcaccaacgctcgcgactgcttcctccacctgccgcggcgtctcgtggcccagctgcatctgctgcagaatcaagctatagaagtggtctggagtcaccagcctgcattcttgagctgggtggaaggcaggcattttagtgatcaaggtgaaaatgtggctgaaattaacagacaagttggtcaaaaacttggactctcaaatgggggacagattccagatgacctgaggaagagactaaatatagaaatgcatgccgtagtcaggataactccagtggaagttacccctaaaattccaagatctctaaagttacaacctagagagaatttacctaaagacataagtgaagaagacataaaaactgtattttattcatggctacagcagtctactaccaccatgcttcctttggtaatatcagaggaagaatttattaagctggaaactaaagatggactgaaggaattttctctgagtatagttcattcttgggaaaaagaaaaagataaaaatatttttctgttgagtcccaatttgctgcagaagactacaatacaagtccttctagatcctatggtaaaagaagaaaacagtgaggaaattgactttattcttccttttttaaagctgagctctttgggaggagtgaattccttaggcgtatcctccttggagcacatcactcacagcctcctgggacgccctttgtctcggcagctgatgtctcttgttgcaggacttaggaatggagctcttttactcacaggaggaaagggaagtggaaaatcaactttagccaaagcaatctgtaaagaagcatttgacaaactggatgcccatgtggagagagttgactgtaaagctttacgaggaaaaaggcttgaaaacatacaaaaaaccctagaggtggctttctcagaggcagtgtggatgcagccatctgttgtcctgctggatgaccttgacctcattgctggactgcctgctgtcccggaacatgagcacagtcctgatgcggtgcagagccagcggcttgctcatgctttgaatgatatgataaaagagtttatctccatgggaagtttggttgcactgattgccacaagtcagtctcagcaatctctacatcctttacttgtttctgctcaaggagttcacatatttcagtgcgtccaacacattcagcctcctaatcaggaacaaagatgtgaaattctgtgtaatgtaataaaaaataaattggactgtgatataaacaagttcaccgatcttgacctgcagcatgtagctaaagaaactggcgggtttgtggctagagattttacagtacttgtggatcgagccatacattctcgactctctcgtcagagtatatccaccagagaaaaattagttttaacaacattggacttccaaaaggctctccgcggatttcttcctgcgtctttgcgaagtgtcaacctgcataaacctagagacctgggttgggacaagattggtgggttacatgaagttaggcagatactcatggatactatccagttacctgccaagtatccagaattatttgcaaacttgcccatacgacaaagaacaggaatactgttgtatggtccgcctggaacaggaaaaaccttactagctggggtaattgcacgagagagtagaatgaattttataagtgtcaaggggccagagttactcagcaaatacattggagcaagtgaacaagctgttcgggatatttttattagagcacaggctgcaaagccctgcattcttttctttgatgaatttgaatccattgctcctcggcggggtcatgataatacaggagttacagaccgagtagttaaccagttgctgactcagttggatggagtagaaggcttacagggtgtttatgtattggctgctactagtcgccctgacttgattgaccctgccctgcttaggcctggtcgactagataaatgtgtatactgtcctcctcctgatcaggtgtcacgtcttgaaattttaaatgtcctcagtgactctctacctctggcagatgatgttgaccttcagcatgtagcatcagtaactgactcctttactggagctgatctgaaagctttactttacaatgcccaattggaggccttacatggaatgctgctctcgagtggactccaggatggaagttccagctctgatagtgacctaagtctgtcttcaatggtctttcttaaccatagcagtggctctgacgattcagctggagatggagaatgtggcttagatcagtcccttgtttctttagagatgtccgagatccttccagatgaatcaaaattcaatatgtaccggctctactttggaagctcttatgaatcagaacttggaaatggaacctcttctgatttgagctcacaatgtctctctgcaccaagctccatgactcaggatttgcctggagttcctgggaaagaccagttgttttcacagcctccagtgttaaggacagcttcacaagagggttgccaagaacttacacaagaacaaagagatcaactgagggcagatatcagtattatcaaaggcagataccggagccaaagtggagaggacgaatccatgaaccaaccaggaccaatcaaaaccagactggctattagtcagtcacatttaatgactgcacttggtcacacaagaccatccattagtgaagatgactggaagaattttgctgagctatatgaaagctttcaaaatccaaagaggagaaaaaatcaaagtggaacaatgtttcgacctggacagaaagtaactttagcataaaatatacttctttttgatttggttctgttaagttttttgatggcttttccatatgttgtaacaggaaaaaaatggtgtctatgaatttcttcttaatttaacaaatttggttaatttataaaatcacagattggtaaatgctataattatgtaatgatcaggattgagattaatactgtagtataaattgggacattataacagattccatattttatttcctaaaatctaaattcagtctttaatgaaataatattagccaaatggtggaactaatttatttcttttgaggaaaagataataaagaatgtaattaaatttaaatttcttggaattcccagttgtatattcatcacctttgtagcatttgacaaattttatgcttagcagcttcttcactgttttgaaataaaatatcctattacctactgatacaa

SEQ ID NO: 164486 - DNA, 2871 bp, Homo sapiens
  Payload ID: 12406
  Gene Symbol: PEX10
  Gene Name: peroxisomal biogenesis factor 10
  Uniprot ID: O60683
  ENST ID: ENST00000288774
  CDS Start-End: 29-1069
ctgctcgggaccacccgaacccgcggccatggccccggccgccgccagccccccggaggtgatccgcgcggcgcagaaggacgagtactaccgcggtgggctgcggagcgcggcgggcggcgccctgcacagcctggcgggtgcgaggaagtggctggagtggaggaaggaggttgagctgctctcagatgtggcctactttggcctcaccacacttgcaggctaccagaccctgggggaggagtacgtcagcatcatccaggtggacccatcgcggatacatgtgccctcctcgctgcgccgtggcgtgctggtgacactgcatgccgtcctgccctacctgctggacaaggccctgctccccctggagcaggagctgcaggctgaccccgacagtgggcgacccttgcaggggagcctggggccaggtgggcgtggctgctcaggggcgcggcgctggatgcgtcaccacacggccaccctgactgagcagcagaggagggcgctgctgcgggcggtcttcgtcctcagacagggcctcgcctgcctccagcggctacatgttgcctggttttacatccacggtgtcttctaccacctggccaagaggctcacggggatcacgtaccaggcgctgaggccagatcccctcagggtcctgatgagtgtggcgccatctgccttacagctccgtgtccgcagcctgcccggagaggacctgagggcccgtgttagctacaggctgctgggggtcatctcactgctgcacctggtgctgtccatggggctgcagctgtacggtttcaggcagcggcagcgagccaggaaggagtggaggctgcaccgcggcctgtctcaccgcagggcctccttggaggagagagccgtttccagaaaccccctgtgcaccctgtgcctggaggagcgcaggcacccaacagccacgccctgcggccacctgttctgctgggagtgcatcaccgcgtggtgcagcagcaaggcggagtgtcccctctgccgggagaagttccctccccagaagctcatctaccttcggcactaccgctgagccggcgcccgggtgggcctggacacagatgacctctacgggagtctgaacgccaagatttagtctcaggattaaccttgcttgcacagaagttagaacactctcagttttttgtcatgtaagatactaacctagccaccctgggagagaacagaaagctgtccctggctgcgctttctcagccctgggaggggcgcctgaacccagaacatttccctaaccccaacctggtaggactcagccacttcttcaggaatttcacttatttggacgggattttaggtttccctcccttccccaaaccatacagttgagaagtaattcagaagtaggccagaagacactttattcgtttatattgtgagaaaacagccccatcaggcttgtgttaaggcaatggactgaatgagtgcgtgctgggtggggtggggcacggaggctggcgggttgcttcagccagtgcagtgagaacagcagccccacggccccatgggaggcggcgctgctctccccgagggcggctgggcagagcacatcccccaggacttgatgaccacacggggcagagagaaaccaaccaaggccagcacctccgtcggaagcatttggcacacacaccttcaatacacgtcaaggtcgcttccagttttagaaaacagaaatctgcatctcagcctgagacgcacagagaggtctcttcctgacccagacgcactcacgagccaggtcctgggggtatgggggctgccaggggcgcccgagccctctcctggggggcctgctgggcaggcgacctgctgacccacggtcactgctgtgttcagcccctcagctcggccccagcctatttcccgcctccatttgatgtttccaggttttcaaaactgcatttaacctgcgccagagagttcaccgtaggcatctttaataaactaactccagcaaaatgtgggtacgttactaacacaagatggaacttgagatttcctgaagcgcagtgttaaaatgcctcgagggcgtgtgccacatttccctgctgacgtaaaacacctggccagcaggaccggcttccggcaaagacccgcgcaaaccatgtcttgctgtttgacttacttaggaatgaggatgaccctgtattcctgggttagtcaaggtcagcttgccagagacggaggagggcgggggggccgtgaccctctagactgggaggaccaccaggagaggcactgggggctgcggccgggtgggcagatgccgccgtggctccatccatcagcacccagtcctttgcttcactgtgctctggccaagcgcgtgcgacttcctgtcacaccttaggcctgagcgcttattaagaaaacagtatgaaaaatgacaaacactcctgtccacagtctgagaatcccaagtgtctcaacacggtaccagaagtaccacctgggagcagcactggctatcttgggtcagggacacacaagcttgaacgtggcctcttagaggagctcgatgtcagatatgtaaacactggtacaagaaaatccagacactaagcattcaccgtgtcaattctgagacaggaaacaccgcccagagtgaggagcctgcgcagcccggggcccaggaggagaggccttcactcgcatgtcagtgtctcatctgggaccacagctgtgatgttctgctgtgcaatatgggtcacctttcgaaaaggccaaacaaaaggtgggctttcctgtgtccagcgactgccatgttttaggtaaagactttagtaaaggtggaggtaaaatcacttggtaaaa

SEQ ID NO: 164487 - DNA, 1997 bp, Homo sapiens
  Payload ID: 12406
  Gene Symbol: PEX10
  Gene Name: peroxisomal biogenesis factor 10
  Uniprot ID: O60683
  ENST ID: ENST00000447513
  CDS Start-End: 70-1050
atcagttctcgcccgtctgggcgtgggcgtggccggcgtggctgctcgggaccacccgaacccgcggccatggccccggccgccgccagccccccggaggtgatccgcgcggcgcagaaggacgagtactaccgcggtgggctgcggagcgcggcgggcggcgccctgcacagcctggcgggtgcgaggaagtggctggagtggaggaaggaggttgagctgctctcagatgtggcctactttggcctcaccacacttgcaggctaccagaccctgggggaggagtacgtcagcatcatccaggtggacccatcgcggatacatgtgccctcctcgctgcgccgtggcgtgctggtgacactgcatgccgtcctgccctacctgctggacaaggccctgctccccctggagcaggagctgcaggctgaccccgacagtgggcgacccttgcaggggagcctggggccaggtgggcgtggctgctcaggggcgcggcgctggatgcgtcaccacacggccaccctgactgagcagcagaggagggcgctgctgcgggcggtcttcgtcctcagacagggcctcgcctgcctccagcggctacatgttgcctggttttacatccacggtgtcttctaccacctggccaagaggctcacggggatcacgtacctccgtgtccgcagcctgcccggagaggacctgagggcccgtgttagctacaggctgctgggggtcatctcactgctgcacctggtgctgtccatggggctgcagctgtacggtttcaggcagcggcagcgagccaggaaggagtggaggctgcaccgcggcctgtctcaccgcagggcctccttggaggagagagccgtttccagaaaccccctgtgcaccctgtgcctggaggagcgcaggcacccaacagccacgccctgcggccacctgttctgctgggagtgcatcaccgcgtggtgcagcagcaaggcggagtgtcccctctgccgggagaagttccctccccagaagctcatctaccttcggcactaccgctgagccggcgcccgggtgggcctggacacagatgacctctacgggagtctgaacgccaagatttagtctcaggattaaccttgcttgcacagaagttagaacactctcagttttttgtcatgtaagatactaacctagccaccctgggagagaacagaaagctgtccctggctgcgctttctcagccctgggaggggcgcctgaacccagaacatttccctaaccccaacctggtaggactcagccacttcttcaggaatttcacttatttggacgggattttaggtttccctcccttccccaaaccatacagttgagaagtaattcagaagtaggccagaagacactttattcgtttatattgtgagaaaacagccccatcaggcttgtgttaaggcaatggactgaatgagtgcgtgctgggtggggtggggcacggaggctggcgggttgcttcagccagtgcagtgagaacagcagccccacggccccatgggaggcggcgctgctctccccgagggcggctgggcagagcacatcccccaggacttgatgaccacacggggcagagagaaaccaaccaaggccagcacctccgtcggaagcatttggcacacacaccttcaatacacgtcaaggtcgcttccagttttagaaaacagaaatctgcatctcagcctgagacgcacagagaggtctcttcctgacccagacgcactcacgagccaggtcctgggggtatgggggctgccaggggcgcccgagccctctcctggggggcctgctgggcaggcgacctgctgacccacggtcactgctgtgttcagcccctcagctcggccccagcctatttcccgcctccatttgatgtttccaggttttcaaaactgcatttaacctgcgccagagagttcaccgtaggcatctttaataaactaactccagcaaaa

SEQ ID NO: 164488 - DNA, 907 bp, Homo sapiens
  Payload ID: 12406
  Gene Symbol: PEX10
  Gene Name: peroxisomal biogenesis factor 10
  ENST ID: ENST00000510434
  CDS Start-End: 34-663
cgtggctgctcgggaccacccgaacccgcggccatggccccggccgccgccagccccccggaggtgatccgcgcggcgcagaaggacgagtactaccgcggtgggctgcggagcgcggcgggcggcgccctgcacagcctggcgggtgcgaggaagtggctggagtggaggaaggaggttgagctgctctcagatgtggcctactttggcctcaccacacttgcaggctaccagaccctgggggaggagtacgtcagcatcatccaggtggacccatcgcggatacatgtgccctcctcgctgcgccgtggcgtgctggtgacactgcatgccgtcctgccctacctgctggacaaggccctgctccccctggagcaggagctgcaggctgaccccgacagtgggcgacccttgcaggggagcctggggccaggtgggcgtggctgctcaggggcgcggcgctggatgcgtcaccacacggccaccctgactgagcagcagaggagggcgctgctgcgggcggtcttcgtcctcagacagggcctcgcctgcctccagcggctacatgttgcctggttttacatccacggtgtcttctaccacctggccaagaggctcacggggatcacctccgtgtccgcagcctgcccggagaggacctgagggcccgtgttagctacaggctgctgggggtcatctcactgctgcacctggtgctgtccatggggctgcagctgtacggtttcaggcagcggcagcgagccaggaaggagtggaggctgcaccgcggcctgtctcaccgcagggcctccttggaggagagagccgtttccagaaaccccctgtgcaccctgtgcctggaggagcgcaggcacccaacagccacgccctgcggccacctgttctg

SEQ ID NO: 164489 - DNA, 1941 bp, Homo sapiens
  Payload ID: 12406
  Gene Symbol: PEX10
  Gene Name: peroxisomal biogenesis factor 10
  ENST ID: ENST00000507596
  CDS Start-End: 39-1013
gccggcgtggctgctcgggaccacccgaacccgcggccatggccccggccgccgccagccccccggaggtgatccgcgcggcgcagaaggacgagtactaccgcggtgggctgcggagcgcggcgggcggcgccctgcacagcctggcgggtgcgaggaagtggctggagtggaggaaggaggttgagctgctctcagatgtggcctactttggcctcaccacacttgcaggctaccagaccctgggggaggagtacgtcagcatcatccaggtggacccatcgcggatacatgtgccctcctcgctgcgccgtggcgtgctggtgacactgcatgccgtcctgccctacctgctggacaaggccctgctccccctggagcaggagctgcaggctgaccccgacagtgggcgacccttgcaggggagcctggggccaggtgggcgtggctgctcaggggcgcggcgctggatgcgtcaccacacggccaccctgactgagcagcagaggagggcgctgctgcgggcggtcttcgtcctcagacagggcctcgcctgcctccagcggctacatgttgcctggttttacatccacggtgtcttctaccacctggccaagaggctcacggggatcacgtacctccgtgtccgcagcctgcccggagaggacctgagggcccgtgttagctacaggctgctgggggtcatctcactgctgcacctggtgctgtccatggggctgcagctgtacggtttcaggcagcggcagcgagccaggaaggagtggaggctgcaccgcggcctgtctcaccgcagggcctccttggaggagagagccgtttccagaaaccccctgtgcaccctgtgcctggaggagcgcaggcacccaacagccacgccctgcggccacctgttctgctgggagtgcatcaccgcgtggtgcagcagcaagtgtcccctctgccgggagaagttccctccccagaagctcatctaccttcggcactaccgctgagccggcgcccgggtgggcctggacacagatgacctctacgggagtctgaacgccaagatttagtctcaggattaaccttgcttgcacagaagttagaacactctcagttttttgtcatgtaagatactaacctagccaccctgggagagaacagaaagctgtccctggctgcgctttctcagccctgggaggggcgcctgaacccagaacatttccctaaccccaacctggtaggactcagccacttcttcaggaatttcacttatttggacgggattttaggtttccctcccttccccaaaccatacagttgagaagtaattcagaagtaggccagaagacactttattcgtttatattgtgagaaaacagccccatcaggcttgtgttaaggcaatggactgaatgagtgcgtgctgggtggggtggggcacggaggctggcgggttgcttcagccagtgcagtgagaacagcagccccacggccccatgggaggcggcgctgctctccccgagggcggctgggcagagcacatcccccaggacttgatgaccacacggggcagagagaaaccaaccaaggccagcacctccgtcggaagcatttggcacacacaccttcaatacacgtcaaggtcgcttccagttttagaaaacagaaatctgcatctcagcctgagacgcacagagaggtctcttcctgacccagacgcactcacgagccaggtcctgggggtatgggggctgccaggggcgcccgagccctctcctggggggcctgctgggcaggcgacctgctgacccacggtcactgctgtgttcagcccctcagctcggccccagcctatttcccgcctccatttgatgtttccaggttttcaaaactgcatttaacctgcgccagagagttcaccgtaggcatctttaa

SEQ ID NO: 164490 - DNA, 548 bp, Homo sapiens
  Payload ID: 12406
  Gene Symbol: PEX10
  Gene Name: peroxisomal biogenesis factor 10
  ENST ID: ENST00000514502
  CDS Start-End: 13-234
gaacccgcggccatggccccggccgccgccagccccccggaggtgatccgcgcggcgcagaaggacgagtactaccgcggtgggctgcggagcgcggcgggcggcgccctgcacagcctggcgggacttattactcttctgatagatgagcaaattgagattccagaaagacctcacagccagcaagttggagagctgctttttgatgctagacagttggcctctggcctgtaatcttaataccccagaccatctttccatgtggccctcataggccctagaacagttgctcaggggaatcccggagcaagagatgagcacaggtgggagattcttcgcagactgtctgcagctcacgctaaggtgcgaggaagtggctggagtggaggaaggaggttgagctgctctcagatgtggcctactttggcctcaccacacttgcaggctaccagaccctgggggaggagtacgtcagcatcatccaggtggacccatcgcggatacatgtgccctcctcgctgcgccgtggcgtgctggtgacactgcat

SEQ ID NO: 164491 - DNA, 653 bp, Homo sapiens
  Payload ID: 12406
  Gene Symbol: PEX10
  Gene Name: peroxisomal biogenesis factor 10
  ENST ID: ENST00000502666
  CDS Start-End: 1-78
gagattccagaaagacctcacagccagcaagttggagagctgctttttgatgctagacagttggcctctggcctgtaatcttaataccccagaccatctttccatgtggccctcataggccctagaacagttgctcaggggaatcccggagcaagagatgagcacaggtgggagattcttcgcagactgtctgcagctcacgctaaggtgcgaggaagtggctggagtggaggaaggaggttgagctgctctcagatgtggcctactttggcctcaccacacttgcaggtagaagctcccacgggacctcaggactgagggcagccacacacaccaagtctggggacggtggccagggggctgccaggcagtgtgagaagctcctggagctggcccgggctaccagaccctgggggaggagtacgtcagcatcatccaggtggacccatcgcggatacatgtgccctcctcgctgcgccgtggcgtgctggtgacactgcatgccgtcctgccctacctgctggacaaggccctgctccccctggagcaggagctgcaggctgaccccgacagtgggcgacccttgcaggggagcctggggccaggtgggcgtggctgctcaggggcgcggcgctggatgcgtcaccacacgg

SEQ ID NO: 164492 - DNA, 611 bp, Homo sapiens
  Payload ID: 12406
  Gene Symbol: PEX10
  Gene Name: peroxisomal biogenesis factor 10
  ENST ID: ENST00000508384
  CDS Start-End: 522-611
cccacagctgagctcctgtagatggaaccagaggtgaggcaaggaactggaggccctccccactgaggtcagcggggcgcagacgcccccttgtcgtgccctgccttcctcctgcaatcctgcaggactctccagggccaagtgctgcccttggggccaaaaaacagggccttctccttcacctgccctgcagccattcaggtgcgaggaagtggctggagtggaggaaggaggttgagctgctctcagatgtggcctactttggcctcaccacacttgcaggctaccagaccctgggggaggagtacgtcagcatcatccaggtggacccatcgcggatacatgtgccctcctcgctgcgccgtggcgtgctggtgacactgcatgccgtcctgccctacctgctggacaaggccctgctccccctggagcaggagctgcaggctgaccccgacagtgggcgacccttgcaggggagcctggggccaggtgggcgtggctgctcaggggcgcggcgctggatgcgtcaccacacggccaccctgactgagcagcagaggagggcgctgctgcgggcggtcttcgtcctcagacagggcctcgcctgcctc

SEQ ID NO: 164493 - DNA, 2740 bp, Homo sapiens
  Payload ID: 12407
  Gene Symbol: PEX11A
  Gene Name: peroxisomal biogenesis factor 11 alpha
  Uniprot ID: O75192
  ENST ID: ENST00000300056
  CDS Start-End: 151-894
agaaagtgtgcccgccccctctggggcggagagactcagcccctccccctcagcggataacctgggactgaccgttccctggggatccgacgggccccagaggacccacgcctgagccccgtgcgactcgtggcctttgggctagaagccatggacgccttcacccgcttcaccaaccagacccagggccgggaccgactcttcagagccactcagtacacatgcatgttgcttagatatttgttagagcccaaagctggcaaagagaaggtggtaatgaagctcaagaaactggagtccagtgtgagcactggtcgtaaatggttcagactaggcaatgtggtacatgctatacaggcaactgagcagagcattcatgccactgacctggtacctcgcttatgcttaacattagccaacctgaaccgtgtgatttatttcatctgtgacaccatcctctgggtgaggagcgtaggtctcacctctggcatcaacaaagagaaatggcgaacgagggctgctcaccactactactattctcttctgctgagcctggtcagggatctgtatgaaatctccctgcagatgaaacgagttacatgtgacagggcaaagaaagagaaatcagcatcccaggatcctctttggttcagcgtggctgaggaggaaacagaatggctccaatcctttctacttcttttattccgatctctgaagcagcatcctcccttgctcctggacacagtgaagaacctttgtgatatcctgaaccctttggaccagctggggatctataaatccaatcctggcatcattggacttggaggtcttgtgtcctctatagcaggcatgatcactgtggcatatcctcagatgaagctgaagacccgttagggtgtttttaggcttggaactagtacctactttaaaagatggcctcttggtgggacagacatttgtataagtcacaggccatgtcatactgtgcttaagttcttgttcatgtgagcatttaacaacctgtgatgtgggcagagatgaggccaagaacggagaagggaggagcatgaagagttgtatgtttttggagtgctggagtgacttgtgaatttctgaatattttcccttcatctaacattgattgaacatctcttatgtgcatagtgggagcttagtatttgctgaatgaataaaaattgaaaggaaaaaatttaaaaagacccaatcgcactgatcattgaacaccagtatacaataactttagggtcatatggatcattggtttcacgattacagtaggtctggtgcatggcactctcagatctagtagaggctctgatgtcagtagcaggatggaggagagctgggcttacagcctctcaacttgttggcccttataccatcactgcactcatgtccttgctctgtgcagaagtagaatcagaaaagcatcaggcaccttcatggtataaattgtgtctatgggtgcagtgaataagcaaaaatcagaagcagaccggagggacttataaaaataggtacagggtcacaatgggtgcctatatgtagcctgtgacagataagaagctgacagtgagacaaacaaaaaactgaggctagagcctcattcctctgactcctaatccagtgttctctccatgctctcccactgtcttcagaattgagtagaaatgtgatcccctcctgaatcctgttttttgcctcttactctcccataatttggaaatttccttgtccagtggtttatattcttttctagaaaaactaaaactgggtggagtgtggtggctcacacctataatcccagcactttgggaggctgaagcggaaggattgcttgaggccaggagttcaagaccagcctgggcaatgtagtgagactccttctctacaacaaagtgttaaaaaattagccaggcatggtggagtatgcctgtagtcccagatactctggaggctgaagcaggaggatcacttgagcccaggagttcaaggctgcagtgagcttccaccgcactccagcccgggtgatagagcaagaccctgtgtcttaaaaaaaaattaagacagtatttagacttatcagttagattgttttatttaaatccttctaacaatttaggcaattctacattaattttcatcaaaatttatccagtcaaaaaaatttcatgaatactccagatgtaagagagtcacaattttctacgataaatcagacatcttatttctagggtgattgagggaggtggaaagcgcaggaggaagccagtgaagaggacaatggaatgctgagtcaatgacattgacttgtgttcctatctgccatcttgggtgtgggtctttatatgtggttacagatcctttagtttgagggaggtgaggtagagaaataggatgccagcaggtaggaggccgatgtcagtcctcccagcaaagctgtgtcatttatctgaatggaaatgagaaaataaatatgtactcaataagtcacatttcccagaaatgtgattgagattctcaaaaaatagactcagattcttggctgtctgtttaaccaatcacgatatgggatttgagaaataaaatttagggaattttaagagacatgaaagctactaggtcagggaaaataaaaagcttaaataactatttttattgtccagatcctctactgtaatagattaactatgttcaataaatttctagacaaaattga

SEQ ID NO: 164494 - DNA, 978 bp, Homo sapiens
  Payload ID: 12407
  Gene Symbol: PEX11A
  Gene Name: peroxisomal biogenesis factor 11 alpha
  Uniprot ID: O75192
  ENST ID: ENST00000561257
  CDS Start-End: 31-681
gtgcgactcgtggcctttgggctagaagccatggacgccttcacccgcttcaccaaccagacccagggccgggaccgactcttcagagccactcagtacacatgcatgttgcttagatatttgttagagcccaaagctggcaaagagaaggtggtaatgaagctcaagaaactggagtccagtgtgagcactggtcgtaaatccaacctgaaccgtgtgatttatttcatctgtgacaccatcctctgggtgaggagcgtaggtctcacctctggcatcaacaaagagaaatggcgaacgagggctgctcaccactactactattctcttctgctgagcctggtcagggatctgtatgaaatctccctgcagatgaaacgagttacatgtgacagggcaaagaaagagaaatcagcatcccaggatcctctttggttcagcgtggctgaggaggaaacagaatggctccaatcctttctacttcttttattccgatctctgaagcagcatcctcccttgctcctggacacagtgaagaacctttgtgatatcctgaaccctttggaccagctggggatctataaatccaatcctggcatcattggacttggaggtcttgtgtcctctatagcaggcatgatcactgtggcatatcctcagatgaagctgaagacccgttagggtgtttttaggcttggaactagtacctactttaaaagatggcctcttggtgggacagacatttgtataagtcacaggccatgtcatactgtgcttaagttcttgttcatgtgagcatttaacaacctgtgatgtgggcagagatgaggccaagaacggagaagggaggagcatgaagagttgtatgtttttggagtgctggagtgacttgtgaatttctgaatattttcccttcatctaacattgattgaacatctcttatgtgcatagtgggagcttagtatttgctgaatgaat

SEQ ID NO: 164495 - DNA, 529 bp, Homo sapiens
  Payload ID: 12407
  Gene Symbol: PEX11A
  Gene Name: peroxisomal biogenesis factor 11 alpha
  ENST ID: ENST00000561224
  CDS Start-End: 122-316
agagactcagcccctccccctcagcggataacctgggactgaccgttccctggggatccgacgggccccagaggacccacgcctgagccccgtgcgactcgtggcctttgggctagaagccatggacgccttcacccgcttcaccaaccagacccagggccgggaccgactcttcagagccactcagtacacatgcatgttgcttagatatttgttagagcccaaagctggcaaagagaaggtggtaatgaagctcaagaaactggagtccagtgtgagcactggtcgtaaatacaaaattgacttgtgtctgtgagtgtgttctgggaagagagaagagttaaacataaggcaatccatcagataatcctcaatcagcctacacagttggtacagcgagctctgggctagaagatccaggctgaggaggaggatggagaaagattgagatgtagagcctctgggttgagagggacctctgaaatgaactcatctagactgctgccatggagatggtgctctacagtag

SEQ ID NO: 164496 - DNA, 905 bp, Homo sapiens
  Payload ID: 12407
  Gene Symbol: PEX11A
  Gene Name: peroxisomal biogenesis factor 11 alpha
  ENST ID: ENST00000559170
  CDS Start-End: 152-250
cagaaagtgtgcccgccccctctggggcggagagactcagcccctccccctcagcggataacctgggactgaccgttccctggggatccgacgggccccagaggacccacgcctgagccccgtgcgactcgtggcctttgggctagaagccatggacgccttcacccgcttcaccaaccagacccagggccgggaccgactcttcagggttcagactaggcaatgtggtacatgctatacaggcaactgagcagagcattcatgccactgacctggtacctcgcttatgcttaacattagccaacctgaaccgtgtgatttatttcatctgtgacaccatcctctgggtgaggagcgtaggtctcacctctggcatcaacaaagagaaatggcgaacgagggctgctcaccactactactattctcttctgctgagcctggtcagggatctgtatgaaatctccctgcagatgaaacgagttacatgtgacagggcaaagaaagagaaatcagcatcccaggatcctctttggttcagcgtggctgaggaggaaacagaatggctccaatcctttctacttcttttattccgatctctgaagcagcatcctcccttgctcctggacacagtgaagaacctttgtgatatcctgaaccctttggaccagctggggatctataaatccaatcctggcatcattggacttggaggtcttgtgtcctctatagcaggcatgatcactgtggcatatcctcagatgaagctgaagacccgttagggtgtttttaggcttggaactagtacctactttaaaagatggcctcttggtgggacagacatttgtataagtcacaggccatgtcatactgtgcttaagttcttgttcatgtgagcatttaacaac

SEQ ID NO: 164497 - DNA, 1740 bp, Homo sapiens
  Payload ID: 12408
  Gene Symbol: PEX11B
  Gene Name: peroxisomal biogenesis factor 11 beta
  Uniprot ID: O96011
  ENST ID: ENST00000369306
  CDS Start-End: 150-929
ttcgcgtcctgaaattccgcttccagggccaagctttcttttctgatactgtttgtccctcgcgaggcaccgttgggtcgcgcagtaggcgtgactaggggcgggaagtggggcgggagcagggccgcggagcctgggctgcggctgtcatggacgcctgggtccgcttcagtgctcagagccaagcccgggagcggctgtgtagggccgcccagtatgcttgctctcttcttggccatgcgctgcagaggcatggagccagtcctgagttacagaaacagattcgacaactggagagccacctgagccttggaagaaagcttctacgcctgggtaactcagcagatgcccttgagtcagccaaaagagctgttcacctatcagatgttgtcctgagattctgcatcactgttagtcacctcaatcgagccttgtacttcgcctgtgacaatgtcctgtgggctggaaagtctggactggctccccgtgtggatcaggagaagtgggcccagcgttcattcaggtactatttgttttccctcatcatgaatttgagccgtgatgcttatgagattcgcctactgatggagcaagagtcttctgcttgtagccggcgactgaaaggttctggaggaggagtcccaggaggaagtgaaactgggggacttgggggaccagggactccaggaggaggtctgccccaactggctctgaaacttcggctgcaagtcctgctcctggctcgagtccttagaggtcatcccccacttctgctagacgtggtcagaaatgcctgtgatctcttcattcctctggacaaactaggcctctggcgctgtggccctgggattgtggggctttgtggcctcgtgtcctccatcctgtctattctcaccctaatctatccctggctacgactcaagccctgaccttccggtacaggataaggaggggacctgaattggtgagatggaatcttagatcgtcccccatgtgccagcctcattcgaattctactctttggttaaagttagaaattcagagatttaggggtggaggaagagctttggggaagatgaggtaaggaaagatgactcgtgaagttaataggatgtctctaatttctagatgtgcctgagcttctgttcttttcctctttctttgtgtctctcttgaatatatttactttgtgtctcttaactctgtttaaggttctgtgtctatgcatctctctctttcttttttcaaccttctcattctcctatccagggatttaatcagcagaattactttttgataggggaggtataaggtttggcctgtaaggttctaactgccttcttttttctcacagaggtggcttatggcagatttttcctccttcaaactccaaacataatttttaagactatgtgccagtggactcttcccttatatctctgcaccacaagttgttggatgtttcctcttcctcccttatgtctacctcaccaacctcgctcatcatttggcccttatccttccttgtacacctaccttcagatttctgcttacactttgatttcagagctttattccccagtctgttcttactcctttgtcgcttatccagaatgatgctatgtgtagcatcttgctgtaaatcctgtacaatgattctgtgtaaatagctgtggcctatgccaataatgaagagcaagcctttcaggtaagcaaattaaagttcagtttgctcatcga

SEQ ID NO: 164498 - DNA, 667 bp, Homo sapiens
  Payload ID: 12408
  Gene Symbol: PEX11B
  Gene Name: peroxisomal biogenesis factor 11 beta
  ENST ID: ENST00000428634
  CDS Start-End: 1-246
ccaggaggaggtctgccccaactggctctgaaacttcggctgcaagtcctgctcctggctcgagtccttagaggtcatcccccacttctgctagacgtggtcagaaatgcctgtgatctcttcattcctctggacaaactaggcctctggcgctgtggccctgggattgtggggctttgtggcctcgtgtcctccatcctgtctattctcaccctaatctatccctggctacgactcaagccctgaccttccggtacaggataaggaggggacctgaattgaggtggcttatggcagatttttcctccttcaaactccaaacataatttttaagactatgtgccagtggactcttcccttatatctctgcaccacaagttgttggatgtttcctcttcctcccttatgtctacctcaccaacctcgctcatcatttggcccttatccttccttgtacacctaccttcagatttctgcttacactttgatttcagagctttattccccagtctgttcttactcctttgtcgcttatccagaatgatgctatgtgtagcatcttgctgtaaatcctgtacaatgattctgtgtaaatagctgtggcctatgccaataatgaagagcaagcctttcaggtaagcaaattaaagttcagtttgctcatcga

SEQ ID NO: 164499 - DNA, 1632 bp, Homo sapiens
  Payload ID: 12408
  Gene Symbol: PEX11B
  Gene Name: peroxisomal biogenesis factor 11 beta
  Uniprot ID: O96011
  ENST ID: ENST00000537888
  CDS Start-End: 85-822
aactccggctacgggggcccgaacggaccgtgaggcgcagatttgagccgctgttgagatgattcctttccgttcgcggaagagatggggaaactgagggccgcccagtatgcttgctctcttcttggccatgcgctgcagaggcatggagccagtcctgagttacagaaacagattcgacaactggagagccacctgagccttggaagaaagcttctacgcctgggtaactcagcagatgcccttgagtcagccaaaagagctgttcacctatcagatgttgtcctgagattctgcatcactgttagtcacctcaatcgagccttgtacttcgcctgtgacaatgtcctgtgggctggaaagtctggactggctccccgtgtggatcaggagaagtgggcccagcgttcattcaggtactatttgttttccctcatcatgaatttgagccgtgatgcttatgagattcgcctactgatggagcaagagtcttctgcttgtagccggcgactgaaaggttctggaggaggagtcccaggaggaagtgaaactgggggacttgggggaccagggactccaggaggaggtctgccccaactggctctgaaacttcggctgcaagtcctgctcctggctcgagtccttagaggtcatcccccacttctgctagacgtggtcagaaatgcctgtgatctcttcattcctctggacaaactaggcctctggcgctgtggccctgggattgtggggctttgtggcctcgtgtcctccatcctgtctattctcaccctaatctatccctggctacgactcaagccctgaccttccggtacaggataaggaggggacctgaattggtgagatggaatcttagatcgtcccccatgtgccagcctcattcgaattctactctttggttaaagttagaaattcagagatttaggggtggaggaagagctttggggaagatgaggtaaggaaagatgactcgtgaagttaataggatgtctctaatttctagatgtgcctgagcttctgttcttttcctctttctttgtgtctctcttgaatatatttactttgtgtctcttaactctgtttaaggttctgtgtctatgcatctctctctttcttttttcaaccttctcattctcctatccagggatttaatcagcagaattactttttgataggggaggtataaggtttggcctgtaaggttctaactgccttcttttttctcacagaggtggcttatggcagatttttcctccttcaaactccaaacataatttttaagactatgtgccagtggactcttcccttatatctctgcaccacaagttgttggatgtttcctcttcctcccttatgtctacctcaccaacctcgctcatcatttggcccttatccttccttgtacacctaccttcagatttctgcttacactttgatttcagagctttattccccagtctgttcttactcctttgtcgcttatccagaatgatgctatgtgtagcatcttgctgtaaatcctgtacaatgattctgtgtaaatagctgtggcctatgccaataatgaagagcaagcctttcaggtaagcaaattaaagttcagtttgctcatcg

SEQ ID NO: 164500 - DNA, 1062 bp, Homo sapiens
  Payload ID: 12409
  Gene Symbol: PEX11G
  Gene Name: peroxisomal biogenesis factor 11 gamma
  Uniprot ID: Q96HA9
  ENST ID: ENST00000221480
  CDS Start-End: 10-735
ggagttgccatggcgtcgctgagcggcctggcgtcggcgctggagtcgtacaggggccgggaccgcctgatccgagtgctggggtactgctgccagctggttggtggagttctggttgaacagtgtcccgccaggtccgaagtggggacacgtctgttggtggtgtccacccaactcagccactgcaggaccatcttgcgactctttgatgacctggccatgtttgtctacactaagcaatatggcctgggggcacaggaggaggacgcctttgtccgctgtgtctccgtcctagggaacctggctgaccagctctactacccctgtgagcacgtggcctgggcggctgatgcccgggtcctccacgtggactcttctcggtggtggacgctgagtacaaccctgtgggccctctctctgctcctgggggttgccaggtccctgtggatgctgctgaaactgagacagaggctgcggagccccacggcgcccttcaccagcccgctgccccggggcaagcggagggccatggaggcgcagatgcagtcggaggcgctgtcacttctcagcaacctggccgacctggccaacgccgtgcactggctgccccggggcgtgctgtgggccggccgcttcccgccgtggctagtgggcctcatgggcaccatctcctcaatcctcagcatgtaccaggcggcccgggccggcggccaggccgaggccactaccccctgacactgccggaagagcacagggacacagccagagcccacggagggcccttcccgcaaagcagaagccgccagggcaggggccggggctctcatggagctgcctgtggtgaaacccatgggcagggtgggtggagggactgatgcgaggtcccccaggcctcagcctggagctcctgagccgtgacagttttcaggggccgtgcagggcttcagcagcacctcctgcctgccagctggcgtcttgtatccaaatcaagatgaggaagagggggcctgtcgtgccttgagaaagctggaacgggaatcaattaaacattgtggtgctggc

SEQ ID NO: 164501 - DNA, 1345 bp, Homo sapiens
  Payload ID: 12409
  Gene Symbol: PEX11G
  Gene Name: peroxisomal biogenesis factor 11 gamma
  Uniprot ID: Q96HA9
  ENST ID: ENST00000593942
  CDS Start-End: 504-1019
ggcaggcttggtgcgaatactgcctccttagagctccaggaacccagttcttagctgtgatggatccttgcaatgaaagaattaagaagggcgggtgcggtggttcacgcctgtaattccagcactttggaaggtcgacgtgggaagattgcttaagcccagggctcaaggccagcctgggtaacatgaacaattcttaacgtccaaagataacgtctttccttaacgtcgaaagatgccttgttgtgatattacagcagtcattcctgctcactacgggcaggcagacagtgcagaaaaggtgaagcacaaaaactaaaaaggaaaatctctccttgaaccactgcgaacagatccgagtgctggggtactgctgccagctggttggtggagttctggttgaacagtgtcccgccaggtccgaagtggggacacgtctgttggtggtgtccacccaactcagccactgcaggaccatcttgcgactctttgatgacctggccatgtttgtctacactaagcaatatggcctgggggcacaggaggaggacgcctttgtccgctgtgtctccgtcctagggaacctggctgaccagctctactacccctgtgagcacgtggcctgggcggctgatgcccgggtcctccacgtggactcttctcggtggtggacgctgagtacaaccctgtgggccctctctctgctcctgggggttgccaggtccctgtggatgctgctgaaactgagacagaggctgcggagccccacggcgcccttcaccagcccgctgccccggggcaagcggagggccatggaggcgcagatgcagtcggaggcgctgtcacttctcagcaacctggccgacctggccaacgccgtgcactggctgccccggggcgtgctgtgggccggccgcttcccgccgtggctagtgggcctcatgggcaccatctcctcaatcctcagcatgtaccaggcggcccgggccggcggccaggccgaggccactaccccctgacactgccggaagagcacagggacacagccagagcccacggagggcccttcccgcaaagcagaagccgccagggcaggggccggggctctcatggagctgcctgtggtgaaacccatgggcagggtgggtggagggactgatgcgaggtcccccaggcctcagcctggagctcctgagccgtgacagttttcaggggccgtgcagggcttcagcagcacctcctgcctgccagctggcgtcttgtatccaaatcaagatgaggaagagggggcctgtcgtgccttgagaaagctggaacgggaatcaattaaacattgtggtgctgg

SEQ ID NO: 164502 - DNA, 806 bp, Homo sapiens
  Payload ID: 12409
  Gene Symbol: PEX11G
  Gene Name: peroxisomal biogenesis factor 11 gamma
  ENST ID: ENST00000593547
  CDS Start-End: 1-505
gtacaggggccgggaccgcctgatccgagtgctggggtactgctgccagctggttggtggagttctggttgaacagtgtcccgccaggtccgaagtggggacacgtctgttggtggtgtccacccaactcagccactgcaggaccatcttgcgactctttgatgacctggccatgtttgtctacactaagcaatatggcctgggggcacaggaggaggacgcctttgtccgctgtgtctccgtcctagggaacctggctgaccagctctactacccctgtgagcacgtggcctgggcggctgatgcccgggtcctccacgtggactcttctcggtggtggacgctgagtacaaccctgtgggccctctctctgctcctgggggttgccaggtccctgtggatgctgctgaaactgagacagaggctgcggagccccacggcgcccttcaccagcatgtaccaggcggcccgggccggcggccaggccgaggccactaccccctgacactgccggaagagcacagggacacagccagagcccacggagggcccttcccgcaaagcagaagccgccagggcaggggccggggctctcatggagctgcctgtggtgaaacccatgggcagggtgggtggagggactgatgcgaggtcccccaggcctcagcctggagctcctgagccgtgacagttttcaggggccgtgcagggcttcagcagcacctcctgcctgccagctggcgtcttgtatccaaatcaagatgaggaagagggggcctgtcgtgccttgagaaagctggaacggg

SEQ ID NO: 164503 - DNA, 2675 bp, Homo sapiens
  Payload ID: 12410
  Gene Symbol: PEX12
  Gene Name: peroxisomal biogenesis factor 12
  Uniprot ID: O00623
  ENST ID: ENST00000225873
  CDS Start-End: 609-1688
ctctcttccgccaggcatcccagaggtcctggtggtttcatttccgggtgcggcttctgtcataaagcggagacctcccttcaaacgtggcgtcgtgggttgtttgcgcctcgcctggggtcagcgagcaaggacgggcgcgggcggggatactcaaagccaacagctggagtcagcccttgtgtcccgggctcacagtggcacgactgaatcctcagagtcggctggcttttgagctctcacgattggggaggagggggcgtttctggttcgcagctccagaggattgcgttccttcccccatacctgtcccccacagtcacgctctgccctgacgtgcagcatttgacaagttaccccctcgccacatactacttccacccacgtccgagttaactttgttcttaaccttcttgagactaccctcggcctccaggtctttttttcccagttcatttttgcccataagattgagtttcgagtttcagatatcatgcagaaagtttacctttaagactgagcacccatctgatactcttcctcccgaaaaagttcatgctcacgagagagtttgtgggaaaagtgaaagccagtacacgcaggaaactatggctgagcacggggctcacttcacagctgcttctgtggccgatgaccagccatccatctttgaggtggtagcacaggacagtttaatgacagcagtgagacccgctcttcagcatgtggtcaaggttcttgcagaatcaaatcccacccactatggcttcttgtggaggtggtttgatgaaatctttactctgctagatcttctgctccagcaacattatctgtctagaaccagtgcctcattttctgaaaacttttacggcttaaagagaattgtaatgggggacactcacaagtctcagagattggctagtgctggtctcccaaagcagcagctttggaaatctattatgttcctggttcttcttccctatctgaaagtgaagctggagaagctggtttctagcctgagagaagaggatgaatattctattcatcccccttcttcccgctggaaacgattttacagagctttcctggcagcctacccatttgtgaacatggcctgggaaggatggtttcttgtacaacaacttcgatacatcctaggaaaagctcagcatcactcaccactgctgaggctggctggagttcagctaggtcgactgacagttcaggatatacaagctctggagcacaaaccagctaaggccagcatgatgcagcaaccagccaggagtgttagtgagaagataaactcagctctgaagaaagctgttgggggtgttgccttatccctgtctactggcctttctgtgggtgtattcttcttgcagttccttgactggtggtactcatctgaaaatcaagaaaccatcaagtcattgactgccctgcctactccaccaccacctgtacacctagactataactctgattctcccctcttacccaaaatgaagactgtgtgcccactgtgtcgtaaaacccgggtgaatgatactgttcttgccacctctggctatgtgttttgttaccgctgtgtgtttcattatgtgaggagtcaccaagcttgtcccatcacaggttatccaacagaagtacaacatctgattaaactctactcccctgagaactgaaagggaatcatgtcttatcctcacaacaaaagtattgcgctgtaatgtcacagagctggtttcagcatggtattgagttgacacttctcagcctcaattcataactatatgaactttaaatgattatatggatttctttaaaaggatatgcccatttgatcctaaccttttagcctgctctctagaaccctacttacagttgaccaagctgcttaaagtagaaggatcaggactggcaggggatatgagggccagtgtagagattaaacagaataatgagtacacaagtttttgcctatccctttccttaaaatataagaaataaaggagctcttacgaaaaacccaggttagaccgcataaaaaataaagtgaacagtgaggtggtagcaagacttctttttagaaaagaaagcatttacctgcctgtctgtaaggtggaaatttcatcagtttgcaaacgataagaaatgcagacttgctcttgatagaaatgcttagaaacactctgggggggaaaaaagctccttccatatactgtgagacatttgttaagtgacatctattgtttatcagcttttaaggataaaaaaggtattttaaaagttggatatttaggatatttgaggatattcctttatgagctctccatatccttcttgagaaactggttaaaaaaggaataggggttgagtgttacagagagtagtctgaagattcctgtgtaaaagcaaagctaacaagcaatgaagacatgaagcaaaatactaatctaattgtgtaaagaaaggatattttaataagttctttctgcttgctgctaagagtttgctaaagtgtcatgaattattctggttattactaaagtttctatgaaacacttaagtagattttaagaataaatgtttctggaaaagaactatgttatgattttgtagaaatgtaaagattacttgaggtgtttaaaataaatttttcattcagacta

SEQ ID NO: 164504 - DNA, 897 bp, Homo sapiens
  Payload ID: 12410
  Gene Symbol: PEX12
  Gene Name: peroxisomal biogenesis factor 12
  ENST ID: ENST00000585380
  CDS Start-End: 235-897
agacgtctgcgcggtgccccaaacagcttgtcaaaaagacctcgcagagagaggttcagagctgtagctttccagcgaggctaccatgcagacccagctacgaaaagtaaaccaaactagccaaaaccagcccacaagggccctcttctgtttcagcggggcgggagcggaagctcagttcatgctcacgagagagtttgtgggaaaagtgaaagccagtacacgcaggaaactatggctgagcacggggctcacttcacagctgcttctgtggccgatgaccagccatccatctttgaggtggtagcacaggacagtttaatgacagcagtgagacccgctcttcagcatgtggtcaaggttcttgcagaatcaaatcccacccactatggcttcttgtggaggtggtttgatgaaatctttactctgctagatcttctgctccagcaacattatctgtctagaaccagtgcctcattttctgaaaacttttacggcttaaagagaattgtaatgggggacactcacaagtctcagagattggctagtgctggtctcccaaagcagcagctttggaaatctattatgttcctggttcttcttccctatctgaaagtgaagctggagaagctggtttctagcctgagagaagaggatgaatattctattcatcccccttcttcccgctggaaacgattttacagagctttcctggcagcctacccatttgtgaacatggcctgggaaggatggtttcttgtacaacaacttcgatacatcctaggaaaagctcagcatcactcaccactgctgaggctggctggagttcagctaggtcgactgacagttcaggatatacaagctctggagcacaaaccagctaaggccagcatgatg

SEQ ID NO: 164505 - DNA, 1607 bp, Homo sapiens
  Payload ID: 12410
  Gene Symbol: PEX12
  Gene Name: peroxisomal biogenesis factor 12
  ENST ID: ENST00000586663
  CDS Start-End: 532-1607
ccttcaaacgtggcgtcgtgggttgtttgcgcctcgcctggggtcagcgagcaaggacgggcgcgggcggggatactcaaagccaacagctggagtcagcccttgtgtcccgggctcacagtggcacgactgaatcctcagagtcggctggcttttgagctctcacgattggggaggagggggcgtttctggttcgcagctccagaggattgcgttccttcccccatacctgtcccccacagtcacgctctgccctgacgtgcagcatttgacaagttaccccctcgccacatactacttccacccacgtccgagttaactttgttcttaaccttcttgagactaccctcggcctccaggtctttttttcccagttcatttttgcccataagattgagtttcgagtttcagatatcatgcagaaagtttacctttaagactgagcacccatctgatactcttcctcccgaaaaagttcatgctcacgagagagtttgtgggaaaagtgaaagccagtacacgcaggaaactatggctgagcacggggctcacttcacagctgcttctgtggccgatgaccagccatccatctttgaggtggtagcacaggacagtttaatgacagcagtgagacccgctcttcagcatgtggtcaaggttcttgcagaatcaaatcccacccactatggcttcttgtggaggtggtttgatgaaatctttactctgctagatcttctgctccagcaacattatctgtctagaaccagtgcctcattttctgaaaacttttacggcttaaagagaattgtaatgggggacactcacaagtctcagagattggctagtgctggtctcccaaagcagcagctttggaaatctattatgttcctggttcttcttccctatctgaaagtgaagctggagaagctggtttctagcctgagagaagaggatgaatattctattcatcccccttcttcccgctggaaacgattttacagagctttcctggcagcctacccatttgtgaacatggcctgggaaggatggtttcttgtacaacaacttcgatacatcctaggaaaagctcagcatcactcaccactgctgaggctggctggagttcagctaggtcgactgacagttcaggatatacaagctctggagcacaaaccagctaaggccagcatgatgcagcaaccagccaggagtgttagtgagaagataaactcagctctgaagaaagctgttgggggtgttgccttatccctgtctactggcctttctgtgggtgtattcttcttgcagttccttgactggtggtactcatctgaaaatcaagaaaccatcaagtcattgactgccctgcctactccaccaccacctgtacacctagactataactctgattctcccctcttacccaaaatgaagactgtgtgcccactgtgtcgtaaaacccgggtgaatgatactgttcttgccacctctggctatgtgttttgttaccgctgtgtgtttcattatgtgaggagtcaccaagcttgtcccatcacaggttatccaacagaagtacaacatctgattaaactctactcccctgagaa

SEQ ID NO: 164506 - DNA, 2682 bp, Homo sapiens
  Payload ID: 12410
  Gene Symbol: PEX12
  Gene Name: peroxisomal biogenesis factor 12
  Uniprot ID: O00623
  ENST ID: ENST00000613219
  CDS Start-End: 617-1696
tagagcgcctctcttccgccaggcatcccagaggtcctggtggtttcatttccgggtgcggcttctgtcataaagcggagacctcccttcaaacgtggcgtcgtgggttgtttgcgcctcgcctggggtcagcgagcaaggacgggcgcgggcggggatactcaaagccaacagctggagtcagcccttgtgtcccgggctcacagtggcacgactgaatcctcagagtcggctggcttttgagctctcacgattggggaggagggggcgtttctggttcgcagctccagaggattgcgttccttcccccatacctgtcccccacagtcacgctctgccctgacgtgcagcatttgacaagttaccccctcgccacatactacttccacccacgtccgagttaactttgttcttaaccttcttgagactaccctcggcctccaggtctttttttcccagttcatttttgcccataagattgagtttcgagtttcagatatcatgcagaaagtttacctttaagactgagcacccatctgatactcttcctcccgaaaaagttcatgctcacgagagagtttgtgggaaaagtgaaagccagtacacgcaggaaactatggctgagcacggggctcacttcacagctgcttctgtggccgatgaccagccatccatctttgaggtggtagcacaggacagtttaatgacagcagtgagacccgctcttcagcatgtggtcaaggttcttgcagaatcaaatcccacccactatggcttcttgtggaggtggtttgatgaaatctttactctgctagatcttctgctccagcaacattatctgtctagaaccagtgcctcattttctgaaaacttttacggcttaaagagaattgtaatgggggacactcacaagtctcagagattggctagtgctggtctcccaaagcagcagctttggaaatctattatgttcctggttcttcttccctatctgaaagtgaagctggagaagctggtttctagcctgagagaagaggatgaatattctattcatcccccttcttcccgctggaaacgattttacagagctttcctggcagcctacccatttgtgaacatggcctgggaaggatggtttcttgtacaacaacttcgatacatcctaggaaaagctcagcatcactcaccactgctgaggctggctggagttcagctaggtcgactgacagttcaggatatacaagctctggagcacaaaccagctaaggccagcatgatgcagcaaccagccaggagtgttagtgagaagataaactcagctctgaagaaagctgttgggggtgttgccttatccctgtctactggcctttctgtgggtgtattcttcttgcagttccttgactggtggtactcatctgaaaatcaagaaaccatcaagtcattgactgccctgcctactccaccaccacctgtacacctagactataactctgattctcccctcttacccaaaatgaagactgtgtgcccactgtgtcgtaaaacccgggtgaatgatactgttcttgccacctctggctatgtgttttgttaccgctgtgtgtttcattatgtgaggagtcaccaagcttgtcccatcacaggttatccaacagaagtacaacatctgattaaactctactcccctgagaactgaaagggaatcatgtcttatcctcacaacaaaagtattgcgctgtaatgtcacagagctggtttcagcatggtattgagttgacacttctcagcctcaattcataactatatgaactttaaatgattatatggatttctttaaaaggatatgcccatttgatcctaaccttttagcctgctctctagaaccctacttacagttgaccaagctgcttaaagtagaaggatcaggactggcaggggatatgagggccagtgtagagattaaacagaataatgagtacacaagtttttgcctatccctttccttaaaatataagaaataaaggagctcttacgaaaaacccaggttagaccgcataaaaaataaagtgaacagtgaggtggtagcaagacttctttttagaaaagaaagcatttacctgcctgtctgtaaggtggaaatttcatcagtttgcaaacgataagaaatgcagacttgctcttgatagaaatgcttagaaacactctgggggggaaaaaagctccttccatatactgtgagacatttgttaagtgacatctattgtttatcagcttttaaggataaaaaaggtattttaaaagttggatatttaggatatttgaggatattcctttatgagctctccatatccttcttgagaaactggttaaaaaaggaataggggttgagtgttacagagagtagtctgaagattcctgtgtaaaagcaaagctaacaagcaatgaagacatgaagcaaaatactaatctaattgtgtaaagaaaggatattttaataagttctttctgcttgctgctaagagtttgctaaagtgtcatgaattattctggttattactaaagtttctatgaaacacttaagtagattttaagaataaatgtttctggaaaagaactatgttatgattttgtagaaatgtaaagattacttgaggtgtttaaaataaatttttcattcagact

SEQ ID NO: 164507 - DNA, 4470 bp, Homo sapiens
  Payload ID: 12411
  Gene Symbol: PEX13
  Gene Name: peroxisomal biogenesis factor 13
  Uniprot ID: Q92968
  ENST ID: ENST00000295030
  CDS Start-End: 39-1250
tcaggggtaggagcgggagccgagaggaggcggaggagatggcgtcccagccgccacctccccccaaaccctgggagacccgccgaattccgggagccggaccgggaccaggaccgggccccactttccaatctgctgatttgggtcctactttaatgacaagacctggacaaccagcacttaccagagtgcccccacctattcttccaaggccatcacagcagacaggaagtagcagtgtgaacacttttagacctgcttacagttcattttcttctggatatggtgcctatggaaattcattttatggaggctatagtccttatagttatggatataatgggctgggctacaaccgcctccgtgtagatgatcttccacccagtagatttgttcagcaagctgaagaaagcagcaggggtgcatttcagtccattgaaagtattgtgcatgcatttgcctctgtcagtatgatgatggatgctaccttttcagctgtctataacagtttcagggctgtattggatgtagcaaatcacttttcccgattgaaaatacactttacaaaagtgttttcagcttttgcattggttaggactatacggtatctttacagacggctacagcggatgttaggtttaagaagaggctctgagaatgaagacctctgggcagagagtgaaggaactgtggcatgccttggtgctgaggaccgagcagctacctcagcaaaatcttggccaatattcttgttctttgctgttatccttggtggtccttacctcatttggaaactattgtctactcacagtgatgaagtaacagacagcatcaactgggcaagtggtgaggatgaccatgtagttgccagagcagaatatgattttgctgccgtatctgaagaagaaatttctttccgggctggtgatatgctgaacttagctctcaaagaacaacaacccaaagtgcgtggttggcttctggctagccttgatggccaaacaacaggacttatacctgcgaattatgtcaaaattcttggcaaaagaaaaggtaggaaaacggtggaatcaagtaaagtttccaagcagcaacaatcttttaccaacccaacactaactaaaggagccacggttgctgattctttggatgaacaggaagctgcctttgaatctgtttttgttgaaactaataaggttccagttgcacctgattccattgggaaagatggagaaaagcaagatctttgatatctttcatgtttgcctgcagttgaacaatactttagagtactttttaaaattatttctcacaaagaaatgaatgtacaatccaatgaaaacatttgttattggctatttcaggtgttttgctgctagaaattattaaagttacacactagtatgttggtctggtgacctggttacattttattatacacattattggaccataaggacatttgtttcacctagattttaagattatggagactgctgtcatttttatcttatttaaatctctaggtttattggaagagtaagattgatgaactatagcatgcacagtttggtacagtagagatcattaatacttttaaaagttctgcattaattgacttggaatccttagaaatggagtggtgacatgtcagtatgagaacaggcaaaaggtaaatttttttttttttttacaaccttaagtaatctcaataataaaattttctgatctgtattatatccagtgttgggtttatattttcacccacaaacaactgacactgctatcttttactgtatttttaaaaatttaatttgaaaaggtcacccagaagcattctgaaggaaatggttctagaattatagagtatgtagccctaatagttttccctcctagcaaaaagtctgaaatttatctttcttacaaactgttccatttcttctaaggatcccttaattatttatctctttaagccaggcatggtggctcacgcctgtaatcccagcactttgggaggctgaggcgggcagatcacctgaggttgggagttcaagaccaccctgaccaacatggagaaaccccatctttacgaaaaatacaaaattagctaggtgtggtggcacatgcctgtaatcccagctactcgggaggctgaggcaggagaattgcttgaaccccaggaggcggaggttacgctgagccggagatctcgccattgcacttcagcctgggcaacaaaagcgaaactccatctcaaaaaataaaattatttatttctttaaaatatgactagttttcatactgggtgaatcagaagtatatgaaaggtatactttcttttcctacaacaaatacttgagttcttttgagtttgcacttaatgatataatcagttataatagtaatttttaatattttcatagattgtttgcttctaccttgtgtaattttttaaattccatatttaggatgctctgtaaatattgaaaatgtgtcacattggatacatttttcttttaggtttagtttttactactgagacttatttatagtcttagtgctctattgccatttagaatatgataatcctcatgcctttaatctcagcactttgggaggccaaggcgggcggatcacctgcggtcaggagtttgagaccagcctggccaacacggtgaaaccctgtctctactaaaaatacgaaaattagctgggtgcagtggcgtgcacctgtagtcccagctactcaggaggctgaggcaggagaatcacttgaacccgggaggcagaggttgcagggagctgagatcatgccactgcactccagcctaggggacagagcaagactctgtctcaaaacaaacaaacaaaaaataataatacgataatgctatttgacgtgttttttggtttataatgattttaaatgcagttaactttcagtacactgaatatttccccagaaaattggaaacttcatatacttggctacgaacatactacagagtaatactatcaggaatacaggtgtataagaatacatttatagatattgttgaaaactttgaactgtttgataaaaattgtgatttagtattttttcttttgtctttttttgaaacggagtctcactctgtcgcccaggctggagtccagtggcgcgatctcggctcactgcaagctccgcctcccgggttcacgccattctcctgcctcagcctcccgagtagctgggactacaggcgcctgccaccaggcccggctaattttttttgtatttttagtagagacggggtttcaccgtgttacccaggatggtctccatctcctgacctcgtgatgagcccgcttcggtctcccaaagtgttgggattacaggcgtgagccaccgcacccagcgatttagtatttttttctaatagactatgttcaacaaataagtaattctcgaatagttcagattaaaacatacaggaaccaagtacatacccagcatagaagaactttactaaaggcttcttggaaagcccttttttgaaacgacagtatcgtaagtaacatatcatttataatagaaatcttgacccagtgcagaaaaataaatatagtaaaatttatttatctttggccagttttccaacacccaggtattagccttgaagttgaagagataaggtttcttgtatattatttttcatttgtgttctacaattaaaggttctgctttgatttgtcagataatttatagaaattttgttctcaaaacaaatgtttgataaaacagattattaaatttggggttgagatgtctaaattgaatgctagaagtaaagtagaagtgaccactattaaagatgtatagggagaagagtacagcacaaagtgataaaatagtgacacttttgtaggggtgtttattgtttggttaagtctgctaaattacggtatgcattatctggtgactatttgtgcctgaaaattcgttttgtattaaaattctggagaaggaattcaggactagaataaagagaaattttgtaaccttttttatcatgacagttttagaataatttttttagctgagattaaatgttcaaggctccaatattatttttaggaacttatttaaggagtgctactttacagaaattactaacacaccaaaacattattaattaaataaaatataagtttacaataataaaacatgtttcttttaatttttctgattatattttatgagttcagaaaggaaatggtaaaagaactatacattttcatgttttaacattttatgtacgtacttgattctgtctgtgtcataattacacatttacttgaacacagctatcctttatcttgtgctttctttaatagaaaaatgaacagaaactgaatgcagttaaatttttatttttagtaggttgtgaagttacttttactggagaaataaaaatatgttaaacttga

SEQ ID NO: 164508 - DNA, 1108 bp, Homo sapiens
  Payload ID: 12411
  Gene Symbol: PEX13
  Gene Name: peroxisomal biogenesis factor 13
  ENST ID: ENST00000401576
  CDS Start-End: 119-229
gtttcttcctacaaattagtggcatcctcccgctgtatggattcagctggcaaagtgctggtctacgcgggcctggacagtcaggggtaggagcgggagccgagaggaggcggaggagatggcgtcccagccgccacctccccccaaaccctgggagacccgccgaattccgggagccggaccgggaccaggaccgggccccactttccacgtagactttggtctgtagcagttgagagcggcatttgtccagccacggcatcgacagggagcaaagtctctccttaaaggtgttaacctctcgagaagttgctgaaagccggaaaggttttacgcaacaggaactcaagccccgtacactttgcattcttttccagcataactcagccagtgtttcggatcgagattggagaagcaactttaaagcaggagttctagatctgaggcctatggatggactttgtgtgcaaaatagtgtatttttctgaggcctgtattttttttttgtttggtttttaatcagtatcagttggtttctaggactttaaaaaggctaaaacatgcagagttgggagtgtttcgtggcctcgtgtggcttttgtttggtagtgctggacatcttaattcagataggtgtgattcaaatgtcaaatcacctactattgtaggttttcctaagcgtaaaaaccccaacatattggaatgtatttctgctgtattctgaaatcttttatttaaacactaaaatgctttaacacagtaacgacttagtttaataaggatatatacataacaagtaataagtttgattaggctggtaagccacggtgacattatctgctaccttttttttgagtgggttcttttttccccatttaggctgcttgtcgaatgagagaggttttattttttgcatctgttaaagttctttttatgtaaaattaaccattttcccactttatcgtgaaatattttaaacacagagaccagtagagagtaagataatacctatatattcactactcaactttaaacagtgttaacatttgccagacttatgtcgaatttttcaaaataaaagacggctaaactctcccattcttcttta

SEQ ID NO: 164509 - DNA, 1533 bp, Homo sapiens
  Payload ID: 12411
  Gene Symbol: PEX13
  Gene Name: peroxisomal biogenesis factor 13
  ENST ID: ENST00000444100
  CDS Start-End: 536-727
aagacaacgcacctattgcgtctagcaattctgttccccgaggaaacgtgcgttttagaacaaaagtaccagcccgctctcgctaggactaagtgagcttctcccttcttgtttgtagaggaaatccgaaaaactgcctggtttgccacctcaccctacctcccccacgagcgaaggagtgcgtgcggctttactcccagcccgactggtccactcccagaaaagcctcggtgggactccgacgtctagggagttgtagccgctaccagaaatatcgatgagcctttaccctgaggtttagaaaggcagctctttctggggcaaatacaaagagcgtgtttcttcctacaaattagtggcatcctcccgctgtatggattcagctggcaaagtaactcaagccttgtcctgactgcaagggtgggcggggtggacggctcggtgttctgcccgttgtgtcttacgctccaggtgctggtctacgcgggcctggacagtcaggggtaggagcgggagccgagaggaggcggaggagatggcgtcccagccgccacctccccccaaaccctgggagacccgccgaattccgggagccggaccgggaccaggaccgggccccactttccaaatggcttctctatctttaaagcgtagactttggtctgtagcagttgagagcggcatttgtccagccacggcatcgacagggagcaaagtctctccttaaaggtgttaacctctcgagaagttgctgaaagccggaaaggttttacgcaacaggaactcaagccccgtacactttgcattcttttccagcataactcagccagtgtttcggatcgagattggagaagcaactttaaagcaggagttctagatctgaggcctatggatggactttgtgtgcaaaatagtgtatttttctgaggcctgtattttttttttgtttggtttttaatcagtatcagttggtttctaggactttaaaaaggctaaaacatgcagagttgggagtgtttcgtggcctcgtgtggcttttgtttggtagtgctggacatcttaattcagataggtgtgattcaaatgtcaaatcacctactattgtaggttttcctaagcgtaaaaaccccaacatattggaatgtatttctgctgtattctgaaatcttttatttaaacactaaaatgctttaacacagtaacgacttagtttaataaggatatatacataacaagtaataagtttgattaggctggtaagccacggtgacattatctgctaccttttttttgagtgggttcttttttccccatttaggctgcttgtcgaatgagagaggttttattttttgcatctgttaaagttctttttatgtaaaattaaccattttcccactttatcgtgaaatattttaaacacagagaccagtagagagtaagataatacctatatattcactactcaactttaaacagtgttaacatttgccagacttatgtcgaatttttcaaaataaaagacggctaaactct

SEQ ID NO: 164510 - DNA, 1014 bp, Homo sapiens
  Payload ID: 12411
  Gene Symbol: PEX13
  Gene Name: peroxisomal biogenesis factor 13
  ENST ID: ENST00000414712
  CDS Start-End: 31-195
aggagcgggagccgagaggaggcggaggagatggcgtcccagccgccacctccccccaaaccctgggagacccgccgaattccgggagccggaccgggaccaggaccgggccccactttccaactttggtctgtagcagttgagagcggcatttgtccagccacggcatcgacagggagcaaagtctctccttaaaggtgttaacctctcgagaagttgctgaaagccggaaaggttttacgcaacaggaactcaagccccgtacactttgcattcttttccagcataactcagccagtgtttcggatcgagattggagaagcaactttaaagcaggagttctagatctgaggcctatggatggactttgtgtgcaaaatagtgtatttttctgaggcctgtattttttttttgtttggtttttaatcagtatcagttggtttctaggactttaaaaaggctaaaacatgcagagttgggagtgtttcgtggcctcgtgtggcttttgtttggtagtgctggacatcttaattcagataggtgtgattcaaatgtcaaatcacctactattgtaggttttcctaagcgtaaaaaccccaacatattggaatgtatttctgctgtattctgaaatcttttatttaaacactaaaatgctttaacacagtaacgacttagtttaataaggatatatacataacaagtaataagtttgattaggctggtaagccacggtgacattatctgctaccttttttttgagtgggttcttttttccccatttaggctgcttgtcgaatgagagaggttttattttttgcatctgttaaagttctttttatgtaaaattaaccattttcccactttatcgtgaaatattttaaacacagagaccagtagagagtaagataatacctatatattcactactcaactttaaacagtgttaacatttgccagacttatgtcgaatttttcaaaataaaagacggctaaactctcccattcttcttt

SEQ ID NO: 164511 - DNA, 1985 bp, Homo sapiens
  Payload ID: 12412
  Gene Symbol: PEX14
  Gene Name: peroxisomal biogenesis factor 14
  Uniprot ID: O75381
  ENST ID: ENST00000356607
  CDS Start-End: 81-1214
agtctgggcgggagggcgagagcgagggcgcctgggagaaacctcgcccagcggcggttgattagtcaggcctcagaaagatggcgtcctcggagcaggcagagcagccgagccagccaagctctactccaggaagtgaaaatgtgctgcctcgagagccgctgattgccacggcagtgaagtttctacagaattcccgggtccgccagagcccacttgcaaccaggagagcattcctaaagaagaaagggctgacagatgaagagattgatatggccttccagcagtcgggcactgctgccgatgagccttcgtccttgggcccagccacacaggtggttcctgtccagccccctcacctcatatctcagccatacagtcccgcaggctcccgatggcgagattacggcgccctggccatcatcatggcaggcattgcatttggctttcaccagctctacaagaaatacctgctccccctcatcctgggcggccgagaggacagaaagcagctggagaggatggaggccggtctctctgagctgagtggcagcgtggcccagacagtgactcagttacagacgaccctcgcctccgtccaggagctgctgattcagcagcagcagaagatccaggagcttgcccacgagctggccgctgccaaggccaccacatccaccaactggatcctggagtcccagaatatcaacgaactcaagtccgaaattaactccttgaaagggcttcttttaaatcggaggcagttccctccatccccatcagccccgaagatcccctcctggcagatcccagtcaagtcaccgtcaccctccagccctgcggccgtgaaccaccacagcagcagcgacatctcacctgtcagcaacgagtccacgtcgtcctcgcctgggaaggagggccacagccccgagggctccacggtcacctaccacttgctgggcccccaggaggaaggcgagggggtggtggacgtcaagggccaggtgcggatggaggtgcaaggcgaggaggagaagagggaggacaaggaggacgaggaggatgaggaggatgatgatgtgagccatgtggacgaggaggactgcctgggggtgcagagggaggaccgccggggcggggatgggcagatcaacgagcaggtggagaagctgcggcggcccgagggcgccagcaacgagagtgagcgggactagggctgcgcctgctgcctccagccctgaggatggcatctagtgtgcccgtgcgtggccataccctgcctccctctctggccctgggagggcagcttggagcccaggtagggggcagagctgtcctcagctgcactgcggcctggtggcagtgtggggagtcacacttctgtccacctggcctcctctcgcctggccgccagccccagccccagccccagccccaggcccagctgcctttggctttgatctcaagtcaggctgaaggcagcgaagcctcggggcccaagcccctccccagccccctctcccggacagacgccttgcccagggtgtgtttgctgagtgtcttgactaccgtgacaccacgcatggccagagctagcgtccctactgcctcccgactcctcagtggaggaggagctgcggtccctctggtgtctgccatccccctccctccctgggcccggccctggacccgtcaggtgcctgtccccagccccaaccccactcatgccccgtcgtcctcccagacaaatgaaaccacgctgcgcttccgatgcccccgcttgccgtgtaatggttcagctaatcccatggcgagatgggggctcactccggaggaggagccaggcagcagggccttcctgaccaacagccagctctgtccttccccccaggaaacacatgttcatttgtgtgatcatgtatagacctcagaacggaagataggactgtatataattgtaataaataccagttgccactatttaa

SEQ ID NO: 164512 - DNA, 637 bp, Homo sapiens
  Payload ID: 12412
  Gene Symbol: PEX14
  Gene Name: peroxisomal biogenesis factor 14
  ENST ID: ENST00000491661
  CDS Start-End: 1-483
caggcagagcagccgagccagccaagctctactccaggaagtgaaaatgtgctgcctcgagagccgctgattgccacggcagtgaagtttctacagaattcccgggtccgccagagcccacttgcaaccaggagagcattcctaaagaagaaagggctgacagatgaagagattgatatggccttccagcagtcgggcactgctgccgatgagccttcgtccttgggcccagccacacaggtggttcctgtccagccccctcacctcatatctcagccatacagtcccgcaggctcccgatggcgagattacggcgccctggccatcatcatggcaggcattgcatttggctttcaccagctctacaagaaatacctgctccccctcatcctgggcggccgagaggacagaaagcagctggagaggatggaggccggtctctctgagctgagtggcagcgtggcccagacaggtaaagattaatgactccatcaagtcacccctcacagccttctccaagcagccccttctctgcccctcccctctccctctgtctccactctatgtggtgacttcatttatctgctctgagaatctgttcacatttgcaaatgaagccgccgtcatttcggtttaa

SEQ ID NO: 164513 - DNA, 1479 bp, Homo sapiens
  Payload ID: 12413
  Gene Symbol: PEX16
  Gene Name: peroxisomal biogenesis factor 16
  Uniprot ID: Q9Y5Y5
  ENST ID: ENST00000241041
  CDS Start-End: 19-1059
gtcggtgccgagggcaggatggagaagctgcggctcctgggcctccgctaccaggagtacgtgactcgtcacccggccgccacggcccagctggagacagcagtgcggggcttcagttacctgctggcaggtcgattcgccgattcgcacgagctgtcagagctggtgtactctgcctctaacctgcttgtgctgctcaatgacgggatcctacggaaggagcttcggaaaaagttgcctgtgtcgctgtcccagcagaagctgctgacatggctgagcgtgctggagtgcgtggaggtgttcatggagatgggagctgccaaggtgtggggtgaagtgggccgctggcttgtcatcgccctcgtccagctggccaaggctgtactgcggatgctcctgctgctctggttcaaggctggcctccagacttcaccccctatcgttccactggacagagagacccaggcacagcccccggatggtgaccacagccctggcaaccatgagcagtcctacgtggggaagcggtcaaaccgggtggtgcgaaccctccagaacacgccgtccctgcactccaggcactggggagctccccagcagcgggagggacggcagcagcagcatcacgaggagctgagtgcgacccccacccccctggggctgcaggagaccatcgcagagtttttgtacattgcccggccgctgctgcacttgctcagcctgggcctgtggggtcagaggtcgtggaaaccctggctcttggctggtgttgtggacgtgaccagcctgagcctcctgagtgacagaaagggcctgacccggagggagcggcgggagctgcggcgccggaccatcctgctgctctactacctgctgcgctctcctttctatgaccgcttctccgaggccaggatcctcttcctgctccagttgctggccgaccacgtccctggcgttggcctggtcacaacgtcccagcgtgcggcctctccgtgcctaccggccaggccccacacacagccctggtcgccaccagcgttcctcccaggacacccttgactgcgctctcctgtgacgatgccactgcagcccgcaccttgtcactgctgggccaagaagccttcactaggagtgggatccaggctcctctcccacagaaagcggtgacttcacctcatggagcccgggaagctgctcgcctcggcagccataggagcgaacactgctgctctctcgctggcccctggtgaggacaggaagcctgaacccgggtgatggctgaacgctgcccagcgtgtcttctggctggggccctccgtctgccccttctccgcagggccctgtggctctggcagccccaggccatggcgttgccagcctccctgtgacagagcctggtgaacagtgagcctggctcccacgcaagtggcactttaagccctgcatcctcggttgagagtaaaaggcttttctccctta

SEQ ID NO: 164514 - DNA, 1335 bp, Homo sapiens
  Payload ID: 12413
  Gene Symbol: PEX16
  Gene Name: peroxisomal biogenesis factor 16
  Uniprot ID: Q9Y5Y5
  ENST ID: ENST00000378750
  CDS Start-End: 245-1255
acttgagggagtagggggccgggtttgggccctcagttgctaagggctacccgagtgggaagcggttcaagagatggggtgaagggtggttcaccggttcttcaagtcctcagccttctggcccgcggaagttaagcaaccaagaggcgggcctaagaccggaagcaggaaggagggcgcaggaagcagggcgccgcagcctgtcgtacggtccttctgtgggtctgtcggtgccgagggcaggatggagaagctgcggctcctgggcctccgctaccaggagtacgtgactcgtcacccggccgccacggcccagctggagacagcagtgcggggcttcagttacctgctggcaggtcgattcgccgattcgcacgagctgtcagagctggtgtactctgcctctaacctgcttgtgctgctcaatgacgggatcctacggaaggagcttcggaaaaagttgcctgtgtcgctgtcccagcagaagctgctgacatggctgagcgtgctggagtgcgtggaggtgttcatggagatgggagctgccaaggtgtggggtgaagtgggccgctggcttgtcatcgccctcgtccagctggccaaggctgtactgcggatgctcctgctgctctggttcaaggctggcctccagacttcaccccctatcgttccactggacagagagacccaggcacagcccccggatggtgaccacagccctggcaaccatgagcagtcctacgtggggaagcggtcaaaccgggtggtgcgaaccctccagaacacgccgtccctgcactccaggcactggggagctccccagcagcgggagggacggcagcagcagcatcacgaggagctgagtgcgacccccacccccctggggctgcaggagaccatcgcagagtttttgtacattgcccggccgctgctgcacttgctcagcctgggcctgtggggtcagaggtcgtggaaaccctggctcttggctggtgttgtggacgtgaccagcctgagcctcctgagtgacagaaagggcctgacccggagggagcggcgggagctgcggcgccggaccatcctgctgctctactacctgctgcgctctcctttctatgaccgcttctccgaggccaggatcctcttcctgctccagttgctggccgaccacgtccctggcgttggcctggtcacaaggccgctcatggattacttgcccacctggcagaaaatctacttctacagttggggctgacagacctcccggaaggagggtgtggggaggggtggggcagggagcccctcttccctaataaaactgactccggcagcgtc

SEQ ID NO: 164515 - DNA, 588 bp, Homo sapiens
  Payload ID: 12413
  Gene Symbol: PEX16
  Gene Name: peroxisomal biogenesis factor 16
  ENST ID: ENST00000525229
  CDS Start-End: 18-176
tcggtgccgagggcaggatggagaagctgcggctcctgggcctccgctaccaggagtacgtgactcgtcacccggccgccacggcccagctggagacagcagtgcggggcttcagttacctgctggcaggtgccaccctgacctttgatcagttccttctgggccctgacctatgaccccagtggcccccttccctgcggagtcagggtagtgatcgctgtgcttgagaagacccgtccaggtcgattcgccgattcgcacgagctgtcagagctggtgtactctgcctctaacctgcttgtgctgctcaatgacgggatcctacggaaggagcttcggaaaaagttgcctgtgtcgctgtcccagcagaagctgctgacatggctgagcgtgctggagtgcgtggaggtgttcatggagatgggagctgccaaggtgtggggtgaagtgggccgctggcttgtcatcgccctcgtccagctggccaaggctgtactgcggatgctcctgctgctctggttcaaggctggcctccagacttcaccccctatcgttccactggacagagagacccaggcacagcccccg

SEQ ID NO: 164516 - DNA, 903 bp, Homo sapiens
  Payload ID: 12413
  Gene Symbol: PEX16
  Gene Name: peroxisomal biogenesis factor 16
  ENST ID: ENST00000525192
  CDS Start-End: 422-903
agttgctaagggctacccgagtgggaagcggttcaagagatggggtgaagggtggttcaccggttcttcaagtcctcagccttctggcccgcggaagttaagcaaccaagaggcgggcctaagaccggaagcaggaaggagggcgcaggaagcagggcgccgcagcctgtcgtacggtccttctgtgggtctgtcggtgccgagggcaggatggagaagctgcggctcctgggcctccgctaccaggagtcgattcgccgattcgcacgagctgtcagagctggtgtactctgcctctaacctgcttgtgctgctcaatgacgggatcctacggaaggagcttcggaaaaagttgcctgtgtcgctgtcccagcagaagctgctgacatggctgagcgtgctggagtgcgtggaggtgttcatggagatgggagctgccaaggtgtggggtgaagtgggccgctggcttgtcatcgccctcgtccagctggccaaggctgtactgcggatgctcctgctgctctggttcaaggctggcctccagacttcaccccctatcgttccactggacagagagacccaggcacagcccccggatggtgaccacagccctggcaaccatgagcagtcctacgtggggaagcggtcaaaccgggtggtgcgaaccctccagaacacgccgtccctgcactccaggcactggggagctccccagcagcgggagggacggcagcagcagcatcacgaggagctgagtgcgacccccacccccctggggctgcaggagaccatcgcagagtttttgtacattgcccggccgctgctgcacttgctcagcctgggcctgtggggtcagaggtcgtggaaaccctggctcttggctggtgttgtggacgtgaccag

SEQ ID NO: 164517 - DNA, 794 bp, Homo sapiens
  Payload ID: 12413
  Gene Symbol: PEX16
  Gene Name: peroxisomal biogenesis factor 16
  ENST ID: ENST00000529030
  CDS Start-End: 268-450
ggcggagagcgtgctaaccaatgacttgagggagtagggggccgggtttgggccctcagttgctaagggctacccgagtgggaagcggttcaagagatggggtgaagggtggttcaccggttcttcaagtcctcagccttctggcccgcggaagttaagcaaccaagaggcgggcctaagaccggaagcaggaaggagggcgcaggaagcagggcgccgcagcctgtcgtacggtccttctgtgggtctgtcggtgccgagggcaggatggagaagctgcggctcctgggcctccgctaccaggagtacgtgactcgtcacccggccgccacggcccagctggagacagcagtgcggggcttcagttacctgctggcaggtcgattcgccgattcgcacgagctgtcagagctgggaagaagctcagtgaggttagagaacagtcactgatggtcccagaaccaagattcaagtctagatctcccagattccaggattcccagattgtaactacctcaagagtgtttgcccagtgactgctgtcacagtcctgaaagaatgcactgggttttgaaaagcagagtgtactctgcctctaacctgcttgtgctgctcaatgacgggatcctacggaaggagcttcggaaaaagttgcctgtgtcgctgtcccagcagaagctgctgacatggctgagcgtgctggagtgcgtggaggtgttcatggagatgggagctgccaaggtgtggggtgaagtgggccgctggcttgtcatcgccctcgtccagctggccaa

SEQ ID NO: 164518 - DNA, 563 bp, Homo sapiens
  Payload ID: 12413
  Gene Symbol: PEX16
  Gene Name: peroxisomal biogenesis factor 16
  ENST ID: ENST00000533151
  CDS Start-End: 15-563
gtgccgagggcaggatggagaagctgcggctcctgggcctccgctaccaggagtacgtgactcgtcacccggccgccacggcccagctggagacagcagtgcggggcttcagttacctgctggcaggtcgattcgccgattcgcacgagctgtcagagctggatggtgaccacagccctggcaaccatgagcagtcctacgtggggaagcggtcaaaccgggtggtgcgaaccctccagaacacgccgtccctgcactccaggcactggggagctccccagcagcgggagggacggcagcagcagcatcacgaggagctgagtgcgacccccacccccctggggctgcaggagaccatcgcagagtttttgtacattgcccggccgctgctgcacttgctcagcctgggcctgtggggtcagaggtcgtggaaaccctggctcttggctggtgttgtggacgtgaccagcctgagcctcctgagtgacagaaagggcctgacccggagggagcggcgggagctgcggcgccggaccatcctgctgctctactacctgctgcgc

SEQ ID NO: 164519 - DNA, 795 bp, Homo sapiens
  Payload ID: 12413
  Gene Symbol: PEX16
  Gene Name: peroxisomal biogenesis factor 16
  ENST ID: ENST00000528674
  CDS Start-End: 270-464
ggggcggagagcgtgctaaccaatgacttgagggagtagggggccgggtttgggccctcagttgctaagggctacccgagtgggaagcggttcaagagatggggtgaagggtggttcaccggttcttcaagtcctcagccttctggcccgcggaagttaagcaaccaagaggcgggcctaagaccggaagcaggaaggagggcgcaggaagcagggcgccgcagcctgtcgtacggtccttctgtgggtctgtcggtgccgagggcaggatggagaagctgcggctcctgggcctccgctaccaggagtcgattcgccgattcgcacgagctgtcagagctgggaagaagctcagtgaggttagagaacagtcactgatggtcccagaaccaagattcaagtctagatctcccagattccaggattcccagattgtaactacctcaagagtgtttgcccagtgactgctgtcacagtcctgaaagaatgcactgggttttgaaaagcagagtgtactctgcctctaacctgcttgtgctgctcaatgacgggatcctacggaaggagcttcggaaaaagttgcctgtgtcgctgtcccagcagaagctgctgacatggctgagcgtgctggagtgcgtggaggtgttcatggagatgggagctgccaaggtgtggggtgaagtgggccgctggcttgtcatcgccctcgtccagctggccaaggctgtactgcggatgctcctgctgctctggttcaaggctggcctccagacttcaccccctatcgttccactg

SEQ ID NO: 164520 - DNA, 1639 bp, Homo sapiens
  Payload ID: 12413
  Gene Symbol: PEX16
  Gene Name: peroxisomal biogenesis factor 16
  ENST ID: ENST00000532681
  CDS Start-End: 865-1590
gatctcccggtgccacccgttccagggaggctgcttggtttgggaagatactccccaggggtctccccttcccttgggggcgcagctgaggactgcgaggtgcgtccgagggccagaaagctgagatcgattctgagttcaaggatcaagtctgccctcaaaccattttacagatcgggaaatccgagacccagagaagggatactcccgcccaagggccaccgagccgagagaagcccgggccagggctttcttcgcgtatgtgggaatgcaggcgcgagccctttggggggcacagtccatacgggagctgaggccgaagccggagcactaactgtgctgtctaggggatcgagacggcactagagggctggactccttactgcctcagtttccccagcactacctttgttgaggaaacggagatggggatactggccgaacgcgcgcctgctgagacacagtgcaactgtatttagacgccccgcacctccccaaatctgatcgaggctccttttttcaagcacccgctatctctcagccctttaaaatccggccctgccgttcgagtctctcggcgttccattggaaagactcggggctccagctcccttctctagaatgaactgctctgactgccgcccggctttaccggagctttaactgcgcaggcgcaagggcagccaacccggtcgattcgccgattcgcacgagctgtcagagctggtgtactctgcctctaacctgcttgtgctgctcaatgacgggatcctacggaaggagcttcggaaaaagttgcctgtgtcgctgtcccagcagaagctgctgacatggctgagcgtgctggagtgcgtggaggtgttcatggagatgggagctgccaaggtgtggggtgaagtgggccgctggcttgtcatcgccctcgtccagctggccaaggctgtactgcggatgctcctgctgctctggttcaaggctggcctccagacttcaccccctatcgttccactggacagagagacccaggcacagcccccggatggtgaccacagccctggcaaccatgagcagtcctacgtggggaagcggtcaaaccgggtggtgcgaaccctccagaacacgccgtccctgcactccaggcactggggagctccccagcagcgggagggacggcagcagcagcatcacgaggagctgagtgcgacccccacccccctggggctgcaggagaccatcgcagagtttttgtacattgcccggccgctgctgcacttgctcagcctgggcctgtggggtcagaggtcgtggaaaccctggctcttggctggtgttgtggacgtgaccagcctgagcctcctgagtgacagaaagggcctgacccggagggagcggcgggagctgcggcgccggaccatcctgctgctctactacctgctgcgctctcctttctatgaccgcttctccgaggccaggatcctcttcctgctccagttgctggccgaccacgtccctggcgttggcctggtcacaaggccgctcatggattacttgcccacctggcagaaaatctacttctacagttggggctgacagacctcccggaaggagggtgtggggaggggtggggcagggagcccct

SEQ ID NO: 164521 - DNA, 3661 bp, Homo sapiens
  Payload ID: 12414
  Gene Symbol: PEX19
  Gene Name: peroxisomal biogenesis factor 19
  Uniprot ID: P40855
  ENST ID: ENST00000368072
  CDS Start-End: 23-922
acggcaagtcggaggtagcaagatggccgccgctgaggaaggctgtagtgtcggggccgaagcggacagggaattggaggagcttctggaaagtgctcttgatgatttcgataaagccaaaccctccccagcacccccttctaccaccacggcccctgatgcttcggggccccagaagagatcgccaggagacactgccaaagatgccctcttcgcttcccaagagaagtttttccaggaactattcgacagtgaactggcttcccaagccactgcggagttcgagaaggcaatgaaggagttggctgaggaagaaccccacctggtggagcagttccaaaagctctcagaggctgcagggagagtgggcagtgatatgacctcccaacaagaattcacttcttgcctaaaggaaacactaagtggattagccaaaaatgccactgaccttcagaactccagcatgtcggaagaagagctgaccaaggccatggaggggctaggcatggacgaaggggatggggaagggaacatcctccccatcatgcagagtattatgcagaacctactctccaaggatgtgctgtacccatcactgaaggagatcacagaaaagtatccagaatggttgcagagtcatcgggaatctctacctccagagcagtttgaaaaatatcaggagcagcacagcgtcatgtgcaaaatatgtgagcagtttgaggcagagacccccacagacagtgaaaccactcaaaaggctcgttttgagatggtgctggatcttatgcagcagctacaagatttaggccatcctccaaaagagctggctggagagatgcctcctggcctcaactttgacctggatgccctcaatctttcgggcccaccaggtgccagtggtgaacagtgtctgatcatgtgaaacacaacacgttttcctctctgagtcccagctatggggaacatctggagtcagcagaaccattgggacctgaggcaggagtgtcacctgcgggagaagtctgcccgctgccctctgtcatcccattcaagattgtgccataccagctgaggtttttcctctgtctctctaggaatagggtctgtttcacaggccatttctgtgaaccctactccattgtggtttctgccactatcaaagttccagctacctgcaaggtgaaggaaggcatcccttttggggcatgcactttctttcctttctcaaaataatgttatatgtggccacactgatgttcacctttacgtccagggtctttgtgccttgtctctactccctctcttggatctggggaggaggggcagagacctgggactctgtatttctatagttctcctggcagagcctttgagaatggggagaaacagcctgggctggggctacaggtctgtcactatgctctcttgccttcagacagaccattctgaattctctaaagggaaagggcttttgcatctaatcacaatagagttgaaagagaggccttaggattctcctctctctaggtgctgagccctcacctccctgttccaggctgagaactcaaatggttaccctgcttcttcctacaatgctgtgtgatatgggtgaacccagcccctgaccttcctctatcccctgcccatcctcccttttacctcctctcttttttaaacacctgtttatcccaacctttttgagctcaagctgtgataaagaagggcccatcctatttcccctcatctagtccatttacgattctcactgactccccgtcttcctggcagacacaaataaacccagtgtcaggtctaggaaattaatggctattcttccccagatacattctggcttatttgagatacatgattctcttagaatcctgtcccttggttcaggaaagtagcttggaaaaggagtaggggtatagcttgggtcccttttcctgcaaggccccatggggcagaatataataaatattctgagtgaggagtgtggtctttttctgatcttcctcagcttccgtaagttgcagagtgaggtatattaggagactagttctacacaatattgtaatgctgggttccatcaacacccaccttccacaactcagtctgcacctcagttggcaaaggagactggatggccatctttcctcatgttcccttgagtatttcaatgtagaaagcccttcaagtggtattatattttaaccttttacattattgttattaatgttagtaatatattgttatgttttctaaattatttttctttaagctgacgtggctttttttctgtggctcccagtgggtctacggaccttggctgacatatgttggtaggtactctggtcagctcagctggctgtcctggttcactcagaagataagtctctccaaagcaaattcacatgcattatgagtcgctttgagcttctgacatgtcacttgccccgaggttaaaacttttcaccccttgaagaccttacatgttttatggtattggtgaggaaggaaatgttctcaaggtctcaggctatttgggaaattccaactcctataccttaccagagcatggaagagcccagatctgaatgtaaaacgtctctgttctgccagagatggaaaaaatacaggtatacttgtgatatagtcatggggcttcagtgtcactattttctccttaaagctccagccaaaaactggacaaggatagagaggaggagggaagaacaaaagagcccttctctatgaaccttgtgccttctgtcctaccagttttcttttacagattctcacttctgctagcctagccagggcttactccaggaatctaaatagatgccctagtccactttatctttgttcccaaggcactcatttttattttgattttgattgaatgtgagcaggttgacctcaggtcacactttgttccaaaaacttttggaattattccaggacttgtggtggagttatggtactctagggcagtctttctcaaactatgtatggtaaaggaccaggttttttgttttccagtccttcacttatcaatatgcattcctattgcccatgacaggtatggagttcacactgtgtgctgccgacccggcaagtttgacagcacccaaactggccagactgttctgtaggttaagtccattgatcatgtacttggatatcacagcaacattgaaatgctaaaaagtttttaaacactctcaatttctaattcaccatgtcacagactggtgaaaaaaaaaaaaaggtgttcactgaccagcacaagtctgcagatcatctttgagtagcactgttttggggccctcggtctctctgaagaccctagcagaactgatacctacctgtatctcttgttctctcctatttgagtttcacttccagagaacttgttcttcagcaagaatgtgtcactagtaaggacatctctagcatttctctagccttccttttctgctgctcaaaaataatcgttacaaagcttaggtttaagctgtatatgaaatatttatgcgactctcaaactttaaaggagttgctcctttgttccaaaattaaatgtgttagataaatttgtgattgtatgggtggcttcatgaattaagaattgaattaatacagactttttgataat

SEQ ID NO: 164522 - DNA, 796 bp, Homo sapiens
  Payload ID: 12414
  Gene Symbol: PEX19
  Gene Name: peroxisomal biogenesis factor 19
  ENST ID: ENST00000392220
  CDS Start-End: 92-796
ttatctgcagagatcaggccaaagggagctctagaaggttgttggggagcactaaactggagaataagagaagatagtttaatgccgtaccatggagtctggtgctcttgatgatttcgataaagccaaaccctccccagcacccccttctaccaccacggcccctgatgcttcggggccccagaagagatcgccaggagacactgccaaagatgccctcttcgcttcccaagagaagtttttccaggaactattcgacagtgaactggcttcccaagccactgcggagttcgagaaggcaatgaaggagttggctgaggaagaaccccacctggtggagcagttccaaaagctctcagaggctgcagggagagtgggcagtgatatgacctcccaacaagaattcacttcttgcctaaaggaaacactaagtggattagccaaaaatgccactgaccttcagaactccagcatgtcggaagaagagctgaccaaggccatggaggggctaggcatggacgaaggggatggggaagggaacatcctccccatcatgcagagtattatgcagaacctactctccaaggatgtgctgtacccatcactgaaggagatcacagaaaagtatccagaatggttgcagagtcatcgggaatctctacctccagagcagtttgaaaaatatcaggagcagcacagcgtcatgtgcaaaatatgtgagcagtttgaggcagagacccccacagacagtgaaaccactcaaaaggctcgttttgagatggtgctggatcttatg

SEQ ID NO: 164523 - DNA, 734 bp, Homo sapiens
  Payload ID: 12414
  Gene Symbol: PEX19
  Gene Name: peroxisomal biogenesis factor 19
  ENST ID: ENST00000495624
  CDS Start-End: 1-358
cgaaggggatggggaagggaacatcctccccatcatgcagagtattatgcagaacctactctccaaggatgtgctgtacccatcactgaaggagatcacagaaaagtatccagaatggttgcagagtcatcgggaatctctacctccagagcagtttgaaaaatatcaggagcagcacagcgtcatgtgcaaaatatgtgagcagtttgaggcagagacccccacagacagtgaaaccactcaaaaggctcgttttgagatggtgctggatcttatgcagcagctacaagatttaggccatcctccaaaagagctggctggagagatggtgagtatgtcttatttttccagattttaatttgagtccccaatttccagaattctttaacctctcaggattccacctaaggtgaaaattgtggctactggggatggatcttcacgtctgtcctaaaaaatgagcaactatctgagtcccttcatctcttccccagcctcctggcctcaactttgacctggatgccctcaatctttcgggcccaccaggtgccagtggtgaacagtgtctgatcatgtgaaacacaacacgttttcctctctgagtcccagctatggggaacatctggagtcagcagaaccattgggacctgaggcaggagtgtcacctgcgggagaagtctgcccgctgccctctgtcatcccattcaagattgtgccataccagctgaggtttt

SEQ ID NO: 164524 - DNA, 3504 bp, Homo sapiens
  Payload ID: 12414
  Gene Symbol: PEX19
  Gene Name: peroxisomal biogenesis factor 19
  ENST ID: ENST00000472750
  CDS Start-End: 31-153
cgcctcctacggcaagtcggaggtagcaagatggccgccgctgaggaaggctgtagtgtcggggccgaagcggacagggaattggaggagcttctggaaagatgccctcttcgcttcccaagagaagtttttccaggaactattcgacagtgaactggcttcccaagccactgcggagttcgagaaggcaatgaaggagttggctgaggaagaaccccacctggtggagcagttccaaaagctctcagaggctgcagggagagtgggcagtgatatgacctcccaacaagaattcacttcttgcctaaaggaaacactaagtggattagccaaaaatgccactgaccttcagaactccagcatgtcggaagaagagctgaccaaggccatggaggggctaggcatggacgaaggggatggggaagggaacatcctccccatcatgcagagtattatgcagaacctactctccaaggatgtgctgtacccatcactgaaggagatcacagaaaagtatccagaatggttgcagagtcatcgggaatctctacctccagagcagtttgaaaaatatcaggagcagcacagcgtcatgtgcaaaatatgtgagcagtttgaggcagagacccccacagacagtgaaaccactcaaaaggctcgttttgagatggtgctggatcttatgcagcagctacaagatttaggccatcctccaaaagagctggctggagagatgcctcctggcctcaactttgacctggatgccctcaatctttcgggcccaccaggtgccagtggtgaacagtgtctgatcatgtgaaacacaacacgttttcctctctgagtcccagctatggggaacatctggagtcagcagaaccattgggacctgaggcaggagtgtcacctgcgggagaagtctgcccgctgccctctgtcatcccattcaagattgtgccataccagctgaggtttttcctctgtctctctaggaatagggtctgtttcacaggccatttctgtgaaccctactccattgtggtttctgccactatcaaagttccagctacctgcaaggtgaaggaaggcatcccttttggggcatgcactttctttcctttctcaaaataatgttatatgtggccacactgatgttcacctttacgtccagggtctttgtgccttgtctctactccctctcttggatctggggaggaggggcagagacctgggactctgtatttctatagttctcctggcagagcctttgagaatggggagaaacagcctgggctggggctacaggtctgtcactatgctctcttgccttcagacagaccattctgaattctctaaagggaaagggcttttgcatctaatcacaatagagttgaaagagaggccttaggattctcctctctctaggtgctgagccctcacctccctgttccaggctgagaactcaaatggttaccctgcttcttcctacaatgctgtgtgatatgggtgaacccagcccctgaccttcctctatcccctgcccatcctcccttttacctcctctcttttttaaacacctgtttatcccaacctttttgagctcaagctgtgataaagaagggcccatcctatttcccctcatctagtccatttacgattctcactgactccccgtcttcctggcagacacaaataaacccagtgtcaggtctaggaaattaatggctattcttccccagatacattctggcttatttgagatacatgattctcttagaatcctgtcccttggttcaggaaagtagcttggaaaaggagtaggggtatagcttgggtcccttttcctgcaaggccccatggggcagaatataataaatattctgagtgaggagtgtggtctttttctgatcttcctcagcttccgtaagttgcagagtgaggtatattaggagactagttctacacaatattgtaatgctgggttccatcaacacccaccttccacaactcagtctgcacctcagttggcaaaggagactggatggccatctttcctcatgttcccttgagtatttcaatgtagaaagcccttcaagtggtattatattttaaccttttacattattgttattaatgttagtaatatattgttatgttttctaaattatttttctttaagctgacgtggctttttttctgtggctcccagtgggtctacggaccttggctgacatatgttggtaggtactctggtcagctcagctggctgtcctggttcactcagaagataagtctctccaaagcaaattcacatgcattatgagtcgctttgagcttctgacatgtcacttgccccgaggttaaaacttttcaccccttgaagaccttacatgttttatggtattggtgaggaaggaaatgttctcaaggtctcaggctatttgggaaattccaactcctataccttaccagagcatggaagagcccagatctgaatgtaaaacgtctctgttctgccagagatggaaaaaatacaggtatacttgtgatatagtcatggggcttcagtgtcactattttctccttaaagctccagccaaaaactggacaaggatagagaggaggagggaagaacaaaagagcccttctctatgaaccttgtgccttctgtcctaccagttttcttttacagattctcacttctgctagcctagccagggcttactccaggaatctaaatagatgccctagtccactttatctttgttcccaaggcactcatttttattttgattttgattgaatgtgagcaggttgacctcaggtcacactttgttccaaaaacttttggaattattccaggacttgtggtggagttatggtactctagggcagtctttctcaaactatgtatggtaaaggaccaggttttttgttttccagtccttcacttatcaatatgcattcctattgcccatgacaggtatggagttcacactgtgtgctgccgacccggcaagtttgacagcacccaaactggccagactgttctgtaggttaagtccattgatcatgtacttggatatcacagcaacattgaaatgctaaaaagtttttaaacactctcaatttctaattcaccatgtcacagactggtgaaaaaaaaaaaaaggtgttcactgaccagcacaagtctgcagatcatctttgagtagcactgttttggggccctcggtctctctgaagaccctagcagaactgatacctacctgtatctcttgttctctcctatttgagtttcacttccagagaacttgttcttcagcaagaatgtgtcactagtaaggacatctctagcatttctctagccttccttttctgctgctcaaaaataatcgttacaaagcttaggtttaagctgtatatgaaatatttatgcgactctcaaactttaaaggagttgctcctttgttccaaaattaaatgtgttagataaatttgtga

SEQ ID NO: 164525 - DNA, 904 bp, Homo sapiens
  Payload ID: 12414
  Gene Symbol: PEX19
  Gene Name: peroxisomal biogenesis factor 19
  ENST ID: ENST00000462644
  CDS Start-End: 84-584
agagatcaggccaaagggagctctagaaggttgttggggagcactaaactggagaataagagaagatagtttaatgccgtaccatggagtctggtgctcttgatgatttcgataaagccaaaccctccccagcacccccttctaccaccacggcccctgatgcttcggggccccagaagagatcgccaggagacactgccaaagatgccctcttcgcttcccaagagaagtttttccaggaactattcgacagtgaactggcttcccaagccactgcggagttcgagaaggcaatgaaggagttggctgaggaagaaccccacctggtggagcagttccaaaagctctcagaggctgcagggagagtggaactccagcatgtcggaagaagagctgaccaaggccatggaggggctaggcatggacgaaggggatggggaagggaacatcctccccatcatgcagagtattatgcagaacctactctccaaggatgtgctgtacccatcactgaaggagatcacagaaaagtatccagaatggttgcagagtcatcgggaatctctacctccagagcagtttgaaaaatatcaggagcagcacagcgtcatgtgcaaaatatgtgagcagtttgaggcagagacccccacagacagtgaaaccactcaaaaggctcgttttgagatggtgctggatcttatgcagcagctacaagatttaggccatcctccaaaagagctggctggagagatgcctcctggcctcaactttgacctggatgccctcaatctttcgggcccaccaggtgccagtggtgaacagtgtctgatcatgtgaaacacaacacgttttcctctctgagtcccagctatggggaacatctggagtcagcagaaccattggg

SEQ ID NO: 164526 - DNA, 894 bp, Homo sapiens
  Payload ID: 12414
  Gene Symbol: PEX19
  Gene Name: peroxisomal biogenesis factor 19
  ENST ID: ENST00000532643
  CDS Start-End: 23-583
acggcaagtcggaggtagcaagatggccgccgctgaggaaggctgtagtgtcggggccgaagcggacagggaattggaggagcttctggaaagtgctcttgatgatttcgataaagccaaaccctccccagcacccccttctaccaccacggcccctgatgcttcggggccccagaagagatcgccaggagacactgccaaagatgccctcttcgcttcccaagagaagtttttccaggaactattcgacagtgaactggcttcccaagccactgcggagttcgagaaggcaatgaaggagttggctgaggaagaaccccacctggtggagcagttccaaaagctctcagaggctgcagggagagtggaactccagcatgtcggaagaagagctgaccaaggccatggaggggctaggcatggacgaaggggatggggaagggaacatcctccccatcatgcagagtattatgcagaacctactctccaaggatgtgctgtacccatcactgaaggagatcacagaaaagtatccagaatggttgcagagtcatcgggaatctctacctccagagcagtttgaaaaatatcaggagcagcacagcgtcatgtgcaaaatatgtgagcagtttgaggcagagacccccacagacagtgaaaccactcaaaaggctcgttttgagatggtgctggatcttatgcagcagctacaagatttaggccatcctccaaaagagctggctggagagatgcctcctggcctcaactttgacctggatgccctcaatctttcgggcccaccaggtgccagtggtgaacagtgtctgatcatgtgaaacacaacacgttttcctctctgagtcccagctatggggaacatctggagtcagcaga

SEQ ID NO: 164527 - DNA, 4317 bp, Homo sapiens
  Payload ID: 12415
  Gene Symbol: PEX2
  Gene Name: peroxisomal biogenesis factor 2
  Uniprot ID: P28328
  ENST ID: ENST00000357039
  CDS Start-End: 397-1314
tgtcggcgttcgcggttgtttggccatccagtgccttcagcagcgccgctaaagcgcagttctcgttggtgtaactttttcttttttttttcagccacttccggctcctgcgtcgctccggaagcctgcgagttccggaagccttggtaatccagattcggctaggaaaagacaagctttccagagaatgtttcagagaaagttacgtggagcgtgggcgtttcgcagactcctaagtggtctggaacctaacctgcagtgtctctgagcttctggcaagtatgaggcaaggatttcacagaagaacttggagcaaaaattcccactgtcatagctataggctgtccagtcttgagggagctgcaggaacaggaaaaagagaccttcagagaagacatggcttccagaaaagagaatgcgaagagtgcaaacagagtgctaagaataagccagttggatgcacttgaactaaacaaggccctggagcagctagtttggtcccagtttactcagtgctttcatggatttaaacctgggctgttagctcgctttgagccagaggtgaaagcgtgcttatgggttttcttgtggagattcaccatctactccaaaaatgccacagtgggacagtcagttttgaatattaagtacaaaaatgatttttcccctaacctgagatatcagccacccagtaaaaatcaaaaaatctggtatgctgtttgtacaattggtggcaggtggttagaagaacgatgctatgatttgtttcgaaaccatcatttagcatcatttgggaaagtcaagcagtgtgtgaattttgtgattggacttttgaaattaggtgggctgattaattttttgattttccttcagaggggaaagtttgcaactttgacagaacgtctcctaggtattcattctgtattttgcaagcctcaaaacatatgtgaagttggctttgaatacatgaatagggaacttctctggcatggttttgctgaatttctgatttttctcttaccacttatcaatgtccagaagttgaaagccaagctgtcttcatggtgtattcctcttactggtgcacctaatagtgacaatacattagccaccagtggcaaagaatgcgctctatgtggagagtggcccaccatgcctcacaccataggatgtgagcatattttctgttatttctgtgctaagagtagtttcttatttgacgtgtactttacttgtcctaagtgtggcacagaagtacacagtctgcagccactgaaatcaggaatcgagatgtcagaagtaaatgctctttagaaactaaaattgcttcctttgaggaaaaaaatgcaccgtgtttaaattcttaatattagtcatcctaagtataccatttatgtatcctttataaggaatgtgctcctagccactgtcttctcctttccaggcatgactgaaatctaatcactggaaaccatgtgattctaaatatattatgtaaatgttaatgtattatgttttttaaatcattgcattcaatttttaatgtcaagaataatggacagcttttgtcaggtgactactaacaatgctccttcattttactacttcttaaaacaaggttggattctaaagataaagattttggagactctgggatgagtgtgcatttattttcagagttgacataatatgataatgtgacaattatgagactgttttaaaccttaagacctgatgcctcagttgtaacttttttttttttttctgagacggtgtcctgctctgtcacccaggctggagtgcagtggcgcgatctctgctcactgcaacgtccgcctcccgggttcaagcaattctcctgcctcagcctcccgagtagctggcactgcaggtgcatgccaccatgcccgggtaatttttgtatttttagtagagatggggttcactgtgttagccaggatggtctctatctcctgatctggtgatccacctgcgtcagcctcccaaagtgctgagattacagacgtgagccactgtgcttggccgcctcagttgtaatgttatgcttttctctgaagccaatttttaagaagttcagtcctcagctgtctgacccctccacagttggctttatattcagaaagtaaaaattacttaaggcagcttggaagtgaggcctgggaactactgggggcaactagtatgaacagcactatttacaggtctctttctcttgcctttgattcagagctgtcattctcagtaaatattgatagttttattgaaacaaaaggggtctttagcatgggaatagtaacagcagtgcataatcaagataattctgtatccttcactctttttctctgcctttttttacttaaaagtaaattcagactcttaaaatggtatagaattattagcttgaacattgaattatctcgtcttaactagaatgttttttaaaaaacagtttttaaatgtttttaaataaacatcttgctagtatgatggaaatacactgccagttcatttttctcttcacctttcattgaacaagtactcaggtgccaggtactgatgtagccattagaggcacaacagtatattaagcaggaaaaatcaagttaccttcatggagtttacattctgtgattgaatgaactgtaagtttaatttaggttcaatttagtgtaagatactgaagaagttttgtagtttgagttaagagtattttacatcttaagaatttgccttcttttgccttctgtaattttaaaacattattgtagaaaacaccaacaattcaggaaaaaatataaaatcaactttcccacaattttttgagagagatcatcactatattttactatatttgtagatttgttgcacgtacatttcttatttacaaaattattataatgcataaaaaatagcattttttcctatgtataaatattcttcaaaactattttagggctgagcacaatggctcatgcctgtaatcccaggctccctacttagggaggctgagcccaggagtttgagttcgtttctaaaaaaataaaaatatatacaaacgtctttgttttttgtttgtttgtttgtttttggtgagaaagggcctcacccagtcacccaggttggagtgcagtggtgtgatcatggctaaccgcagcctttccctcccagggctcaagcgatcctcccatctgagcctcccaagttgctgggaccacaggcccataccaccatgcctggctaatttttgtagagatgaggtctcactttgttgcccaggctggtcttgaacttctgggctcaagcagtcctcctaccctggcctcccaaagttgtgggattacaggcatgagccactgcacccagccataatatatttttaaaatgctatgtatatgccatcatattcctattcctattattatttaaccaccatcatagagcatttaggttcttttcactttctgttgtgaataatgcaatgttgaatctgagttcattaagtgaagagtccagctgcacactgcaggcccagtctggatgtaggtgctcagatggttctctttgagacaggctttatcctttggctctcatttttttgatgagtgtacatggcatgagggacacagattccgctagaattcaaatcccacttgtgtataacctagggcaatgtgccacatctctgcacatctgttcattgtaaggattacatgtttagtgtatataaagctcttaaaacaatgcctgacacatagtaaatagaatataatagtagtgctttcctttgctgttgtcagtattactctgagtcggtttcattctcacacagaatgatggccgctagaagctcaaggcttataatctgctagctttctgatcccactggcatgagatactcttgcctaatagttacagctaaagtccaggagctcactgttactggtctgccttggattatgtgcacattcctgaaccagccactatagctaggggatggaaaatactgttcctggttacttaaatgtaggtgatgctcctcccatataccacatgaacctaaaggagtcctggaggaggccgttcaccacaggaaactgaggtgttcttagaagggtggatgctggcagatctctactagttagagtctacatttgccttactcatttcaaaagtccacattgcagtctcattttaccagtgatctagcttgataaggacattcataagtaactggatgattctttaacattgcagatttgaaaggattaaataaagtcaacaaaattgttatatcaa

SEQ ID NO: 164528 - DNA, 1470 bp, Homo sapiens
  Payload ID: 12415
  Gene Symbol: PEX2
  Gene Name: peroxisomal biogenesis factor 2
  Uniprot ID: P28328
  ENST ID: ENST00000520103
  CDS Start-End: 226-1143
actgccattcataccacagaacgagaaggcagtggcgatcctcaacggctacatgtcactgcctgccacttccggctcctgcgtcgctccggaagcctgcgagttccggaagccttggtaatccagattcggctaggaaaagacaagctttccagagaatgtttcagagaaagttacgtggagcgtgggcgtttcgcagactcctaagagaccttcagagaagacatggcttccagaaaagagaatgcgaagagtgcaaacagagtgctaagaataagccagttggatgcacttgaactaaacaaggccctggagcagctagtttggtcccagtttactcagtgctttcatggatttaaacctgggctgttagctcgctttgagccagaggtgaaagcgtgcttatgggttttcttgtggagattcaccatctactccaaaaatgccacagtgggacagtcagttttgaatattaagtacaaaaatgatttttcccctaacctgagatatcagccacccagtaaaaatcaaaaaatctggtatgctgtttgtacaattggtggcaggtggttagaagaacgatgctatgatttgtttcgaaaccatcatttagcatcatttgggaaagtcaagcagtgtgtgaattttgtgattggacttttgaaattaggtgggctgattaattttttgattttccttcagaggggaaagtttgcaactttgacagaacgtctcctaggtattcattctgtattttgcaagcctcaaaacatatgtgaagttggctttgaatacatgaatagggaacttctctggcatggttttgctgaatttctgatttttctcttaccacttatcaatgtccagaagttgaaagccaagctgtcttcatggtgtattcctcttactggtgcacctaatagtgacaatacattagccaccagtggcaaagaatgcgctctatgtggagagtggcccaccatgcctcacaccataggatgtgagcatattttctgttatttctgtgctaagagtagtttcttatttgacgtgtactttacttgtcctaagtgtggcacagaagtacacagtctgcagccactgaaatcaggaatcgagatgtcagaagtaaatgctctttagaaactaaaattgcttcctttgaggaaaaaaatgcaccgtgtttaaattcttaatattagtcatcctaagtataccatttatgtatcctttataaggaatgtgctcctagccactgtcttctcctttccaggcatgactgaaatctaatcactggaaaccatgtgattctaaatatattatgtaaatgttaatgtattatgttttttaaatcattgcattcaatttttaatgtcaagaataatggacagcttttgtcaggtgactactaacaatgctccttcattttactacttcttaaaacaaggttggattctaaagataaagatt

SEQ ID NO: 164529 - DNA, 1627 bp, Homo sapiens
  Payload ID: 12415
  Gene Symbol: PEX2
  Gene Name: peroxisomal biogenesis factor 2
  Uniprot ID: P28328
  ENST ID: ENST00000522527
  CDS Start-End: 406-1323
gggtgtccgcttcggcttttcggcccttcggctcttcggcttgtcggcgttcgcggttgtttggccatccagtgccttcagcagcgccgctaaagcgcagttctcgttggtgtaactttttcttttttttttcagccacttccggctcctgcgtcgctccggaagcctgcgagttccggaagccttggtaatccagattcggctaggaaaagacaagctttccagagaatgtttcagagaaagttacgtggagcgtgggcgtttcgcagactcctaagcttctggcaagtatgaggcaaggatttcacagaagaacttggagcaaaaattcccactgtcatagctataggctgtccagtcttgagggagctgcaggaacaggaaaaagagaccttcagagaagacatggcttccagaaaagagaatgcgaagagtgcaaacagagtgctaagaataagccagttggatgcacttgaactaaacaaggccctggagcagctagtttggtcccagtttactcagtgctttcatggatttaaacctgggctgttagctcgctttgagccagaggtgaaagcgtgcttatgggttttcttgtggagattcaccatctactccaaaaatgccacagtgggacagtcagttttgaatattaagtacaaaaatgatttttcccctaacctgagatatcagccacccagtaaaaatcaaaaaatctggtatgctgtttgtacaattggtggcaggtggttagaagaacgatgctatgatttgtttcgaaaccatcatttagcatcatttgggaaagtcaagcagtgtgtgaattttgtgattggacttttgaaattaggtgggctgattaattttttgattttccttcagaggggaaagtttgcaactttgacagaacgtctcctaggtattcattctgtattttgcaagcctcaaaacatatgtgaagttggctttgaatacatgaatagggaacttctctggcatggttttgctgaatttctgatttttctcttaccacttatcaatgtccagaagttgaaagccaagctgtcttcatggtgtattcctcttactggtgcacctaatagtgacaatacattagccaccagtggcaaagaatgcgctctatgtggagagtggcccaccatgcctcacaccataggatgtgagcatattttctgttatttctgtgctaagagtagtttcttatttgacgtgtactttacttgtcctaagtgtggcacagaagtacacagtctgcagccactgaaatcaggaatcgagatgtcagaagtaaatgctctttagaaactaaaattgcttcctttgaggaaaaaaatgcaccgtgtttaaattcttaatattagtcatcctaagtataccatttatgtatcctttataaggaatgtgctcctagccactgtcttctcctttccaggcatgactgaaatctaatcactggaaaccatgtgattctaaatatattatgtaaatgttaatgtattatgttttttaaatcattgcattcaatttttaatgtcaagaataatggacagcttttgtcaggtgactactaacaatgctccttcattttactacttcttaaaacaag

SEQ ID NO: 164530 - DNA, 700 bp, Homo sapiens
  Payload ID: 12415
  Gene Symbol: PEX2
  Gene Name: peroxisomal biogenesis factor 2
  ENST ID: ENST00000518986
  CDS Start-End: 162-700
ggcagtgtggagaatgcactgaaggaggcagaagcttctggcaagtatgaggcaaggatttcacagaagaacttggagcaaaaattcccactgtcatagctataggctgtccagtcttgagggagctgcaggaacaggaaaaagagaccttcagagaagacatggcttccagaaaagagaatgcgaagagtgcaaacagagtgctaagaataagccagttggatgcacttgaactaaacaaggccctggagcagctagtttggtcccagtttactcagtgctttcatggatttaaacctgggctgttagctcgctttgagccagaggtgaaagcgtgcttatgggttttcttgtggagattcaccatctactccaaaaatgccacagtgggacagtcagttttgaatattaagtacaaaaatgatttttcccctaacctgagatatcagccacccagtaaaaatcaaaaaatctggtatgctgtttgtacaattggtggcaggtggttagaagaacgatgctatgatttgtttcgaaaccatcatttagcatcatttgggaaagtcaagcagtgtgtgaattttgtgattggacttttgaaattaggtgggctgattaattttttgattttccttcagaggggaaagtttgcaactttgacagaacgtctcctaggtattcattctgtattttgcaagcc

SEQ ID NO: 164531 - DNA, 473 bp, Homo sapiens
  Payload ID: 12415
  Gene Symbol: PEX2
  Gene Name: peroxisomal biogenesis factor 2
  ENST ID: ENST00000519956
  CDS Start-End: 465-473
ggaggtaagaactaagacgttcttaaaccctactacgtgctggaatcctgaagtgcctgccatcattcaaacttaagcactaactctctagagagacactgccattcataccacagaacgagaaggcagtggcgatcctcaacggctacatgtcactgcctgccacttccggctcctgcgtcgctccggaagcctgcgagttccggaagccttggtaatccagattcggctaggaaaagacaagctttccagagaatgtttcagagaaagttacgtggagcgtgggcgtttcgcagactcctaagtggtctggaacctaacctgcagtgtctctgagcttctggcaagtatgaggcaaggatttcacagaagaacttggagcaaaaattcccactgtcatagctataggctgtccagtcttgagggagctgcaggaacaggaaaaagagaccttcagagaagacatggcttcc

SEQ ID NO: 164532 - DNA, 18445 bp, Homo sapiens
  Payload ID: 12416
  Gene Symbol: PEX26
  Gene Name: peroxisomal biogenesis factor 26
  Uniprot ID: Q7Z412
  ENST ID: ENST00000329627
  CDS Start-End: 207-1124
acagaaggcgatgggccgagagctgaggaactacaactcctagagtactccgcgccgccgggacgccgcgcggctgcggggctgggcgagcgcaaagatgtccgcgcccgctgccgggaggcgaggccaactcgggatatcccggagcctctggggaggcggtcactccgacgtctgaggacctgggccttggacccggactcgttatgaagagcgattcttcgacctctgcagcccccctcagggggctcgggggacccctgcgcagcagcgagccggtgcgcgcggtcccggcccgggcgccggccgtggaccttctggaggaggcggccgacctcctggtggtgcacctggacttccgggcggcgctggagacctgcgagcgggcctggcagagtctggccaaccacgccgtggcagaggaacccgcgggcacctcattggaggtgaagtgctccctgtgtgttgtggggatccaggccctggcagaaatggatcggtggcaagaagtcctctcctgggtccttcagtattaccaggtccctgaaaagctaccccccaaagtcctggagctgtgcattcttttatacagcaaaatgcaagagcctggagctgtgctggatgtggtgggtgcctggctccaagacccagccaatcaaaaccttccagaatatggagccttggcagaatttcacgtgcagcgggtgctgctgcctctgggctgcttatcggaggctgaggagctagtggtgggctctgcagcctttggtgaggagcggcgactggatgtacttcaggccattcacacagcgaggcagcagcagaaacaggaacactcaggctctgaggaggcccagaagccaaacctggaaggctctgtctcccacaagttcctgtcactaccgatgttggttcgccagctttgggactctgcggtgagccacttcttttctctgcccttcaaaaagagtctcctggctgccttgatcctctgtctcctggtggtgagatttgatccagcttccccttcctccctgcacttcctctacaagctggcccagctcttccgctggatccggaaggctgcattttctcgcctctaccagctccgcatccgtgactgagggtccctgcgcaccacagcctctctgctcctcacgtccgtggccacagaagcagagcgacagagcgacacatccacaggcgcccctggggaaatgggaccagcctaatctcgcggagtgcactgtgtcttgctgcctgggtgccctctcctttgcaccctacttcggctggtcgcggtagatgatgtggaaacaaagcaggaccagcaggcacagcacctccagaacagtgccccggatgaccagaggccccttgaaaaggaggggtttggggacagggactgtgtccatgaaacattccatcttcttggtgaaggcaaggggttggttcttcaggtcaggatgttaatggagctggaagttcagaaaaagcctggtgaagtgacccttggcctttcacttcttgagaaacatacttctttgctgggcatggtgactcacgcctgtaatcccagcactttggaagggtgaggtgggtggatcacttgtggccaggagttcaaaacctgcctggccaacatggtgaaaccccatctctactaaaaatacaaaaattagctagatgtggtgcacgcctatagtcctagctacttgggaggctgaggcaggagaatcacttgagccagggaggcaaaagttgcagtgagctgagattgtgctaccgcactctctcaaaacaaacaaaaaaacatgccccacaggacagtaccttaattagctagagtagatctgagagggcctcttcttgcctgcactgtgctccccagagctgatctaattctgtatcaataggctgttcccatggtcttgccatgcgcttgaagctgcaggagccttctcactgttcaggctggggtgtggttttcagaaccaccgggttgactactgaaaaccaagtgagccttacagctcttatcgctgggtaaagtgatcttgcctggtgcctcttggtcttcagctcaattttccaggttgtcctggccaagtcttgctctgttacgctcagtgcctctgcccactctttccccgccagcccttccctcccgccctgcaaacttgtcccttggctgtttcaccaggttctgcctgtatccttgcctccttggtacacaccatttcaggttcttccctttctgtgtcccattgtcctagttatgttctgttgtttgtgtaatgcccaaatttttctgctcgtgtggccttgaaaagtaggccagcctcagaggctgctgagctgaaaatggaactgagtaatcaggtgagctggaagggatgtggggggcggggcagacgggagacatgggttttgaaggcagtgaacaataaaaccttagggaggtggcaccgaggccttagcatttgaggagctgaaatgtttcagtgttgttttctcaccagccacaagcatcttatgagtttctgtgcaaggaagcgtagagcactgctgtgctgtcaggatgaagaagggctttctgcaggggctggcctttctctacccagaggccaagcaggctgccctgcactgtgtccttggtgttgatgcccaaaatagagaaggtgcttgctagcttttccttggtacattttcgggggttgcaaggcaacaagttttcttttgttttgtttgtttgtttgtttgtttgtttttgagatggagtctctgtcacccaggctggagtgcagtggcgtgatctcagctcactgcaagctccgcctcccgggttcatgccattctcctgcctcagcctcccgagtagctgggactacaggtgcccaccacctcgcctggctaatatttttgtatttttagtagagtctgggtttcactgtgttagccgggatggtctcgatctcctgaacttgtgatccacccacctaggcctcccaaagtgctgggattacaggtgtgagccatcgcgcccggccaacttttctttagaaaaatgagtaaagtaggtaaacttcacaggccccttagaattaaatccttagggcatggttcaagtctgtaggaagcaaatctatacttttttatatgggcttttaagtaaagcttagaaccctggggggagaaaagcagtcaggtgaggtttgagattccttctatagaatgatttcttaaaatgaaaatctgggcccacttaactaccctagataaaacgcttcaatggcttcccatggctcactggataacatctaaattcttcatggaattgaaggcccctatgtgctggttttggctaagatctcccctttgatgtgggtcccctgttgattatatgtgcggccttccagctgcccaccatcacagctacagctcgctccccttggcctctgtgccttggctcgcactgttcctactgaaggcctagcacctgctcttggcctggtgagcccctccaccttccaggcttactcaaagaattctttctgcccctccctgtgtcccgggacctgtttcatatcgcttctgtggtcgtgaccccatggtcttgtaattgtgaacttctttgctgccccttcgaagctggggagtgcttgttgcagatgcatccaagaggggtaattgcgtatcaacagtggatttgctggttgtttctacagggttctgaagcatgcaacatagaacagatacctttaaatttaggggcgctaaggaaagcaggaaccagtaatcctcttctgtggtgggatgggagggtgggggagaggggtggaatggagaggaaacaggctattgttggccagccctgggtggaggtgggtgcaagcaggacagatagtgcctgggggtgggggcggagggttcgcctctaggaaggggctagaagggatgaggaaatagttcatagcttcgtgcaggtgatccctattctgcgtgtatgtgtttgcacatgagtgtttgtagaccatagaccattaaaaaatacggaattcaaaagttacaaaaagggtattcttggaaaagaaagttgtttttttttagtcttgctgtgttgcccaggctggacctgaactcctgggcttgagcaagtcttcccctcagcctctggagtagctgggcctacagtgtgtgctgccacacccagctaatacagtctttctactcccgctctctattccccagtttcttgcccagaggcaacccttgccagtctgtttatccctccagatacagtctctgatagtaaacttttctttctcttacacaaatgatagtagtcacatacactacacacactgtgccacgtttaaaaagaaaaaaaacaattctcggctgggcgcggtggcgcatgcctgtaatcccagcactttgggaggccaaggtgggtgaatcacctgaagtcaggagttcgagatcagcatggccaacatggtgaaaccccatctctactaaaaatacaaaaaaaaaatgagccgggcatggtggtgggtacctgtaatcccagctactcaggaggctgaggcaggagaatcacttgaacccgggaggcaagggttgcagtgagctgagatcgcgccattgcactcccacctgggcaacaaagagtgaaacttggtctcagaaacgaaacaaaacacaaaaacctttctcagtcccagcatatgtggagcagcctcattcttcatagctgtgtgtcattccgttgcgtgatggggtcacagagcacagacctggtgcccttttcctttttaatatgtggaaacccctccatgctttccaaagcctacaagtacagcagccccaagtttagggtgagcagcagtggtcagagctctttactattacttttgggcaaacgcaagccaggctggcaaccaccactgccgccgaggggagatacaagcaggccagttcacactctggacgttcagtttctttctacatctagaaggtggcctctgctatccacttaaagcagcccaaggaactgtcagaaagcgaaagtgatgacatgaaccgcgagtagggcacctccctgtgccgtcgtctgctttccttcctccctcccagcctccctgtgccgtcctctgctttcctccctcccagcacggaaaagccgtggggccgatggactttggcctcacatccacagatggggcctgtgggaattctactgatttactctctggcctagtcaagcaacccacccacggcctggccaaggtcggcctcaccgccctggcctagcacctttggaaactgaatacatggagtgttaaccagaaaaatgtctggcccttttgcctcgctgcctctggaaacctcagtgtttcgggctggtaggaagctacaggacagacagtgggcacggtgcctagcagcctgtcgcgcccccgcccgcctctgcattcctccagcggtggtgtacggatccagacattgtttgccacctctaggcctcttgataaaacagcaagtatttttcttgtcttaaagcaatgcatgtatattttagaaaatattaattgcatagaaggaaatacaggactcgtgatcccaccactcagaaataattactattaatacggttgattttctttcagcttttttccccctaattaattaactaattcttttttttcctgcaactcctgcttcacagactttttttttttttttaacttggcatggtggctcacacctataatcccagcactttgggaggccagagtgggaggattgcttgagcctaggagttcaaagctagcctgggcaacctagtgggaccccatttcttttttttggggggggggtgggttataaaagcccttttataaagccaattttaaacaagaaaaaaacaaaaagtttacaaaagaaaaaaagatacagaaaaagaataacttgcttcatatgtcccaaaaagagaaaaaaataaacgggacaatgccaacatgctcaacaataaagggttctttttcttacttttttaatacaaaatacaagcaaaggatacacatacttaaaacagagctcaggagcagacacgcagtcctgggaacccttcaataagagcaaagcaggagtttgttttttctttgtgcagatacatacagagactgggatatgtaaaaattaagtatcacaaaagaccatcacacgattctaccaatgcatgttgcatctataattcacgaacatggtcaacaagatcatgttcacttcaaccccatttcatttaaattaaagaaaaaaacctggccgggcgcggtggctcacgcctgtaatcccagcaccttgggaagccgaggcaggtggatcacgaggtcaggagatcgagaccatcctggctaacacggtgaaatcccatctctactaaaaaaatacaaaaaattagccgggcgtggtggcgggtgcctgtagccccagctactcgggaggctgaggcagaagaatggcgtgaacccaggaggcggagcttgcagtgagcctagatggcgccactgcactccagcctgggggacagagcaagactccgtcttaaaaaaaaaaaaaacaaaaataaaccttttaaataaagtggttacattctaactttaacttccttagtaccatgctgcaggtttcagcactgttaaggtattgcaagaatgcccaaccctctggtgtctgattgtgtatctagcaacattgcagtatgaagaaaagagatgccccgggtacgaccccatttctattaaaaataaatgtaaacacccaaccctcttggcagcccatgcacttgagaacctgtagaaaatggcagtgtgcaaccagcatggctgcgagctcagcgtcttcactagagagagtggaggtggttaggaaagggcaggcgggaaggggccatgttggccggacaactgcaggtgaagatgggattgtgaagtacagtccaaggcccactcaccaagggctggatccaaatatgtggggttgggattctgtgacctacttccaattttaatattgacctgagctcatatttagctctacatgtttcccagctcgtattttccaacagcccctttaaaacttttagcatcctcttgtcacttttgtactatccaaggtgggacggacaggtgtcagataatagcagagacttggtgaagaaatgaaagcacttttgtagaagagtgtcatttcagaaaaaagccttttttttttgagatggagtctcgctctgtcacccaggctggaatgcagtggcgtgatctcagctcactgcaagctccgcctcctgggttcacaccattctcctgcctcagcctcccgagtggctgggactataggcgcccgccaccacgcctggctaattttttggtatttttagtagagactgggtttcaccgtgttagccaggatggtctcgatctcctgacctcgtgatccgcctcccacagtgctgggattacaggcgtgagccacggcacctggagagaaaaaagcttctttaatgacgacctcaacataatttacatggagaagtttcttaggtggaaaaccgatttgtatggtcctcagaatgtaacctacaggttcttgccctcagaaaaatgcatgcatacttttatgttacaggcttattttccaaatgcggtagagggccatcccttctttggcttcttgccttgtctctgaccccactgactgccccttttctgcctccatagctagtttcttattttcctttggctttttttttcttttcttttcttttcttctttttttttttgagatggaatcttgctcttgtcacctaggctggagtgcagtggtgcgatctcggctcactgcaccctcctcttgggttcaagccagcgaggtagatattatcattttagagacagcaaaacagactcagaggggctaatgtgcccagtgccccaccgcttttaaatggtagagctgggatttgaatctaggcatacaggtaccaggatttctgttcttatctcccccatagcacctggaatgaggccatccatgtaagaggccaagtaataaagatttgttgaatgaacttggattttggccttaggaattagggaaggaagaaatagaagcagcaagagttggtgagcaataagacccgcaccagggctgaagggtggaggtggggcaggggagggctctgtgctttggcatctgtttagtagtatcgtcgcccagctccctccagagaaagagcaggaggtgttcttctcagatgtaccagcaatgacaaagcctggcgggtgtcctcctgggtaggtataaatacaagctggtagtttcattggatgactcacacagataagccatgctcttggttaccagtggacttagctgggtctcaaagaatgggctgctttctctggaaagctggggagctggtaaaattttttggtcgccccaccagagacatcctacccattcccagtccctctgtgggctctgacatctctgtccggcgggcaccccctgctctggaacattctgggaatgcttcccactccccttttagtacttgtttgtgttctgtcctgttcctggatttcatggtctccatggtgacaagtgcttgttttcagaggtgctaaagacaatggctaaaagatgtgctctattaatcctcccaggaaacatattttgcaaaagcctttttttttttttttttgagaaacaaggcctaaccccaatggagtaatttgctgcgtaaatgagagacatcatgggattgtggttaagagtgtgggtcccagacccataatgcccaagtttgtatcttttttttttgagacagagtctcactctgtcgtccaagctggagggcagtggcatgatctcgacacactgcaacatccacttcctaggttcaagcgattctcttgcctcagccttccgagtagctggaactacaggcacacactaccacgcctggctaatttttgaatttttagtagagacggggttttaccatgttggccaggctggtcttgaactcttgacctcaagtgatctgcatgcctcacctcccaaagtgttgggaatacaggcatgagccaccacacccggcctgagtttgtatcttgactcacctgctttgaccttcaaataatctttcctgtgcctcagttacttcataggtttgttgtgaggattaactggtgctaatccatgtaaaacactgaaaaggtgcatagcatgtagtgagcaggtgctagttattattactgttgctcttaattaagtgaggtaaggaggggagagttggagtggtagaacccagcatcttgtgaacatcagaccacagaaaaggcagcacttctgattcctgttcttagcctaggaactaggctttgcaaatggctctgaattttttttttttttttgagatggagtctcgctctgtcgcccaggctggagtgcagtggcacgatctcagctcactgcaagctctgcctcccaggttcatgccattcttctgcctcagcctcccgaatagctgggactacaggcgcccgccaccacacccggctaattttttgtatttttagtagagatggggtttcaccgtgttagccaggatggtctcgatctcctgaccttgtgatctgcccacctcggcctcccaaagtgctgggattacaggcgtgagccaccacgcccggccggctctgatttcttaaagtgctaagcctttttatatattcatttcagaccatgtttaattttctaaatatgcaatacattcatagggtttttgaaaaggcttgaaaaagtctagtgtgaaagcagtctgtattagtccattttcacactgctttagagaagtatcagagactgggtaattgttgaagaaaagaggtttaactgactcacagttctgcatggctgtgaggcctcaggaaacaagcagtcatagtggaaggcaaaggggaagcaaggcacatcttacatggcagcagcagagagaatgaggggggatgccacactttaaaaccatcagaactcgtgagaactgactcactatcacaagaacaacaggggagaaactgttcctgtgatccagtcacctcccaccaggtccctcctccgacgtggggattacagtttgagatgagatttgagtggggacacagagccaaaccatatcacctcccatctcttcatttagcaagttcacctaccccaatggcagctatggccgttagttttttttttttttcttttttttgagacagagcctcactctgtcgcccaggctggagtgcaggggtgtgatctcggctcactgcaagctccgccttccgggttcacgccattctcctgcctcagcctcccaagtggctgggactacaggctcctgccaccgcgcccggctaattttttgtatttttagtagagacggggtctcaccgtgttagccaggatggtcttgatctcctgacctcgtgatccacttgcctcggtctcccaaagtgctgggattacaggcatgagccaccgtgcctggccacagccattagttttaaatttactcttccagaggtaaatttaatacaccaatacaaaaccagtatggatatagatcctagtttcttctcctttttataaaaaaaacctgtagtatattatgtactctgttttattccttcctttttttttcttataaaaaatacagagatggggtcttactacactgaccaggctggtgttgaacttgcctcaagtgatcctcccatcttgacctcccaaagtgctgggattataggcataagccaccacacccagatgatttttttatttttcaaagaagtggcatgattttgatgacaataaaggacaatatgtaattaatggtaattataatacagccttctagaggccaggtgcagtggcccatgcccgtaatcccaccactttgggtggccaaggcaggtggatcatgaggccaggagtttgagaccagcctggccaacatgatgaaaccccatctcttcaaaaaatctaaaaattagctgggtgtggtggcgtgcacctgtaatctcagctacttgggaggctgaggcacaagaatcacttgaacccaggaggcggaggttgcagtgggccgagatcgagccactgcactccagcctgggcaacagagcgagactctgtctcacacatacacacacaaaaaaagtataaatatatagctttctagatataggattggactggttttggttctggctctgttactaatttgccctataactttgcataagtcatttaatctcgggtccaatttttctcacctccaagatggggacaaaaattatcttccttggctgggtgcggtggctcatgcctgcaatcccagcacttcgggaggccaagaccagcctggccaacatgatgaaaccccacctctactaaaaatacaaaaattagctgggtgtgatggtgcacacctttaatcccagctactcaggaggaggctgaggcaggagaatctctggaacctgggaggcagaggttgcagtgagctgagatcctgccactgcactccagtctgggcgacagagtgagattctgtctcaaaaaaaagaaaaaagaaaaaaaaattacctccctcattttctttataatattattgtgtaaaatgagtaaaagtctataagaaaaactttgaaaagtattaagtaatacacatgtgtatgtgtgcgtgtgtagacatatatatataatatatatacacatatgcaatggagtaatgaaaatactatataataaatataaaatggattaaaactatataaaatagatgcatgaaatggctacatagatatggatgtttgcatataggcacatttagctggattaagttagatttaaatggtccaatagagaactgtgcatacaattacataggcaaccacaaatcaaccctttctctgggctatctaaaataatcaggtactagaccaaaaaatgacatgctgtctgccttaccttttagtgatgatttgtaggaagaggaaggtaggggctggtgagtggaaaagtagtagagtttgtgagggaatgttctgtatgtctgaagacaaagtctggagattggtgggccagaaggtgtgaatctactctgaaggacaggcaagagtccagcccagggaaaaaggtgcagatgggtaggatttgggtgggtacttgaattaaaaaaatgaatttgtgaggcaatattgctggagtcaaaaccaaaaaatcaaattgaccagggcaaaaaatagcctggggcctagcatggctctgctgccacgtaggatgactggacctctttccaggttcgtgttaacagtccatactacttatggtatacgtgaaatgctttctattcattcaagcaaccttactaaaaacaccccatgaaaataaaagtctatatcttcccttcaatatacattcatatgtgcttattttaagcatatatctaccaatttgagtttggcattctttttcatttaatattattacctattcagcttccaacattatcacttccttactacacacatttgtttcctaggactgctgttaacaaattgccacaaatgtatggcttaaaacaacagaaatttattatctcacagctctgaaggccagaagtcagccaaagcctctgcctctgaaggctgtaggcaagattccttccttgtttcttccagcttctgctggctctaagtgttccctggcctgcgacagcatcactccaatccctgcctcagtcttcgcttgaccttcttcgtacctctgtatcttctctgccaaggatgcatgtcactgaatttaagagccaccctaatccaggatgatctcatcttgaggtcctcaattacatcaagatccttattccaaataatgtcacattctgagattttaggcaaacatatctttggggggccaaaattcaatcccctaatccatgttagtaaccatgcagtgttccttcttatttctatgttgaccttttcagctctttctatttattgttattatttttgagatagagtttcaatcttgttgcccaggctggagtgcaatggtgcaatcttggctcacggcaacctccgcctcccaggttcaagcaattctcctgcctcagcctcctgagtagctggtatgacaggcatgcaccaccatgcccagctaattttatatttttagtagaggcagggtttcgctgtgttggccagactggtctcaaactcctgatcttgggtgatctgccctcctcagcctcccaaagtgctgggattagaggcgtgagccaccatgcctggccagctctttctaactaaaaaataataataataataataaaaaataaaagatgatacttgcaaaatacctcaagtgtacctcatttacctcaaatatacctcatggtccgaaagtatttagtcagcaatgtaccattatagaaaaacacatagcttgtggctccaactttaaaaccagaataaccaagtgaaaagtcagtacagattctcacttctacttaaaaaatcaaaggtacacattgggaattgaacagctatgttttttcttctttctagagatgtgacatacatattttctggtcagtaatattctaccaatggtattaattcaaagcaggtagatgaccagcgatgctgtttactacatcctacgcatgctgagatagatgagtgggacaccatctcggtaggaaagagtttgacaggaagaagaaattgcagagtccctgcctgtcccagagaacctaacaaactgatctatatggaaaggattttcagcaaacatgcacaaacacagttaatatgctggaagaagaggatagcttttagtctatttccagcacacggcctacactcactggtaccccatacaacaggaatgaatgccgacttagcatttttgccttcacagcgctggcaactaaaaggctcacagatactctgatctttaagcagataatcatggaattctcaacatcatatccactaggttaggctgagggttcatctataaaagtatttttccaaaaataatgcttaaaagagacttctagaaacagtgggactgtatcaggatcaacagaagacttcttgacccaaagattcaaatatagaactaggaattgattttcacatgtagtttttaggtaaaggacatctctttcagttgattcctacagccaagactagctttgatcctgggagattcagaaacctcaagatgggtagctggcttgagtaacatcctagataatagtcccagtcaaaaaccccattgaggttgaaggactggaaactgacctgtgtgaaaaagagctatcagtgcaggaaaagactcatgctgattttgaccttcctctgacccttttccctcaactgcttggtggggagtagcgaggagaaggagcatgtggcaccctcattggaggctggagcactgctgcagaaagtgatctcttactcatacttcaagacacagcctaagtatgaccacctgtatggacccttccctaatgcccaggatcaagaaaagaatgtggccaccttccaaggctcagagtagctgtgcaatgacttgtgtcaaaacccgatccagagcagcagtgatgaaatcaccctctcctttaagacctggcattacaatggcctcatcctgcatgtgggcaagtcagctctctgatggatggtgcaatttccttggtcattaacctgaggtctggggcctttaaagctattgaggagccagtgaatggagaattcgacaacgcctggcatgattgagggtgacacatcacggcagatgatggctgaggagacattgcccagaagtctcatcttaggtggttgagtaggaagtttgtgaagcaggtggtgggtgagatggagtgggtagagattcaggtatggagatgtcagtgtctaactttcttctagtctttgcaatttcacaaggaaaatcactaaaatgtgcgtctcttcatttaaaagaaaaaaaagttcatgccaaagctgctgggacaaagaggactcatgatagtgggttattccacactgttgacacactgaatgtatgctggcagaagggcctcaggtggaatgctgggcatgggtttgccccacagcagtctgattcaaaagcacctgagagatgggaggagtactagggttactaaacacaagaaggtgtttcaggagaaacacatcaagccatttgtttttgacccttaatacttaacatgaatgatgagttgcagaacagtcagtctttccaagatgtattgttctatcctcaatagctgcagcctctccaagccagtgggctggtgacatccaggatgatcctcttccttgcctggaggtgggatctagtgccacagcttgttcggggaagctggcatagaagatgatttgctcaacaaagtcaccgctaaactatcgcttaggtctagtccccggcctatggcaccaagtactcctggtagtacttgtacacagaatttctctataataaccagaacatgtcatccatggtaatgtctgctacatatccaaccacagcatcaaattctgtctgatgaagggcaccagccccttcatctttatcatgcctaatattgtgaaggccatgtgctaaatccagcaatccgctccagtaggtgtccttcaggatacttttctgtcaagtaaatacatttattaaaaataggcatgtagccgggcgcagtggctcacacctgtaatcgcagtactttaggaggctgaggcgggcgaatcacgaggtcaggagttcgagaccagcctggccaacacggtgaaaccccatctctactaaaaatacaaaaaattagctgggcatggtggcgtgtgcctgtaatcccagatactcaggaggctgaggcaggagaattgcttgaacccaggaggcagaggtggcagtgagccgagatcgtgcgatcgtgctattgcactccagcctgggcgacagtgtgcgactgcatctcaaaaaaaaaaaaaaaaaaaaggcatgtaaaagttaatctcatggaggtagagagtagaatgacaattactagaggctgggcagggtgtgtatgtgggatgaagaggtggcttgatggacacaaacatagatagaaggagtgagttctaatgcttgatagcagaatagggtgaccattgttaacactgtattgggtgtttcaaaatagacggaataaaggatttgaaatgttctcaacacatagaaatgagaaatactcaaggtcatgggtatcctggataccctgagttgatcactacacattctatgcatgtaatgaaatgtcacatctacttcaataatatgtacaaatattatttatcaaaaagcaggcatgtaggtgagttgattttcttccatgtcttcaaactcctggtaatacttgtccacaaaatttctctataataaccggaacatgtcatccatgataatgtgtactatatatccaaccacaacatcaaattctgtatcagaggcagaagagaaggacagcatgaagctcgattcctccaactgtcctttggctggtggccctccaccctgcccacagcccggccagctcagccccgtctctgtcccatacagagccacagccacagtgagagcctggcagcctgcccggaggaggcttcttggcccagcccggtcaacacccacatgcaccaccaccaactttttgctattgtgaataacatagctgtaaacagattgcatatgaaagtgctgtgaaatcaccaagggctgagtagaacagttaagacgatagtagttgttttctttctgggtttttctcttgggctggtttttgaaagtggatctacaacattgatagagatcagtttttctgctcttccaacatactgccaggacgtggtccagaaagattgggtactttgcaatactcatagcaatatgtgaagtgattggaaaaaatgagactattcaaccagttgtttcagtgttggttaggaggaaaatgcccagaaaggggaacagttaatcatctacacaataccaagagcaggaggggatgaccgacggcttcatctttcctagtctatcccacacagacctttaggtgctcttttttttctttttttcgctctgtcgcccatgctggagtgcaatggcgcgatctcggctcaccacaacttccacctcccaggttcaagcgattctcctgccttagcctcctgagtagctgggattacaggcatgcaccaccacgcctggctaatttttgtatttttagtagagacggggtttctccatgttggtctggctggtctcgaactcccaacctcaggtggtccacctgcctcagccttccaaagcgttgggattacaggcatgagccatcgcacccgcctctttaggtgttcttttaggagctggtagcggaggaaggtggttacccatctgtgacagagccttggatgtcacgaggccacaggctggcctttcctcctgtttacaggaggtgagttttcctgagttcccagcctcagtgttctctgcacagtctgtcactgactcccgctcccagtgctcactgcctcttgttctcactgcctcctgttctcactgcctcctgtttctgctgagttctttgcatctgcctgatgttggtttaaagctccacccctcccaggggaatttgtcccatgattcacctcctctttggtgatctcttgattgcggctgctgcagccatgtaaaccttaaaggcgagccaatttgtttgtgatccagtggccaaaatggttcaccctcaacttcccttaatcccctgcagcatctgagacacatgggtgaatgtatgtaaggtacttggggctaaccaaagttaaatacatatgacaagtacctgaatctagataatctaatggtaagatatcgtttgctctctggacttcatgggctcaccccagcaatggggtgcctggaaatgaagagatctttcttgtgtctcatcctctgggctcccagcctccctcaacatcatgacctccatctgtaacacccaccatcctggagcagcatcctggatattggaactctgaagtctaacctaagagaacaaggacaagcctctctatgaaaggtttgcccttccagatccagttgagctctgctctggagccagactctctgaagcatagcccagctctagctcttaccagttatgtgatcaggaatgagagttaatgtttctatgtttctgattcttcatttgtaaaatgaggataataaaaatttaacttca

SEQ ID NO: 164533 - DNA, 1672 bp, Homo sapiens
  Payload ID: 12416
  Gene Symbol: PEX26
  Gene Name: peroxisomal biogenesis factor 26
  Uniprot ID: Q7Z412
  ENST ID: ENST00000399744
  CDS Start-End: 370-1287
gcgagcgcaaagatgtccgcgcccgctgccgggaggcgaggtgagtctttgatcgtaaccaggagcccggagctgaggcagttcctgcacgtgtcgcggggccggagaagctagggccaggtattccagggatgcaagaatcctgcaaatctgacgtgtaaactgcttccccagcctccaggcgagcccagcttttgcctcagataggccccttccttttccttctcggggaatcgacctcgggaaggggtgtgggcaaagagatgaggactctccctcttcgcccaggccaactcgggatatcccggagcctctggggaggcggtcactccgacgtctgaggacctgggccttggacccggactcgttatgaagagcgattcttcgacctctgcagcccccctcagggggctcgggggacccctgcgcagcagcgagccggtgcgcgcggtcccggcccgggcgccggccgtggaccttctggaggaggcggccgacctcctggtggtgcacctggacttccgggcggcgctggagacctgcgagcgggcctggcagagtctggccaaccacgccgtggcagaggaacccgcgggcacctcattggaggtgaagtgctccctgtgtgttgtggggatccaggccctggcagaaatggatcggtggcaagaagtcctctcctgggtccttcagtattaccaggtccctgaaaagctaccccccaaagtcctggagctgtgcattcttttatacagcaaaatgcaagagcctggagctgtgctggatgtggtgggtgcctggctccaagacccagccaatcaaaaccttccagaatatggagccttggcagaatttcacgtgcagcgggtgctgctgcctctgggctgcttatcggaggctgaggagctagtggtgggctctgcagcctttggtgaggagcggcgactggatgtacttcaggccattcacacagcgaggcagcagcagaaacaggaacactcaggctctgaggaggcccagaagccaaacctggaaggctctgtctcccacaagttcctgtcactaccgatgttggttcgccagctttgggactctgcggtgagccacttcttttctctgcccttcaaaaagagtctcctggctgccttgatcctctgtctcctggtggtgagatttgatccagcttccccttcctccctgcacttcctctacaagctggcccagctcttccgctggatccggaaggctgcattttctcgcctctaccagctccgcatccgtgactgagggtccctgcgcaccacagcctctctgctcctcacgtccgtggccacagaagcagagcgacagagcgacacatccacaggcgcccctggggaaatgggaccagcctaatctcgcggagtgcactgtgtcttgctgcctgggtgccctctcctttgcaccctacttcggctggtcgcggtagatgatgtggaaacaaagcaggaccagcaggcacagcacctccagaacagtgccccggatgaccagaggccccttgaaaaggaggggtttggggacagggactgtgtccatgaaacattccatcttcttggtgaaggcaaggggttggttcttcaggtcaggatgttaatggagctggaagttcagaaaaagcctggtgaagtga

SEQ ID NO: 164534 - DNA, 815 bp, Homo sapiens
  Payload ID: 12416
  Gene Symbol: PEX26
  Gene Name: peroxisomal biogenesis factor 26
  Uniprot ID: Q7Z412
  ENST ID: ENST00000428061
  CDS Start-End: 1-771
atgaagagcgattcttcgacctctgcagcccccctcagggggctcgggggacccctgcgcagcagcgagccggtgcgcgcggtcccggcccgggcgccggccgtggaccttctggaggaggcggccgacctcctggtggtgcacctggacttccgggcggcgctggagacctgcgagcgggcctggcagagtctggccaaccacgccgtggcagaggaacccgcgggcacctcattggaggtgaagtgctccctgtgtgttgtggggatccaggccctggcagaaatggatcggtggcaagaagtcctctcctgggtccttcagtattaccaggtccctgaaaagctaccccccaaagtcctggagctgtgcattcttttatacagcaaaatgcaagagcctggagctgtgctggatgtggtgggtgcctggctccaagacccagccaatcaaaaccttccagaatatggagccttggcagaatttcacgtgcagcgggtgctgctgcctctgggctgcttatcggaggctgaggagctagtggtgggctctgcagcctttggtgaggagcggcgactggatgtacttcaggccattcacacagcgaggcagcagcagaaacaggaacactcaggctctgaggaggcccagaagccaaacctggaagcttccccttcctccctgcacttcctctacaagctggcccagctcttccgctggatccggaaggctgcattttctcgcctctaccagctccgcatccgtgactgagggtccctgcgcaccacagcctctctgctcctcacgtccgtggc

SEQ ID NO: 164535 - DNA, 2082 bp, Homo sapiens
  Payload ID: 12416
  Gene Symbol: PEX26
  Gene Name: peroxisomal biogenesis factor 26
  ENST ID: ENST00000474897
  CDS Start-End: 363-932
caaagatgtccgcgcccgctgccgggaggcgaggtgagtctttgatcgtaaccaggagcccggagctgaggcagttcctgcacgtgtcgcggggccggagaagctagggccaggtattccagggatgcaagaatcctgcaaatctgacgtgtaaactgcttccccagcctccaggcgagcccagcttttgcctcagataggccccttccttttccttctcggggaatcgacctcgggaaggggtgtgggcaaagagatgaggactctccctcttcgcccaggccaactcgggatatcccggagcctctggggaggcggtcactccgacgtctgaggacctgggccttggacccggactcgttatgaagagcgattcttcgacctctgcagcccccctcagggggctcgggggacccctgcgcagcagcgagccggtgcgcgcggtcccggcccgggcgccggccgtggaccttctggaggaggcggccgacctcctggtggtgcacctggacttccgggcggcgctggagacctgcgagcgggcctggcagagtctggccaaccacgccgtggcagaggaacccgcgggcacctcattggaggtgaagtgctccctgtgtgttgtggggatccaggccctggcagaaatggatcggtggcaagaagtcctctcctgggtccttcagtattaccaggtccctgaaaagctaccccccaaagtcctggagctgtgcgggaatgcatatcagtccacgtgggccaagcgggagttcagattggcaatgcctgctgggagctcttctgcctggaacacggcatccaggcagacggcacttttgatgctcaagctagcaagatcaacgatgatgactccttcaccacctttttcagcgagactggcaatgggaagcatgtgccccgggccgtcatgatagatctggagcctactgtagtggatgaggttcgggcaggaacctaccgccagctcttccatccagagcagctgatcacaggaaaggaggatgcagccaacaactatgcccggggccactacacggtgggcaaggagagcattgacctggtgctggaccgcatacggaagctgacagatgcttgctctggcctgcagggcttcctgattttccacagttttggtgggggcactggctccggcttcacttctctgctgatggaacgcctctccctggattatggcaagaaatccaagctggagtttgccatctacccagccccccaggtctctactgcagtggtggagccctacaactccatcctgaccacccacaccacactggaacattcagattgtgctttcatggtggacaacgaagccatctatgacatctgccgcaggaaccttgacattgagcgccctacctataccaacctcaaccgcctcatcagtcagattgtgtcctcaatcactgcttctctccgctttgacggggccctcaatgtggacctcactgagttccagaccaacctggtgccctacccccgcatccacttcccgctggtcacctacgcgcccatcatctctgccgagaaagcctatcacgaacagctctctgtggccgagataaccagctcctgctttgagcccaacagccagatggtgaagtgcgacccgagacatggcaagtacatggcctgctgcatgctctaccggggcgacgtggtgcccaaggatgtgaatgtcgctattgctgccatcaagaccaagaggaccatccagtttgtagactggtgtcccacaggcttcaaggtgggcatcaactaccagcccccgaccgtggtccccgggggagacctggccaaggtgcagcgggccgtctgcatgctcagcaacaccacggccattgcggaggcctgggcccgcctcgaccacaagttcgacctcatgtacgccaagcgggcctttgtgcattggtatgtgggagaggggatggaagaaggagaattttctgaggccagggaagacttagctgccctggagaaggattatgaagaagtggggactgattcgtttgaagaagaaaatgaaggggaggaattttaaat

SEQ ID NO: 164536 - DNA, 3924 bp, Homo sapiens
  Payload ID: 12416
  Gene Symbol: PEX26
  Gene Name: peroxisomal biogenesis factor 26
  Uniprot ID: Q7Z412
  ENST ID: ENST00000610387
  CDS Start-End: 210-980
attacagaaggcgatgggccgagagctgaggaactacaactcctagagtactccgcgccgccgggacgccgcgcggctgcggggctgggcgagcgcaaagatgtccgcgcccgctgccgggaggcgaggccaactcgggatatcccggagcctctggggaggcggtcactccgacgtctgaggacctgggccttggacccggactcgttatgaagagcgattcttcgacctctgcagcccccctcagggggctcgggggacccctgcgcagcagcgagccggtgcgcgcggtcccggcccgggcgccggccgtggaccttctggaggaggcggccgacctcctggtggtgcacctggacttccgggcggcgctggagacctgcgagcgggcctggcagagtctggccaaccacgccgtggcagaggaacccgcgggcacctcattggaggtgaagtgctccctgtgtgttgtggggatccaggccctggcagaaatggatcggtggcaagaagtcctctcctgggtccttcagtattaccaggtccctgaaaagctaccccccaaagtcctggagctgtgcattcttttatacagcaaaatgcaagagcctggagctgtgctggatgtggtgggtgcctggctccaagacccagccaatcaaaaccttccagaatatggagccttggcagaatttcacgtgcagcgggtgctgctgcctctgggctgcttatcggaggctgaggagctagtggtgggctctgcagcctttggtgaggagcggcgactggatgtacttcaggccattcacacagcgaggcagcagcagaaacaggaacactcaggctctgaggaggcccagaagccaaacctggaagcttccccttcctccctgcacttcctctacaagctggcccagctcttccgctggatccggaaggctgcattttctcgcctctaccagctccgcatccgtgactgagggtccctgcgcaccacagcctctctgctcctcacgtccgtggccacagaagcagagcgacagagcgacacatccacaggcgcccctggggaaatgggaccagcctaatctcgcggagtgcactgtgtcttgctgcctgggtgccctctcctttgcaccctacttcggctggtcgcggtagatgatgtggaaacaaagcaggaccagcaggcacagcacctccagaacagtgccccggatgaccagaggccccttgaaaaggaggggtttggggacagggactgtgtccatgaaacattccatcttcttggtgaaggcaaggggttggttcttcaggtcaggatgttaatggagctggaagttcagaaaaagcctggtgaagtgacccttggcctttcacttcttgagaaacatacttctttgctgggcatggtgactcacgcctgtaatcccagcactttggaagggtgaggtgggtggatcacttgtggccaggagttcaaaacctgcctggccaacatggtgaaaccccatctctactaaaaatacaaaaattagctagatgtggtgcacgcctatagtcctagctacttgggaggctgaggcaggagaatcacttgagccagggaggcaaaagttgcagtgagctgagattgtgctaccgcactctctcaaaacaaacaaaaaaacatgccccacaggacagtaccttaattagctagagtagatctgagagggcctcttcttgcctgcactgtgctccccagagctgatctaattctgtatcaataggctgttcccatggtcttgccatgcgcttgaagctgcaggagccttctcactgttcaggctggggtgtggttttcagaaccaccgggttgactactgaaaaccaagtgagccttacagctcttatcgctgggtaaagtgatcttgcctggtgcctcttggtcttcagctcaattttccaggttgtcctggccaagtcttgctctgttacgctcagtgcctctgcccactctttccccgccagcccttccctcccgccctgcaaacttgtcccttggctgtttcaccaggttctgcctgtatccttgcctccttggtacacaccatttcaggttcttccctttctgtgtcccattgtcctagttatgttctgttgtttgtgtaatgcccaaatttttctgctcgtgtggccttgaaaagtaggccagcctcagaggctgctgagctgaaaatggaactgagtaatcaggtgagctggaagggatgtggggggcggggcagacgggagacatgggttttgaaggcagtgaacaataaaaccttagggaggtggcaccgaggccttagcatttgaggagctgaaatgtttcagtgttgttttctcaccagccacaagcatcttatgagtttctgtgcaaggaagcgtagagcactgctgtgctgtcaggatgaagaagggctttctgcaggggctggcctttctctacccagaggccaagcaggctgccctgcactgtgtccttggtgttgatgcccaaaatagagaaggtgcttgctagcttttccttggtacattttcgggggttgcaaggcaacaagttttcttttgttttgtttgtttgtttgtttgtttgtttttgagatggagtctctgtcacccaggctggagtgcagtggcgtgatctcagctcactgcaagctccgcctcccgggttcatgccattctcctgcctcagcctcccgagtagctgggactacaggtgcccaccacctcgcctggctaatatttttgtatttttagtagagtctgggtttcactgtgttagccgggatggtctcgatctcctgaacttgtgatccacccacctaggcctcccaaagtgctgggattacaggtgtgagccatcgcgcccggccaacttttctttagaaaaatgagtaaagtaggtaaacttcacaggccccttagaattaaatccttagggcatggttcaagtctgtaggaagcaaatctatacttttttatatgggcttttaagtaaagcttagaaccctggggggagaaaagcagtcaggtgaggtttgagattccttctatagaatgatttcttaaaatgaaaatctgggcccacttaactaccctagataaaacgcttcaatggcttcccatggctcactggataacatctaaattcttcatggaattgaaggcccctatgtgctggttttggctaagatctcccctttgatgtgggtcccctgttgattatatgtgcggccttccagctgcccaccatcacagctacagctcgctccccttggcctctgtgccttggctcgcactgttcctactgaaggcctagcacctgctcttggcctggtgagcccctccaccttccaggcttactcaaagaattctttctgcccctccctgtgtcccgggacctgtttcatatcgcttctgtggtcgtgaccccatggtcttgtaattgtgaacttctttgctgccccttcgaagctggggagtgcttgttgcagatgcatccaagaggggtaattgcgtatcaacagtggatttgctggttgtttctacagggttctgaagcatgcaacatagaacagatacctttaaatttaggggcgctaaggaaagcaggaaccagtaatcctcttctgtggtgggatgggagggtgggggagaggggtggaatggagaggaaacaggctattgttggccagccctgggtggaggtgggtgcaagcaggacagatagtgcctgggggtgggggcggagggttcgcctctaggaaggggctagaagggatgaggaaatagttcatagcttcgtgcaggtgatccctattctgcgtgtatgtgtttgcacatgagtgtttgtagaccatagaccattaaaaaatacggaattcaaaagtt

SEQ ID NO: 164537 - DNA, 1969 bp, Homo sapiens
  Payload ID: 12417
  Gene Symbol: PEX3
  Gene Name: peroxisomal biogenesis factor 3
  Uniprot ID: P56589
  ENST ID: ENST00000367591
  CDS Start-End: 64-1185
gaaacagtttcctggtgaagcagtccctcacccctagtcagcccacacccctagggcctaaagatgctgaggtctgtatggaattttctgaaacgccacaaaaagaaatgcatcttcctgggcacggtccttggaggagtatatattctggggaaatatggacagaagaaaatcagagaaatacaggaaagggaggctgcagaatacattgcccaagcacgacgacaatatcattttgaaagtaaccagaggacttgcaatatgacagtgctgtccatgcttccaacactgagagaggccttaatgcagcaactgaattccgagagcctcacagctctgctaaaaaacaggccttcaaacaagctagaaatatgggaggatctgaagataataagtttcacaagaagtactgtggctgtatacagtacctgtatgctggttgttcttttgcgggtccagttaaacataattggtggatatatttacctggataatgcagcagttggcaaaaatggcactacaattcttgctcccccagatgtccaacagcagtatttatcaagtattcagcacctacttggagatggcctgacagaattgatcactgtcattaaacaagctgtgcagaaggttttaggaagtgtttctcttaaacattctttgtcccttttggacttggagcaaaaactaaaagaaatcagaaatctcgttgagcagcataagtcttcttcttggattaataaagatggatccaaacctttattatgccattatatgatgccagatgaagaaactccattagcagtgcaggcctgtggactttctcctcgagacattaccactattaaacttctcaatgaaactagagacatgttggaaagcccagattttagtacagttttgaatacctgtttaaaccgaggttttagtagacttctagacaatatggctgagttctttcgacctactgaacaggacctgcaacatggtaactctatgaatagtctttccagtgtcagcctgcctttagctaagataattccaatagtaaacggacagatccattcagtttgcagtgaaacacctagtcattttgttcaggatctgttgacaatggagcaagtgaaagactttgctgctaatgtgtatgaagcttttagtacccctcagcaactggagaaatgatttttccttcaagaaaaactacagtgggattcatttactttttaaaatacactgggtaaatcacctatacttagagtaacagtttgttatcaaaatgcctgataaaatatattcttaataaaagtcttcatttcataatgaaatcaatttatttggcatcttaatatatttttttagattcatcaacagaccagtttttgtgggcatatatatatacacgtgcaaatatcagaattgttaataatttgttacacatggacatttgttccaaactgactaaaaatcaatatagatattttatatacatatatatatataaaaatacaaaattcagtgtactttaccatattaatactgaggaaaaatctgttggagacataggtctaggatgtgtgaagtttggaaaaatatgctatttaattataatgttccctagactgctgtaaacagaagtgaatcagacttttctccagctacctttcaaaataataaattatttgtctcaaatataccttgatggaggacttttttattcttatggaaatagtgaattccaacaactatgatgaactatgttctttgctatttcttcactatattttttaaggttttattaaaaagccttagaaagttacatattggtttagaggctaaaattgtgttgatgctgtttactcacctaattacatagttttaatcatttgtacataattttaaaaacttactttgtattgattttgaatacagtgaaaatcttattgcaataaactattttagtaaaata

SEQ ID NO: 164538 - DNA, 784 bp, Homo sapiens
  Payload ID: 12417
  Gene Symbol: PEX3
  Gene Name: peroxisomal biogenesis factor 3
  ENST ID: ENST00000367592
  CDS Start-End: 237-784
tgagcggcggcggctgcgcggcggcagcggcagaaagcgtagctgctttgctgtagtccacgcccccttgccgctccggtgacagtctctgcggaaagtcacgtttgtgatttcgggagagcacagaacgggacgacggcgctcttgctgggtcatctgggccaggtgacgaagaaacagtttcctggtgaagcagtccctcacccctagtcagcccacacccctagggcctaaagatgctgaggtctgtatggaattttctgaaacgccacaaaaagaaatgcatcttcctgggcacggtccttggagtgctgtccatgcttccaacactgagagaggccttaatgcagcaactgaattccgagagcctcacagctctgctaaaaaacaggccttcaaacaagctagaaatatgggaggatctgaagataataagtttcacaagaagtactgtggctgtatacagtacctgtatgctggttgttcttttgcgggtccagttaaacataattggtggatatatttacctggataatgcagcagttggcaaaaatggcactacaattcttgctcccccagatgtccaacagcagtatttatcaagtattcagcacctacttggagatggcctgacagaattgatcactgtcattaaacaagctgtgcagaaggttttaggaagtgtttctcttaaacattctttgtcccttttggacttggagcaaaaactaaaagaaatcagaaatctcgttgagcagcataagtcttcttcttggattaataa

SEQ ID NO: 164539 - DNA, 3252 bp, Homo sapiens
  Payload ID: 12418
  Gene Symbol: PEX5
  Gene Name: peroxisomal biogenesis factor 5
  Uniprot ID: P50542
  ENST ID: ENST00000266563
  CDS Start-End: 184-1992
cttaaggccccgccttttcagacagcttccgctgggcctgggccgctgcggggcggtcacggcccctttaagcctgagccccgccccctggctccccgccccctcttctcccctcccccaagccagcacctggtgccccggcgggtcgtgcggcgcggcgctccgcgagagctggcggtcaccatggcaatgcgggagctggtggaggccgaatgcgggggtgccaacccgctcatgaagctcgccgggcacttcacccaggacaaggcccttcggcaggagggattgaggcctggcccctggccccccggagccccggcctctgaggcagcctccaagcctttgggagtagcttctgaagatgagttggtggctgaattcctgcaggaccagaatgcaccccttgtgtcccgtgcccctcagaccttcaagatggatgacctcctggctgagatgcagcagattgagcagtcaaacttccgccaggctccccagagagcccctggtgtggcagacttggccttgtctgagaactgggcccaggagtttcttgcagctggagatgctgtggatgtaactcaggattataatgagactgactggtcccaagaattcatctctgaagttacagaccccttgtctgtgtcccctgcccgctgggctgaggaatatttggagcaatcagaggagaagctgtggctgggagaacctgagggaacagccaccgatcgctggtatgatgaatatcatcctgaggaggatctgcagcacacggccagtgactttgtggccaaagtggatgaccccaaattggctaattctgagggtacatcagatgcctgggttgaccagttcacaagaccagtaaacacatctgcccttgatatggagtttgaacgagccaagtcagctatagagtctgatgtcgatttctgggacaagttgcaggcagagttggaggagatggcaaaacgggatgctgaggcccacccctggctttctgactatgatgaccttacgtcagctacctatgataaggggtaccagtttgaggaggagaaccccttgcgtgatcaccctcagccttttgaagaagggctgcggcgccttcaggagggggacctgccaaatgctgtgctgctttttgaggcagctgtgcagcaggatcctaagcacatggaagcttggcagtatctgggtaccacccaggcagagaatgaacaagaactattagccatcagtgcattgcggaggtgtctggagctaaagccagataaccagacagcactgatggcgctggctgtgagcttcaccaacgagtccctgcagcgacaggcctgtgaaaccctacgagactggctgcggtacacaccagcctatgcccatctggtgacacctgctgaagaaggggctggtggggcaggactgggccccagcaagcgtatcctgggatctctcttgtctgactccctgtttcttgaagtgaaagagctcttcctggcagctgtgcggctggaccctacctccattgaccctgatgtgcagtgtggcttgggagtccttttcaacctgagtggggagtatgacaaggccgtggactgcttcacagctgccctcagcgttcgtcccaatgactatttgctgtggaataagctaggcgccaccctggccaatggaaaccagagtgaagaagcagtagctgcgtaccgccgggccctcgagctccagcctggctatatccggtcccgctataacctgggcatcagctgcatcaacctcggggctcaccgggaggctgtggagcactttctggaggccctgaacatgcagaggaaaagccggggcccccggggtgaaggaggtgccatgtcggagaacatctggagcaccctgcgtttggcattgtctatgttaggccagagcgatgcctatggggcagccgacgcgcgggatctgtccaccctcctaactatgtttggcctgccccagtgacagtgggacgggctgccctgtgagtgtccacctggagggatccccgctttggatgtgattccctctccccaaatgggcctaccaagggggcgggctgatgaccataagcggtacggcctttcaggagctgcctcaacgtaggggtgggtagtctgtgttctagttcctacataattgtaggaaaatgagctgtgtcatctctgagtcccttggtaattcaagggctgtacatccagctacagatctctctgctcatcatgccctttcttggtgctgctttttgggtaggaccccacgatttagggtaactgttatcatcagctgccatttctgatagggtctaccacatctgtaatgtctgtcctttcccccacttttactgggaattgatagtccagcttccttgggcagtgtaagtaggaggttcatctgctgtgcgcctctaatgtctgtctggatgggatgtgttaggagttggcctgttgggttgaattgttgatttggctgagcagagctgagttttggtaggagtgctcatggttctgtcattcttggacctctcctggctgagctctgattccctgtgagcacgatgctgatgcaatagtcctgtgtcatcactgcagcggtcctcaggagctgccagggccaattgctacagagtgtctgggtgtgtggcataggaggaaggtttgcttgtgaaatgaggctgggtgggagcggggagggactagatcagaagagatcaagggctctattcaggaacgttggtgggaggacagagcaagtgggaagggggtatggtgagtgcggcaatccctcatcctcttagaagcacctgtgaatgggaattgagccaactgttatagaaaattggttcagaaagtgcaatcttgccagatttctagcaaataggttcagtgttaccataagcctttgctgtacttcttgaaatgtttctaggggagagcattggaaaatccccttcccccatctagatcgaaggaagatgagggagcagcttggattcttctcagttgtcccctgcatggggagatacactaacccccagaaatgactgctaagcctcttgccttgtctttagtagctaatgatcagagagattttttttttaaactaccatggtcccaggattccatcctgaaatttatttttctttgtatgaatatgtgtaaatgatttaaaaataaaactgtaaaatatttgtacgaagaataaatggaactgatgtgggtatga

SEQ ID NO: 164540 - DNA, 3170 bp, Homo sapiens
  Payload ID: 12418
  Gene Symbol: PEX5
  Gene Name: peroxisomal biogenesis factor 5
  Uniprot ID: P50542
  ENST ID: ENST00000266564
  CDS Start-End: 18-1913
gagagctggcggtcaccatggcaatgcgggagctggtggaggccgaatgcgggggtgccaacccgctcatgaagctcgccgggcacttcacccaggacaaggcccttcggcaggagggattgaggcctggcccctggccccccggagccccggcctctgaggcagcctccaagcctttgggagtagcttctgaagatgagttggtggctgaattcctgcaggaccagaatgcaccccttgtgtcccgtgcccctcagaccttcaagatggatgacctcctggctgagatgcagcagattgagcagtcaaacttccgccaggctccccagagagcccctggtgtggcagacttggccttgtctgagaactgggcccaggagtttcttgcagctggagatgctgtggatgtaactcaggattataatgagactgactggtcccaagaattcatctctgaagttacagaccccttgtctgtgtcccctgcccgctgggctgaggaatatttggagcaatcagaggagaagctgtggctgggagaacctgagggaacagccaccgatcgctggtatgatgaatatcatcctgaggaggatctgcagcacacggccagtgactttgtggccaaagtggatgaccccaaattggctaattctgagttcctgaaattcgtgcggcagattggcgaagggcaggtgtccctggagtccggtgcagggtcgggccgagctcaggcagaacagtgggcagcagagtttatacagcagcagggtacatcagatgcctgggttgaccagttcacaagaccagtaaacacatctgcccttgatatggagtttgaacgagccaagtcagctatagagttgcaggcagagttggaggagatggcaaaacgggatgctgaggcccacccctggctttctgactatgatgaccttacgtcagctacctatgataaggggtaccagtttgaggaggagaaccccttgcgtgatcaccctcagccttttgaagaagggctgcggcgccttcaggagggggacctgccaaatgctgtgctgctttttgaggcagctgtgcagcaggatcctaagcacatggaagcttggcagtatctgggtaccacccaggcagagaatgaacaagaactattagccatcagtgcattgcggaggtgtctggagctaaagccagataaccagacagcactgatggcgctggctgtgagcttcaccaacgagtccctgcagcgacaggcctgtgaaaccctacgagactggctgcggtacacaccagcctatgcccatctggtgacacctgctgaagaaggggctggtggggcaggactgggccccagcaagcgtatcctgggatctctcttgtctgactccctgtttcttgaagtgaaagagctcttcctggcagctgtgcggctggaccctacctccattgaccctgatgtgcagtgtggcttgggagtccttttcaacctgagtggggagtatgacaaggccgtggactgcttcacagctgccctcagcgttcgtcccaatgactatttgctgtggaataagctaggcgccaccctggccaatggaaaccagagtgaagaagcagtagctgcgtaccgccgggccctcgagctccagcctggctatatccggtcccgctataacctgggcatcagctgcatcaacctcggggctcaccgggaggctgtggagcactttctggaggccctgaacatgcagaggaaaagccggggcccccggggtgaaggaggtgccatgtcggagaacatctggagcaccctgcgtttggcattgtctatgttaggccagagcgatgcctatggggcagccgacgcgcgggatctgtccaccctcctaactatgtttggcctgccccagtgacagtgggacgggctgccctgtgagtgtccacctggagggatccccgctttggatgtgattccctctccccaaatgggcctaccaagggggcgggctgatgaccataagcggtacggcctttcaggagctgcctcaacgtaggggtgggtagtctgtgttctagttcctacataattgtaggaaaatgagctgtgtcatctctgagtcccttggtaattcaagggctgtacatccagctacagatctctctgctcatcatgccctttcttggtgctgctttttgggtaggaccccacgatttagggtaactgttatcatcagctgccatttctgatagggtctaccacatctgtaatgtctgtcctttcccccacttttactgggaattgatagtccagcttccttgggcagtgtaagtaggaggttcatctgctgtgcgcctctaatgtctgtctggatgggatgtgttaggagttggcctgttgggttgaattgttgatttggctgagcagagctgagttttggtaggagtgctcatggttctgtcattcttggacctctcctggctgagctctgattccctgtgagcacgatgctgatgcaatagtcctgtgtcatcactgcagcggtcctcaggagctgccagggccaattgctacagagtgtctgggtgtgtggcataggaggaaggtttgcttgtgaaatgaggctgggtgggagcggggagggactagatcagaagagatcaagggctctattcaggaacgttggtgggaggacagagcaagtgggaagggggtatggtgagtgcggcaatccctcatcctcttagaagcacctgtgaatgggaattgagccaactgttatagaaaattggttcagaaagtgcaatcttgccagatttctagcaaataggttcagtgttaccataagcctttgctgtacttcttgaaatgtttctaggggagagcattggaaaatccccttcccccatctagatcgaaggaagatgagggagcagcttggattcttctcagttgtcccctgcatggggagatacactaacccccagaaatgactgctaagcctcttgccttgtctttagtagctaatgatcagagagattttttttttaaactaccatggtcccaggattccatcctgaaatttatttttctttgtatgaatatgtgtaaatgatttaaaaataaaactgtaaaatatttgtacgaagaataaatggaactgatgtgggta

SEQ ID NO: 164541 - DNA, 1508 bp, Homo sapiens
  Payload ID: 12418
  Gene Symbol: PEX5
  Gene Name: peroxisomal biogenesis factor 5
  ENST ID: ENST00000396637
  CDS Start-End: 278-1508
gcgtgctggggctgcgcggggctaggtatggtcgggctgttttcccactgtcccttcttcgggcagtgtcgccgtccagcctggttgttgaagcgtccccgtggtcccccggggtccaggcccctttgtggaggcagctgctggcccccagcccatgggaccgtagtcgcggaggcctctgcagaggcgcaggctggaagcggtggcctttgaggggggcggcaggagagagtaccgacctccctcgaactcctggcagagagagctggcggtcaccatggcaatgcgggagctggtggaggccgaatgcgggggtgccaacccgctcatgaagctcgccgggcacttcacccaggacaaggcccttcggcaggagggattgaggcctggcccctggccccccggagccccggcctctgaggcagtgagtgttcttgaggtggaaagcccaggtgcagcctctgaggcagcctccaagcctttgggagtagcttctgaagatgagttggtggctgaattcctgcaggaccagaatgcaccccttgtgtcccgtgcccctcagaccttcaagatggatgacctcctggctgagatgcagcagattgagcagtcaaacttccgccaggctccccagagagcccctggtgtggcagacttggccttgtctgagaactgggcccaggagtttcttgcagctggagatgctgtggatgtaactcaggattataatgagactgactggtcccaagaattcatctctgaagttacagaccccttgtctgtgtcccctgcccgctgggctgaggaatatttggagcaatcagaggagaagctgtggctgggagaacctgagggaacagccaccgatcgctggtatgatgaatatcatcctgaggaggatctgcagcacacggccagtgactttgtggccaaagtggatgaccccaaattggctaattctgagggtacatcagatgcctgggttgaccagttcacaagaccagtaaacacatctgcccttgatatggagtttgaacgagccaagtcagctatagagttgcaggcagagttggaggagatggcaaaacgggatgctgaggcccacccctggctttctgactatgatgaccttacgtcagctacctatgataaggggtaccagtttgaggaggagaaccccttgcgtgatcaccctcagccttttgaagaagggctgcggcgccttcaggagggggacctgccaaatgctgtgctgctttttgaggcagctgtgcagcaggatcctaagcacatggaagcttggcagtatctgggtaccacccaggcagagaatgaacaagaactattagccatcagtgcattgcggaggtgtctggagctaaagccagataaccagacagcactgatggcgctggctgtgagcttcaccaacgagtccctgcagcgacaggcctgtgaaaccctacgagactggctgcggtacacaccagcctatgcccatctggtga

SEQ ID NO: 164542 - DNA, 2105 bp, Homo sapiens
  Payload ID: 12418
  Gene Symbol: PEX5
  Gene Name: peroxisomal biogenesis factor 5
  ENST ID: ENST00000412720
  CDS Start-End: 90-2072
ggcagcagggccggggagatgggcggtggggagcgcgggagggaccgggccgagccgggggaagggctccggtgacttaaggggagggaatgctcctctgccgtgctcaccgcgtgctggggctgcgcggggctagagagctggcggtcaccatggcaatgcgggagctggtggaggccgaatgcgggggtgccaacccgctcatgaagctcgccgggcacttcacccaggacaaggcccttcggcaggagggattgaggcctggcccctggccccccggagccccggcctctgaggcagcctccaagcctttgggagtagcttctgaagatgagttggtggctgaattcctgcaggaccagaatgcaccccttgtgtcccgtgcccctcagaccttcaagatggatgacctcctggctgagatgcagcagattgagcagtcaaacttccgccaggctccccagagagcccctggtgtggcagacttggccttgtctgagaactgggcccaggagtttcttgcagctggagatgctgtggatgtaactcaggattataatgagactgactggtcccaagaattcatctctgaagttacagaccccttgtctgtgtcccctgcccgctgggctgaggaatatttggagcaatcagaggagaagctgtggctgggagaacctgagggaacagccaccgatcgctggtatgatgaatatcatcctgaggaggatctgcagcacacggccagtgactttgtggccaaagtggatgaccccaaattggctaattctgagttcctgaaattcgtgcggcagattggcgaagggcaggtgtccctggagtccggtgcagggtcgggccgagctcaggcagaacagtgggcagcagagtttatacagcagcagggtacatcagatgcctgggttgaccagttcacaagaccagtaaacacatctgcccttgatatggagtttgaacgagccaagtcagctatagagtctgatgtcgatttctgggacaagttgcaggcagagttggaggagatggcaaaacgggatgctgaggcccacccctggctttctgactatgatgaccttacgtcagctacctatgataaggggtaccagtttgaggaggagaaccccttgcgtgatcaccctcagccttttgaagaagggctgcggcgccttcaggagggggacctgccaaatgctgtgctgctttttgaggcagctgtgcagcaggatcctaagcacatggaagcttggcagtatctgggtaccacccaggcagagaatgaacaagaactattagccatcagtgcattgcggaggtgtctggagctaaagccagataaccagacagcactgatggcgctggctgtgagcttcaccaacgagtccctgcagcgacaggcctgtgaaaccctacgagactggctgcggtacacaccagcctatgcccatctggtgacacctgctgaagaaggggctggtggggcaggactgggccccagcaagcgtatcctgggatctctcttgtctgactccctgtttcttgaagtgaaagagctcttcctggcagctgtgcggctggaccctacctccattgaccctgatgtgcagtgtggcttgggagtccttttcaacctgagtggggagtatgacaaggccgtggactgcttcacagctgccctcagcgttcgtcccaatgactatttgctgtggaataagctaggcgccaccctggccaatggaaaccagagtgaagaagcagtagctgcgtaccgccgggccctcgagctccagcctggctatatccggtcccgctataacctgggcatcagctgcatcaacctcggggctcaccgggaggctgtggagcactttctggaggccctgaacatgcagaggaaaagccggggcccccggggtgaaggaggtgccatgtcggagaacatctggagcaccctgcgtttggcattgtctatgttaggccagagcgatgcctatggggcagccgacgcgcgggatctgtccaccctcctaactatgtttggcctgccccagtgacagtgggacgggctgccctgtgagtgtccacct

SEQ ID NO: 164543 - DNA, 2689 bp, Homo sapiens
  Payload ID: 12418
  Gene Symbol: PEX5
  Gene Name: peroxisomal biogenesis factor 5
  Uniprot ID: P50542
  ENST ID: ENST00000455147
  CDS Start-End: 581-2500
gacgctaccccgctaggggttatttggaagcggggcaggcctaggaggctgaagaaggcttcggactggactccccagcccctggtgttagggcttttctctttcttgggcttgggaacattagccagccccattttagaggggaaaactgaggctcagaaagggcactgaatccccttaggtcacaatgcgcccaagggaagaggcaggatcgactgagcctaggatctcgcgtcttcggctttcccccagagcctgggaagcccttcttagctccactcttctttgagctttccgtcaaacaaatcctagggcccgtggccttttcgagcgctcctaaaggcgactctccaagacccgctctctaagtgtcgccgtccagcctggttgttgaagcgtccccgtggtcccccggggtccaggcccctttgtggaggcagctgctggcccccagcccatgggaccgtagtcgcggaggcctctgcagaggcgcaggctggaagcggtggcctttgaggggggcggcaggagagagtaccgacctccctcgaactcctggcagagagagctggcggtcaccatggcaatgcgggagctggtggaggccgaatgcgggggtgccaacccgctcatgaagctcgccgggcacttcacccaggacaaggcccttcggcaggagggattgaggcctggcccctggccccccggagccccggcctctgaggcagcctccaagcctttgggagtagcttctgaagatgagttggtggctgaattcctgcaggaccagaatgcaccccttgtgtcccgtgcccctcagaccttcaagatggatgacctcctggctgagatgcagcagattgagcagtcaaacttccgccaggctccccagagagcccctggtgtggcagacttggccttgtctgagaactgggcccaggagtttcttgcagctggagatgctgtggatgtaactcaggattataatgagactgactggtcccaagaattcatctctgaagttacagaccccttgtctgtgtcccctgcccgctgggctgaggaatatttggagcaatcagaggagaagctgtggctgggagaacctgagggaacagccaccgatcgctggtatgatgaatatcatcctgaggaggatctgcagcacacggccagtgactttgtggccaaagtggatgaccccaaattggctaattctgagttcctgaaattcgtgcggcagattggcgaagggcaggtgtccctggagtccggtgcagggtcgggccgagctcaggcagaacagtgggcagcagagtttatacagcagcagggtacatcagatgcctgggttgaccagttcacaagaccagtaaacacatctgcccttgatatggagtttgaacgagccaagtcagctatagagtctgatgtcgatttctgggacaagttgcaggcagagttggaggagatggcaaaacgggatgctgaggcccacccctggctttctgactatgatgaccttacgtcagctacctatgataaggggtaccagtttgaggaggagaaccccttgcgtgatcaccctcagccttttgaagaagggctgcggcgccttcaggagggggacctgccaaatgctgtgctgctttttgaggcagctgtgcagcaggatcctaagcacatggaagcttggcagtatctgggtaccacccaggcagagaatgaacaagaactattagccatcagtgcattgcggaggtgtctggagctaaagccagataaccagacagcactgatggcgctggctgtgagcttcaccaacgagtccctgcagcgacaggcctgtgaaaccctacgagactggctgcggtacacaccagcctatgcccatctggtgacacctgctgaagaaggggctggtggggcaggactgggccccagcaagcgtatcctgggatctctcttgtctgactccctgtttcttgaagtgaaagagctcttcctggcagctgtgcggctggaccctacctccattgaccctgatgtgcagtgtggcttgggagtccttttcaacctgagtggggagtatgacaaggccgtggactgcttcacagctgccctcagcgttcgtcccaatgactatttgctgtggaataagctaggcgccaccctggccaatggaaaccagagtgaagaagcagtagctgcgtaccgccgggccctcgagctccagcctggctatatccggtcccgctataacctgggcatcagctgcatcaacctcggggctcaccgggaggctgtggagcactttctggaggccctgaacatgcagaggaaaagccggggcccccggggtgaaggaggtgccatgtcggagaacatctggagcaccctgcgtttggcattgtctatgttaggccagagcgatgcctatggggcagccgacgcgcgggatctgtccaccctcctaactatgtttggcctgccccagtgacagtgggacgggctgccctaaatatacagcctctgcagacactgcttctgaatgaacgggctggagtttccttgggatcctgaactcatattggattctctacctaccatcttggacaattcatgtaggaaaacaaatcctcatttgttcaaacaatagatgaaaattattaaagttttgacacatatt

SEQ ID NO: 164544 - DNA, 2253 bp, Homo sapiens
  Payload ID: 12418
  Gene Symbol: PEX5
  Gene Name: peroxisomal biogenesis factor 5
  Uniprot ID: P50542
  ENST ID: ENST00000434354
  CDS Start-End: 81-2045
tcttctcccctcccccaagccagcacctggtgccccggcgggtcgtgcggcgcggcgctccgcgagagctggcggtcaccatggcaatgcgggagctggtggaggccgaatgcgggggtgccaacccgctcatgaagctcgccgggcacttcacccaggacaaggcccttcggcaggagggattgaggcctggcccctggccccccggagccccggcctctgaggcagtgagtgttcttgaggtggaaagcccaggtgcagcctctgaggcagcctccaagcctttgggagtagcttctgaagatgagttggtggctgaattcctgcaggaccagaatgcaccccttgtgtcccgtgcccctcagaccttcaagatggatgacctcctggctgagatgcagcagattgagcagtcaaacttccgccaggctccccagagagcccctggtgtggcagacttggccttgtctgagaactgggcccaggagtttcttgcagctggagatgctgtggatgtaactcaggattataatgagactgactggtcccaagaattcatctctgaagttacagaccccttgtctgtgtcccctgcccgctgggctgaggaatatttggagcaatcagaggagaagctgtggctgggagaacctgagggaacagccaccgatcgctggtatgatgaatatcatcctgaggaggatctgcagcacacggccagtgactttgtggccaaagtggatgaccccaaattggctaattctgagttcctgaaattcgtgcggcagattggcgaagggcaggtgtccctggagtccggtgcagggtcgggccgagctcaggcagaacagtgggcagcagagtttatacagcagcagggtacatcagatgcctgggttgaccagttcacaagaccagtaaacacatctgcccttgatatggagtttgaacgagccaagtcagctatagagtctgatgtcgatttctgggacaagttgcaggcagagttggaggagatggcaaaacgggatgctgaggcccacccctggctttctgactatgatgaccttacgtcagctacctatgataaggggtaccagtttgaggaggagaaccccttgcgtgatcaccctcagccttttgaagaagggctgcggcgccttcaggagggggacctgccaaatgctgtgctgctttttgaggcagctgtgcagcaggatcctaagcacatggaagcttggcagtatctgggtaccacccaggcagagaatgaacaagaactattagccatcagtgcattgcggaggtgtctggagctaaagccagataaccagacagcactgatggcgctggctgtgagcttcaccaacgagtccctgcagcgacaggcctgtgaaaccctacgagactggctgcggtacacaccagcctatgcccatctggtgacacctgctgaagaaggggctggtggggcaggactgggccccagcaagcgtatcctgggatctctcttgtctgactccctgtttcttgaagtgaaagagctcttcctggcagctgtgcggctggaccctacctccattgaccctgatgtgcagtgtggcttgggagtccttttcaacctgagtggggagtatgacaaggccgtggactgcttcacagctgccctcagcgttcgtcccaatgactatttgctgtggaataagctaggcgccaccctggccaatggaaaccagagtgaagaagcagtagctgcgtaccgccgggccctcgagctccagcctggctatatccggtcccgctataacctgggcatcagctgcatcaacctcggggctcaccgggaggctgtggagcactttctggaggccctgaacatgcagaggaaaagccggggcccccggggtgaaggaggtgccatgtcggagaacatctggagcaccctgcgtttggcattgtctatgttaggccagagcgatgcctatggggcagccgacgcgcgggatctgtccaccctcctaactatgtttggcctgccccagtgacagtgggacgggctgccctgtgagtgtccacctggagggatccccgctttggatgtgattccctctccccaaatgggcctaccaagggggcgggctgatgaccataagcggtacggcctttcaggagctgcctcaacgtaggggtgggtagtctgtgttctagttcctacataattgtaggaaaatgagctgtgtcatctctgagtcc

SEQ ID NO: 164545 - DNA, 2477 bp, Homo sapiens
  Payload ID: 12418
  Gene Symbol: PEX5
  Gene Name: peroxisomal biogenesis factor 5
  Uniprot ID: P50542
  ENST ID: ENST00000420616
  CDS Start-End: 519-2438
ggtgccccggcgggtcgtgcggcgcggcgctccgcggtgagcgcctgaccccgagggggcccggggccgcgtccctgggccctccccacccttgcggtggcctcgcgggtcccaggggcggggctggagcggcagcagggccggggagatgggcggtggggagcgcgggagggaccgggccgagccgggggaagggctccggtgacttaaggggagggaatgctcctctgccgtgctcaccgcgtgctggggctgcgcggggctaggtatggtcgggctgttttcccactgtcccttcttcgggcagtgtcgccgtccagcctggttgttgaagcgtccccgtggtcccccggggtccaggcccctttgtggaggcagctgctggcccccagcccatgggaccgtagtcgcggaggcctctgcagaggcgcaggctggaagcggtggcctttgaggggggcggcaggagagagtaccgacctccctcgaactcctggcagagagagctggcggtcaccatggcaatgcgggagctggtggaggccgaatgcgggggtgccaacccgctcatgaagctcgccgggcacttcacccaggacaaggcccttcggcaggagggattgaggcctggcccctggccccccggagccccggcctctgaggcagcctccaagcctttgggagtagcttctgaagatgagttggtggctgaattcctgcaggaccagaatgcaccccttgtgtcccgtgcccctcagaccttcaagatggatgacctcctggctgagatgcagcagattgagcagtcaaacttccgccaggctccccagagagcccctggtgtggcagacttggccttgtctgagaactgggcccaggagtttcttgcagctggagatgctgtggatgtaactcaggattataatgagactgactggtcccaagaattcatctctgaagttacagaccccttgtctgtgtcccctgcccgctgggctgaggaatatttggagcaatcagaggagaagctgtggctgggagaacctgagggaacagccaccgatcgctggtatgatgaatatcatcctgaggaggatctgcagcacacggccagtgactttgtggccaaagtggatgaccccaaattggctaattctgagttcctgaaattcgtgcggcagattggcgaagggcaggtgtccctggagtccggtgcagggtcgggccgagctcaggcagaacagtgggcagcagagtttatacagcagcagggtacatcagatgcctgggttgaccagttcacaagaccagtaaacacatctgcccttgatatggagtttgaacgagccaagtcagctatagagtctgatgtcgatttctgggacaagttgcaggcagagttggaggagatggcaaaacgggatgctgaggcccacccctggctttctgactatgatgaccttacgtcagctacctatgataaggggtaccagtttgaggaggagaaccccttgcgtgatcaccctcagccttttgaagaagggctgcggcgccttcaggagggggacctgccaaatgctgtgctgctttttgaggcagctgtgcagcaggatcctaagcacatggaagcttggcagtatctgggtaccacccaggcagagaatgaacaagaactattagccatcagtgcattgcggaggtgtctggagctaaagccagataaccagacagcactgatggcgctggctgtgagcttcaccaacgagtccctgcagcgacaggcctgtgaaaccctacgagactggctgcggtacacaccagcctatgcccatctggtgacacctgctgaagaaggggctggtggggcaggactgggccccagcaagcgtatcctgggatctctcttgtctgactccctgtttcttgaagtgaaagagctcttcctggcagctgtgcggctggaccctacctccattgaccctgatgtgcagtgtggcttgggagtccttttcaacctgagtggggagtatgacaaggccgtggactgcttcacagctgccctcagcgttcgtcccaatgactatttgctgtggaataagctaggcgccaccctggccaatggaaaccagagtgaagaagcagtagctgcgtaccgccgggccctcgagctccagcctggctatatccggtcccgctataacctgggcatcagctgcatcaacctcggggctcaccgggaggctgtggagcactttctggaggccctgaacatgcagaggaaaagccggggcccccggggtgaaggaggtgccatgtcggagaacatctggagcaccctgcgtttggcattgtctatgttaggccagagcgatgcctatggggcagccgacgcgcgggatctgtccaccctcctaactatgtttggcctgccccagtgacagtgggacgggctgccctgtgagtgtccacctggaggg

SEQ ID NO: 164546 - DNA, 522 bp, Homo sapiens
  Payload ID: 12418
  Gene Symbol: PEX5
  Gene Name: peroxisomal biogenesis factor 5
  ENST ID: ENST00000537873
  CDS Start-End: 18-522
gagagctggcggtcaccatggcaatgcgggagctggtggaggccgaatgcgggggtgccaacccgctcatgaagctcgccgggcacttcacccaggacaaggcccttcggcaggagggattgaggcctggcccctggccccccggagccccggcctctgaggcagcctccaagcctttgggagtagcttctgaagatgagttggtggctgaattcctgcaggaccagaatgcaccccttgtgtcccgtgcccctcagaccttcaagatggatgacctcctggctgagatgcagcagattgagcagtcaaacttccgccaggctccccagagagcccctggtgtggcagacttggccttgtctgagaactgggcccaggagtttcttgcagctggagatgctgtggatgtaactcaggattataatgagactgactggtcccaagaattcatctctgaagttacagttcttacccgttccaggtatgatgaatatcatcctgaggaggatctgcagcacacgg

SEQ ID NO: 164547 - DNA, 641 bp, Homo sapiens
  Payload ID: 12418
  Gene Symbol: PEX5
  Gene Name: peroxisomal biogenesis factor 5
  ENST ID: ENST00000540398
  CDS Start-End: 336-641
gaagaaggcttcggactggactccccagcccctggtgttagggcttttctctttcttgggcttgggaacattagccagccccattttagaggggaaaactgaggctcagaaagggcactgaatccccttaggtcacaatgcgcccaagggaagaggcaggatcgactgagcctaggatctcgcgtcttcggctttcccccagagcctgggaagcccttcttagctccactcttctttgagctttccgtcaaacaaatcctagggcccgtggccttttcgagcgctcctaaaggcgactctccaagacccgctctctaagagagctggcggtcaccatggcaatgcgggagctggtggaggccgaatgcgggggtgccaacccgctcatgaagctcgccgggcacttcacccaggacaaggcccttcggcaggagggattgaggcctggcccctggccccccggagccccggcctctgaggcagcctccaagcctttgggagtagcttctgaagatgagttggtggctgaattcctgcaggaccagaatgcaccccttgtgtcccgtgcccctcagaccttcaagatggatgacctcctggctgagatgcagcagattgagcagtcaaacttccgccaggct

SEQ ID NO: 164548 - DNA, 548 bp, Homo sapiens
  Payload ID: 12418
  Gene Symbol: PEX5
  Gene Name: peroxisomal biogenesis factor 5
  ENST ID: ENST00000543974
  CDS Start-End: 193-548
tccgctgggcctgggccgctgcggggcggtcacggcccctttaagcctgagcctggcccctggccccccggagccccggcctctgaggcagcctccaagcctttgggagtagcttctgaagatgagttggtggctgaattcctgcaggaccagaatgcaccccttgtgtcccgtgcccctcagaccttcaagatggatgacctcctggctgagatgcagcagattgagcagtcaaacttccgccaggctccccagagagcccctggtgtggcagacttggccttgtctgagaactgggcccaggagtttcttgcagctggagatgctgtggatgtaactcaggattataatgagactgactggtcccaagaattcatctctgaagttacagaccccttgtctgtgtcccctgcccgctgggctgaggaatatttggagcaatcagaggagaagctgtggctgggagaacctgagggaacagccaccgatcgctggtatgatgaatatcatcctgaggaggatctgcagcacacggccagtgactttgt

SEQ ID NO: 164549 - DNA, 848 bp, Homo sapiens
  Payload ID: 12418
  Gene Symbol: PEX5
  Gene Name: peroxisomal biogenesis factor 5
  ENST ID: ENST00000542539
  CDS Start-End: 104-848
attattgcccttggtcatttaccggcagccctgggcccctccttgctcttctccatgacactaggactcccttggtcttgaagctggagagctggcggtcaccatggcaatgcgggagctggtggaggccgaatgcgggggtgccaacccgctcatgaagctcgccgggcacttcacccaggacaaggcccttcggcaggagggattgaggcctggcccctggccccccggagccccggcctctgaggcagcctccaagcctttgggagtagcttctgaagatgagttggtggctgaattcctgcaggaccagaatgcaccccttgtgtcccgtgcccctcagaccttcaagatggatgacctcctggctgagatgcagcagattgagcagtcaaacttccgccaggctccccagagagcccctggtgtggcagacttggccttgtctgagaactgggcccaggagtttcttgcagctggagatgctgtggatgtaactcaggattataatgagactgactggtcccaagaattcatctctgaagttacagaccccttgtctgtgtcccctgcccgctgggctgaggaatatttggagcaatcagaggagaagctgtggctgggagaacctgagggaacagccaccgatcgctggtatgatgaatatcatcctgaggaggatctgcagcacacggccagtgactttgtggccaaagtggatgaccccaaattggctaattctgagttcctgaaattcgtgcggcagattggcgaagggcaggtgtccctggagtccggtgcagggtcgggccgagctcaggcagaacagtgggcagcagagtttatac

SEQ ID NO: 164550 - DNA, 562 bp, Homo sapiens
  Payload ID: 12418
  Gene Symbol: PEX5
  Gene Name: peroxisomal biogenesis factor 5
  ENST ID: ENST00000545845
  CDS Start-End: 179-562
cagatgcctatgggcttcatcaacccctgattttagaggaactgcgtcattgtacatctctgtctttctctcttaggcctccaagcctttgggagtagcttctgaagatgagttggtggctgaattcctgcaggaccagaatgcaccccttgtgtcccgtgcccctcagaccttcaagatggatgacctcctggctgagatgcagcagattgagcagtcaaacttccgccaggctccccagagagcccctggtgtggcagacttggccttgtctgagaactgggcccaggagtttcttgcagctggagatgctgtggatgtaactcaggattataatgagactgactggtcccaagaattcatctctgaagttacagaccccttgtctgtgtcccctgcccgctgggctgaggaatatttggagcaatcagaggagaagctgtggctgggagaacctgagggaacagccaccgatcgctggtatgatgaatatcatcctgaggaggatctgcagcacacggccagtgactttgtggccaaagtggatgaccccaaattggct

SEQ ID NO: 164551 - DNA, 579 bp, Homo sapiens
  Payload ID: 12418
  Gene Symbol: PEX5
  Gene Name: peroxisomal biogenesis factor 5
  ENST ID: ENST00000544456
  CDS Start-End: 266-579
tcccccaagccagcacctggtgccccggcgggtcgtgcggcgcggcgctccgcgtgtcgccgtccagcctggttgttgaagcgtccccgtggtcccccggggtccaggcccctttgtggaggcagctgctggcccccagcccatgggaccgtagtcgcggaggcctctgcagaggcgcaggctggaagcggtggcctttgaggggggcggcaggagagagtaccgacctccctcgaactcctggcagagagagctggcggtcaccatggcaatgcgggagctggtggaggccgaatgcgggggtgccaacccgctcatgaagctcgccgggcacttcacccaggacaaggcccttcggcaggagggattgaggcctggcccctggccccccggagccccggcctctgaggcagcctccaagcctttgggagtagcttctgaagatgagttggtggctgaattcctgcaggaccagaatgcaccccttgtgtcccgtgcccctcagaccttcaagatggatgacctcctggctgagatgcagcagattgagcagtcaaacttccgccaggctccccagag

SEQ ID NO: 164552 - DNA, 575 bp, Homo sapiens
  Payload ID: 12418
  Gene Symbol: PEX5
  Gene Name: peroxisomal biogenesis factor 5
  ENST ID: ENST00000536883
  CDS Start-End: 229-575
atgcaccctgggctgggatggtacttctgttcgtctggcattattgcccttggtcatttaccggcagccctgggcccctccttgctcttctccatgacactaggactcccttggtcttgaagctgggcctccaagcctttgggagtagcttctgaagatgagttggtggctgaattcctgcaggaccagaatgcaccccttgtgtcccgtgcccctcagaccttcaagatggatgacctcctggctgagatgcagcagattgagcagtcaaacttccgccaggctccccagagagcccctggtgtggcagacttggccttgtctgagaactgggcccaggagtttcttgcagctggagatgctgtggatgtaactcaggattataatgagactgactggtcccaagaattcatctctgaagttacagaccccttgtctgtgtcccctgcccgctgggctgaggaatatttggagcaatcagaggagaagctgtggctgggagaacctgagggaacagccaccgatcgctggtatgatgaatatcatcctgaggaggatctgcagcacacggccag

SEQ ID NO: 164553 - DNA, 878 bp, Homo sapiens
  Payload ID: 12418
  Gene Symbol: PEX5
  Gene Name: peroxisomal biogenesis factor 5
  ENST ID: ENST00000545574
  CDS Start-End: 61-878
cagcacctggtgccccggcgggtcgtgcggcgcggcgctccgcgagagctggcggtcaccatggcaatgcgggagctggtggaggccgaatgcgggggtgccaacccgctcatgaagctcgccgggcacttcacccaggacaaggcccttcggcaggagggattgaggcctggcccctggccccccggagccccggcctctgaggcattggtggctgaattcctgcaggaccagaatgcaccccttgtgtcccgtgcccctcagaccttcaagatggatgacctcctggctgagatgcagcagattgagcagtcaaacttccgccaggctccccagagagcccctggtgtggcagacttggccttgtctgagaactgggcccaggagtttcttgcagctggagatgctgtggatgtaactcaggattataatgagactgactggtcccaagaattcatctctgaagttacagaccccttgtctgtgtcccctgcccgctgggctgaggaatatttggagcaatcagaggagaagctgtggctgggagaacctgagggaacagccaccgatcgctggtatgatgaatatcatcctgaggaggatctgcagcacacggccagtgactttgtggccaaagtggatgaccccaaattggctaattctgagggtacatcagatgcctgggttgaccagttcacaagaccagtaaacacatctgcccttgatatggagtttgaacgagccaagtcagctatagagtctgatgtcgatttctgggacaagttgcaggcagagttggaggagatggcaaaacgggatgctgaggcccacccctggctttctgactatgatgaccttacgtcagctacctatgataa

SEQ ID NO: 164554 - DNA, 386 bp, Homo sapiens
  Payload ID: 12418
  Gene Symbol: PEX5
  Gene Name: peroxisomal biogenesis factor 5
  ENST ID: ENST00000541850
  CDS Start-End: 1-94
ggcattgtctatgttaggccagagcgatgcctatggggcagccgacgcgcgggatctgtccaccctcctaactatgtttggcctgccccagtgacagtgggacgggctgccctaggagaaaattaaacacctgggggaggaaaacaggaagctgttgtggcacctgtcaccacctgggggatcacgaggcagctggtgtcttgggctctgcagaaatatacagcctctgcagacactgcttctgaatgaacgggctggagtttccttgggatcctgaactcatattggattctctacctaccatcttggacaattcatgtaggaaaacaaatcctcatttgttcaaacaatagatgaaaattattaaagttttgacacatattaaa

SEQ ID NO: 164555 - DNA, 567 bp, Homo sapiens
  Payload ID: 12418
  Gene Symbol: PEX5
  Gene Name: peroxisomal biogenesis factor 5
  ENST ID: ENST00000536841
  CDS Start-End: 226-567
aagcggtggcctttgaggggggcggcaggagagagtaccgacctccctcgaactcctggcagaggtgggggtcgcagcaaaagcactggggtggagggcggccagtgtggggcagacgcctgtgtgccttcctcagatacgggcagagttgtggatgtgagaagggtctggcttgggtacctcagttccaaacctcctgtgtccatcagagagctggcggtcaccatggcaatgcgggagctggtggaggccgaatgcgggggtgccaacccgctcatgaagctcgccgggcacttcacccaggacaaggcccttcggcaggagggattgaggcctggcccctggccccccggagccccggcctctgaggcagcctccaagcctttgggagtagcttctgaagatgagttggtggctgaattcctgcaggaccagaatgcaccccttgtgtcccgtgcccctcagaccttcaagatggatgacctcctggctgagatgcagcagattgagcagtcaaacttccgccaggctccccagagagcccctggtgtggcagacttggccttg

SEQ ID NO: 164556 - DNA, 2818 bp, Homo sapiens
  Payload ID: 12419
  Gene Symbol: PEX5L
  Gene Name: peroxisomal biogenesis factor 5-like
  Uniprot ID: Q8IYB4
  ENST ID: ENST00000263962
  CDS Start-End: 172-2046
cagcgctgccgagtggccgccggccggccgagtacccggagctccagggggctcaggagcaccctctgagaacccgctgtgcacccaccttttcccctcttttggtgggcaagtaagcacgggggaaaagcatccggtggcctcagggagccctgaagaaaccgaagcagaatgtaccagggacacatgcaggtagtaggtgtaaccttgaagaaaaagtggcactgtcttcaaaaaagtgacctgaccctggctttgggaaaaggctctagggcggcagataaggctgttgccatggtgatgaaggagataccgagggaggagtctgctgaagaaaagcccctccttactatgacatcacagctggtgaatgagcaacaagaaagcagacccctcctgagtccctccatcgatgactttctctgtgaaaccaaatcggaagcaatagcaaggccagtaacatccaatacagctgtattgaccactggcttagatctcctcgacctgagtgaaccagtctctcaaacccaaaccaaagccaagaagtcagagccctcatcaaaaacctcatccctcaagaaaaaggccgatggatctgacctcatcagcacggatgctgagcagagaggccagcctctcagagtcccggagacttcatccttagatctagacattcaaacacaactggaaaaatgggacgatgttaagtttcatggagatcgaaataccaagggacatccaatggcagagagaaaatcatcctcatctagaactggatcaaaagagctcttatggtcctcagaacacagatctcaaccagaactgagtggtggaaaaagcgccctcaactctgagtcggcttcagaattggaattagtggctccgactcaggctcgactgaccaaagaacatcgctggggaagcgcattactttctagaaaccactccttagaagaagagtttgaaagggcaaaagcagcagtggagtcagatacagagttttgggataagatgcaagcagaatgggaagaaatggctcggaggaactggatatctgagaaccaagaagcccagaaccaagtaaccatctcggctagtgagaagggatattactttcacactgaaaaccccttcaaggactggcctggagcatttgaagaaggcttaaaaaggctgaaggaaggggatctgccagtcaccatcctgttcatggaagcagcaattcttcaggaccctggagatgcagaggcatggcagttcctcgggataacccaggcggagaatgaaaatgaacaagcagctattgtcgccctccagaggtgcttagaattacagcccaacaacttaaaagctttgatggccttggctgtgagttatactaacactggccatcagcaggatgcctgtgacgctctgaagaattggattaagcaaaatccaaagtacaaataccttgtgaaaagcaagaagggatctccaggcctcacccggcggatgtctaagtccccagttgatagctctgttctggaaggggtgaaggaattatatctggaagctgcccaccaaaatggagatatgatcgacccagacctgcagacaggtctaggggttctgttccacctgagtggagaatttaatagagcaatagatgcatttaacgctgccttaactgttcggccagaggactattcactatggaaccgcctcggggcgaccttggcgaacggagaccgcagcgaggaagccgtggaggcctatacgcgagcactggagattcagccaggattcatccggtccagatacaacctaggaataagctgcatcaacctgggcgcctacagagaagcggtcagcaattttctcactgccctcagtttgcaaagaaagagcaggaatcagcagcaagttcctcatcctgcaatctctgggaatatctgggctgccctcagaattgcgctctctctgatggaccaaccagaactcttccaggcggctaatcttggtgacctggatgtcctcttaagagctttcaacttggatccttgaagaaagaataataccagtactaataatccctgatctgtgtgattgtactgaaaaatcaaaaactattttattatgaatttcaaaaggataaatcaaatattcaaaaggccatggtcatatagcccaaggaaattaattcctgtggacaatgcccagtctctgttcagatccaaaagcacaaaatgttgtatatagagtcaaagtcaggctcaaaagaagaattaagagactcaagacaaaccaagataaagtaactgtgtgttgaatactctttccacaagttgcaagcatattgcaacacatgttctttgggttttttgtctccccttgcagctgatgacacatctgaggaacttgttcatgggaaacatggaaaaagcactgcctcagattgggaaattctgactgtttctgaactgtcttcttttgcaagactgaacatagtttgggccattggtgcatgcacatatattaacttgtgactaaagacagacattgcttaaacctgttccaattttaacttttactgtagccctttgattccagagagggagctttgctggcaaaagcagtttttgcactagaaatttttgctgttcccaatctaaacttttctggtattgtatatatgcactttaatatcttatttatgccttgctggagttttgttttgttgctccaatttttaacttgggggtgaaagatttaagaactcagcctcactagatcaacggaccaaataaacaattcctgaagacagtttttcatagtg

SEQ ID NO: 164557 - DNA, 8540 bp, Homo sapiens
  Payload ID: 12419
  Gene Symbol: PEX5L
  Gene Name: peroxisomal biogenesis factor 5-like
  Uniprot ID: Q8IYB4
  ENST ID: ENST00000392649
  CDS Start-End: 114-1670
aacattagaatatcttgtaataaataataagttaaagatctctcctgacacagtcattgttgatttcactgttatagggaaaaggctctagggcggcagataaggctgttgccatggtgatgaaggagataccgagggaggagtctgctgaagaaaagcccctccttactatgacatcacagctggtgaatgagcaacaagaaagcagacccctcctgagtccctccatcgatgactttctctgtgaaaccaaatcggaagcaatagcaaggccagtaacatccaatacagctgacattcaaacacaactggaaaaatgggacgatgttaagtttcatggagatcgaaataccaagggacatccaatggcagagagaaaatcatcctcatctagaactggatcaaaagagctcttatggtcctcagaacacagatctcaaccagaactgagtggtggaaaaagcgccctcaactctgagtcggcttcagaattggaattagtggctccgactcaggctcgactgaccaaagaacatcgctggggaagcgcattactttctagaaaccactccttagaagaagagtttgaaagggcaaaagcagcagtggagtcagatacagagttttgggataagatgcaagcagaatgggaagaaatggctcggaggaactggatatctgagaaccaagaagcccagaaccaagtaaccatctcggctagtgagaagggatattactttcacactgaaaaccccttcaaggactggcctggagcatttgaagaaggcttaaaaaggctgaaggaaggggatctgccagtcaccatcctgttcatggaagcagcaattcttcaggaccctggagatgcagaggcatggcagttcctcgggataacccaggcggagaatgaaaatgaacaagcagctattgtcgccctccagaggtgcttagaattacagcccaacaacttaaaagctttgatggccttggctgtgagttatactaacactggccatcagcaggatgcctgtgacgctctgaagaattggattaagcaaaatccaaagtacaaataccttgtgaaaagcaagaagggatctccaggcctcacccggcggatgtctaagtccccagttgatagctctgttctggaaggggtgaaggaattatatctggaagctgcccaccaaaatggagatatgatcgacccagacctgcagacaggtctaggggttctgttccacctgagtggagaatttaatagagcaatagatgcatttaacgctgccttaactgttcggccagaggactattcactatggaaccgcctcggggcgaccttggcgaacggagaccgcagcgaggaagccgtggaggcctatacgcgagcactggagattcagccaggattcatccggtccagatacaacctaggaataagctgcatcaacctgggcgcctacagagaagcggtcagcaattttctcactgccctcagtttgcaaagaaagagcaggaatcagcagcaagttcctcatcctgcaatctctgggaatatctgggctgccctcagaattgcgctctctctgatggaccaaccagaactcttccaggcggctaatcttggtgacctggatgtcctcttaagagctttcaacttggatccttgaagaaagaataataccagtactaataatccctgatctgtgtgattgtactgaaaaatcaaaaactattttattatgaatttcaaaaggataaatcaaatattcaaaaggccatggtcatatagcccaaggaaattaattcctgtggacaatgcccagtctctgttcagatccaaaagcacaaaatgttgtatatagagtcaaagtcaggctcaaaagaagaattaagagactcaagacaaaccaagataaagtaactgtgtgttgaatactctttccacaagttgcaagcatattgcaacacatgttctttgggttttttgtctccccttgcagctgatgacacatctgaggaacttgttcatgggaaacatggaaaaagcactgcctcagattgggaaattctgactgtttctgaactgtcttcttttgcaagactgaacatagtttgggccattggtgcatgcacatatattaacttgtgactaaagacagacattgcttaaacctgttccaattttaacttttactgtagccctttgattccagagagggagctttgctggcaaaagcagtttttgcactagaaatttttgctgttcccaatctaaacttttctggtattgtatatatgcactttaatatcttatttatgccttgctggagttttgttttgttgctccaatttttaacttgggggtgaaagatttaagaactcagcctcactagatcaacggaccaaataaacaattcctgaagacagtttttcatagtgtaggattttgaagaagtgtttttcttaaagcagatacgatgacataaggcgtaaatatggcaaacagatcttttcattcacgtgctttctgggtctgtatgaacataagtaagacacaaggtactgtctcttcatgcattctctgcaggaagaaagtttgatggtatcgtgatttctattgagttcaaattaacttgcttaagtgtcatactttactggctttgccctgcacaccaatattccttttaaaccataaatattttaaataatatttcttaagagtgataaataacattttttcctaaaaattatgttttcttagtttcataataatctgcactgttcatccccttgcattctaagtgatagaagagcaacactttcaaaccaaatctcactgaatgccagtgatttcatatgaaagatgcatgcctctttggctctttgaacatttagcaagtattgggaattttctattagcagtggtgttttaattggttgaattccacttagttctccacagtgttttgtatgtgtttggggcttggtgattattttgaaagatacattttttaaagaattaggaacattttttgcaaaatgctaatcagaatataattttcccaatgtcaggtatagaagttatcccattcttctttacctggtctccttccttcgtctagaaccttccccacagtagctaatcctaacaactttttatttatgttctttgataataatagctcatcccgctcatgattatagctacccacaaaaaataaaacaacaacaacaaaaaagactccacagaattgggatcaaaacagtctaattggctggggaataagcttctactgaggagtaaatgtgcacacgtgcttatcaattgaatgcgaggtacaggaataaaatcctctcctctgttacatctgaagtccttgggttgtgagagggcctcaagttaacagaaaccacaagtccttgaggcttacatatgttataacctattctagtttataaagacaaaaagctgaggccactgtgaggagtgccaggttttgatagtcattgtcaaagttgacttgggccaggtggtagctccagctggtcagcagaaggcagaggcattcaggcactcatcatgggtagcagcgaccacccagtctcagaccgtgcttctctacagtctcagcagcaaagtaaagctcaacaatgctttcaagaatggtattgtaagaattgtagaattcgagaaacccagtctggtaaggactcttggggccagcctccaagccatggcagggcctgcttgaatatgcctgattaagcatcctttccttccctgctccttcctcctgccatctctgtaccttgaccagaaagtcggcatgaatagttcatggacaaaggattgaatagcctctgaacaaaggattcaaagcaaactttgtaagtgttctgtgatgccattctatactttgagcagcagctgaatctgcagcctggatttaaagcctgaaactagtataaatgtcaaataattaatttgttgctaaatggtggcaaattttgtggcccaagttttattttgctattggaacacaaactccaaggagctgttttagggaagactaaacaatcttccattcttaccattatttggcaatttgcagagcatttagtagtactttctctagtgtatgtagtatctgtcagatctaagatttttataggctgtcaagaagtccagaattacggcccaagaggaaaagagttgcatttttcaataatattttttataaaattaagttaaaaccattattaaaacatgagtgacaggccaggtgcggtggctcacgcctgtaatcctagcactttgggaggcagaggcgggcagaccacgaggtcaggagttcgagaccagcctgaccaacatggtgaaaccccgtctttattaagaatacaaaaattagccgggtgtagtggtatgcacctgtaataccagctactcaggaggctgaggcaggagaatcacttgaaccagggaggcggaggttgcagtgagccgagattgcaccgctgcactccagtctgggtgacagagcgagactccgtctcaaaaaaaacaaaaaagtgacagtttataggaatagagcaccaccaagaaatcagtagcaagactttagaacagtctttttgtataaatcatatacagtaaatgttttgtttcttagaagtgcatctactttattttttggcagaacaatttttggcatcttatcttcatggcatgaaattgtcatttaaattactctttccgtttgaaaggggagggtatccttatttcccttctgaggtactctgagaaggctttgagtttcctttttcatgtattaatgtataacagcctaacagctcctagaagagggtattcttactagaatggctacatacgggtgacttcagttacatacaggtgacttccagggactgacttcgcctgtagattggatgaaaataaagagaaagccagtgattattgctgagtttcaaaatataaccatttctagtaggctacttctacatgctgttgtaccttcctggtgaggaggagacagagggataggggagaggaggaggaataaaaatccctctcactgggccaatcatactgattcattccctttacttcctccaaaactcactccccatgactcctgaaaaatgggtagatctcgtccaccaggaaattttaatagaatactatgcaccgtgctttctcagtcaatctggattcctactagaacagaaaagtaaggaaacataactgggtaggaatgtccacttacgtttcacaaactcacttttagagtttcatgccactttcctcattcttctctttaagatactattatattgaacgtgggacccatgtctaaatacttgtatagataaatatttcttgtatattcttcccatacaagcaagacttgaatacagttgtagctagtcccacttttataataaaagcttccaaactctttatcataaactttgtctgtgagcttgggaatacagagaaagcaagttgatcattctgagacccttcctcatttgccctgaatcagttccccaagattggactgtactttaagctagttgttgtagcagtggtggttgttgttttatatcttgagatacttctagaacattctagaaacagggtattctaaaggcttactttatatgccatcctttttgaaccctcttattttagaaattattacacgtgcacacttatgatttcaaccttgtaaaataatttcaaattcatttcgtatccacattttactgcagtttccctatcatcatctcaatagttatagaactggttgaaattaaactgttttgaactaagaagtagatatatatatatatatatatatatatttttttttttttttttaaagagtgttcatagataaactctggcataaagtttgtaaaaaagcaattttttaaaagcaaaacgtataacctcaggtacaaaaatattgcatgcattagtattgcaaatttgcctactcaaatattaaccaaagcatgcaagataacttgactgaatttaaatttacacagtgcatgattaagtctcataggttagcctgttgttccttgcctctatacaagggagcatttttatgaactttgtgttacagtttttctatttgcttttcttatcctatccttgagattgttttcatgctatcacactgaactttacagatattcacacatctggtttctacagtgttaccagtgccaaactaatcctctgaagaatctgggacatctaaacactttttcaaaaaccagttgaggcacaacagatcccaaacttaaacaaatccaagtgtctgaatgctactaaactaaatcatgttgactgcctcagcacataaaggtttcgactttaaattcttaataatgcatttcaaaatttttctaaaagtttgggaataaattagaaaaactgatattctaaataaggcgaggaggttggggtaatgtcaggcacatcaaaatcatcacacaacgaagtagatatggggccttaattttcataaatgtcacatagcaagtgtgtggggtatcacaacattgttctgatacagccctgtttgtatggtagttgagctgcttgggctaaatgtcccttgagaaactggacttgatcaacaggtctaaaaacactgatatttagggagtgatgaggtgatttcacggtcactcagaaccaactctgaaatcttctcactgccttttcccataacccctattttatgaggagaccagaaagggagagagcaaagctcagtgagaccatgtggtcttacattagtaacagctttgttactcactccatataccccggtaccctcacacacataccatgaactcaaagacagaattctacacataacacacatagcaaagacgattgtggggaggcattaaacagttaagaggaaaaaaaaaaacacagaaaattaaactgtgaggtttaacaacctctcatgtggtattttgccttgaacgaagtttccactacctgcagcttctgcagaaataccaaaataacacagtctagagacaagtgtcccaatgtcagaactgttttctcaggaccttctctataagagaaaactaacttgcaatgctgcagaatgtcagagcaaaaccctgatgagctccgtgggatacttaatagaagcctgcactcaaaataatattaagatggaaacaacaacaacaattaggcagttctttgctcaactataaaatgtgtatcattcattgggggagggggaggggtcgtgttctttggatttcttggaaagggaaatggtataacacaaaaagactaagaggtatacacactcagctcggtaattcgagcatttggcattttcactgagatatatagcatttctgcatggataccatacaagaattctgccatgtgagaaatgtgttcatgatggactacattaccagtagttaagggaaatacagcaaacttaagtttttaccaacttcctttcatgttccctatatatcatctaacccaaactttcaatttacattgcccaaatttgtttacattggttgaaaaaaaactgattaatttattaaactttttacaaactgtaacaaacatttaactatttagaaaagacatttctacatattttatatatctatgaatattgcatctctaatctaatctaaaaatgttgttttgagacaattcttctgtgatgcttcctcctcatgctcataaatgtttaaagtcttgggatttcattttcaggctgaaatagataacaagaaaaaaatttaagtttaaatgtttacattgcgttactaaattaataccaattcaaattaagtgacctatagtaaattaatggcaatgggggggaggggattttaaagtgattggcatattatgtgatactgtatcagtgatttagtgaaataatatgtatcatagcacaactctgttgggtattaaggcttcatcttagtatttccctgcgttgctctttgaaataaaattactaccataaaaataacctcttatcatattgatgtgtttaatttactcagttggcttctaatttgcgtaacaagattaaggtagtatttttgtactattattggaagcatgccttccctttttcacattattaaattgtatttatatttgtgcaattttaaactatgttttcaaataaactttgtctgcggcttcgaggtcttttcaggaatctttcaaaatgggatttggggatcagaactccttctgatcaaatggaatccaatttgtactactggctaaaggtccttttattaaatattgaatatcactacatatgattttgcatgagctatctggaaatcaggaatgcatttttggatataaaacaaaactttaaaaatcttcctcctttgttaattttttaagactaaaatattatttaacctgaaattgaattttgtgattctttttagaataaaaatattaaaataaa

SEQ ID NO: 164558 - DNA, 1817 bp, Homo sapiens
  Payload ID: 12419
  Gene Symbol: PEX5L
  Gene Name: peroxisomal biogenesis factor 5-like
  Uniprot ID: Q8IYB4
  ENST ID: ENST00000464614
  CDS Start-End: 172-1728
gagctaagcaaagtgggaagctgagtgcttgaaagaggattatgctcgcactagaaataagcaaaaagtaaagaacaaggatatggaaaactaagcagtgatgaagacctcgaaataattgttgatcaaaagcagggaaaaggctctagggcggcagataaggctgttgccatggtgatgaaggagataccgagggaggagtctgctgaagaaaagcccctccttactatgacatcacagctggtgaatgagcaacaagaaagcagacccctcctgagtccctccatcgatgactttctctgtgaaaccaaatcggaagcaatagcaaggccagtaacatccaatacagctgacattcaaacacaactggaaaaatgggacgatgttaagtttcatggagatcgaaataccaagggacatccaatggcagagagaaaatcatcctcatctagaactggatcaaaagagctcttatggtcctcagaacacagatctcaaccagaactgagtggtggaaaaagcgccctcaactctgagtcggcttcagaattggaattagtggctccgactcaggctcgactgaccaaagaacatcgctggggaagcgcattactttctagaaaccactccttagaagaagagtttgaaagggcaaaagcagcagtggagtcagatacagagttttgggataagatgcaagcagaatgggaagaaatggctcggaggaactggatatctgagaaccaagaagcccagaaccaagtaaccatctcggctagtgagaagggatattactttcacactgaaaaccccttcaaggactggcctggagcatttgaagaaggcttaaaaaggctgaaggaaggggatctgccagtcaccatcctgttcatggaagcagcaattcttcaggaccctggagatgcagaggcatggcagttcctcgggataacccaggcggagaatgaaaatgaacaagcagctattgtcgccctccagaggtgcttagaattacagcccaacaacttaaaagctttgatggccttggctgtgagttatactaacactggccatcagcaggatgcctgtgacgctctgaagaattggattaagcaaaatccaaagtacaaataccttgtgaaaagcaagaagggatctccaggcctcacccggcggatgtctaagtccccagttgatagctctgttctggaaggggtgaaggaattatatctggaagctgcccaccaaaatggagatatgatcgacccagacctgcagacaggtctaggggttctgttccacctgagtggagaatttaatagagcaatagatgcatttaacgctgccttaactgttcggccagaggactattcactatggaaccgcctcggggcgaccttggcgaacggagaccgcagcgaggaagccgtggaggcctatacgcgagcactggagattcagccaggattcatccggtccagatacaacctaggaataagctgcatcaacctgggcgcctacagagaagcggtcagcaattttctcactgccctcagtttgcaaagaaagagcaggaatcagcagcaagttcctcatcctgcaatctctgggaatatctgggctgccctcagaattgcgctctctctgatggaccaaccagaactcttccaggcggctaatcttggtgacctggatgtcctcttaagagctttcaacttggatccttgaagaaagaataataccagtactaataatccctgatctgtgtgattgtactgaaaaatcaaaaactattttattatgaatttcaaaaggat

SEQ ID NO: 164559 - DNA, 584 bp, Homo sapiens
  Payload ID: 12419
  Gene Symbol: PEX5L
  Gene Name: peroxisomal biogenesis factor 5-like
  ENST ID: ENST00000469198
  CDS Start-End: 2-584
gatgtctgacagtgaaatggatggaaggacccacattccatctctacttaatgcccttttgtccagaaaccgggtcatgcaaatgagctacttgaaaagtaaagaacaaggatatggaaaactaagcagtgatgaagacctcgaaataattgttgatcaaaagcagctggtgaatgagcaacaagaaagcagacccctcctgagtccctccatcgatgactttctctgtgaaaccaaatcggaagcaatagcaaggccagtaacatccaatacagctgtattgaccactggcttagatctcctcgacctgagtgaaccagtctctcaaacccaaaccaaagccaagaagtcagagccctcatcaaaaacctcatccctcaagaaaaaggccgatggatctgacctcatcagcacggatgctgagcagagaggccagcctctcagagtcccggagacttcatccttagatctagacattcaaacacaactggaaaaatgggacgatgttaagtttcatggagatcgaaataccaagggacatccaatggcagagagaaaatcatcctcatctagaactggatcaa

SEQ ID NO: 164560 - DNA, 2235 bp, Homo sapiens
  Payload ID: 12419
  Gene Symbol: PEX5L
  Gene Name: peroxisomal biogenesis factor 5-like
  Uniprot ID: Q8IYB4
  ENST ID: ENST00000472994
  CDS Start-End: 361-2064
gagagacatgaggcaacctggcaggaagcgagaaagagttcggcgaagaaggagtgagttctagagacgccccgcgagcaggacccgcgcctgcaggagagcctggccgacccggctcctcgccttctctgcgcgctctcccgcgtccgctttcagcaccccgagcggagaacagttcccggcagcccgcagcgctgccgagtggccgccggccggccgagtacccggagctccagggggctcaggagcaccctctgagaacccgctgtgcacccaccttttcccctcttttggtgggcaagtaagcacgggggaaaagcatccggtggcctcagggagccctgaagaaaccgaagcagaatgtaccagggacacatgcagctggtgaatgagcaacaagaaagcagacccctcctgagtccctccatcgatgactttctctgtgaaaccaaatcggaagcaatagcaaggccagtaacatccaatacagctgtattgaccactggcttagatctcctcgacctgagtgaaccagtctctcaaacccaaaccaaagccaagaagtcagagccctcatcaaaaacctcatccctcaagaaaaaggccgatggatctgacctcatcagcacggatgctgagcagagaggccagcctctcagagtcccggagacttcatccttagatctagacattcaaacacaactggaaaaatgggacgatgttaagtttcatggagatcgaaataccaagggacatccaatggcagagagaaaatcatcctcatctagaactggatcaaaagagctcttatggtcctcagaacacagatctcaaccagaactgagtggtggaaaaagcgccctcaactctgagtcggcttcagaattggaattagtggctccgactcaggctcgactgaccaaagaacatcgctggggaagcgcattactttctagaaaccactccttagaagaagagtttgaaagggcaaaagcagcagtggagtcagatacagagttttgggataagatgcaagcagaatgggaagaaatggctcggaggaactggatatctgagaaccaagaagcccagaaccaagtaaccatctcggctagtgagaagggatattactttcacactgaaaaccccttcaaggactggcctggagcatttgaagaaggcttaaaaaggctgaaggaaggggatctgccagtcaccatcctgttcatggaagcagcaattcttcaggaccctggagatgcagaggcatggcagttcctcgggataacccaggcggagaatgaaaatgaacaagcagctattgtcgccctccagaggtgcttagaattacagcccaacaacttaaaagctttgatggccttggctgtgagttatactaacactggccatcagcaggatgcctgtgacgctctgaagaattggattaagcaaaatccaaagtacaaataccttgtgaaaagcaagaagggatctccaggcctcacccggcggatgtctaagtccccagttgatagctctgttctggaaggggtgaaggaattatatctggaagctgcccaccaaaatggagatatgatcgacccagacctgcagacaggtctaggggttctgttccacctgagtggagaatttaatagagcaatagatgcatttaacgctgccttaactgttcggccagaggactattcactatggaaccgcctcggggcgaccttggcgaacggagaccgcagcgaggaagccgtggaggcctatacgcgagcactggagattcagccaggattcatccggtccagatacaacctaggaataagctgcatcaacctgggcgcctacagagaagcggtcagcaattttctcactgccctcagtttgcaaagaaagagcaggaatcagcagcaagttcctcatcctgcaatctctgggaatatctgggctgccctcagaattgcgctctctctgatggaccaaccagaactcttccaggcggctaatcttggtgacctggatgtcctcttaagagctttcaacttggatccttgaagaaagaataataccagtactaataatccctgatctgtgtgattgtactgaaaaatcaaaaactattttattatgaatttcaaaaggataaatcaaatattcaaaaggccatggtcatatagcccaaggaaattaattcctgtggacaatgcccagtctctgttcagatcc

SEQ ID NO: 164561 - DNA, 2992 bp, Homo sapiens
  Payload ID: 12419
  Gene Symbol: PEX5L
  Gene Name: peroxisomal biogenesis factor 5-like
  Uniprot ID: Q8IYB4
  ENST ID: ENST00000485199
  CDS Start-End: 455-2230
gagaacggcgcgcgccccgctcggcagctgcggcggcggctggtgtaggcgctcacgtcagggctgggaggagggggttcgcagctcagagagagagagacatgaggcaacctggcaggaagcgagaaagagttcggcgaagaaggagtgagttctagagacgccccgcgagcaggacccgcgcctgcaggagagcctggccgacccggctcctcgccttctctgcgcgctctcccgcgtccgctttcagcaccccgagcggagaacagttcccggcagcccgcagcgctgccgagtggccgccggccggccgagtacccggagctccagggggctcaggagcaccctctgagaacccgctgtgcacccaccttttcccctcttttggtgggcaagtaagcacgggggaaaagcatccggtggcctcagggagccctgaagaaaccgaagcagaatgtaccagggacacatgcagaaaagtaaagaacaaggatatggaaaactaagcagtgatgaagacctcgaaataattgttgatcaaaagcagctggtgaatgagcaacaagaaagcagacccctcctgagtccctccatcgatgactttctctgtgaaaccaaatcggaagcaatagcaaggccagtaacatccaatacagctgtattgaccactggcttagatctcctcgacctgagtgaaccagtctctcaaacccaaaccaaagccaagaagtcagagccctcatcaaaaacctcatccctcaagaaaaaggccgatggatctgacctcatcagcacggatgctgagcagagaggccagcctctcagagtcccggagacttcatccttagatctagacattcaaacacaactggaaaaatgggacgatgttaagtttcatggagatcgaaataccaagggacatccaatggcagagagaaaatcatcctcatctagaactggatcaaaagagctcttatggtcctcagaacacagatctcaaccagaactgagtggtggaaaaagcgccctcaactctgagtcggcttcagaattggaattagtggctccgactcaggctcgactgaccaaagaacatcgctggggaagcgcattactttctagaaaccactccttagaagaagagtttgaaagggcaaaagcagcagtggagtcagatacagagttttgggataagatgcaagcagaatgggaagaaatggctcggaggaactggatatctgagaaccaagaagcccagaaccaagtaaccatctcggctagtgagaagggatattactttcacactgaaaaccccttcaaggactggcctggagcatttgaagaaggcttaaaaaggctgaaggaaggggatctgccagtcaccatcctgttcatggaagcagcaattcttcaggaccctggagatgcagaggcatggcagttcctcgggataacccaggcggagaatgaaaatgaacaagcagctattgtcgccctccagaggtgcttagaattacagcccaacaacttaaaagctttgatggccttggctgtgagttatactaacactggccatcagcaggatgcctgtgacgctctgaagaattggattaagcaaaatccaaagtacaaataccttgtgaaaagcaagaagggatctccaggcctcacccggcggatgtctaagtccccagttgatagctctgttctggaaggggtgaaggaattatatctggaagctgcccaccaaaatggagatatgatcgacccagacctgcagacaggtctaggggttctgttccacctgagtggagaatttaatagagcaatagatgcatttaacgctgccttaactgttcggccagaggactattcactatggaaccgcctcggggcgaccttggcgaacggagaccgcagcgaggaagccgtggaggcctatacgcgagcactggagattcagccaggattcatccggtccagatacaacctaggaataagctgcatcaacctgggcgcctacagagaagcggtcagcaattttctcactgccctcagtttgcaaagaaagagcaggaatcagcagcaagttcctcatcctgcaatctctgggaatatctgggctgccctcagaattgcgctctctctgatggaccaaccagaactcttccaggcggctaatcttggtgacctggatgtcctcttaagagctttcaacttggatccttgaagaaagaataataccagtactaataatccctgatctgtgtgattgtactgaaaaatcaaaaactattttattatgaatttcaaaaggataaatcaaatattcaaaaggccatggtcatatagcccaaggaaattaattcctgtggacaatgcccagtctctgttcagatccaaaagcacaaaatgttgtatatagagtcaaagtcaggctcaaaagaagaattaagagactcaagacaaaccaagataaagtaactgtgtgttgaatactctttccacaagttgcaagcatattgcaacacatgttctttgggttttttgtctccccttgcagctgatgacacatctgaggaacttgttcatgggaaacatggaaaaagcactgcctcagattgggaaattctgactgtttctgaactgtcttcttttgcaagactgaacatagtttgggccattggtgcatgcacatatattaacttgtgactaaagacagacattgcttaaacctgttccaattttaacttttactgtagccctttgattccagagagggagctttgctggcaaaagcagtttttgcactagaaatttttgctgttcccaatctaaacttttctggtattgtatatatgcactttaatatcttatttatgccttgctggagttttgttttgttgctccaatttttaacttgggggtgaaagatttaagaactcagcctcactagatcaacggaccaaataaacaattcctgaagacagtt

SEQ ID NO: 164562 - DNA, 2309 bp, Homo sapiens
  Payload ID: 12419
  Gene Symbol: PEX5L
  Gene Name: peroxisomal biogenesis factor 5-like
  Uniprot ID: Q8IYB4
  ENST ID: ENST00000468741
  CDS Start-End: 695-1999
cacttggaaggtggagagattagctttctttttccttctagttcagtcctttggctactgtgaaagaccacgcagaagctgtggacttgctttttgtgcttgacaaaagtgcatagatagaagacagggattcccggctgggaggagggaggagagctgaagatccctgcctgggctggctgagctaagcaaagtgggaagctgagtgcttgaaagaggattatgctcgcactagaaataagcaaaaagtaaagaacaaggatatggaaaactaagcagtgatgaagacctcgaaataattgttgatcaaaagcagctggtgaatgagcaacaagaaagcagacccctcctgagtccctccatcgatgactttctctgtgaaaccaaatcggaagcaatagcaaggccagtaacatccaatacagctgtattgaccactggcttagatctcctcgacctgagtgaaccagtctctcaaacccaaaccaaagccaagaagtcagagccctcatcaaaaacctcatccctcaagaaaaaggccgatggatctgacctcatcagcacggatgctgagcagagaggccagcctctcagagtcccggagacttcatccttagatctagacattcaaacacaactggaaaaatgggacgatgttaagtttcatggagatcgaaataccaagggacatccaatggcagagagaaaatcatcctcatctagaactggatcaaaagagctcttatggtcctcagaacacagatctcaaccagaactgagtggtggaaaaagcgccctcaactctgagtcggcttcagaattggaattagtggctccgactcaggctcgactgaccaaagaacatcgctggggaagcgcattactttctagaaaccactccttagaagaagagtttgaaagggcaaaagcagcagtggagtcagatacagagttttgggataagatgcaagcagaatgggaagaaatggctcggaggaactggatatctgagaaccaagaagcccagaaccaagtaaccatctcggctagtgagaagggatattactttcacactgaaaaccccttcaaggactggcctggagcatttgaagaaggcttaaaaaggctgaaggaaggggatctgccagtcaccatcctgttcatggaagcagcaattcttcaggaccctggagatgcagaggcatggcagttcctcgggataacccaggcggagaatgaaaatgaacaagcagctattgtcgccctccagaggtgcttagaattacagcccaacaacttaaaagctttgatggccttggctgtgagttatactaacactggccatcagcaggatgcctgtgacgctctgaagaattggattaagcaaaatccaaagtacaaataccttgtgaaaagcaagaagggatctccaggcctcacccggcggatgtctaagtccccagttgatagctctgttctggaaggggtgaaggaattatatctggaagctgcccaccaaaatggagatatgatcgacccagacctgcagacaggtctaggggttctgttccacctgagtggagaatttaatagagcaatagatgcatttaacgctgccttaactgttcggccagaggactattcactatggaaccgcctcggggcgaccttggcgaacggagaccgcagcgaggaagccgtggaggcctatacgcgagcactggagattcagccaggattcatccggtccagatacaacctaggaataagctgcatcaacctgggcgcctacagagaagcggtcagcaattttctcactgccctcagtttgcaaagaaagagcaggaatcagcagcaagttcctcatcctgcaatctctgggaatatctgggctgccctcagaattgcgctctctctgatggaccaaccagaactcttccaggcggctaatcttggtgacctggatgtcctcttaagagctttcaacttggatccttgaagaaagaataataccagtactaataatccctgatctgtgtgattgtactgaaaaatcaaaaactattttattatgaatttcaaaaggataaatcaaatattcaaaaggccatggtcatatagcccaaggaaattaattcctgtggacaatgcccagtctctgttcagatccaaaagcacaaaatgttgtatatagagtcaaagtcaggctcaaaagaagaattaagagactcaagacaaaccaagataaagtaactgtgtgttgaatactctttccacaagttgcaagcatattgcaacacatgttcttt

SEQ ID NO: 164563 - DNA, 472 bp, Homo sapiens
  Payload ID: 12419
  Gene Symbol: PEX5L
  Gene Name: peroxisomal biogenesis factor 5-like
  ENST ID: ENST00000496721
  CDS Start-End: 262-472
actatacacaagtggcttcttccctgctatgcaccagtggcatgcacaaaccaaaaagaagcagaatgatctgaaaaactggtgaatgagcaacaagaaagcagacccctcctgagtccctccatcgatgactttctctgtgaaaccaaatcggaagcaatagcaaggccagtaacatccaatacagctgacattcaaacacaactggaaaaatgggacgatgttaagtttcatggagatcgaaataccaagggacatccaatggcagagagaaaatcatcctcatctagaactggatcaaaagagctcttatggtcctcagaacacagatctcaaccagaactgagtggtggaaaaagcgccctcaactctgagtcggcttcagaattggaattagtggctccgactcaggctcgactgaccaaagaacatcgctggggaagcgcattactttctagaaaccactccttag

SEQ ID NO: 164564 - DNA, 2147 bp, Homo sapiens
  Payload ID: 12419
  Gene Symbol: PEX5L
  Gene Name: peroxisomal biogenesis factor 5-like
  Uniprot ID: Q8IYB4
  ENST ID: ENST00000465751
  CDS Start-End: 328-2136
aagagttcggcgaagaaggagtgagttctagagacgccccgcgagcaggacccgcgcctgcaggagagcctggccgacccggctcctcgccttctctgcgcgctctcccgcgtccgctttcagcaccccgagcggagaacagttcccggcagcccgcagcgctgccgagtggccgccggccggccgagtacccggagctccagggggctcaggagcaccctctgagaacccgctgtgcacccaccttttcccctcttttggtgggcaagtaagcacgggggaaaagcatccggtggcctcagggagccctgaagaaaccgaagcagaatgtaccagggacacatgcagggaaaaggctctagggcggcagataaggctgttgccatggtgatgaaggagataccgagggaggagtctgctgaagaaaagcccctccttactatgacatcacagctggtgaatgagcaacaagaaagcagacccctcctgagtccctccatcgatgactttctctgtgaaaccaaatcggaagcaatagcaaggccagtaacatccaatacagctgtattgaccactggcttagatctcctcgacctgagtgaaccagtctctcaaacccaaaccaaagccaagaagtcagagccctcatcaaaaacctcatccctcaagaaaaaggccgatggatctgacctcatcagcacggatgctgagcagagaggccagcctctcagagtcccggagacttcatccttagatctagacattcaaacacaactggaaaaatgggacgatgttaagtttcatggagatcgaaataccaagggacatccaatggcagagagaaaatcatcctcatctagaactggatcaaaagagctcttatggtcctcagaacacagatctcaaccagaactgagtggtggaaaaagcgccctcaactctgagtcggcttcagaattggaattagtggctccgactcaggctcgactgaccaaagaacatcgctggggaagcgcattactttctagaaaccactccttagaagaagagtttgaaagggcaaaagcagcagtggagtcagatacagagttttgggataagatgcaagcagaatgggaagaaatggctcggaggaactggatatctgagaaccaagaagcccagaaccaagtaaccatctcggctagtgagaagggatattactttcacactgaaaaccccttcaaggactggcctggagcatttgaagaaggcttaaaaaggctgaaggaaggggatctgccagtcaccatcctgttcatggaagcagcaattcttcaggaccctggagatgcagaggcatggcagttcctcgggataacccaggcggagaatgaaaatgaacaagcagctattgtcgccctccagaggtgcttagaattacagcccaacaacttaaaagctttgatggccttggctgtgagttatactaacactggccatcagcaggatgcctgtgacgctctgaagaattggattaagcaaaatccaaagtacaaataccttgtgaaaagcaagaagggatctccaggcctcacccggcggatgtctaagtccccagttgatagctctgttctggaaggggtgaaggaattatatctggaagctgcccaccaaaatggagatatgatcgacccagacctgcagacaggtctaggggttctgttccacctgagtggagaatttaatagagcaatagatgcatttaacgctgccttaactgttcggccagaggactattcactatggaaccgcctcggggcgaccttggcgaacggagaccgcagcgaggaagccgtggaggcctatacgcgagcactggagattcagccaggattcatccggtccagatacaacctaggaataagctgcatcaacctgggcgcctacagagaagcggtcagcaattttctcactgccctcagtttgcaaagaaagagcaggaatcagcagcaagttcctcatcctgcaatctctgggaatatctgggctgccctcagaattgcgctctctctgatggaccaaccagaactcttccaggcggctaatcttggtgacctggatgtcctcttaagagctttcaacttggatccttgaagaaagaataa

SEQ ID NO: 164565 - DNA, 874 bp, Homo sapiens
  Payload ID: 12419
  Gene Symbol: PEX5L
  Gene Name: peroxisomal biogenesis factor 5-like
  ENST ID: ENST00000463761
  CDS Start-End: 264-874
ctttggctactgtgaaagaccacgcagaagctgtggacttgctttttgtgcttgacaaaagtgcatagatagaagacagggattcccggctgggaggagggaggagagctgaagatccctgcctgggctggctgagctaagcaaagtgggaagctgagtgcttgaaagaggattatgctcgcactagaaataagcaatctgtggttctctggtcagcaagttctggcaaggaagccactgccagtggcataaagaattctgggatgtctgacagtgaaatggatggaaggacccacattccatctctacttaatgcccttttgtccagaaaccgggtcatgcaaatgagctacttgaaaagtaaagaacaaggatatggaaaactaagcagtgatgaagacctcgaaataattgttgatcaaaagcagggaaaaggctctagggcggcagataaggctgttgccatggtgatgaaggagataccgagggaggagtctgctgaagaaaagcccctccttactatgacatcacagctggtgaatgagcaacaagaaagcagacccctcctgagtccctccatcgatgactttctctgtgaaaccaaatcggaagcaatagcaaggccagtaacatccaatacagctgtattgaccactggcttagatctcctcgacctgagtgaaccagtctctcaaacccaaaccaaagccaagaagtcagagccctcatcaaaaacctcatccctcaagaaaaaggccgatggatctgacctcatcagcacggatgctgagcagagaggccagcctctcagagtcccggagacttcatccttagatctagacattcaaacacaactggaaaaatgggacgatgt

SEQ ID NO: 164566 - DNA, 563 bp, Homo sapiens
  Payload ID: 12419
  Gene Symbol: PEX5L
  Gene Name: peroxisomal biogenesis factor 5-like
  ENST ID: ENST00000491640
  CDS Start-End: 460-563
agaggaattaagccaaacatactctagtggagctgtctatattacaccaaacaaattgaataatgctgaagtgttggccagctggtgaatgagcaacaagaaagcagacccctcctgagtccctccatcgatgactttctctgtgaaaccaaatcggaagcaatagcaaggccagtaacatccaatacagctgtattgaccactggcttagatctcctcgacctgagtgaaccagtctctcaaacccaaaccaaagccaagaagtcagagccctcatcaaaaacctcatccctcaagaaaaaggccgatggatctgacctcatcagcacggatgctgagcagagaggccagcctctcagagtcccggagacttcatccttagatctagacattcaaacacaactggaaaaatgggacgatgttaagtttcatggagatcgaaataccaagggacatccaatggcagagagaaaatcatcctcatctagaactggatcaaaagagctcttatggtcctcagaacacagatctcaaccagaactgagtggtggaaaaagcgccct

SEQ ID NO: 164567 - DNA, 9082 bp, Homo sapiens
  Payload ID: 12419
  Gene Symbol: PEX5L
  Gene Name: peroxisomal biogenesis factor 5-like
  Uniprot ID: Q8IYB4
  ENST ID: ENST00000467460
  CDS Start-End: 332-2212
gagaaagagttcggcgaagaaggagtgagttctagagacgccccgcgagcaggacccgcgcctgcaggagagcctggccgacccggctcctcgccttctctgcgcgctctcccgcgtccgctttcagcaccccgagcggagaacagttcccggcagcccgcagcgctgccgagtggccgccggccggccgagtacccggagctccagggggctcaggagcaccctctgagaacccgctgtgcacccaccttttcccctcttttggtgggcaagtaagcacgggggaaaagcatccggtggcctcagggagccctgaagaaaccgaagcagaatgtaccagggacacatgcagaaaagtaaagaacaaggatatggaaaactaagcagtgatgaagacctcgaaataattgttgatcaaaagcagggaaaaggctctagggcggcagataaggctgttgccatggtgatgaaggagataccgagggaggagtctgctgaagaaaagcccctccttactatgacatcacagctggtgaatgagcaacaagaaagcagacccctcctgagtccctccatcgatgactttctctgtgaaaccaaatcggaagcaatagcaaggccagtaacatccaatacagctgtattgaccactggcttagatctcctcgacctgagtgaaccagtctctcaaacccaaaccaaagccaagaagtcagagccctcatcaaaaacctcatccctcaagaaaaaggccgatggatctgacctcatcagcacggatgctgagcagagaggccagcctctcagagtcccggagacttcatccttagatctagacattcaaacacaactggaaaaatgggacgatgttaagtttcatggagatcgaaataccaagggacatccaatggcagagagaaaatcatcctcatctagaactggatcaaaagagctcttatggtcctcagaacacagatctcaaccagaactgagtggtggaaaaagcgccctcaactctgagtcggcttcagaattggaattagtggctccgactcaggctcgactgaccaaagaacatcgctggggaagcgcattactttctagaaaccactccttagaagaagagtttgaaagggcaaaagcagcagtggagtcagatacagagttttgggataagatgcaagcagaatgggaagaaatggctcggaggaactggatatctgagaaccaagaagcccagaaccaagtaaccatctcggctagtgagaagggatattactttcacactgaaaaccccttcaaggactggcctggagcatttgaagaaggcttaaaaaggctgaaggaaggggatctgccagtcaccatcctgttcatggaagcagcaattcttcaggaccctggagatgcagaggcatggcagttcctcgggataacccaggcggagaatgaaaatgaacaagcagctattgtcgccctccagaggtgcttagaattacagcccaacaacttaaaagctttgatggccttggctgtgagttatactaacactggccatcagcaggatgcctgtgacgctctgaagaattggattaagcaaaatccaaagtacaaataccttgtgaaaagcaagaagggatctccaggcctcacccggcggatgtctaagtccccagttgatagctctgttctggaaggggtgaaggaattatatctggaagctgcccaccaaaatggagatatgatcgacccagacctgcagacaggtctaggggttctgttccacctgagtggagaatttaatagagcaatagatgcatttaacgctgccttaactgttcggccagaggactattcactatggaaccgcctcggggcgaccttggcgaacggagaccgcagcgaggaagccgtggaggcctatacgcgagcactggagattcagccaggattcatccggtccagatacaacctaggaataagctgcatcaacctgggcgcctacagagaagcggtcagcaattttctcactgccctcagtttgcaaagaaagagcaggaatcagcagcaagttcctcatcctgcaatctctgggaatatctgggctgccctcagaattgcgctctctctgatggaccaaccagaactcttccaggcggctaatcttggtgacctggatgtcctcttaagagctttcaacttggatccttgaagaaagaataataccagtactaataatccctgatctgtgtgattgtactgaaaaatcaaaaactattttattatgaatttcaaaaggataaatcaaatattcaaaaggccatggtcatatagcccaaggaaattaattcctgtggacaatgcccagtctctgttcagatccaaaagcacaaaatgttgtatatagagtcaaagtcaggctcaaaagaagaattaagagactcaagacaaaccaagataaagtaactgtgtgttgaatactctttccacaagttgcaagcatattgcaacacatgttctttgggttttttgtctccccttgcagctgatgacacatctgaggaacttgttcatgggaaacatggaaaaagcactgcctcagattgggaaattctgactgtttctgaactgtcttcttttgcaagactgaacatagtttgggccattggtgcatgcacatatattaacttgtgactaaagacagacattgcttaaacctgttccaattttaacttttactgtagccctttgattccagagagggagctttgctggcaaaagcagtttttgcactagaaatttttgctgttcccaatctaaacttttctggtattgtatatatgcactttaatatcttatttatgccttgctggagttttgttttgttgctccaatttttaacttgggggtgaaagatttaagaactcagcctcactagatcaacggaccaaataaacaattcctgaagacagtttttcatagtgtaggattttgaagaagtgtttttcttaaagcagatacgatgacataaggcgtaaatatggcaaacagatcttttcattcacgtgctttctgggtctgtatgaacataagtaagacacaaggtactgtctcttcatgcattctctgcaggaagaaagtttgatggtatcgtgatttctattgagttcaaattaacttgcttaagtgtcatactttactggctttgccctgcacaccaatattccttttaaaccataaatattttaaataatatttcttaagagtgataaataacattttttcctaaaaattatgttttcttagtttcataataatctgcactgttcatccccttgcattctaagtgatagaagagcaacactttcaaaccaaatctcactgaatgccagtgatttcatatgaaagatgcatgcctctttggctctttgaacatttagcaagtattgggaattttctattagcagtggtgttttaattggttgaattccacttagttctccacagtgttttgtatgtgtttggggcttggtgattattttgaaagatacattttttaaagaattaggaacattttttgcaaaatgctaatcagaatataattttcccaatgtcaggtatagaagttatcccattcttctttacctggtctccttccttcgtctagaaccttccccacagtagctaatcctaacaactttttatttatgttctttgataataatagctcatcccgctcatgattatagctacccacaaaaaataaaacaacaacaacaaaaaagactccacagaattgggatcaaaacagtctaattggctggggaataagcttctactgaggagtaaatgtgcacacgtgcttatcaattgaatgcgaggtacaggaataaaatcctctcctctgttacatctgaagtccttgggttgtgagagggcctcaagttaacagaaaccacaagtccttgaggcttacatatgttataacctattctagtttataaagacaaaaagctgaggccactgtgaggagtgccaggttttgatagtcattgtcaaagttgacttgggccaggtggtagctccagctggtcagcagaaggcagaggcattcaggcactcatcatgggtagcagcgaccacccagtctcagaccgtgcttctctacagtctcagcagcaaagtaaagctcaacaatgctttcaagaatggtattgtaagaattgtagaattcgagaaacccagtctggtaaggactcttggggccagcctccaagccatggcagggcctgcttgaatatgcctgattaagcatcctttccttccctgctccttcctcctgccatctctgtaccttgaccagaaagtcggcatgaatagttcatggacaaaggattgaatagcctctgaacaaaggattcaaagcaaactttgtaagtgttctgtgatgccattctatactttgagcagcagctgaatctgcagcctggatttaaagcctgaaactagtataaatgtcaaataattaatttgttgctaaatggtggcaaattttgtggcccaagttttattttgctattggaacacaaactccaaggagctgttttagggaagactaaacaatcttccattcttaccattatttggcaatttgcagagcatttagtagtactttctctagtgtatgtagtatctgtcagatctaagatttttataggctgtcaagaagtccagaattacggcccaagaggaaaagagttgcatttttcaataatattttttataaaattaagttaaaaccattattaaaacatgagtgacaggccaggtgcggtggctcacgcctgtaatcctagcactttgggaggcagaggcgggcagaccacgaggtcaggagttcgagaccagcctgaccaacatggtgaaaccccgtctttattaagaatacaaaaattagccgggtgtagtggtatgcacctgtaataccagctactcaggaggctgaggcaggagaatcacttgaaccagggaggcggaggttgcagtgagccgagattgcaccgctgcactccagtctgggtgacagagcgagactccgtctcaaaaaaaacaaaaaagtgacagtttataggaatagagcaccaccaagaaatcagtagcaagactttagaacagtctttttgtataaatcatatacagtaaatgttttgtttcttagaagtgcatctactttattttttggcagaacaatttttggcatcttatcttcatggcatgaaattgtcatttaaattactctttccgtttgaaaggggagggtatccttatttcccttctgaggtactctgagaaggctttgagtttcctttttcatgtattaatgtataacagcctaacagctcctagaagagggtattcttactagaatggctacatacgggtgacttcagttacatacaggtgacttccagggactgacttcgcctgtagattggatgaaaataaagagaaagccagtgattattgctgagtttcaaaatataaccatttctagtaggctacttctacatgctgttgtaccttcctggtgaggaggagacagagggataggggagaggaggaggaataaaaatccctctcactgggccaatcatactgattcattccctttacttcctccaaaactcactccccatgactcctgaaaaatgggtagatctcgtccaccaggaaattttaatagaatactatgcaccgtgctttctcagtcaatctggattcctactagaacagaaaagtaaggaaacataactgggtaggaatgtccacttacgtttcacaaactcacttttagagtttcatgccactttcctcattcttctctttaagatactattatattgaacgtgggacccatgtctaaatacttgtatagataaatatttcttgtatattcttcccatacaagcaagacttgaatacagttgtagctagtcccacttttataataaaagcttccaaactctttatcataaactttgtctgtgagcttgggaatacagagaaagcaagttgatcattctgagacccttcctcatttgccctgaatcagttccccaagattggactgtactttaagctagttgttgtagcagtggtggttgttgttttatatcttgagatacttctagaacattctagaaacagggtattctaaaggcttactttatatgccatcctttttgaaccctcttattttagaaattattacacgtgcacacttatgatttcaaccttgtaaaataatttcaaattcatttcgtatccacattttactgcagtttccctatcatcatctcaatagttatagaactggttgaaattaaactgttttgaactaagaagtagatatatatatatatatatatatatatttttttttttttttttaaagagtgttcatagataaactctggcataaagtttgtaaaaaagcaattttttaaaagcaaaacgtataacctcaggtacaaaaatattgcatgcattagtattgcaaatttgcctactcaaatattaaccaaagcatgcaagataacttgactgaatttaaatttacacagtgcatgattaagtctcataggttagcctgttgttccttgcctctatacaagggagcatttttatgaactttgtgttacagtttttctatttgcttttcttatcctatccttgagattgttttcatgctatcacactgaactttacagatattcacacatctggtttctacagtgttaccagtgccaaactaatcctctgaagaatctgggacatctaaacactttttcaaaaaccagttgaggcacaacagatcccaaacttaaacaaatccaagtgtctgaatgctactaaactaaatcatgttgactgcctcagcacataaaggtttcgactttaaattcttaataatgcatttcaaaatttttctaaaagtttgggaataaattagaaaaactgatattctaaataaggcgaggaggttggggtaatgtcaggcacatcaaaatcatcacacaacgaagtagatatggggccttaattttcataaatgtcacatagcaagtgtgtggggtatcacaacattgttctgatacagccctgtttgtatggtagttgagctgcttgggctaaatgtcccttgagaaactggacttgatcaacaggtctaaaaacactgatatttagggagtgatgaggtgatttcacggtcactcagaaccaactctgaaatcttctcactgccttttcccataacccctattttatgaggagaccagaaagggagagagcaaagctcagtgagaccatgtggtcttacattagtaacagctttgttactcactccatataccccggtaccctcacacacataccatgaactcaaagacagaattctacacataacacacatagcaaagacgattgtggggaggcattaaacagttaagaggaaaaaaaaaaacacagaaaattaaactgtgaggtttaacaacctctcatgtggtattttgccttgaacgaagtttccactacctgcagcttctgcagaaataccaaaataacacagtctagagacaagtgtcccaatgtcagaactgttttctcaggaccttctctataagagaaaactaacttgcaatgctgcagaatgtcagagcaaaaccctgatgagctccgtgggatacttaatagaagcctgcactcaaaataatattaagatggaaacaacaacaacaattaggcagttctttgctcaactataaaatgtgtatcattcattgggggagggggaggggtcgtgttctttggatttcttggaaagggaaatggtataacacaaaaagactaagaggtatacacactcagctcggtaattcgagcatttggcattttcactgagatatatagcatttctgcatggataccatacaagaattctgccatgtgagaaatgtgttcatgatggactacattaccagtagttaagggaaatacagcaaacttaagtttttaccaacttcctttcatgttccctatatatcatctaacccaaactttcaatttacattgcccaaatttgtttacattggttgaaaaaaaactgattaatttattaaactttttacaaactgtaacaaacatttaactatttagaaaagacatttctacatattttatatatctatgaatattgcatctctaatctaatctaaaaatgttgttttgagacaattcttctgtgatgcttcctcctcatgctcataaatgtttaaagtcttgggatttcattttcaggctgaaatagataacaagaaaaaaatttaagtttaaatgtttacattgcgttactaaattaataccaattcaaattaagtgacctatagtaaattaatggcaatgggggggaggggattttaaagtgattggcatattatgtgatactgtatcagtgatttagtgaaataatatgtatcatagcacaactctgttgggtattaaggcttcatcttagtatttccctgcgttgctctttgaaataaaattactaccataaaaataacctcttatcatattgatgtgtttaatttactcagttggcttctaatttgcgtaacaagattaaggtagtatttttgtactattattggaagcatgccttccctttttcacattattaaattgtatttatatttgtgcaattttaaactatgttttcaaataaactttgtctgcggcttcgaggtcttttcaggaatctttcaaaatgggatttggggatcagaactccttctgatcaaatggaatccaatttgtactactggctaaaggtccttttattaaatattgaatatcactacatatgattttgcatgagctatctggaaatcaggaatgcatttttggatataaaacaaaactttaaaaatcttcctcctttgttaattttttaagactaaaatattatttaacctgaaattgaattttgtgattctttttagaataaaaatattaaaataaa

SEQ ID NO: 164568 - DNA, 2361 bp, Homo sapiens
  Payload ID: 12419
  Gene Symbol: PEX5L
  Gene Name: peroxisomal biogenesis factor 5-like
  Uniprot ID: Q8IYB4
  ENST ID: ENST00000476138
  CDS Start-End: 305-2056
ctttggctactgtgaaagaccacgcagaagctgtggacttgctttttgtgcttgacaaaagtgcatagatagaagacagggattcccggctgggaggagggaggagagctgaagatccctgcctgggctggctgagctaagcaaagtgggaagctgagtgcttgaaagaggattatgctcgcactagaaataagcaaaaagtaaagaacaaggatatggaaaactaagcagtgatgaagacctcgaaataattgttgatcaaaagcagggaaaaggctctagggcggcagataaggctgttgccatggtgatgaaggagataccgagggaggagtctgctgaagaaaagcccctccttactatgacatcacagctggtgaatgagcaacaagaaagcagacccctcctgagtccctccatcgatgactttctctgtgaaaccaaatcggaagcaatagcaaggccagtaacatccaatacagctgtattgaccactggcttagatctcctcgacctgagtgaaccagtctctcaaacccaaaccaaagccaagaagtcagagccctcatcaaaaacctcatccctcaagaaaaaggccgatggatctgacctcatcagcacggatgctgagcagagaggccagcctctcagagtcccggagacttcatccttagatctagacattcaaacacaactggaaaaatgggacgatgttaagtttcatggagatcgaaataccaagggacatccaatggcagagagaaaatcatcctcatctagaactggatcaaaagagctcttatggtcctcagaacacagatctcaaccagaactgagtggtggaaaaagcgccctcaactctgagtcggcttcagaattggaattagtggctccgactcaggctcgactgaccaaagaacatcgctggggaagcgcattactttctagaaaccactccttagaagaagagtttgaaagggcaaaagcagcagtggagtcagatacagagttttgggataagatgcaagcagaatgggaagaaatggctcggaggaactggatatctgagaaccaagaagcccagaaccaagtaaccatctcggctagtgagaagggatattactttcacactgaaaaccccttcaaggactggcctggagcatttgaagaaggcttaaaaaggctgaaggaaggggatctgccagtcaccatcctgttcatggaagcagcaattcttcaggaccctggagatgcagaggcatggcagttcctcgggataacccaggcggagaatgaaaatgaacaagcagctattgtcgccctccagaggtgcttagaattacagcccaacaacttaaaagctttgatggccttggctgtgagttatactaacactggccatcagcaggatgcctgtgacgctctgaagaattggattaagcaaaatccaaagtacaaataccttgtgaaaagcaagaagggatctccaggcctcacccggcggatgtctaagtccccagttgatagctctgttctggaaggggtgaaggaattatatctggaagctgcccaccaaaatggagatatgatcgacccagacctgcagacaggtctaggggttctgttccacctgagtggagaatttaatagagcaatagatgcatttaacgctgccttaactgttcggccagaggactattcactatggaaccgcctcggggcgaccttggcgaacggagaccgcagcgaggaagccgtggaggcctatacgcgagcactggagattcagccaggattcatccggtccagatacaacctaggaataagctgcatcaacctgggcgcctacagagaagcggtcagcaattttctcactgccctcagtttgcaaagaaagagcaggaatcagcagcaagttcctcatcctgcaatctctgggaatatctgggctgccctcagaattgcgctctctctgatggaccaaccagaactcttccaggcggctaatcttggtgacctggatgtcctcttaagagctttcaacttggatccttgaagaaagaataataccagtactaataatccctgatctgtgtgattgtactgaaaaatcaaaaactattttattatgaatttcaaaaggataaatcaaatattcaaaaggccatggtcatatagcccaaggaaattaattcctgtggacaatgcccagtctctgttcagatccaaaagcacaaaatgttgtatatagagtcaaagtcaggctcaaaagaagaattaagagactcaagacaaaccaagataaagtaactgtgtgttgaatactctttccacaagttgcaagcatattgcaacacatgt

SEQ ID NO: 164569 - DNA, 2696 bp, Homo sapiens
  Payload ID: 12420
  Gene Symbol: PEX6
  Gene Name: peroxisomal biogenesis factor 6
  Uniprot ID: Q13608
  ENST ID: ENST00000244546
  CDS Start-End: 1-2217
atggcgctggctgtcttgcgggtcctggagccctttccgaccgagacacccccgttggcagtgctgctgccacccgggggcccgtggccggcggcggagctgggcctggtgctggccctgaggcctgcaggggagagcccggcagggccggcgctgctggtggcagccctggaggggccggacgcgggcaccgaagagcagggtcccgggccgccgcagctactggttagccgcgcgctgctgcggctcctggcactgggctccggggcctgggtgcgggcgcgggcggtgcggcggcccccggcgctaggttgggcactgcttggcacctcgctggggcctgggctcggaccgcgagtcgggccgctgctggtgaggcgcggagagaccctcccagtgcccggaccgcgggtgctggagacgcggccggcgttgcaagggctgctgggcccagggactcggctggctgtgactgagctccgcgggcgggccagactgtgtccagagtctggggacagcagtcggcccccacccccgcccgtggtgtcctcctttgcggtttctggcacagtgcggcgactccagggagttctgggagggactggagattcactaggggtgagccggagctgtctccgtggccttggcctcttccagggcgaatgggtgtgggtggcccaggccagagagtcatcgaacacttcacagccgcacttggctagggtgcaggtcctagaacctcgctgggacctctctgatagactgggacccggctctggaccgctgggagagcccctcgctgacggactggcgcttgtccctgccactttggcttttaatcttggctgtgaccccctggaaatgggagagctcagaattcagaggtacttggaaggctccatcgcccctgaagacaaaggaagctgctcattgctgcctgggcctccatttgccagagagttacacatcgaaattgtgtcttctccccactacagcactaatggaaattatgacggtgttctttaccggcactttcagatacccagggtagtccaggaaggggatgttctatgtgtgccaacaattgggcaagtagagatcctggaaggaagtccagagaaactgcccaggtggcgggaaatgttttttaaagtgaagaaaacagttggggaagctccagatggaccagccagtgcctacttggccgacaccacccatacctccttgtacatggtgggttctaccctgagccctgttccatggctcccttcagaggaatccactctctggagcagtttgtctcctccaggcctggaggccttggtgtctgaactctgtgctgtcctgaagcctcgcctccagccagggggtgccctgctgacaggaactagcagtgtccttctacggggccccccaggctgtgggaagaccacagtagttgctgctgcctgtagtcaccttgggctccacttactgaaggtgccctgctccagcctctgtgcagaaagtagtggggctgtggagacaaaactgcaggccatcttctcccgggcccgccgttgccggcctgcagtcctgttgctcacagctgtggaccttctgggccgggaccgtgatgggctgggtgaggatgcccgtgtgatggctgtgctgcgtcacctcctcctcaatgaggaccccctcaacagctgccctcccctcatggttgtggccaccacaagccgggcccaggacctgcctgctgatgtgcagacagcatttcctcatgagctcgaggtgcctgctctgtcagaggggcagcggctcagcatcctgcgggccctcactgcccaccttcccctgggccaggaggtgaacttggcacagctagcacggcggtgtgcaggctttgtggtaggggatctctatgcccttctgacccacagcagccgggcagcctgcaccaggatcaagaactcaggtttggcaggtggcttgactgaggaggatgagggggagctgtgtgctgccggctttcctctcctggctgaggactttgggcaggcactggagcaactgcagacagctcactcccaggccgttggagcccccaaggtggagaccaagtccttggagtgtttgccagggccagggctgcagctccatgcattatcttctttgatgaactggactctttggccccaagccgggggcgaagtggagattctggaggagtgatggacagggtggtgtctcagctccttgccgagctagatgggctgcacagcactcaggatgtgtttgtgattggagccaccaacagaccagatctcctggaccctgcccttctgcggcctggcagatttgacaagctggtgtttgtgggggcaaatgaggaccgggcctcccagctacgcgttctaagtgccatcacacgcaaattcaagctagagccatctgtgagcctggtaaacgtgctagattgctgccctccccagctgacgggcgcggacctctactctctctgctctgatgctatgacagctgccctcaaacgcagggttcatgacctggaggaagggctggagccaggtagctcagcactgatgctcaccatggaggacttgctgcaggctgccgcccggctgcaaccctcagtcagtgagcaggagctgctccggtacaagcgcatccagcgcaagtttgctgcctgctag

SEQ ID NO: 164570 - DNA, 3478 bp, Homo sapiens
  Payload ID: 12420
  Gene Symbol: PEX6
  Gene Name: peroxisomal biogenesis factor 6
  Uniprot ID: Q13608
  ENST ID: ENST00000304611
  CDS Start-End: 71-3013
acactagtcgtctggctctctggctccggaagctgcgctccttcaccctcctcgttggtgtcctgtcaccatggcgctggctgtcttgcgggtcctggagccctttccgaccgagacacccccgttggcagtgctgctgccacccgggggcccgtggccggcggcggagctgggcctggtgctggccctgaggcctgcaggggagagcccggcagggccggcgctgctggtggcagccctggaggggccggacgcgggcaccgaagagcagggtcccgggccgccgcagctactggttagccgcgcgctgctgcggctcctggcactgggctccggggcctgggtgcgggcgcgggcggtgcggcggcccccggcgctaggttgggcactgcttggcacctcgctggggcctgggctcggaccgcgagtcgggccgctgctggtgaggcgcggagagaccctcccagtgcccggaccgcgggtgctggagacgcggccggcgttgcaagggctgctgggcccagggactcggctggctgtgactgagctccgcgggcgggccagactgtgtccagagtctggggacagcagtcggcccccacccccgcccgtggtgtcctcctttgcggtttctggcacagtgcggcgactccagggagttctgggagggactggagattcactaggggtgagccggagctgtctccgtggccttggcctcttccagggcgaatgggtgtgggtggcccaggccagagagtcatcgaacacttcacagccgcacttggctagggtgcaggtcctagaacctcgctgggacctctctgatagactgggacccggctctggaccgctgggagagcccctcgctgacggactggcgcttgtccctgccactttggcttttaatcttggctgtgaccccctggaaatgggagagctcagaattcagaggtacttggaaggctccatcgcccctgaagacaaaggaagctgctcattgctgcctgggcctccatttgccagagagttacacatcgaaattgtgtcttctccccactacagcactaatggaaattatgacggtgttctttaccggcactttcagatacccagggtagtccaggaaggggatgttctatgtgtgccaacaattgggcaagtagagatcctggaaggaagtccagagaaactgcccaggtggcgggaaatgttttttaaagtgaagaaaacagttggggaagctccagatggaccagccagtgcctacttggccgacaccacccatacctccttgtacatggtgggttctaccctgagccctgttccatggctcccttcagaggaatccactctctggagcagtttgtctcctccaggcctggaggccttggtgtctgaactctgtgctgtcctgaagcctcgcctccagccagggggtgccctgctgacaggaactagcagtgtccttctacggggccccccaggctgtgggaagaccacagtagttgctgctgcctgtagtcaccttgggctccacttactgaaggtgccctgctccagcctctgtgcagaaagtagtggggctgtggagacaaaactgcaggccatcttctcccgggcccgccgttgccggcctgcagtcctgttgctcacagctgtggaccttctgggccgggaccgtgatgggctgggtgaggatgcccgtgtgatggctgtgctgcgtcacctcctcctcaatgaggaccccctcaacagctgccctcccctcatggttgtggccaccacaagccgggcccaggacctgcctgctgatgtgcagacagcatttcctcatgagctcgaggtgcctgctctgtcagaggggcagcggctcagcatcctgcgggccctcactgcccaccttcccctgggccaggaggtgaacttggcacagctagcacggcggtgtgcaggctttgtggtaggggatctctatgcccttctgacccacagcagccgggcagcctgcaccaggatcaagaactcaggtttggcaggtggcttgactgaggaggatgagggggagctgtgtgctgccggctttcctctcctggctgaggactttgggcaggcactggagcaactgcagacagctcactcccaggccgttggagcccccaagatcccctcagtgtcctggcatgatgtgggtgggctgcaggaggtgaagaaggagatcctggagaccattcagctccccctggagcaccctgagctactgagcctgggcctgagacgctcaggccttctgctccatgggccccctggcaccggcaagacccttctggccaaggcagtagccactgagtgcagccttaccttcctcagcgtgaaggggccagagctcattaacatgtatgtgggccaaagtgaggagaatgtgcgggaagtgtttgccagggccagggctgcagctccatgcattatcttctttgatgaactggactctttggccccaagccgggggcgaagtggagattctggaggagtgatggacagggtggtgtctcagctccttgccgagctagatgggctgcacagcactcaggatgtgtttgtgattggagccaccaacagaccagatctcctggaccctgcccttctgcggcctggcagatttgacaagctggtgtttgtgggggcaaatgaggaccgggcctcccagctacgcgttctaagtgccatcacacgcaaattcaagctagagccatctgtgagcctggtaaacgtgctagattgctgccctccccagctgacgggcgcggacctctactctctctgctctgatgctatgacagctgccctcaaacgcagggttcatgacctggaggaagggctggagccaggtagctcagcactgatgctcaccatggaggacttgctgcaggctgccgcccggctgcaaccctcagtcagtgagcaggagctgctccggtacaagcgcatccagcgcaagtttgctgcctgctaggagccccccagggtctgggaccccgctcagcatggctgcaggtaccttgatagcccacagagagatctgggaaggaagggctcctcctcaggctgctgccaacccacctggaggccacctccctccaggagatcccagggtgcaaagtggcattgagacagcagcaacagctcaagagatatctcctgcctacttgcccctccttccaggccggctctaagagaaaggcccatctactcaggaagagggccagggccttgggttctggggattgggccctgagagggctagttctgtggctgaaaataaagcatgtcccgccccctactggtgttgtggcatgaaaggttggagtgagaaagagcagggttgtgggaggagtaagccctgggagagggtgggggggtgggcagcatgggagcctgatccttctgacataaataaacacaatgcatgcaggaactg

SEQ ID NO: 164571 - DNA, 1464 bp, Homo sapiens
  Payload ID: 12421
  Gene Symbol: PEX7
  Gene Name: peroxisomal biogenesis factor 7
  Uniprot ID: O00628
  ENST ID: ENST00000318471
  CDS Start-End: 82-1053
tctctctaaccgcgccagtgtgcctccgactcggaacggcttccgcggccggggcagcgagggccgggggcggcgggcgggatgagtgcggtgtgcggtggagcggcgcggatgctgcggacgccgggacgccacggctacgccgccgagttctccccgtacctgccgggccgcctggcctgcgccaccgcgcagcactacggcatcgcgggctgtggaaccctactaatattggatccagatgaagctgggctaaggctttttagaagctttgactggaatgatggtttgtttgatgtgacttggagtgagaacaacgaacatgtcctcatcacctgtagtggcgatggctcgctgcagctctgggacactgccaaagctgcagggccactgcaagtctataaagaacacgctcaggaggtgtatagtgttgattggagccaaaccagaggtgaacagcttgtggtgtctggctcatgggatcaaactgtcaaattgtgggatccaactgttggaaagtctctgtgcacctttagaggccatgaaagtattatttatagcacaatctggtctccccacatccctggttgttttgcttcagcctcaggtgatcagactctgagaatatgggatgtgaaggcagcaggagtaagaatcgtgattcctgcacatcaggcagaaatcttgagttgtgactggtgtaaatacaatgagaatttgctggtgaccggggcggttgactgtagtttgagaggctgggacttaaggaatgtacgacaaccagtgtttgaacttcttggtcatacctatgctattaggagggtgaaattttcaccatttcatgcttctgtgctggcctcttgctcgtatgattttactgtaagattctggaacttttcaaagcctgactctcttcttgaaacagtggagcatcatacagagtttacttgtggtttagacttcagtcttcagagccccactcaggtggctgactgttcttgggatgaaacaataaagatctatgaccctgcttgtcttactattcctgcttgagatacactactttggtcagaaacagaggatgttggctgaagaactgcctaacagcaaataaattaactatggaaaacatagacattatgcttttatatgctattcagatttcaaatctttccaatttaccctggaatcagttttgagggagctgataaagactttagctgactcgttaagcctgatacataagccatatttaaaattctaagaaataattaatgttatgatatatcttgtagtatctattaaaatgtctctgggtcataaaatggattaaaatatgggagatcagtaggttatacttatatagatagtgatatatttcatttttaatttgtcatttttgatgtaaaatataatcactgctgtgataaataaactatctattgatcatttatcattttataa

SEQ ID NO: 164572 - DNA, 680 bp, Homo sapiens
  Payload ID: 12421
  Gene Symbol: PEX7
  Gene Name: peroxisomal biogenesis factor 7
  ENST ID: ENST00000367756
  CDS Start-End: 88-456
gcctggtctctctaaccgcgccagtgtgcctccgactcggaacggcttccgcggccggggcagcgagggccgggggcggcgggcgggatgagtgcggtgtgcggtggagcggcgcggatgctgcggacgccgggacgccacggctacgccgccgagttctccccgtacctgccgggccgcctggcctgcgccaccgcgcagcactacggcatcgcgggctgtggaaccctactaatattggatccagatgaagctgggctaaggctttttagaagctttgactggaatgatggtttgtttgatgtgacttggagtgagaacaacgaacatgtcctcatcacctgtagtggcgatggctcgctgcagctctgggacactgccaaagctgcagggccactgcaagtctataaagaacacgctcaggagtatgttcagggaagctgtgttgtgaaatagaagagcaactaatgggtcattttcttctgtggaagagagtatataataaagacgtatagcatggttttagtcaatcttggatttgaatcccagctttgtaagttacctgttgtgagaccttgcgtatgtcacatatttttcctaaacttgagtgtttttatttgcaaactaagtttattagtagtctgtatcacagaccagcattgaataaatatgagctagta

SEQ ID NO: 164573 - DNA, 945 bp, Homo sapiens
  Payload ID: 12421
  Gene Symbol: PEX7
  Gene Name: peroxisomal biogenesis factor 7
  Uniprot ID: O00628
  ENST ID: ENST00000541292
  CDS Start-End: 103-945
acttccgtccggtctgcctggtctctctaaccgcgccagtgtgcctccgactcggaacggcttccgcggccggggcagcgagggccgggggcggcgggcgggatgagtgcggtgtgcggtggagcggcgcggatgctgcggacgccgggacgccacggctacgccgccgagttctccccgtacctgccgggccgcctggcctgcgccaccgcgcagcactacggcatcgcgggctgtggaaccctactaatattggatccagatgaagctgggctaaggctttttagaagctttgactggaatgatggtttgtttgatgtgacttggagtgagaacaacgaacatgtcctcatcacctgtagtggcgatggctcgctgcagctctgggacactgccaaagctgcagggccactgcaagtctataaagaacacgctcaggaggtgtatagtgttgattggagccaaaccagaggtgaacagcttgtggtgtctggctcatgggatcaaactgtcaaattgtgggatccaactgttggaaagtctctgtgcacctttagaggccatgaaagtattatttatagcacaatctggtctccccacatccctggttgttttgcttcagcctcaggtgatcagactctgagaatatgggatgtgaaggcagcaggagtaagaatcgtgattcctgcacatcaggcagaaatcttgagttgtgactggtgtaaatacaatgagaatttgctggtgaccggggcggttgactgtagtttgagaggctgggacttaaggaatgtacgacaaccagtgtttgaacttcttggtcatacctatgctattaggagggtgaaaatggagtcttgccctgtcacccagacacgatctcagctcactgcaacctctgccttctgggttcaagctgttctcctgcctcagcctactgagtag

SEQ ID NO: 164574 - DNA, 957 bp, Homo sapiens
  Payload ID: 12422
  Gene Symbol: PXMP2
  Gene Name: peroxisomal membrane protein 2, 22kDa
  Uniprot ID: Q9NR77
  ENST ID: ENST00000317479
  CDS Start-End: 66-653
gggctccgcgcccggccagcctgaggtggggtcggtgcccccggcggcacggcgctggggaggcgatggcgccggccgcgtccaggctgcgggccgaagccgggctcggggcgctgccgcggcgggcgctcgcccagtacctgctcttcctgcggctctacccggtgctcaccaaggcggccaccagtggcattttgtcagcacttgggaacttcctggcccagatgattgagaagaagcggaaaaaagaaaactctagaagtctggatgtcggtgggcctctgagatatgccgtttacgggttcttcttcacagggccgctgagtcacttcttctacttcttcatggaacattggatccctcctgaggtccccctggcagggctcaggaggcttctcctggaccgcctcgtctttgcaccggccttcctcatgttgttcttcctcatcatgaactttctggaggggaaagacgcctcagccttcgccgccaagatgagggggggcttctggccggcgctgaggatgaactggcgggtgtggacgccactacagttcatcaacatcaactacgtccctctgaagttccgggtgctcttcgccaacctggcagctctgttctggtatgcctacctggcctccttggggaagtgacgaccgctgggagaacatcaggtgcactgtggacgtgggtctgggggtctcacccgcccagcgagagcagaaccaatccagtcaggatgtcactgactctaaatcaggtgattcaagatgcccaaaaatgatggatagagaaacagaaatctctgaatgtcagaaccctgtcttttaaaaaggcagtcgctgccttcaggtggtgctgccccagaaacttaaaatttagtcgaggcagtttcaattgttactgtggaccgaattaggatcacaataaacgataatgcaggttcttcaatggtga

SEQ ID NO: 164575 - DNA, 762 bp, Homo sapiens
  Payload ID: 12422
  Gene Symbol: PXMP2
  Gene Name: peroxisomal membrane protein 2, 22kDa
  ENST ID: ENST00000428960
  CDS Start-End: 1-682
gcggaaaaaagaaaactctagaagtctggatgtcggtgggcctctgagatatgccgtttacgggttcttcttcacagggccgctgagtcacttcttctacttcttcatggaacattggatccctcctgaggtccccctggcagggctcaggaggcttctcctggaccgcctcgtctttgcaccggccttcctcatgttgttcttcctcatcatgaactttctggaggggaaagacgcctcagccttcgccgccaagatgagggggggcttctggccggcgctgaggatgaactggcgggtgtggacgccactacagttcatcaacatcaactacgtccctctgaagccagggtccccaggaccactcccacactgggaggatggggtgcagcaccccctgcagcatggcaggatacccccagatgctacaggaggaggcctggcagagcctgcaggggccacgtgcttccctcccccagaagttccgggtgctcttcgccaacctggcagctctgttctggtatgcctacctggcctccttggggaagtgacgaccgctgggagaacatcaggtgcactgtggacgtgggtctgggggtctcacccgcccagcgagagcagaaccaatccagtcaggatgtcactgactctaaatcaggtgattcaagatgcccaaaaatgatggatagagaaacagaaatctctgaatgtcagaaccctgtcttttaaaaaggcagtcgctgccttcaggtggtgctgccc

SEQ ID NO: 164576 - DNA, 516 bp, Homo sapiens
  Payload ID: 12422
  Gene Symbol: PXMP2
  Gene Name: peroxisomal membrane protein 2, 22kDa
  ENST ID: ENST00000539093
  CDS Start-End: 1-148
tggcattttgtcagcacttgggaacttcctggcccagatgattgagaagaagcggaaaaaagaaaactctagaagtctggatgtcggtgggcctctgagatatgccgtttacgggggaaagacgcctcagccttcgccgccaagatgagggggggcttctggccggcgctgaggatgaactggcgggtgtggacgccactacagttcatcaacatcaactacgtccctctgaagttccgggtgctcttcgccaacctggcagctctgttctggtatgcctacctggcctccttggggaagtgacgaccgctgggagaacatcaggtgcactgtggacgtgggtctgggggtctcacccgcccagcgagagcagaaccaatccagtcaggatgtcactgactctaaatcaggtgattcaagatgcccaaaaatgatggatagagaaacagaaatctctgaatgtcagaaccctgtcttttaaaaaggcagtcgctgccttcaggtggtgctgcccca

SEQ ID NO: 164577 - DNA, 632 bp, Homo sapiens
  Payload ID: 12422
  Gene Symbol: PXMP2
  Gene Name: peroxisomal membrane protein 2, 22kDa
  ENST ID: ENST00000543589
  CDS Start-End: 30-512
gcccccggcggcacggcgctggggaggcgatggcgccggccgcgtccaggctgcgggccgaagccgggctcggggcgctgccgcggcgggcgctcgcccagtacctgctcttcctgcggctctacccggtgctcaccaaggcggccaccagtggcattttgtcagcacttgggaacttcctggcccagatgattgagaagaagcggaaaaaagaaaactctagaagtctggatgtcggtgggcctctgagatatgccgtttacggttccgggtgctcttcgccaacctggcagctctgttctggtatgcctacctggcctccttggggaagtgacgaccgctgggagaacatcaggtgcactgtggacgtgggtctgggggtctcacccgcccagcgagagcagaaccaatccagtcaggatgtcactgactctaaatcaggtgattcaagatgcccaaaaatgatggatagagaaacagaaatctctgaatgtcagaaccctgtcttttaaaaaggcagtcgctgccttcaggtggtgctgccccagaaacttaaaatttagtcgaggcagtttcaattgttactgtggaccgaattaggatcacaataaacgataatgcaggttcttcaa

SEQ ID NO: 164578 - DNA, 537 bp, Homo sapiens
  Payload ID: 12422
  Gene Symbol: PXMP2
  Gene Name: peroxisomal membrane protein 2, 22kDa
  ENST ID: ENST00000454379
  CDS Start-End: 1-252
cctgaggtccccctggcagggctcaggaggcttctcctggaccgcctcgtctttgcaccggccttcctcatgttgttcttcctcatcatgaactttctggaggggaaagacgcctcagccttcgccgccaagatgagggggggcttctggccggcgctgaggatgaactggcgggtgtggacgccactacagttcatcaacatcaactacgtccctctgaaggtgagggccacggggctcagcctctgctaacattactttgtcagccttttccttccttccttccttcctctttcctccccccctccctcccctcttcttttctcttctcttctttctttggtagttttccgctagacttagtttcatccgtgtctagactcctcaactacccttggattttgcccatgaccctgaatcattgctagttcgggattcaggaagcaacagagaagggtgtcccgagtggtcgtctttgcctcttctgttcgttcagcaaattctcattaaaagcccccatgccagggatgcctatga

SEQ ID NO: 164579 - DNA, 979 bp, Homo sapiens
  Payload ID: 12423
  Gene Symbol: PXMP4
  Gene Name: peroxisomal membrane protein 4, 24kDa
  ENST ID: ENST00000217398
  CDS Start-End: 104-538
acgagtcggcggcgctaccgaggggctgtgggcgcgcagctggaacctccggctgtcagtgcgcttacagttcctaaccccgaccctgcgcgcagcccgcactatggcagccccgccgcagctaagggctctgctcgtagtcgtcaacgcactgctgcgcaagcgccgctaccacgctgcgttggccgtgcttaagggcttccggaacggggctgtctatggagccaaaatccgggcccctcacgcgctggtcatgacctttctcttccggaatggcaggggcacctgtgtttgtgcagcctccaggagaagctgtgggccatactgcaggccacatatatccactcctggaacctggcacggtttgtgttcacctacaagggtctccgtgccctgcagtcctacatacaaggcaagacctacccagcacacgcattcctggcggccttcctcgggggtatcctggtgtttggagaaaacaataacatcaacagccagatcaacatgtacctgttgtcacgcgtcctgtttgccctgagccgcctggctgtagagaagggctacatccctgaacccaggtgggacccgttcccgctgctcactgcggtggtgtgggggctggtgctgtggctctttgagtatcaccgatccaccctgcagccctcgctgcagtcctccatgacctacctctatgaggacagcaatgtatggcacgacatctcagacttcctcgtctataacaagagccgtccctccaattaatgcagccctgaggtgtctggctgtggctcaagatttggccccatgcagaccctcccaaaggatactgccttctcaagatcataggcctcagactccaactggtgttatcccagggttccgtttgctgaagtaaaaacactgattttaaaatcccagtgggtacctttgtatggtggcacaagtggccgaatcaggctgaggaatctacggcttggtt

SEQ ID NO: 164580 - DNA, 989 bp, Homo sapiens
  Payload ID: 12423
  Gene Symbol: PXMP4
  Gene Name: peroxisomal membrane protein 4, 24kDa
  Uniprot ID: Q9Y6I8
  ENST ID: ENST00000344022
  CDS Start-End: 113-328
atagacgccacgagtcggcggcgctaccgaggggctgtgggcgcgcagctggaacctccggctgtcagtgcgcttacagttcctaaccccgaccctgcgcgcagcccgcactatggcagccccgccgcagctaagggctctgctcgtagtcgtcaacgcactgctgcgcaagcgccgctaccacgctgcgttggccgtgcttaagggcttccggaacggggctgtctatggagccaaaatccgggcccctcacgcgctggtcatgacctttctcttccggaatggcagatcaacatgtacctgttgtcacgcgtcctgtttgccctgagccgcctggctgtagagaagggctacatccctgaacccaggtgggacccgttcccgctgctcactgcggtggtgtgggggctggtgctgtggctctttgagtatcaccgatccaccctgcagccctcgctgcagtcctccatgacctacctctatgaggacagcaatgtatggcacgacatctcagacttcctcgtctataacaagagccgtccctccaattaatgcagccctgaggtgtctggctgtggctcaagatttggccccatgcagaccctcccaaaggatactgccttctcaagatcataggcctcagactccaactggtgttatcccagggttccgtttgctgaagtaaaaacactgattttaaaatcccagtgggtacctttgtatggtggcacaagtggccgaatcaggctgaggaatctacggcttggttccagctgtgcagctgacttctgtgagactggggccagccacactactctctaggcctcaggggtcaaggagctcagaggagggccctgaggtctctttccggtgggtatgttcattcttcaactgttcttatgtcacagagggctccttgctggtgggcagtgggttgtaaatactttttaaaaaacactaagttccttatctcagatgctgttctactg

SEQ ID NO: 164581 - DNA, 5684 bp, Homo sapiens
  Payload ID: 12423
  Gene Symbol: PXMP4
  Gene Name: peroxisomal membrane protein 4, 24kDa
  Uniprot ID: Q9Y6I8
  ENST ID: ENST00000409299
  CDS Start-End: 94-732
ggcgctaccgaggggctgtgggcgcgcagctggaacctccggctgtcagtgcgcttacagttcctaaccccgaccctgcgcgcagcccgcactatggcagccccgccgcagctaagggctctgctcgtagtcgtcaacgcactgctgcgcaagcgccgctaccacgctgcgttggccgtgcttaagggcttccggaacggggctgtctatggagccaaaatccgggcccctcacgcgctggtcatgacctttctcttccggaatggcagcctccaggagaagctgtgggccatactgcaggccacatatatccactcctggaacctggcacggtttgtgttcacctacaagggtctccgtgccctgcagtcctacatacaaggcaagacctacccagcacacgcattcctggcggccttcctcgggggtatcctggtgtttggagaaaacaataacatcaacagccagatcaacatgtacctgttgtcacgcgtcctgtttgccctgagccgcctggctgtagagaagggctacatccctgaacccaggtgggacccgttcccgctgctcactgcggtggtgtgggggctggtgctgtggctctttgagtatcaccgatccaccctgcagccctcgctgcagtcctccatgacctacctctatgaggacagcaatgtatggcacgacatctcagacttcctcgtctataacaagagccgtccctccaattaatgcagccctgaggtgtctggctgtggctcaagatttggccccatgcagaccctcccaaaggatactgccttctcaagatcataggcctcagactccaactggtgttatcccagggttccgtttgctgaagtaaaaacactgattttaaaatcccagtgggtacctttgtatggtggcacaagtggccgaatcaggctgaggaatctacggcttggttccagctgtgcagctgacttctgtgagactggggccagccacactactctctaggcctcaggggtcaaggagctcagaggagggccctgaggtctctttccggtgggtatgttcattcttcaactgttcttatgtcacagagggctccttgctggtgggcagtgggttgtaaatactttttaaaaaacactaagttccttatctcagatgctgttctactggagaagttctagattcccactgtccaatagaaacacgtgagccatatatgtaattaaaatgtttctagtagctgcattacaaaaaagaagcctgggcactgtggctcactcctgtaatctcagaactttgggaggctgaggcaggtggatcacttgagctcaggagcttgagaccagcctgggcaacatggtgaaacccagtttctacaaaaaatacaaaaaattagccgggttccatcacctgtggttccagctgaggtgggaggatcacttgagcctatgaggtcgaggctacagtgagcaaagatcacgccactgcactccagcctgggcgacagtgagaccctgtctcaccaaagaaaaaaaaaaggtgagattaatcttcactatatattttaacacaaatttctaaaagttatttcaacatataattaacatcattagatattttgtactcttttttgtattaagtattcaaaattgggtgtatattttgccacccacattttcaggacccagtagccacatgtggctagtggctgctgtgacgggcaacacagatatggaacacttgtatcctcacagattattctagtggacagtgcagatctagagctagaggacatgggtttgagtccccactcccccactgtgtaaccttggggaaggttctggacctctcagagcctcaatttatcataaaatgaggataatcataatgccgtggtcctcactggacttgtgcaactaccactgatgtgctactaattactttcatttagtgcattcatacttccacttgggtgttttccacatattattattattttttttttttaagtagcgacagggtctcgctctgtcactagggctagtctcgacctcctagcctcaagcaatcttcctgcctcagtctcccaaagtgccatgattacaggcatgagccactgcccctagcctgcacatattatttttaaaccatacagtggccttgcaaatgtgtgttttcgtccccattttacagatgtagaaactgagggtcaggccaggtgcagtggctcacgcctgtaatcccagcactttgggaggctgaggcaggcagataacctgagatcaggagttcttgaccagcctggccaacatggtaaaaccccatctctactaaaaatacaaaaattagccaggcatggtggcacgtccctgtaatcccagctactggggaggctgaggcaggagaatcgcttgaacctgggaggcagaggctgcagtgagctgagatcgcacgactgcactccagcctgggccacagagcgagactgtgtctaaaaaaaaaataaaaaaagaaaagaaaagaaactgagaatcagagaggagagtaacttgcccaaggtaatacagctagtataacagccgaatcaagatttgaactcagattcgtctgatttcaaagcccatgttttttccagtgccttgtttcaaatttagaaacctaagccatgctatgcaaatgttagctcattataggatatgggccagaaaggggtacacattcaaatgcccataggggcctacaatgacatagtgctatgcgatgaggagtgatggggacatagggaactggagacttgtgtaccagtctgattttttcttttttttttttttttgagacagagtcttgctctctcgcccaggctggagtgcagtggcgcgatcttggctcactgcaagctctgcctcccaggtttacttacaccattctcctgcctcagcctccggagtagctgggcctacaggtgcccgccaccacacccggctaattttttgtatttttagtagagatggggtttcaccgtgttagccaggatggtctcaatctcctgacctcatgatccacccaccttggcctcccaaaatgctgggattacaggtgtgagccaccatgcctggccaagtctgcttttttcgaaaccacgatcctagaccaggcacggtggcttgcacctgtaatcccagcactttgggaggccgaggcgggtggatcacctgaggtcaggagttcgagaccagcctggccaacatggcgaaatcctgtctctactaaaaatacaaaaattagctggacatggtggcaggcacctgtaattccagctacttgggaggctgaggtgggagaatctcttgaacctggggggctgctgtgagccgagatagttccattacacttcagcctgggtgacagagtaagactctgtctcaaaaaaaaaaaaaaaaaaaaaaacacaatcctggacaaatcaaacaagtctccaggaaaatctggtccatgggctaccaatttgagaccattggtctggtagatacactttcattaatatacttactccatcactctttctatattttagaagttactagtagaaatgtatgcaggagtcactggagaccttattaaaatgcagcttctgattcagtgagctggggtggggcctgagagtctgcatttctcccaggctccctggtgctgccagtggtgctgctctgagtaacaagggggtggggaatgatatggagccgtccattattatcccatctgacaaatgagtcacagagcccttaggtaattgaggtgggatcagtctgattctgtaagctgtgttttcagccacaacatttactgcaaacttggagtaggtaattatgaagttcctttaacttgctgtggaggttgaatgagctctagagtaaggggtccgcaaccccggtaccggtccatggcctgttcggaaccaggccacgcagcaggagttgaaaggtgggtgagctagcgaagcttcatctgtatgtacagccactccccactgctcacattaccacctgagctctgccttctgtcagatcagtggtggcattagatgctcgtaggaatgcaaaccctattgtgaactgcgcatgcaagggatctaggttgcatgctccttatgagaatctaatgcctgatgatctgtcactgtctcccgtcacgccttgatgggactgtctagttgctggaaaacaaactcagggctcccactgattctacattatggtgtgttgtacaattatttcattatatattacaaggtaataataatagaaataaaatccacagtaaatgcaatgtgcttgaatcatcctgaaaccacgtcccctccccagtggtccgtggaaaaattatcttccccaaaactggtccctggtgccaaaaaggttggggactgctgctctaggggttggggagggcagagggcttgggccatcaccaggcaggttttatagcagatggtgggggtgccctgcctatagctcctctaaataacgactctggtgcacactagccagctttgccagtggccgcccctctgtctttctgcctgaggactctagcttgtcactggtgcctcctttgccagcctctggcaggcctgaagggctggagaatgaacacatccttggagcaaccttcaaccaatgactgataaatacccccactcccacagcccgcatccctcacccctcgggtgggataactcagaggtgcgtgctccacactgactcccagggccgcccagcagggctgagcctcaaacaccctccccatctcccttcctcatgcccctaccagtgcttcctgggaccacttcccatatgaaccacttgcactcaaacccttgtcttagagtctgctattgggggaacccaaactaaaactggcctctgtacagcaggttgagaggcaatatagcatggtggtcagggacataggctttggagccagagtgcctgggctcaagccctggccccacagtttccttgggcaagtgactgagccattctgtgcctctatttcctcattgataaagtaggcgttgtcgtagcacacacctcatcgagtggtgtggagggttaaagaatatgacacagttaaagtgagtccccaataaatgctgttatttctaagagcatccaaatgtagaggaagtgtgcccctgaggactgagcacaccctgcttttagcctgtcctgcccccagctgaaggtgaaaccttggccgcctgccctcctgaagtcccgccactgctgctgggggttggccaactccgctaccgactgtctctgctctctaagaataggtttccctcacagatggcatctctctggatgctgctagagcatctggtgcttccaactgcacactccagggaggaaggcagtgtggtctgtgccggggagcagggctctgccttccagcagatctgagaggagtcccatttggctccttcctagctgccctccattctctaagacctgtaaaacagggatggccagagggctcttgttgcacagtaagtgctatgcttcctaaatgctagttcctgaaatagaatggtttaacctctacttactaaacacctgctacaatcctgttaattcttttgacatgtaagactaaaataaataaataaataaataaatata

SEQ ID NO: 164582 - DNA, 1853 bp, Homo sapiens
  Payload ID: 12424
  Gene Symbol: PECR
  Gene Name: peroxisomal trans-2-enoyl-CoA reductase
  Uniprot ID: Q9BY49
  ENST ID: ENST00000265322
  CDS Start-End: 76-987
tccgcccgcccgcctcgaatgtccctgagacccagaagggcctgcgctcagctgctctggcaccccgctgcagggatggcctcctgggctaagggcaggagctacctggcgcctggtttgctgcagggccaagtggccatcgtcaccggcggggccacgggcatcggaaaagccatcgtgaaggagctcctggagctggggagtaatgtggtcattgcatcccgtaagttggagagattgaagtctgcggcagatgaactgcaggccaacctacctcccacaaagcaggcacgagtcattcccatacaatgcaacatccggaatgaggaggaggtgaataatttggtcaaatctaccttagatacttttggtaagatcaatttcttggtgaacaatggaggaggccagtttctttcccctgctgaacacatcagttctaagggatggcacgctgtgcttgagaccaacctgacgggtaccttctacatgtgcaaagcagtttacagctcctggatgaaagagcatggaggatctatcgtcaatatcattgtccctactaaagctggatttccattagctgtgcattctggagctgcaagagcaggtgtttacaacctcaccaaatctttagctttggaatgggcctgcagtggaatacggatcaattgtgttgcccctggagttatttattcccagactgctgtggagaactatggttcctggggacaaagcttctttgaagggtcttttcagaaaatccccgctaaacgaattggtgttcctgaggaggtctcctctgtggtctgcttcctactgtctcctgcagcttccttcatcactggacagtcggtggatgtggatgggggccggagtctctatactcactcgtatgaggtaccagatcatgacaactggcccaagggagcaggggacctttctgttgtcaaaaagatgaaggagacctttaaggagaaagctaagctctgagctgaggaaacaaggtgtcctccatcccccagtgccttcacatcttgaggatatgcttctgtactttttaaaagcttatagttggtatggaaaacatttttcttatttttaagtgttattaattatatctatggaaaaactattcctgaaatatatacagtcttatgtcccaatcagagtcttttaacctatgatttaaaaatgtataagtaacagaaattaacatattttaatgactttactttttatttctaagaaaagtatttgaaaaatggaataattttaaatcaatgataattctagggatcatgaactcccagaagattttattatttaattgtaaaggtagaggccagacgcagtggctcacgcctgtaattccagcactttgggaggccgaggtaggcgggtcagttgaggtcaggagttcaagaccaggctggccaacatggtaaaaccctgtctctactgaaaaacaacaaaaacaaaaacacaaattagtcgggtgtggtggcacacacctgtagtcccaggtacttgggaggctgaggcaggaggatcgcttgaacccaggaagcagaggttgcagtgagctgagatcatgctactgcagtccagcctgggctacagagtgagactgcatctcaaaaaaaacccaaaaaacaaaaacaaacaacaacaacaaaattataaaggtagaaaataaacctaaattgtgtcgtaattaagattattaaaattagaattatacaatgacttatttttggtggcaaatactttaggagcaataatgccttatggtaattattgatgtatagtttcttttgtttatgaagtcaaatttgtataaattctcttaattcaaa

SEQ ID NO: 164583 - DNA, 1100 bp, Homo sapiens
  Payload ID: 12424
  Gene Symbol: PECR
  Gene Name: peroxisomal trans-2-enoyl-CoA reductase
  ENST ID: ENST00000442122
  CDS Start-End: 50-523
gagacccagaagggcctgcgctcagctgctctggcaccccgctgcagggatggcctcctgggctaagggcaggagctacctggcgcctggtttgctgcagggccaagtggccatcgtcaccggcggggccacgggcatcggaaaagccatcgtgaaggagctcctggagctggggagtaatgtggtcattgcatcccgtaagttggagagattgaagtctgcggcagatgaactgcaggccaacctacctcccacaaagcaggcacgagtcattcccatacaatgcaacatccggaatgaggaggaggtgaataatttggtcaaatctaccttagatacttttggtaagatcaatttcttggtgaacaatggaggaggccagtttctttcccctgctgaacacatcagttctaagggatggcacgctgtgcttgagaccaacctgacgggtaccttctacatgtgcaaagcaggcattctggagctgcaagagcaggtgtttacaacctcaccaaatctttagctttggaatgggcctgcagtggaatacggatcaattgtgttgcccctggagttatttattcccagactgctgtggagaactatggttcctggggacaaagcttctttgaagggtcttttcagaaaatccccgctaaacgaattggtgttcctgaggaggtctcctctgtggtctgcttcctactgtctcctgcagcttccttcatcactggacagtcggtggatgtggatgggggccggagtctctatactcactcgtatgaggtaccagatcatgacaactggcccaagggagcaggggacctttctgttgtcaaaaagatgaaggagacctttaaggagaaagctaagctctgagctgaggaaacaaggtgtcctccatcccccagtgccttcacatcttgaggatatgcttctgtactttttaaaagcttatagttgtgataacaatccatattcctcatttggagcaactctggtgagggatgatgagaagaatttatggagtatgccccatgatgtgtcccacacagaggcagacgacgacagaaccctgtacaatttgatagtcattcgta

SEQ ID NO: 164584 - DNA, 2108 bp, Homo sapiens
  Payload ID: 12425
  Gene Symbol: PXT1
  Gene Name: peroxisomal, testis specific 1
  Uniprot ID: Q8NFP0
  ENST ID: ENST00000454782
  CDS Start-End: 485-889
ggggccgcaccgtaaatgggtgtcgcctttcctccagtccactctgcacccaacctcagcgggcgcacttttctgagttgcgcataccctctcaattattaaaggttgcagacggaaaagttagtagttttcggaattgtagaatacgctcgtgcagcgccaggacggctaatgcttacccgaaaatgtggaaccctgatctccccatgcgtggagcgaggttggaggtagcgtagtaagaatactggagttgcttaaacgcatttgctcgaaagtcactaccctggatatacattctggccaaaagaaagggggaaaaactccacatttttctcaaatactgagtttcatgaagagaacctccaacaaatggtatataaaggaaaacaaagcaaacaaaagagggaaactttgcaatttattaactcaagcatgaaaatacagaaaataaagagggctcaacatacttggaaaaggaaaaaacatgaagaaaaaacatgatggcattgtttatgaaactaaagaagttctcaatccatctcccaaagtaacacattgttgcaaatcactgtggttaaaatacagttttcagaaggcatacatgacccaacttgtcagctcccagccagttccagccatgtcaaggaacccagatcataatctactttctcagcccaaggagcatagcattgttcagaagcatcaccaggaggaaataattcacaagttggccatgcagctgagacacattggggacaacattgatcataggatggttcgagaggatcttcaacaggatggcagagatgcactagatcattttgtcttctttttctttagaagagttcaggtgttgctgcattttttctggaacaaccatttgctgtaaaaggaaagtaaaggtcaagtggtcaagttctgttttctttttaccctctgagaaacatgaatcccactgggacagatgggaagaacacccttctccgtctccctctttttgtacccatcactgttggtctacacccagtttgttgaagaactgcgggttcacgagccatttgtctcttcggaggagctagctatgagatgtctgcgatcacatcacggtaaagcccaaggagtaattaggaccccaggaagccttgctgcccagaaaacaccagcgctgtggatggtcccagggctccttgtgaggaaaccttgaacatttccttccaggaatgaaagagaacctcgtcctcaaactaaaggccacagaaatgggcactacctcctggcccactccctgggcaccatgccctctggtgacctgttggctccactcttgtcactcatgtccagatctgcagtgccagcttctccttctcggtgacatgtcacctccctgccccaatcctggctccaaccctctctggaaaatcgaagtgaaacatttgtctctaatactcaaattcaacatatggctcatctcatctaccttcccatttccatgcctagaggccccactactaccactagcaccgttgggtgtttccttctcaggctctgattctacaacatttacgttcttttctcacctttgatcccctcactcctctgtgacccccttcaagtcttccttcaccactccagtgttttcccataccactcgaccctgctcgaaggtatctttccctgctctgtcatcctcttttaggcatgcctgcttaaaatcgggagtgcttagtccttggccaacagtcctgccttctagaagaatgtaagacctgaaagagttatgaatctatcactaggcaaaaacttctcttttcctattgctggatggttttgctattattggttggtgggccctttgcctgtggaatgtatttcactcattctctcctgcacgctgttaggcagttctttcacctgcatgcttcttcttttacctttttgtctacctcatagtccctctctcccctcctttaaaagaattataaatattaggaaagcttgttgttataaattaaaagtttacatatgtatcttgagttcttcataggggaagtgttattttaaaaaattctaaaaatgaaataaatattgttattttattgagcatgaaa

SEQ ID NO: 164585 - DNA, 619 bp, Homo sapiens
  Payload ID: 12425
  Gene Symbol: PXT1
  Gene Name: peroxisomal, testis specific 1
  ENST ID: ENST00000619547
  CDS Start-End: 21-176
aaataattcacaagttggccatgcagctgagacacattggggacaacattgatcataggatggttcgagaggatcttcaacaggatggcagagatgcactagatcattttgtcttctttttctttagaagagttcaggtgttgctgcattttttctggaacaaccatttgctgtaaaaggaatgaaagagaacctcgtcctcaaactaaaggccacagaaatgggcactacctcctggcccactccctgggcaccatgccctctggtgacctgttggctccactcttgtcactcatgtccagatctgcagtgccagcttctccttctcggtgacatgtcacctccctgccccaatcctggctccaaccctctctggaaaatcgaagtgaaacatttgtctctaatactcaaattcaacatatggctcatctcatctaccttcccatttccatgcctagaggccccactactaccactagcaccgttgggtgtttccttctcaggctctgattctacaacatttacgttcttttctcacctttgatcccctcactcctctgtgacccccttcaagtcttccttcaccactccagtgttttcccataccactcgaccctgc

SEQ ID NO: 164586 - DNA, 9965 bp, Homo sapiens
  Payload ID: 12426
  Gene Symbol: PPARA
  Gene Name: peroxisome proliferator-activated receptor alpha
  Uniprot ID: Q07869
  ENST ID: ENST00000262735
  CDS Start-End: 183-1589
gcgccgcctccttcggcgttcgccccacggaccggcaggcggcggaccgcggcccaggctgaagctcagggccctgtctgctctgtggactcaacagtttgtggcaagacaagctcagaactgagaagctgtcaccacagtagcttggagctcggcggcacaaccagcaccatctggtcgcgatggtggacacggaaagcccactctgccccctctccccactcgaggccggcgatctagagagcccgttatctgaagagttcctgcaagaaatgggaaacatccaagagatttcgcaatccatcggcgaggatagttctggaagctttggctttacggaataccagtatttaggaagctgtcctggctcagatggctcggtcatcacggacacgctttcaccagcttcgagcccctcctcggtgacttatcctgtggtccccggcagcgtggacgagtctcccagtggagcattgaacatcgaatgtagaatctgcggggacaaggcctcaggctatcattacggagtccacgcgtgtgaaggctgcaagggcttctttcggcgaacgattcgactcaagctggtgtatgacaagtgcgaccgcagctgcaagatccagaaaaagaacagaaacaaatgccagtattgtcgatttcacaagtgcctttctgtcgggatgtcacacaacgcgattcgttttggacgaatgccaagatctgagaaagcaaaactgaaagcagaaattcttacctgtgaacatgacatagaagattctgaaactgcagatctcaaatctctggccaagagaatctacgaggcctacttgaagaacttcaacatgaacaaggtcaaagcccgggtcatcctctcaggaaaggccagtaacaatccaccttttgtcatacatgatatggagacactgtgtatggctgagaagacgctggtggccaagctggtggccaatggcatccagaacaaggaggcggaggtccgcatctttcactgctgccagtgcacgtcagtggagaccgtcacggagctcacggaattcgccaaggccatcccaggcttcgcaaacttggacctgaacgatcaagtgacattgctaaaatacggagtttatgaggccatattcgccatgctgtcttctgtgatgaacaaagacgggatgctggtagcgtatggaaatgggtttataactcgtgaattcctaaaaagcctaaggaaaccgttctgtgatatcatggaacccaagtttgattttgccatgaagttcaatgcactggaactggatgacagtgatatctccctttttgtggctgctatcatttgctgtggagatcgtcctggccttctaaacgtaggacacattgaaaaaatgcaggagggtattgtacatgtgctcagactccacctgcagagcaaccacccggacgatatctttctcttcccaaaacttcttcaaaaaatggcagacctccggcagctggtgacggagcatgcgcagctggtgcagatcatcaagaagacggagtcggatgctgcgctgcacccgctactgcaggagatctacagggacatgtactgagttccttcagatcagccacaccttttccaggagttctgaagctgacagcactacaaaggagacgggggagcagcacgattttgcacaaatatccaccactttaaccttagagcttggacagtctgagctgtaggtaaccggcatattattccatatctttgttttaaccagtacttctaagagcatagaactcaaatgctgggggtaggtggctaatctcaggactgggaagattacggcgaattatgctcaatggtctgattttaactcacccgatgttaatcaatgcacattgctttagatcacattcgtgatttaccatttaattaactggtaacctcaaaattcgtggcctgtcttcccattcaccccgcttttgactattgtgctcctttataattctgaaaactaatcagcactttttaacaatgtttataatcctataagtctagatgtatccaaaggtgaagtatgtaaaaagcagcaaaatatttatttcaaagacttcacttctgtttcctgaatctaaagaaagacaacatgctgctttttaatcataggatggagaattttaaagaactgtttgggccaggcacagtcgctcatacttgtaatcccagcactttgggaggccgaggcgggtggatcacaaggtcagcagatcgagaccatcctggccaacatggtgaaaccctgtctctactaaaaatacaaaaattagccgggtgtggtggcacatgcctgtaatcccagctactcgggaagctgaggcaggagaattgcttgaaccagggagttggaggttgcagtgagctaagactgcaccactgcactccagcctggtgacagaacgagactctgtcttaaaaacaaacaaacaaaaaaaaaatctgttagataagctatcaaaatgcagctgttgttttgtttttggctcactgttttcgtggttgtaactaatatgtggaaaggcccatttccaggtttgcgtagaagagcccagaaaacagagtctcaagacccccgctctggactgtcataagctagcacccgtggtaagcgggacgagacaagctcccgaagcccgccagcttcctgctccactcagctccgtccagtcaacctgaacccacccagtccagctgtctgtgggaatggtggtgttcttagggacagactgacaccttacttgtcagtgttcctccgggccccatttggcagctcccgtatcttttgttatgttgcttttaaagatatgatgttttattgttttaactcttggtgacagtagatgctctctggagcgcagacgaggcacatgtgtcttcatagcctgggctgggtgggagccagtcaccctgcggatcgagagagggggtagagtcttcttcaaatggcagttttacttcaaatggcagatttcacaagagttggttattttttacaatggtttaggttgttaagtctcctttgtatgtaaggtagttttttcaacatctaaaatttttgttttagccttcaaaaccaacttaccaacctcagtccagctgggaaggcagcgttgattatggtagtttgtcaagaatatatggacctggaaacactttctctctctgtccacctggtagataaattgtcctgttgagaatttttagatctggactggaactgccaggaccaccgcctccagggagtcgctgggcacctggaggtatcgtcgatgcctctcccccatctttagaaaatttggctcttctgaggtcattattattttaagaatgattaggattgataagggtcccatgaccagcattatgaaaatgcgagagtgggaaggacacagtgtgagacttccactagaaaaaagtgaaagttagggttaggacatccttttttaaaaattacaaatttagtccgttttggtttttgtaatcaggctaggcacagtggctcacacatggaatcccagcactttgggaggccgaggtgggaggatcacttgagcccaggagttcgagaccagcctaggcaacatagcaagaccctgtctgtacacaaaatttaaaaattagttcatcggggtggcacacatcagtagtcccagctactctgcaggctgaggtgggaggattgcttgaacccaggaggtcgaggctgcagtgagctgtgatctcaccactgcattccagcctgggtgacagagttagattccaccctctcccaccccggcaaaaaaaaaaaaaaaagatgcaatcaaaggggctgttggccagcaatggcagcagcagcggcgggcagtctgcccaagtgtcttaggaaccaaaagcaaataaaagtgtttccatatatgccaccagccaagtggccatcctaattcagaaagaagctagcctttgagtgtctgtcatggtgcatccgtttcagtattatttcctaaaatgagaagcccctgtgtcaacaagatccaggggctggagcccaatgccaagcctgtgttgtccccagcgaccctgcagctgctcgctctgatgtaccctgtgccattcaaggagatgtggtccaggaaagtgagcctcatggttttcagagaagtcattgttctgtttacattttcataaaacctgtttaaaatagctccccgtctcaggctttcagcagtaacagtgagctgactggcaagttcgatgttagctcccgggacactcagcagcgatggtgagcattttggtttccttaaggcccagcaagacttccagggacatctctggtgaagccagaatggagacacccgtgacctcaggctgaaagtcactcgacattggtctcttgtgttgatagggaaggaaatcaggcattcctatttctttaaataacaaaaccactaattgccactcaatgctggaatattttgggtcacctaatcatagatttctcagggcatcaatactcaaatataggctgattatgccccagttcaaatgggaactattaacagagtgcatttcttgcttgctgggtttcaacagacatcagccaaaagaacaaaagagatgtcaggacagattccaggagtgtcggagcacatgtgtggcacccgctccctctggcagcgaatgtaggaagtcgccaaatttacccactcttcaacaagtcattgtttaaacacggtttttcattttctcaacttttaatagcaaaaagtgccaaagtcctcagagacctaacagccttggtctaccgtgctgaccagggtgaaggcacggcgagggactcctcccagacgtgcctcttgtgtgccagctggctgtggctcgggagcagacgcaggcctctccattgtccaggggagcctggcggcgcatccctcctctcccacctcctggcacttccagctgggtgtcccacatgttggattccgtccccaccacacttccagagaccggagaactgtgcagggcctaaggccgtttggatgaattgtcaaaacaagatgcttccagttacagcggcaggagcgggactgggagcacgggctgacggctgctggtgcctttcttcccacctcgcttgcctgtttccgcttgacccttcctccagctccgatgagaagagtataaagcatcttcctaacgggtgtgtttgctatacgaacataatggacgtgaagtggggcagaaacccagaactcagcattcaaggatgcccaggagagctgtccctgttttaaagagctgtgttttgttttgtttcgcatttagagagcagacaaggcacccttctgctgcgctgatacgtttcttacactgggccattttagacccccagggaaacagccttcctggagcgttgtctggaggttccagggacagggcagcctcccagagccgagcaagagctcaaggtacaaatgagagatttgctataccgtgagaagtcaacaacttagccaccacttccccgcaatggaccatgtaacaaatacctcagcaggccctgcaaaaggccatgctagagctgaggcgcacagcctgtggcctctgtagttagggcaggtgggatggagactccttgagtgcacacacctgagcctgcccacacacaggggagcagcatctcgtatgacgtctggaaggaacttcggttgtgtaaagggagccttgaagatacgtgcaaaaggtgctaccccaatttggtgaaactgacattgggcacgtcttgggcttaggagaagcggccgatggtcccggcctgcagtgacaaacccccctccccgcaccgcccccagcaccccctctcctcttcacctcttcctgctggccacgaggaagccacttcctcagagagaccctaccagatgcggatggaaacagatgcaccaaagcaagccctgatgaaaccgcgacttcctaaggtctgtctcctctgaacttgcacctgggcctctctgtgtttggttccaagcacttcccacctcaaactcccattttcaaaccactgtatctctgcgcacatctgctacttaccagccgcatacatgatggagggttttttggtcctgatccagtggccacacctgtctttgaaatgtctcactgaactccagttttaaaatagattcattgcttcaacacagcaagcccaatgcacccagctaagactggcttgaccgacagcctggcctttggtggggggcttcctggggcctggggaaagctggccaccttcaacagctggtacctcttcaacagtgtggcctttcaaaatgcagatgccaccaggagaacatgcccacagctcaccacctatggatgccatggctctgggcagctttcaaagcaggttcctgtggtctcctcagctgtttgagggggtaacagcaaatcagcctccattttaaaatgaaaacaccagcctccagatgtagggcctgctgggtgttgctagccgctggtccccaggcacggtgcactttctccacctcctgcagcctccctgttgtttctagactcttgcacctggtgagtgcaaggataggtgacccaggggcctgcagccttgtcctcagctcccatctcctggactgccagcctcaccctctgcagttagcatggttggcctgatgcagggatcccgagggattactttttagaccttctttcacattcagaaaagtagtatagattcaggagaggcaagaaaattatgctgtccatagaagtcacccatgaagactgatgccaccacctgaaggctcatgattgttaaaaatgtccacgggaacctctcgtccacaggaggtttgtctcaacacttcccatttttacggcattggcattgccaagcatggggaagtatctgctcttctcatgttaaaagtggcccagcttttcttaactcagtccaagctgacttgtttagctgcactggaatttcttaccaaccaaatatttgcatcgagcaaagggggctgtgtgcacctccctaatggcagcgatgatggctgctgtcattcaagcccatcttcagacgtcacagtctggaagtgaaatgtccacaaacatctgtggcagaaaaggctatacggaccacccagttgtgctgcagctttacagagcaaggaagggttgtggcaaataaatgattaacctgcctcgactgtgctgagggcaacaaaggccatctcaccaaaggattattcgatgccattaaatcatcccgtgaccttcctgcttccgagtccatggcctttgcccagggcatgtactcccctgagaggccttctgcctagaaagatctatgactgggttccaaagttgaggcctaggtttttgctgggatttagatattttcaggcaccattttgacagcattcaggaaaacggttattgaccccatagactagggtaagaataaaggcaataaatttggtctgactcagaatataggagatccatatatttctctggaaaccacagtgtacactaaaatgtgaaattgaaggttttgttaaaaagaaaaagataatgagcttcatgctttgtttaattacataatgatttccattacgctatttctgtgaaatgcagcaggttcttaaacgttatttcagtggcatgggctggaagcttatcacaaaaagccatgtgtgtggccttatcagaacagaaagagacaggctggtgcccaaggctgctgcctgctccaccttttgccagctctggacatctgaggacgtcccggcagatctggaatggggccctcaactgaccatttgcttctcagaatttcagtttgagacatgagaggtataatcagttacttttctccccccagagaaacccttttgtgaggggagaggagctatggtatgtggttcagctgaaacacatacaactgcatccttttggagtcctttgccaacaaaaacagaccaacagaccagatggtgtccatgttcaatatcatgtcttgatggacgcagctgatgacctcaaatacttgagtggtctcatggctgttagatggattatttgaaaaaaaaaaaaaaaaaagagagaaaaaataattgatttttacatcagagatagcaaactaagacctggggaggggggtcagcttttattttattttattttttttaagtttgctagttgggtcaaatgtgaggaggagggagtctacctgccacctcttctcttgcccctcttctgcccacacatccagcatccaaaatccattcatttaatgaattgataaagtgccgtgcaaactggtgcacaaacaggcccccagtccacgcagcctggctcctaggaaaagtggtgaccgggcgtgggggggcatgccgcagccctgggacacagtcgggcaccttccccggacccccaggccttggctgtgcctcaagtcagagagggtcagccttcaggccccggagacgagtgactggccgatcatttcacaataaaatcactcacttttggcaacttcactttttttaaggcacagtcagttccttttctcatgtacctcacaaaagatgaagaccatgtagtactctttttggtaaagttacagtgttcatgttaaatatcacttttttctacattgtgtggtaaaaagaactacgttaatagctatatcttaaatactgtgatttgactttttgaaaaatatcctaatacaaatattttactaacttacaatcactcatttaataagaaacatttggattcttttgaaatcagtgttaattgactcatattcttaaaagcctggctcttgaccctattggaaacacaaaggaagctgaaatcaaacatctaaaatacactgcgtacacgtgtgcgtgcacacacacacacacacacacacacacacagctcttcatttctcctgagccatgcagaatttactttcaatgtggaaatctgttccctttaccacactgtatatgcacagagcacaagagaggctatctctagtcacttccaccagcgaggccttagactccgtattagaggccaccgatttcatacaacagtgtttcgctaaagacccttcactattcttgtttagtaaatagctgtctgctcttcagggaactgttacctatgggttattaccaaagaacgctggcaattggaaatgtcctgatggaaattctttgcacgtgccggttctctggcatcctccaggtggcccaacccaaagcagaaagcagaaaccacagaccccgtgagtctccccataccttgtttccaataacttggcaaaacttcttggtgcatattggttacaccctctgggattcataatgccattaggctaaaaccctaagagagagggttgacagaaacacacgcgagaatgaggcagatcccagagcaaggactgggcccagactctccacatgtgctctactagtgagtgccttatactctcagtattttggggcttacagcttcttatttgtgctaaaaaggtgcagttccaaagtaggaactgccacacaggccccagcatcctctctccaacttcatacctctctcctggtggggggagcgggcatccaggacctccggaatcaaggatgtgcagagaagagcgaaagtaatttttctagtcacatgaactgattggttccaggcaattagaaaatggctataaaataaccttaattttaaaaaaaaatcttgggtcttcgttttcctattaggagactgaactgaccacatgtattgatttatatcctgaatatatgggaacttctgtgtttgggatgtcctactgtaagactgatgaatgtacagagttaatttcagggtacagttttgccttaatggttttaaaaaataaactattttttaaaatttt

SEQ ID NO: 164587 - DNA, 1558 bp, Homo sapiens
  Payload ID: 12426
  Gene Symbol: PPARA
  Gene Name: peroxisome proliferator-activated receptor alpha
  Uniprot ID: Q07869
  ENST ID: ENST00000402126
  CDS Start-End: 129-1535
cacagttctggaggctgggaagttcaagatcaaagtgccagcagattcagtgtcatgtgaggacgtgcttcctgcttcatagataagagcttggagctcggcggcacaaccagcaccatctggtcgcgatggtggacacggaaagcccactctgccccctctccccactcgaggccggcgatctagagagcccgttatctgaagagttcctgcaagaaatgggaaacatccaagagatttcgcaatccatcggcgaggatagttctggaagctttggctttacggaataccagtatttaggaagctgtcctggctcagatggctcggtcatcacggacacgctttcaccagcttcgagcccctcctcggtgacttatcctgtggtccccggcagcgtggacgagtctcccagtggagcattgaacatcgaatgtagaatctgcggggacaaggcctcaggctatcattacggagtccacgcgtgtgaaggctgcaagggcttctttcggcgaacgattcgactcaagctggtgtatgacaagtgcgaccgcagctgcaagatccagaaaaagaacagaaacaaatgccagtattgtcgatttcacaagtgcctttctgtcgggatgtcacacaacgcgattcgttttggacgaatgccaagatctgagaaagcaaaactgaaagcagaaattcttacctgtgaacatgacatagaagattctgaaactgcagatctcaaatctctggccaagagaatctacgaggcctacttgaagaacttcaacatgaacaaggtcaaagcccgggtcatcctctcaggaaaggccagtaacaatccaccttttgtcatacatgatatggagacactgtgtatggctgagaagacgctggtggccaagctggtggccaatggcatccagaacaaggaggcggaggtccgcatctttcactgctgccagtgcacgtcagtggagaccgtcacggagctcacggaattcgccaaggccatcccaggcttcgcaaacttggacctgaacgatcaagtgacattgctaaaatacggagtttatgaggccatattcgccatgctgtcttctgtgatgaacaaagacgggatgctggtagcgtatggaaatgggtttataactcgtgaattcctaaaaagcctaaggaaaccgttctgtgatatcatggaacccaagtttgattttgccatgaagttcaatgcactggaactggatgacagtgatatctccctttttgtggctgctatcatttgctgtggagatcgtcctggccttctaaacgtaggacacattgaaaaaatgcaggagggtattgtacatgtgctcagactccacctgcagagcaaccacccggacgatatctttctcttcccaaaacttcttcaaaaaatggcagacctccggcagctggtgacggagcatgcgcagctggtgcagatcatcaagaagacggagtcggatgctgcgctgcacccgctactgcaggagatctacagggacatgtactgagttccttcagatcagccacacct

SEQ ID NO: 164588 - DNA, 9995 bp, Homo sapiens
  Payload ID: 12426
  Gene Symbol: PPARA
  Gene Name: peroxisome proliferator-activated receptor alpha
  Uniprot ID: Q07869
  ENST ID: ENST00000407236
  CDS Start-End: 214-1620
ccaggctgaagctcagggccctgtctgctctgtggactcaacagtttgtggcaagacaagctcagaactgagaagctgtcaccacagttctggaggctgggaagttcaagatcaaagtgccagcagattcagtgtcatgtgaggacgtgcttcctgcttcatagataagagtagcttggagctcggcggcacaaccagcaccatctggtcgcgatggtggacacggaaagcccactctgccccctctccccactcgaggccggcgatctagagagcccgttatctgaagagttcctgcaagaaatgggaaacatccaagagatttcgcaatccatcggcgaggatagttctggaagctttggctttacggaataccagtatttaggaagctgtcctggctcagatggctcggtcatcacggacacgctttcaccagcttcgagcccctcctcggtgacttatcctgtggtccccggcagcgtggacgagtctcccagtggagcattgaacatcgaatgtagaatctgcggggacaaggcctcaggctatcattacggagtccacgcgtgtgaaggctgcaagggcttctttcggcgaacgattcgactcaagctggtgtatgacaagtgcgaccgcagctgcaagatccagaaaaagaacagaaacaaatgccagtattgtcgatttcacaagtgcctttctgtcgggatgtcacacaacgcgattcgttttggacgaatgccaagatctgagaaagcaaaactgaaagcagaaattcttacctgtgaacatgacatagaagattctgaaactgcagatctcaaatctctggccaagagaatctacgaggcctacttgaagaacttcaacatgaacaaggtcaaagcccgggtcatcctctcaggaaaggccagtaacaatccaccttttgtcatacatgatatggagacactgtgtatggctgagaagacgctggtggccaagctggtggccaatggcatccagaacaaggaggcggaggtccgcatctttcactgctgccagtgcacgtcagtggagaccgtcacggagctcacggaattcgccaaggccatcccaggcttcgcaaacttggacctgaacgatcaagtgacattgctaaaatacggagtttatgaggccatattcgccatgctgtcttctgtgatgaacaaagacgggatgctggtagcgtatggaaatgggtttataactcgtgaattcctaaaaagcctaaggaaaccgttctgtgatatcatggaacccaagtttgattttgccatgaagttcaatgcactggaactggatgacagtgatatctccctttttgtggctgctatcatttgctgtggagatcgtcctggccttctaaacgtaggacacattgaaaaaatgcaggagggtattgtacatgtgctcagactccacctgcagagcaaccacccggacgatatctttctcttcccaaaacttcttcaaaaaatggcagacctccggcagctggtgacggagcatgcgcagctggtgcagatcatcaagaagacggagtcggatgctgcgctgcacccgctactgcaggagatctacagggacatgtactgagttccttcagatcagccacaccttttccaggagttctgaagctgacagcactacaaaggagacgggggagcagcacgattttgcacaaatatccaccactttaaccttagagcttggacagtctgagctgtaggtaaccggcatattattccatatctttgttttaaccagtacttctaagagcatagaactcaaatgctgggggtaggtggctaatctcaggactgggaagattacggcgaattatgctcaatggtctgattttaactcacccgatgttaatcaatgcacattgctttagatcacattcgtgatttaccatttaattaactggtaacctcaaaattcgtggcctgtcttcccattcaccccgcttttgactattgtgctcctttataattctgaaaactaatcagcactttttaacaatgtttataatcctataagtctagatgtatccaaaggtgaagtatgtaaaaagcagcaaaatatttatttcaaagacttcacttctgtttcctgaatctaaagaaagacaacatgctgctttttaatcataggatggagaattttaaagaactgtttgggccaggcacagtcgctcatacttgtaatcccagcactttgggaggccgaggcgggtggatcacaaggtcagcagatcgagaccatcctggccaacatggtgaaaccctgtctctactaaaaatacaaaaattagccgggtgtggtggcacatgcctgtaatcccagctactcgggaagctgaggcaggagaattgcttgaaccagggagttggaggttgcagtgagctaagactgcaccactgcactccagcctggtgacagaacgagactctgtcttaaaaacaaacaaacaaaaaaaaaatctgttagataagctatcaaaatgcagctgttgttttgtttttggctcactgttttcgtggttgtaactaatatgtggaaaggcccatttccaggtttgcgtagaagagcccagaaaacagagtctcaagacccccgctctggactgtcataagctagcacccgtggtaagcgggacgagacaagctcccgaagcccgccagcttcctgctccactcagctccgtccagtcaacctgaacccacccagtccagctgtctgtgggaatggtggtgttcttagggacagactgacaccttacttgtcagtgttcctccgggccccatttggcagctcccgtatcttttgttatgttgcttttaaagatatgatgttttattgttttaactcttggtgacagtagatgctctctggagcgcagacgaggcacatgtgtcttcatagcctgggctgggtgggagccagtcaccctgcggatcgagagagggggtagagtcttcttcaaatggcagttttacttcaaatggcagatttcacaagagttggttattttttacaatggtttaggttgttaagtctcctttgtatgtaaggtagttttttcaacatctaaaatttttgttttagccttcaaaaccaacttaccaacctcagtccagctgggaaggcagcgttgattatggtagtttgtcaagaatatatggacctggaaacactttctctctctgtccacctggtagataaattgtcctgttgagaatttttagatctggactggaactgccaggaccaccgcctccagggagtcgctgggcacctggaggtatcgtcgatgcctctcccccatctttagaaaatttggctcttctgaggtcattattattttaagaatgattaggattgataagggtcccatgaccagcattatgaaaatgcgagagtgggaaggacacagtgtgagacttccactagaaaaaagtgaaagttagggttaggacatccttttttaaaaattacaaatttagtccgttttggtttttgtaatcaggctaggcacagtggctcacacatggaatcccagcactttgggaggccgaggtgggaggatcacttgagcccaggagttcgagaccagcctaggcaacatagcaagaccctgtctgtacacaaaatttaaaaattagttcatcggggtggcacacatcagtagtcccagctactctgcaggctgaggtgggaggattgcttgaacccaggaggtcgaggctgcagtgagctgtgatctcaccactgcattccagcctgggtgacagagttagattccaccctctcccaccccggcaaaaaaaaaaaaaaaagatgcaatcaaaggggctgttggccagcaatggcagcagcagcggcgggcagtctgcccaagtgtcttaggaaccaaaagcaaataaaagtgtttccatatatgccaccagccaagtggccatcctaattcagaaagaagctagcctttgagtgtctgtcatggtgcatccgtttcagtattatttcctaaaatgagaagcccctgtgtcaacaagatccaggggctggagcccaatgccaagcctgtgttgtccccagcgaccctgcagctgctcgctctgatgtaccctgtgccattcaaggagatgtggtccaggaaagtgagcctcatggttttcagagaagtcattgttctgtttacattttcataaaacctgtttaaaatagctccccgtctcaggctttcagcagtaacagtgagctgactggcaagttcgatgttagctcccgggacactcagcagcgatggtgagcattttggtttccttaaggcccagcaagacttccagggacatctctggtgaagccagaatggagacacccgtgacctcaggctgaaagtcactcgacattggtctcttgtgttgatagggaaggaaatcaggcattcctatttctttaaataacaaaaccactaattgccactcaatgctggaatattttgggtcacctaatcatagatttctcagggcatcaatactcaaatataggctgattatgccccagttcaaatgggaactattaacagagtgcatttcttgcttgctgggtttcaacagacatcagccaaaagaacaaaagagatgtcaggacagattccaggagtgtcggagcacatgtgtggcacccgctccctctggcagcgaatgtaggaagtcgccaaatttacccactcttcaacaagtcattgtttaaacacggtttttcattttctcaacttttaatagcaaaaagtgccaaagtcctcagagacctaacagccttggtctaccgtgctgaccagggtgaaggcacggcgagggactcctcccagacgtgcctcttgtgtgccagctggctgtggctcgggagcagacgcaggcctctccattgtccaggggagcctggcggcgcatccctcctctcccacctcctggcacttccagctgggtgtcccacatgttggattccgtccccaccacacttccagagaccggagaactgtgcagggcctaaggccgtttggatgaattgtcaaaacaagatgcttccagttacagcggcaggagcgggactgggagcacgggctgacggctgctggtgcctttcttcccacctcgcttgcctgtttccgcttgacccttcctccagctccgatgagaagagtataaagcatcttcctaacgggtgtgtttgctatacgaacataatggacgtgaagtggggcagaaacccagaactcagcattcaaggatgcccaggagagctgtccctgttttaaagagctgtgttttgttttgtttcgcatttagagagcagacaaggcacccttctgctgcgctgatacgtttcttacactgggccattttagacccccagggaaacagccttcctggagcgttgtctggaggttccagggacagggcagcctcccagagccgagcaagagctcaaggtacaaatgagagatttgctataccgtgagaagtcaacaacttagccaccacttccccgcaatggaccatgtaacaaatacctcagcaggccctgcaaaaggccatgctagagctgaggcgcacagcctgtggcctctgtagttagggcaggtgggatggagactccttgagtgcacacacctgagcctgcccacacacaggggagcagcatctcgtatgacgtctggaaggaacttcggttgtgtaaagggagccttgaagatacgtgcaaaaggtgctaccccaatttggtgaaactgacattgggcacgtcttgggcttaggagaagcggccgatggtcccggcctgcagtgacaaacccccctccccgcaccgcccccagcaccccctctcctcttcacctcttcctgctggccacgaggaagccacttcctcagagagaccctaccagatgcggatggaaacagatgcaccaaagcaagccctgatgaaaccgcgacttcctaaggtctgtctcctctgaacttgcacctgggcctctctgtgtttggttccaagcacttcccacctcaaactcccattttcaaaccactgtatctctgcgcacatctgctacttaccagccgcatacatgatggagggttttttggtcctgatccagtggccacacctgtctttgaaatgtctcactgaactccagttttaaaatagattcattgcttcaacacagcaagcccaatgcacccagctaagactggcttgaccgacagcctggcctttggtggggggcttcctggggcctggggaaagctggccaccttcaacagctggtacctcttcaacagtgtggcctttcaaaatgcagatgccaccaggagaacatgcccacagctcaccacctatggatgccatggctctgggcagctttcaaagcaggttcctgtggtctcctcagctgtttgagggggtaacagcaaatcagcctccattttaaaatgaaaacaccagcctccagatgtagggcctgctgggtgttgctagccgctggtccccaggcacggtgcactttctccacctcctgcagcctccctgttgtttctagactcttgcacctggtgagtgcaaggataggtgacccaggggcctgcagccttgtcctcagctcccatctcctggactgccagcctcaccctctgcagttagcatggttggcctgatgcagggatcccgagggattactttttagaccttctttcacattcagaaaagtagtatagattcaggagaggcaagaaaattatgctgtccatagaagtcacccatgaagactgatgccaccacctgaaggctcatgattgttaaaaatgtccacgggaacctctcgtccacaggaggtttgtctcaacacttcccatttttacggcattggcattgccaagcatggggaagtatctgctcttctcatgttaaaagtggcccagcttttcttaactcagtccaagctgacttgtttagctgcactggaatttcttaccaaccaaatatttgcatcgagcaaagggggctgtgtgcacctccctaatggcagcgatgatggctgctgtcattcaagcccatcttcagacgtcacagtctggaagtgaaatgtccacaaacatctgtggcagaaaaggctatacggaccacccagttgtgctgcagctttacagagcaaggaagggttgtggcaaataaatgattaacctgcctcgactgtgctgagggcaacaaaggccatctcaccaaaggattattcgatgccattaaatcatcccgtgaccttcctgcttccgagtccatggcctttgcccagggcatgtactcccctgagaggccttctgcctagaaagatctatgactgggttccaaagttgaggcctaggtttttgctgggatttagatattttcaggcaccattttgacagcattcaggaaaacggttattgaccccatagactagggtaagaataaaggcaataaatttggtctgactcagaatataggagatccatatatttctctggaaaccacagtgtacactaaaatgtgaaattgaaggttttgttaaaaagaaaaagataatgagcttcatgctttgtttaattacataatgatttccattacgctatttctgtgaaatgcagcaggttcttaaacgttatttcagtggcatgggctggaagcttatcacaaaaagccatgtgtgtggccttatcagaacagaaagagacaggctggtgcccaaggctgctgcctgctccaccttttgccagctctggacatctgaggacgtcccggcagatctggaatggggccctcaactgaccatttgcttctcagaatttcagtttgagacatgagaggtataatcagttacttttctccccccagagaaacccttttgtgaggggagaggagctatggtatgtggttcagctgaaacacatacaactgcatccttttggagtcctttgccaacaaaaacagaccaacagaccagatggtgtccatgttcaatatcatgtcttgatggacgcagctgatgacctcaaatacttgagtggtctcatggctgttagatggattatttgaaaaaaaaaaaaaaaaaagagagaaaaaataattgatttttacatcagagatagcaaactaagacctggggaggggggtcagcttttattttattttattttttttaagtttgctagttgggtcaaatgtgaggaggagggagtctacctgccacctcttctcttgcccctcttctgcccacacatccagcatccaaaatccattcatttaatgaattgataaagtgccgtgcaaactggtgcacaaacaggcccccagtccacgcagcctggctcctaggaaaagtggtgaccgggcgtgggggggcatgccgcagccctgggacacagtcgggcaccttccccggacccccaggccttggctgtgcctcaagtcagagagggtcagccttcaggccccggagacgagtgactggccgatcatttcacaataaaatcactcacttttggcaacttcactttttttaaggcacagtcagttccttttctcatgtacctcacaaaagatgaagaccatgtagtactctttttggtaaagttacagtgttcatgttaaatatcacttttttctacattgtgtggtaaaaagaactacgttaatagctatatcttaaatactgtgatttgactttttgaaaaatatcctaatacaaatattttactaacttacaatcactcatttaataagaaacatttggattcttttgaaatcagtgttaattgactcatattcttaaaagcctggctcttgaccctattggaaacacaaaggaagctgaaatcaaacatctaaaatacactgcgtacacgtgtgcgtgcacacacacacacacacacacacacacacagctcttcatttctcctgagccatgcagaatttactttcaatgtggaaatctgttccctttaccacactgtatatgcacagagcacaagagaggctatctctagtcacttccaccagcgaggccttagactccgtattagaggccaccgatttcatacaacagtgtttcgctaaagacccttcactattcttgtttagtaaatagctgtctgctcttcagggaactgttacctatgggttattaccaaagaacgctggcaattggaaatgtcctgatggaaattctttgcacgtgccggttctctggcatcctccaggtggcccaacccaaagcagaaagcagaaaccacagaccccgtgagtctccccataccttgtttccaataacttggcaaaacttcttggtgcatattggttacaccctctgggattcataatgccattaggctaaaaccctaagagagagggttgacagaaacacacgcgagaatgaggcagatcccagagcaaggactgggcccagactctccacatgtgctctactagtgagtgccttatactctcagtattttggggcttacagcttcttatttgtgctaaaaaggtgcagttccaaagtaggaactgccacacaggccccagcatcctctctccaacttcatacctctctcctggtggggggagcgggcatccaggacctccggaatcaaggatgtgcagagaagagcgaaagtaatttttctagtcacatgaactgattggttccaggcaattagaaaatggctataaaataaccttaattttaaaaaaaaatcttgggtcttcgttttcctattaggagactgaactgaccacatgtattgatttatatcctgaatatatgggaacttctgtgtttgggatgtcctactgtaagactgatgaatgtacagagttaatttcagggtacagttttgccttaatggttttaaaaaataaactattttttaaaattt

SEQ ID NO: 164589 - DNA, 368 bp, Homo sapiens
  Payload ID: 12426
  Gene Symbol: PPARA
  Gene Name: peroxisome proliferator-activated receptor alpha
  ENST ID: ENST00000440343
  CDS Start-End: 342-368
gggccgtggacgcggcggccccgcggcgggggcagcgggcggcgggggcggaggcggccgctagcgccctgcccggcgccgcctccttcggcgttcgccccacggaccggcaggcggcggaccgcggcccaggctgaagctcagggccctgtctgctctgtggactcaacagtttgtggcaagacaagctcagaactgagaagctgtcaccacagttctggaggctgggaagttcaagatcaaagtgccagcagattcagtgtcatgtgaggacgtgcttcctgcttcatagataagagtagcttggagctcggcggcacaaccagcaccatctggtcgcgatggtggacacggaaagcccactctgc

SEQ ID NO: 164590 - DNA, 531 bp, Homo sapiens
  Payload ID: 12426
  Gene Symbol: PPARA
  Gene Name: peroxisome proliferator-activated receptor alpha
  ENST ID: ENST00000415785
  CDS Start-End: 324-531
gcagcgggcggcgggggcggaggcggccgctagcgccctgcccggcgccgcctccttcggcgttcgccccacggaccggcaggcggcggaccgcggcccaggctgaagctcagggccctgtctgctctgtggactcaacagtttgtggcaagacaagctcagaactgagaagctgtcaccacagtgccacacccccctgtcccagtgcactggggctgtggatcccttcaaagctgagattgcctgtctgtggtctccagcgttaagcacagtcattagctcagcttggagctcggcggcacaaccagcaccatctggtcgcgatggtggacacggaaagcccactctgccccctctccccactcgaggccggcgatctagagagcccgttatctgaagagttcctgcaagaaatgggaaacatccaagagatttcgcaatccatcggcgaggatagttctggaagctttggctttacggaataccagtatttaggaagctgtcctggctcagatggctcggtcatcacgg

SEQ ID NO: 164591 - DNA, 572 bp, Homo sapiens
  Payload ID: 12426
  Gene Symbol: PPARA
  Gene Name: peroxisome proliferator-activated receptor alpha
  ENST ID: ENST00000420804
  CDS Start-End: 173-572
cttcggcgttcgccccacggaccggcaggcggcggaccgcggcccaggctgaagctcagggccctgtctgctctgtggactcaacagtttgtggcaagacaagctcagaactgagaagctgtcaccacagtagcttggagctcggcggcacaaccagcaccatctggtcgcgatggtggacacggaaagcccactctgccccctctccccactcgaggccggcgatctagagagcccgttatctgaagagttcctgcaagaaatgggaaacatccaagagatttcgcaatccatcggcgaggatagttctggaagctttggctttacggaataccagtatttaggaagctgtcctggctcagatggctcggtcatcacggacacgctttcaccagcttcgagcccctcctcggtgacttatcctgtggtccccggcagcgtggacgagtctcccagtggagcattgaacatcgaatgtagaatctgcggggacaaggcctcaggctatcattacggagtccacgcgtgtgaaggctgcaaggtagaggggagctggaacagggcctggtggc

SEQ ID NO: 164592 - DNA, 3774 bp, Homo sapiens
  Payload ID: 12427
  Gene Symbol: PPARD
  Gene Name: peroxisome proliferator-activated receptor delta
  Uniprot ID: Q03181
  ENST ID: ENST00000311565
  CDS Start-End: 350-1675
ggcaggagcgggagaattctgcggagcctgcgggacggcggcggtggcgccgtaggcagccgggacagtgttgtacagtgttttgggcatgcacgtgatactcacacagtggcttctgctcaccaacagatgaagacagatgcaccaacgagggtctggaatggtctggagtggtctggaaagcagggtcagatacccctggaaaactgaagcccgtggagcagtgatctctacaggactgcttcaaggctgatgggaaccaccctgtagaggtccatctgcgttcagacccagacgatgccagagctatgactgggcctgcaggtgtggcgccgaggggagatcagccatggagcagccacaggaggaagcccctgaggtccgggaagaggaggagaaagaggaagtggcagaggcagaaggagccccagagctcaatgggggaccacagcatgcacttccttccagcagctacacagacctctcccggagctcctcgccaccctcactgctggaccaactgcagatgggctgtgacggggcctcatgcggcagcctcaacatggagtgccgggtgtgcggggacaaggcatcgggcttccactacggtgttcatgcatgtgaggggtgcaagggcttcttccgtcgtacgatccgcatgaagctggagtacgagaagtgtgagcgcagctgcaagattcagaagaagaaccgcaacaagtgccagtactgccgcttccagaagtgcctggcactgggcatgtcacacaacgctatccgttttggtcggatgccggaggctgagaagaggaagctggtggcagggctgactgcaaacgaggggagccagtacaacccacaggtggccgacctgaaggccttctccaagcacatctacaatgcctacctgaaaaacttcaacatgaccaaaaagaaggcccgcagcatcctcaccggcaaagccagccacacggcgccctttgtgatccacgacatcgagacattgtggcaggcagagaaggggctggtgtggaagcagttggtgaatggcctgcctccctacaaggagatcagcgtgcacgtcttctaccgctgccagtgcaccacagtggagaccgtgcgggagctcactgagttcgccaagagcatccccagcttcagcagcctcttcctcaacgaccaggttacccttctcaagtatggcgtgcacgaggccatcttcgccatgctggcctctatcgtcaacaaggacgggctgctggtagccaacggcagtggctttgtcacccgtgagttcctgcgcagcctccgcaaacccttcagtgatatcattgagcctaagtttgaatttgctgtcaagttcaacgccctggaacttgatgacagtgacctggccctattcattgcggccatcattctgtgtggagaccggccaggcctcatgaacgttccacgggtggaggctatccaggacaccatcctgcgtgccctcgaattccacctgcaggccaaccaccctgatgcccagtacctcttccccaagctgctgcagaagatggctgacctgcggcaactggtcaccgagcacgcccagatgatgcagcggatcaagaagaccgaaaccgagacctcgctgcaccctctgctccaggagatctacaaggacatgtactaacggcggcacccaggcctccctgcagactccaatggggccagcactggaggggcccacccacatgacttttccattgaccagcccttgagcacccggcctggagcagcagagtcccacgatcgccctcagacacatgacacccacggcctctggctccctgtgccctctctcccgcttcctccagccagctctcttcctgtctttgttgtctccctctttctcagttcctctttcttttctaattcctgttgctctgtttcttcctttctgtaggtttctctcttcccttctcccttgccctccctttctctctccaccccccacgtctgtcctcctttcttattctgtgagatgttttgtattatttcaccagcagcatagaacaggacctctgcttttgcacaccttttccccaggagcagaagagagtggggcctgccctctgccccatcattgcacctgcaggcttaggtcctcacttctgtctcctgtcttcagagcaaaagacttgagccatccaaagaaacactaagctctctgggcctgggttccagggaaggctaagcatggcctggactgactgcagccccctatagtcatggggtccctgctgcaaaggacagtgggcaggaggccccaggctgagagccagatgcctccccaagactgtcattgcccctccgatgctgaggccacccactgacccaactgatcctgctccagcagcacacctcagccccactgacacccagtgtccttccatcttcacactggtttgccaggccaatgttgctgatggccccctgcactggccgctggacggcactctcccagcttggaagtaggcagggttccctccaggtgggcccccacctcactgaagaggagcaagtctcaagagaaggaggggggattggtggttggaggaagcagcacacccaattctgcccctaggactcggggtctgagtcctggggtcaggccagggagagctcggggcaggccttccgccagcactcccactgcccccctgcccagtagcagccgcccacattgtgtcagcatccagggccagggcctggcctcacatccccctgctcctttctctagctggctccacgggagttcaggccccactccccctgaagctgcccctccagcacacacacataagcactgaaatcactttacctgcaggctccatgcacctcccttccctccctgaggcaggtgagaacccagagagaggggcctgcaggtgagcaggcagggctgggccaggtctccggggaggcaggggtcctgcaggtcctggtgggtcagcccagcacctgctcccagtgggagcttcccgggataaactgagcctgttcattctgatgtccatttgtcccaatagctctactgccctccccttcccctttactcagcccagctggccacctagaagtctccctgcacagcctctagtgtccggggaccttgtgggaccagtcccacaccgctggtccctgccctcccctgctcccaggttgaggtgcgctcacctcagagcagggccaaagcacagctgggcatgccatgtctgagcggcgcagagccctccaggcctgcaggggcaaggggctggctggagtctcagagcacagaggtaggagaactggggttcaagcccaggcttcctgggtcctgcctggtcctccctcccaaggagccattctgtgtgtgactctgggtggaagtgcccagcccctgcccctacgggcgctgcagcctcccttccatgccccaggatcactctctgctggcaggattcttcccgctccccacctacccagctgatgggggttggggtgcttcctttcaggccaaggctatgaagggacagctgctgggacccacctccccctccccggccacatgccgcgtccctgccccgacccgggtctggtgctgaggatacagctcttctcagtgtctgaacaatctccaaaattgaaatgtatatttttgctaggagccccagcttcctgtgtttttaatataaatagtgtacacagactgacgaaactttaaataaatgggaattaaatatttaa

SEQ ID NO: 164593 - DNA, 2041 bp, Homo sapiens
  Payload ID: 12427
  Gene Symbol: PPARD
  Gene Name: peroxisome proliferator-activated receptor delta
  Uniprot ID: Q03181
  ENST ID: ENST00000337400
  CDS Start-End: 350-1435
ggcaggagcgggagaattctgcggagcctgcgggacggcggcggtggcgccgtaggcagccgggacagtgttgtacagtgttttgggcatgcacgtgatactcacacagtggcttctgctcaccaacagatgaagacagatgcaccaacgagggtctggaatggtctggagtggtctggaaagcagggtcagatacccctggaaaactgaagcccgtggagcagtgatctctacaggactgcttcaaggctgatgggaaccaccctgtagaggtccatctgcgttcagacccagacgatgccagagctatgactgggcctgcaggtgtggcgccgaggggagatcagccatggagcagccacaggaggaagcccctgaggtccgggaagaggaggagaaagaggaagtggcagaggcagaaggagccccagagctcaatgggggaccacagcatgcacttccttccagcagctacacagacctctcccggagctcctcgccaccctcactgctggaccaactgcagatgggctgtgacggggcctcatgcggcagcctcaacatggagtgccgggtgtgcggggacaaggcatcgggcttccactacggtgttcatgcatgtgaggggtgcaagggcttcttccgtcgtacgatccgcatgaagctggagtacgagaagtgtgagcgcagctgcaagattcagaagaagaaccgcaacaagtgccagtactgccgcttccagaagtgcctggcactgggcatgtcacacaacgctatccgttttggtcggatgccggaggctgagaagaggaagctggtggcagggctgactgcaaacgaggggagccagtacaacccacaggtggccgacctgaaggccttctccaagcacatctacaatgcctacctgaaaaacttcaacatgaccaaaaagaaggcccgcagcatcctcaccggcaaagccagccacacggcgccctttgtgatccacgacatcgagacattgtggcaggcagagaaggggctggtgtggaagcagttggtgaatggcctgcctccctacaaggagatcagcgtgcacgtcttctaccgctgccagtgcaccacagtggagaccgtgcgggagctcactgagttcgccaagagcatccccagcttcagcagcctcttcctcaacgaccaggttacccttctcaagtatggcgtgcacgaggccatcttcgccatgctggcctctatcgtcaacaaggacgggctgctggtagccaacggcagtggctttgtcacccgtgagttcctgcgcagcctccgcaaacccttcagtgatatcattgagcctaagtttgaatttgctgtcaagttcaacgccctggaacttgatgacagtgacctggccctattcattgcggccatcattctgtgtggaggtgagtgagagtggggcaggtgggctggcctggcacacccagtcgtcctgggggttggccctcactgcagggcactgtgcctgagctctgacagtgtggggaagtgtccctgtgatcttggcagtggaacatgcaaggcactgactgagcatgcaggatcagctccatctcattatgtacgtagatagaggtggagacaggaaaaagactaagccagacgtggtggctcacacctgtaatcccagcactttggcaggccgaggcgggtggatcacttgaggtcaggagttcgaaaccagcctggccaacatggtgaaaccccgtctctactaaaaatacaaaaaattagccagatgtggtggcacgcgcctgtaatcccagctacttgggaggctgagccaggagaatcgcttgaacccgagaggtggaggttgcagtgagccaaaatcccaccactgcactccagcctgggtgacagagtgagaccctgtctcaaaaaaaaggaaaaggactaacaggcagtatgctgtcatgttaatgtggggtggaaaaattgtctgcattttttctgcatttttaaaattccaacacaataaatacaataataactatgc

SEQ ID NO: 164594 - DNA, 3747 bp, Homo sapiens
  Payload ID: 12427
  Gene Symbol: PPARD
  Gene Name: peroxisome proliferator-activated receptor delta
  Uniprot ID: Q03181
  ENST ID: ENST00000360694
  CDS Start-End: 310-1635
gcggagcgtgtgacgctgcggccgccgcggacctggggattaatgggaaaagttttggcaggagcgggagaattctgcggagcctgcgggacggcggcggtggcgccgtaggcagccgggacagtgttgtacagtgttttgggcatgcacgtgatactcacacagtggcttctgctcaccaacagatgaagacagatgcaccaacgaggctgatgggaaccaccctgtagaggtccatctgcgttcagacccagacgatgccagagctatgactgggcctgcaggtgtggcgccgaggggagatcagccatggagcagccacaggaggaagcccctgaggtccgggaagaggaggagaaagaggaagtggcagaggcagaaggagccccagagctcaatgggggaccacagcatgcacttccttccagcagctacacagacctctcccggagctcctcgccaccctcactgctggaccaactgcagatgggctgtgacggggcctcatgcggcagcctcaacatggagtgccgggtgtgcggggacaaggcatcgggcttccactacggtgttcatgcatgtgaggggtgcaagggcttcttccgtcgtacgatccgcatgaagctggagtacgagaagtgtgagcgcagctgcaagattcagaagaagaaccgcaacaagtgccagtactgccgcttccagaagtgcctggcactgggcatgtcacacaacgctatccgttttggtcggatgccggaggctgagaagaggaagctggtggcagggctgactgcaaacgaggggagccagtacaacccacaggtggccgacctgaaggccttctccaagcacatctacaatgcctacctgaaaaacttcaacatgaccaaaaagaaggcccgcagcatcctcaccggcaaagccagccacacggcgccctttgtgatccacgacatcgagacattgtggcaggcagagaaggggctggtgtggaagcagttggtgaatggcctgcctccctacaaggagatcagcgtgcacgtcttctaccgctgccagtgcaccacagtggagaccgtgcgggagctcactgagttcgccaagagcatccccagcttcagcagcctcttcctcaacgaccaggttacccttctcaagtatggcgtgcacgaggccatcttcgccatgctggcctctatcgtcaacaaggacgggctgctggtagccaacggcagtggctttgtcacccgtgagttcctgcgcagcctccgcaaacccttcagtgatatcattgagcctaagtttgaatttgctgtcaagttcaacgccctggaacttgatgacagtgacctggccctattcattgcggccatcattctgtgtggagaccggccaggcctcatgaacgttccacgggtggaggctatccaggacaccatcctgcgtgccctcgaattccacctgcaggccaaccaccctgatgcccagtacctcttccccaagctgctgcagaagatggctgacctgcggcaactggtcaccgagcacgcccagatgatgcagcggatcaagaagaccgaaaccgagacctcgctgcaccctctgctccaggagatctacaaggacatgtactaacggcggcacccaggcctccctgcagactccaatggggccagcactggaggggcccacccacatgacttttccattgaccagcccttgagcacccggcctggagcagcagagtcccacgatcgccctcagacacatgacacccacggcctctggctccctgtgccctctctcccgcttcctccagccagctctcttcctgtctttgttgtctccctctttctcagttcctctttcttttctaattcctgttgctctgtttcttcctttctgtaggtttctctcttcccttctcccttgccctccctttctctctccaccccccacgtctgtcctcctttcttattctgtgagatgttttgtattatttcaccagcagcatagaacaggacctctgcttttgcacaccttttccccaggagcagaagagagtggggcctgccctctgccccatcattgcacctgcaggcttaggtcctcacttctgtctcctgtcttcagagcaaaagacttgagccatccaaagaaacactaagctctctgggcctgggttccagggaaggctaagcatggcctggactgactgcagccccctatagtcatggggtccctgctgcaaaggacagtgggcaggaggccccaggctgagagccagatgcctccccaagactgtcattgcccctccgatgctgaggccacccactgacccaactgatcctgctccagcagcacacctcagccccactgacacccagtgtccttccatcttcacactggtttgccaggccaatgttgctgatggccccctgcactggccgctggacggcactctcccagcttggaagtaggcagggttccctccaggtgggcccccacctcactgaagaggagcaagtctcaagagaaggaggggggattggtggttggaggaagcagcacacccaattctgcccctaggactcggggtctgagtcctggggtcaggccagggagagctcggggcaggccttccgccagcactcccactgcccccctgcccagtagcagccgcccacattgtgtcagcatccagggccagggcctggcctcacatccccctgctcctttctctagctggctccacgggagttcaggccccactccccctgaagctgcccctccagcacacacacataagcactgaaatcactttacctgcaggctccatgcacctcccttccctccctgaggcaggtgagaacccagagagaggggcctgcaggtgagcaggcagggctgggccaggtctccggggaggcaggggtcctgcaggtcctggtgggtcagcccagcacctgctcccagtgggagcttcccgggataaactgagcctgttcattctgatgtccatttgtcccaatagctctactgccctccccttcccctttactcagcccagctggccacctagaagtctccctgcacagcctctagtgtccggggaccttgtgggaccagtcccacaccgctggtccctgccctcccctgctcccaggttgaggtgcgctcacctcagagcagggccaaagcacagctgggcatgccatgtctgagcggcgcagagccctccaggcctgcaggggcaaggggctggctggagtctcagagcacagaggtaggagaactggggttcaagcccaggcttcctgggtcctgcctggtcctccctcccaaggagccattctgtgtgtgactctgggtggaagtgcccagcccctgcccctacgggcgctgcagcctcccttccatgccccaggatcactctctgctggcaggattcttcccgctccccacctacccagctgatgggggttggggtgcttcctttcaggccaaggctatgaagggacagctgctgggacccacctccccctccccggccacatgccgcgtccctgccccgacccgggtctggtgctgaggatacagctcttctcagtgtctgaacaatctccaaaattgaaatgtatatttttgctaggagccccagcttcctgtgtttttaatataaatagtgtacacagactgacgaaactttaaataaatgggaattaaatatttaagagctgactggaa

SEQ ID NO: 164595 - DNA, 3453 bp, Homo sapiens
  Payload ID: 12427
  Gene Symbol: PPARD
  Gene Name: peroxisome proliferator-activated receptor delta
  Uniprot ID: Q03181
  ENST ID: ENST00000418635
  CDS Start-End: 310-1341
gcggagcgtgtgacgctgcggccgccgcggacctggggattaatgggaaaagttttggcaggagcgggagaattctgcggagcctgcgggacggcggcggtggcgccgtaggcagccgggacagtgttgtacagtgttttgggcatgcacgtgatactcacacagtggcttctgctcaccaacagatgaagacagatgcaccaacgaggctgatgggaaccaccctgtagaggtccatctgcgttcagacccagacgatgccagagctatgactgggcctgcaggtgtggcgccgaggggagatcagccatggagcagccacaggaggaagcccctgaggtccgggaagaggaggagaaagaggaagtggcagaggcagaaggagccccagagctcaatgggggaccacagcatgcacttccttccagcagctacacagctatccgttttggtcggatgccggaggctgagaagaggaagctggtggcagggctgactgcaaacgaggggagccagtacaacccacaggtggccgacctgaaggccttctccaagcacatctacaatgcctacctgaaaaacttcaacatgaccaaaaagaaggcccgcagcatcctcaccggcaaagccagccacacggcgccctttgtgatccacgacatcgagacattgtggcaggcagagaaggggctggtgtggaagcagttggtgaatggcctgcctccctacaaggagatcagcgtgcacgtcttctaccgctgccagtgcaccacagtggagaccgtgcgggagctcactgagttcgccaagagcatccccagcttcagcagcctcttcctcaacgaccaggttacccttctcaagtatggcgtgcacgaggccatcttcgccatgctggcctctatcgtcaacaaggacgggctgctggtagccaacggcagtggctttgtcacccgtgagttcctgcgcagcctccgcaaacccttcagtgatatcattgagcctaagtttgaatttgctgtcaagttcaacgccctggaacttgatgacagtgacctggccctattcattgcggccatcattctgtgtggagaccggccaggcctcatgaacgttccacgggtggaggctatccaggacaccatcctgcgtgccctcgaattccacctgcaggccaaccaccctgatgcccagtacctcttccccaagctgctgcagaagatggctgacctgcggcaactggtcaccgagcacgcccagatgatgcagcggatcaagaagaccgaaaccgagacctcgctgcaccctctgctccaggagatctacaaggacatgtactaacggcggcacccaggcctccctgcagactccaatggggccagcactggaggggcccacccacatgacttttccattgaccagcccttgagcacccggcctggagcagcagagtcccacgatcgccctcagacacatgacacccacggcctctggctccctgtgccctctctcccgcttcctccagccagctctcttcctgtctttgttgtctccctctttctcagttcctctttcttttctaattcctgttgctctgtttcttcctttctgtaggtttctctcttcccttctcccttgccctccctttctctctccaccccccacgtctgtcctcctttcttattctgtgagatgttttgtattatttcaccagcagcatagaacaggacctctgcttttgcacaccttttccccaggagcagaagagagtggggcctgccctctgccccatcattgcacctgcaggcttaggtcctcacttctgtctcctgtcttcagagcaaaagacttgagccatccaaagaaacactaagctctctgggcctgggttccagggaaggctaagcatggcctggactgactgcagccccctatagtcatggggtccctgctgcaaaggacagtgggcaggaggccccaggctgagagccagatgcctccccaagactgtcattgcccctccgatgctgaggccacccactgacccaactgatcctgctccagcagcacacctcagccccactgacacccagtgtccttccatcttcacactggtttgccaggccaatgttgctgatggccccctgcactggccgctggacggcactctcccagcttggaagtaggcagggttccctccaggtgggcccccacctcactgaagaggagcaagtctcaagagaaggaggggggattggtggttggaggaagcagcacacccaattctgcccctaggactcggggtctgagtcctggggtcaggccagggagagctcggggcaggccttccgccagcactcccactgcccccctgcccagtagcagccgcccacattgtgtcagcatccagggccagggcctggcctcacatccccctgctcctttctctagctggctccacgggagttcaggccccactccccctgaagctgcccctccagcacacacacataagcactgaaatcactttacctgcaggctccatgcacctcccttccctccctgaggcaggtgagaacccagagagaggggcctgcaggtgagcaggcagggctgggccaggtctccggggaggcaggggtcctgcaggtcctggtgggtcagcccagcacctgctcccagtgggagcttcccgggataaactgagcctgttcattctgatgtccatttgtcccaatagctctactgccctccccttcccctttactcagcccagctggccacctagaagtctccctgcacagcctctagtgtccggggaccttgtgggaccagtcccacaccgctggtccctgccctcccctgctcccaggttgaggtgcgctcacctcagagcagggccaaagcacagctgggcatgccatgtctgagcggcgcagagccctccaggcctgcaggggcaaggggctggctggagtctcagagcacagaggtaggagaactggggttcaagcccaggcttcctgggtcctgcctggtcctccctcccaaggagccattctgtgtgtgactctgggtggaagtgcccagcccctgcccctacgggcgctgcagcctcccttccatgccccaggatcactctctgctggcaggattcttcccgctccccacctacccagctgatgggggttggggtgcttcctttcaggccaaggctatgaagggacagctgctgggacccacctccccctccccggccacatgccgcgtccctgccccgacccgggtctggtgctgaggatacagctcttctcagtgtctgaacaatctccaaaattgaaatgtatatttttgctaggagccccagcttcctgtgtttttaatataaatagtgtacacagactgacgaaactttaaataaatgggaattaaatatttaagagctgactggaa

SEQ ID NO: 164596 - DNA, 3516 bp, Homo sapiens
  Payload ID: 12427
  Gene Symbol: PPARD
  Gene Name: peroxisome proliferator-activated receptor delta
  Uniprot ID: Q03181
  ENST ID: ENST00000448077
  CDS Start-End: 196-1404
gcggagcgtgtgacgctgcggccgccgcggacctggggattaatgggaaaagttttggcaggagcgggagaattctgcggagcctgcgggacggcggcggtggcgccgtaggcagccgggacagtgttgtacagtgttttgggcatgcacgtgatactcacacagtggcttctgctcaccaacagatgaagacagatgcaccaacgagacctctcccggagctcctcgccaccctcactgctggaccaactgcagatgggctgtgacggggcctcatgcggcagcctcaacatggagtgccgggtgtgcggggacaaggcatcgggcttccactacggtgttcatgcatgtgaggggtgcaagggcttcttccgtcgtacgatccgcatgaagctggagtacgagaagtgtgagcgcagctgcaagattcagaagaagaaccgcaacaagtgccagtactgccgcttccagaagtgcctggcactgggcatgtcacacaacgctatccgttttggtcggatgccggaggctgagaagaggaagctggtggcagggctgactgcaaacgaggggagccagtacaacccacaggtggccgacctgaaggccttctccaagcacatctacaatgcctacctgaaaaacttcaacatgaccaaaaagaaggcccgcagcatcctcaccggcaaagccagccacacggcgccctttgtgatccacgacatcgagacattgtggcaggcagagaaggggctggtgtggaagcagttggtgaatggcctgcctccctacaaggagatcagcgtgcacgtcttctaccgctgccagtgcaccacagtggagaccgtgcgggagctcactgagttcgccaagagcatccccagcttcagcagcctcttcctcaacgaccaggttacccttctcaagtatggcgtgcacgaggccatcttcgccatgctggcctctatcgtcaacaaggacgggctgctggtagccaacggcagtggctttgtcacccgtgagttcctgcgcagcctccgcaaacccttcagtgatatcattgagcctaagtttgaatttgctgtcaagttcaacgccctggaacttgatgacagtgacctggccctattcattgcggccatcattctgtgtggagaccggccaggcctcatgaacgttccacgggtggaggctatccaggacaccatcctgcgtgccctcgaattccacctgcaggccaaccaccctgatgcccagtacctcttccccaagctgctgcagaagatggctgacctgcggcaactggtcaccgagcacgcccagatgatgcagcggatcaagaagaccgaaaccgagacctcgctgcaccctctgctccaggagatctacaaggacatgtactaacggcggcacccaggcctccctgcagactccaatggggccagcactggaggggcccacccacatgacttttccattgaccagcccttgagcacccggcctggagcagcagagtcccacgatcgccctcagacacatgacacccacggcctctggctccctgtgccctctctcccgcttcctccagccagctctcttcctgtctttgttgtctccctctttctcagttcctctttcttttctaattcctgttgctctgtttcttcctttctgtaggtttctctcttcccttctcccttgccctccctttctctctccaccccccacgtctgtcctcctttcttattctgtgagatgttttgtattatttcaccagcagcatagaacaggacctctgcttttgcacaccttttccccaggagcagaagagagtggggcctgccctctgccccatcattgcacctgcaggcttaggtcctcacttctgtctcctgtcttcagagcaaaagacttgagccatccaaagaaacactaagctctctgggcctgggttccagggaaggctaagcatggcctggactgactgcagccccctatagtcatggggtccctgctgcaaaggacagtgggcaggaggccccaggctgagagccagatgcctccccaagactgtcattgcccctccgatgctgaggccacccactgacccaactgatcctgctccagcagcacacctcagccccactgacacccagtgtccttccatcttcacactggtttgccaggccaatgttgctgatggccccctgcactggccgctggacggcactctcccagcttggaagtaggcagggttccctccaggtgggcccccacctcactgaagaggagcaagtctcaagagaaggaggggggattggtggttggaggaagcagcacacccaattctgcccctaggactcggggtctgagtcctggggtcaggccagggagagctcggggcaggccttccgccagcactcccactgcccccctgcccagtagcagccgcccacattgtgtcagcatccagggccagggcctggcctcacatccccctgctcctttctctagctggctccacgggagttcaggccccactccccctgaagctgcccctccagcacacacacataagcactgaaatcactttacctgcaggctccatgcacctcccttccctccctgaggcaggtgagaacccagagagaggggcctgcaggtgagcaggcagggctgggccaggtctccggggaggcaggggtcctgcaggtcctggtgggtcagcccagcacctgctcccagtgggagcttcccgggataaactgagcctgttcattctgatgtccatttgtcccaatagctctactgccctccccttcccctttactcagcccagctggccacctagaagtctccctgcacagcctctagtgtccggggaccttgtgggaccagtcccacaccgctggtccctgccctcccctgctcccaggttgaggtgcgctcacctcagagcagggccaaagcacagctgggcatgccatgtctgagcggcgcagagccctccaggcctgcaggggcaaggggctggctggagtctcagagcacagaggtaggagaactggggttcaagcccaggcttcctgggtcctgcctggtcctccctcccaaggagccattctgtgtgtgactctgggtggaagtgcccagcccctgcccctacgggcgctgcagcctcccttccatgccccaggatcactctctgctggcaggattcttcccgctccccacctacccagctgatgggggttggggtgcttcctttcaggccaaggctatgaagggacagctgctgggacccacctccccctccccggccacatgccgcgtccctgccccgacccgggtctggtgctgaggatacagctcttctcagtgtctgaacaatctccaaaattgaaatgtatatttttgctaggagccccagcttcctgtgtttttaatataaatagtgtacacagactgacgaaactttaaataaatgggaattaaatatttaagagctgactggaa

SEQ ID NO: 164597 - DNA, 1850 bp, Homo sapiens
  Payload ID: 12428
  Gene Symbol: PPARG
  Gene Name: peroxisome proliferator-activated receptor gamma
  Uniprot ID: P37231
  ENST ID: ENST00000287820
  CDS Start-End: 122-1639
actcatgggtgtattcacaaattctgttacttcaagtctttttcttttaacggattgatcttttgctagatagagacaaaatatcagtgtgaattacagcaaacccctattccatgctgttatgggtgaaactctgggagattctcctattgacccagaaagcgattccttcactgatacactgtctgcaaacatatcacaagaaatgaccatggttgacacagagatgccattctggcccaccaactttgggatcagctccgtggatctctccgtaatggaagaccactcccactcctttgatatcaagcccttcactactgttgacttctccagcatttctactccacattacgaagacattccattcacaagaacagatccagtggttgcagattacaagtatgacctgaaacttcaagagtaccaaagtgcaatcaaagtggagcctgcatctccaccttattattctgagaagactcagctctacaataagcctcatgaagagccttccaactccctcatggcaattgaatgtcgtgtctgtggagataaagcttctggatttcactatggagttcatgcttgtgaaggatgcaagggtttcttccggagaacaatcagattgaagcttatctatgacagatgtgatcttaactgtcggatccacaaaaaaagtagaaataaatgtcagtactgtcggtttcagaaatgccttgcagtggggatgtctcataatgccatcaggtttgggcggatgccacaggccgagaaggagaagctgttggcggagatctccagtgatatcgaccagctgaatccagagtccgctgacctccgggccctggcaaaacatttgtatgactcatacataaagtccttcccgctgaccaaagcaaaggcgagggcgatcttgacaggaaagacaacagacaaatcaccattcgttatctatgacatgaattccttaatgatgggagaagataaaatcaagttcaaacacatcacccccctgcaggagcagagcaaagaggtggccatccgcatctttcagggctgccagtttcgctccgtggaggctgtgcaggagatcacagagtatgccaaaagcattcctggttttgtaaatcttgacttgaacgaccaagtaactctcctcaaatatggagtccacgagatcatttacacaatgctggcctccttgatgaataaagatggggttctcatatccgagggccaaggcttcatgacaagggagtttctaaagagcctgcgaaagccttttggtgactttatggagcccaagtttgagtttgctgtgaagttcaatgcactggaattagatgacagcgacttggcaatatttattgctgtcattattctcagtggagaccgcccaggtttgctgaatgtgaagcccattgaagacattcaagacaacctgctacaagccctggagctccagctgaagctgaaccaccctgagtcctcacagctgtttgccaagctgctccagaaaatgacagacctcagacagattgtcacggaacacgtgcagctactgcaggtgatcaagaagacggagacagacatgagtcttcacccgctcctgcaggagatctacaaggacttgtactagcagagagtcctgagccactgccaacatttcccttcttccagttgcactattctgagggaaaatctgacacctaagaaatttactgtgaaaaagcattttaaaaagaaaaggttttagaatatgatctattttatgcatattgtttataaagacacatttacaatttacttttaatattaaaaattaccatattatgaaattgctgatagta

SEQ ID NO: 164598 - DNA, 1870 bp, Homo sapiens
  Payload ID: 12428
  Gene Symbol: PPARG
  Gene Name: peroxisome proliferator-activated receptor gamma
  Uniprot ID: P37231
  ENST ID: ENST00000309576
  CDS Start-End: 238-1671
cccgcccccgcgccgggcccggctcggcccgacccggctccgccgcgggcaggcggggcccagcgcactcggagcccgagcccgagccgcagccgccgcctggggcgcttgggtcggcctcgaggacaccggagaggggcgccacgccgccgtggccgcagatttgaaagaagccaacactaaaccacaaatatacaacaaggccattttctcaaacgagagtcagcctttaacgaaatgaccatggttgacacagagatgccattctggcccaccaactttgggatcagctccgtggatctctccgtaatggaagaccactcccactcctttgatatcaagcccttcactactgttgacttctccagcatttctactccacattacgaagacattccattcacaagaacagatccagtggttgcagattacaagtatgacctgaaacttcaagagtaccaaagtgcaatcaaagtggagcctgcatctccaccttattattctgagaagactcagctctacaataagcctcatgaagagccttccaactccctcatggcaattgaatgtcgtgtctgtggagataaagcttctggatttcactatggagttcatgcttgtgaaggatgcaagggtttcttccggagaacaatcagattgaagcttatctatgacagatgtgatcttaactgtcggatccacaaaaaaagtagaaataaatgtcagtactgtcggtttcagaaatgccttgcagtggggatgtctcataatgccatcaggtttgggcggatgccacaggccgagaaggagaagctgttggcggagatctccagtgatatcgaccagctgaatccagagtccgctgacctccgggccctggcaaaacatttgtatgactcatacataaagtccttcccgctgaccaaagcaaaggcgagggcgatcttgacaggaaagacaacagacaaatcaccattcgttatctatgacatgaattccttaatgatgggagaagataaaatcaagttcaaacacatcacccccctgcaggagcagagcaaagaggtggccatccgcatctttcagggctgccagtttcgctccgtggaggctgtgcaggagatcacagagtatgccaaaagcattcctggttttgtaaatcttgacttgaacgaccaagtaactctcctcaaatatggagtccacgagatcatttacacaatgctggcctccttgatgaataaagatggggttctcatatccgagggccaaggcttcatgacaagggagtttctaaagagcctgcgaaagccttttggtgactttatggagcccaagtttgagtttgctgtgaagttcaatgcactggaattagatgacagcgacttggcaatatttattgctgtcattattctcagtggagaccgcccaggtttgctgaatgtgaagcccattgaagacattcaagacaacctgctacaagccctggagctccagctgaagctgaaccaccctgagtcctcacagctgtttgccaagctgctccagaaaatgacagacctcagacagattgtcacggaacacgtgcagctactgcaggtgatcaagaagacggagacagacatgagtcttcacccgctcctgcaggagatctacaaggacttgtactagcagagagtcctgagccactgccaacatttcccttcttccagttgcactattctgagggaaaatctgacacctaagaaatttactgtgaaaaagcattttaaaaagaaaaggttttagaatatgatctattttatgcatattgtttataaagacacatttacaatttacttttaatattaaaaattaccatattatgaaa

SEQ ID NO: 164599 - DNA, 1329 bp, Homo sapiens
  Payload ID: 12428
  Gene Symbol: PPARG
  Gene Name: peroxisome proliferator-activated receptor gamma
  Uniprot ID: P37231
  ENST ID: ENST00000396999
  CDS Start-End: 1-561
atgaccatggttgacacagagatgccattctggcccaccaactttgggatcagctccgtggatctctccgtaatggaagaccactcccactcctttgatatcaagcccttcactactgttgacttctccagcatttctactccacattacgaagacattccattcacaagaacagatccagtggttgcagattacaagtatgacctgaaacttcaagagtaccaaagtgcaatcaaagtggagcctgcatctccaccttattattctgagaagactcagctctacaataagcctcatgaagagccttccaactccctcatggcaattgaatgtcgtgtctgtggagataaagcttctggatttcactatggagttcatgcttgtgaaggatgcaagggtttcttccggagaacaatcagattgaagcttatctatgacagatgtgatcttaactgtcggatccacaaaaaaagtagaaataaatgtcagtactgtcggtttcagaaatgccttgcagtggggatgtctcataatgaggaactacaaaaggatagttattagattgccaaatcctgcagaacctccagcaggcacaagttggtttttctccctcaagaaagagaagtgagccaagcgtggtggtgcatgcctgtggtcccagctactcaggaggctgagccatcaggtttgggcggatgccacaggccgagaaggagaagctgttggcggagatctccagtgatatcgaccagctgaatccagagtccgctgacctccgggccctggcaaaacatttgtatgactcatacataaagtccttcccgctgaccaaagcaaaggcgagggcgatcttgacaggaaagacaacagacaaatcaccattcgttatctatgacatgaattccttaatgatgggagaagataaaatcaagttcaaacacatcacccccctgcaggagcagagcaaagaggtggccatccgcatctttcagggctgccagtttcgctccgtggaggctgtgcaggagatcacagagtatgccaaaagcattcctggttttgtaaatcttgacttgaacgaccaagtaactctcctcaaatatggagtccacgagatcatttacacaatgctggcctccttgatgaataaagatggggttctcatatccgagggccaaggcttcatgacaagggagtttctaaagagcctgcgaaagccttttggtgactttatggagcccaagtttgagtttgctgtgaagttcaatgcactggaattagatgacagcgacttggcaatatttattgctgtcattattctcagtggag

SEQ ID NO: 164600 - DNA, 1122 bp, Homo sapiens
  Payload ID: 12428
  Gene Symbol: PPARG
  Gene Name: peroxisome proliferator-activated receptor gamma
  ENST ID: ENST00000397000
  CDS Start-End: 69-821
gaagccaacactaaaccacaaatatacaacaaggccattttctcaaacgagagtcagcctttaacgaaatgaccatggttgacacagagatgccattctggcccaccaactttgggatcagctccgtggatctctccgtaatggaagaccactcccactcctttgatatcaagcccttcactactgttgacttctccagcatttctactccacattacgaagacattccattcacaagaacagatccagtggttgcagattacaagtatgacctgaaacttcaagagtaccaaagtgcaatcaaagtggagcctgcatctccaccttattattctgagaagactcagctctacaataagcctcatgaagagccttccaactccctcatggcaattgaatgtcgtgtctgtggagataaagcttctggatttcactatggagttcatgcttgtgaaggatgcaagggtttcttccggagaacaatcagattgaagcttatctatgacagatgtgatcttaactgtcggatccacaaaaaaagtagaaataaatgtcagtactgtcggtttcagaaatgccttgcagtggggatgtctcataatgccatcaggtttgggcggatgccacaggccgagaaggagaagctgttggcggagatctccagtgatatcgaccagctgaatccagagtccgctgacctccgggccctggcaaaacatttgtatgactcatacataaagtccttcccgctgaccaaagcaaaggcgagggcgatcttgacaggaaagacaacagacaaatcaaccgcccaggtttgctgaatgtgaagcccattgaagacattcaagacaacctgctacaagccctggagctccagctgaagctgaaccaccctgagtcctcacagctgtttgccaagctgctccagaaaatgacagacctcagacagattgtcacggaacacgtgcagctactgcaggtgatcaagaagacggagacagacatgagtcttcacccgctcctgcaggagatctacaaggacttgtactagcagagagtcctgagccactgccaacatttcccttcttccagttgcactattctgagggaaaatctgacacc

SEQ ID NO: 164601 - DNA, 2017 bp, Homo sapiens
  Payload ID: 12428
  Gene Symbol: PPARG
  Gene Name: peroxisome proliferator-activated receptor gamma
  Uniprot ID: P37231
  ENST ID: ENST00000397010
  CDS Start-End: 385-1818
aacttacaaacgcaaggaactctgaaagtgtgcagcaccaccgatcagaagagaaaaccaagggacccgaaatatgctttaattaaattttcttttaaaatgtcactggaaagaacatcttgggaagacggcctggccgatcgccgtgtgaagggcaagccactctggccgagagggagccccacacctcggtctccccagaccggccctggccgggggcatccccctaaacttcggatccctcctcggaaatgggaccctctctgggccgcctcccagcggtggtggcgaggagcaaacgacaccagatttgaaagaagccaacactaaaccacaaatatacaacaaggccattttctcaaacgagagtcagcctttaacgaaatgaccatggttgacacagagatgccattctggcccaccaactttgggatcagctccgtggatctctccgtaatggaagaccactcccactcctttgatatcaagcccttcactactgttgacttctccagcatttctactccacattacgaagacattccattcacaagaacagatccagtggttgcagattacaagtatgacctgaaacttcaagagtaccaaagtgcaatcaaagtggagcctgcatctccaccttattattctgagaagactcagctctacaataagcctcatgaagagccttccaactccctcatggcaattgaatgtcgtgtctgtggagataaagcttctggatttcactatggagttcatgcttgtgaaggatgcaagggtttcttccggagaacaatcagattgaagcttatctatgacagatgtgatcttaactgtcggatccacaaaaaaagtagaaataaatgtcagtactgtcggtttcagaaatgccttgcagtggggatgtctcataatgccatcaggtttgggcggatgccacaggccgagaaggagaagctgttggcggagatctccagtgatatcgaccagctgaatccagagtccgctgacctccgggccctggcaaaacatttgtatgactcatacataaagtccttcccgctgaccaaagcaaaggcgagggcgatcttgacaggaaagacaacagacaaatcaccattcgttatctatgacatgaattccttaatgatgggagaagataaaatcaagttcaaacacatcacccccctgcaggagcagagcaaagaggtggccatccgcatctttcagggctgccagtttcgctccgtggaggctgtgcaggagatcacagagtatgccaaaagcattcctggttttgtaaatcttgacttgaacgaccaagtaactctcctcaaatatggagtccacgagatcatttacacaatgctggcctccttgatgaataaagatggggttctcatatccgagggccaaggcttcatgacaagggagtttctaaagagcctgcgaaagccttttggtgactttatggagcccaagtttgagtttgctgtgaagttcaatgcactggaattagatgacagcgacttggcaatatttattgctgtcattattctcagtggagaccgcccaggtttgctgaatgtgaagcccattgaagacattcaagacaacctgctacaagccctggagctccagctgaagctgaaccaccctgagtcctcacagctgtttgccaagctgctccagaaaatgacagacctcagacagattgtcacggaacacgtgcagctactgcaggtgatcaagaagacggagacagacatgagtcttcacccgctcctgcaggagatctacaaggacttgtactagcagagagtcctgagccactgccaacatttcccttcttccagttgcactattctgagggaaaatctgacacctaagaaatttactgtgaaaaagcattttaaaaagaaaaggttttagaatatgatctattttatgcatattgtttataaagacacatttacaatttacttttaatattaaaaattaccatattatgaaa

SEQ ID NO: 164602 - DNA, 2006 bp, Homo sapiens
  Payload ID: 12428
  Gene Symbol: PPARG
  Gene Name: peroxisome proliferator-activated receptor gamma
  Uniprot ID: P37231
  ENST ID: ENST00000397012
  CDS Start-End: 374-1807
ctttgtgggctcctgcaagtgccaggcgctgaccactcctcctgggagcctaactgaggggggtagaggcagcagaggttaacagaaatctcaggtcccttggtggaaggtgggtgtgtagtcgtggtactttacgcctcggtgtttagggaggagcctaaggtaaggagtcagaaacggggagtaaccgagctgcggcttttatataaggtcagtggtaggtaaggaaggggccttaacctctgctggtgaccagaagcctgcatttctgcattctgcttaattccctttccttagatttgaaagaagccaacactaaaccacaaatatacaacaaggccattttctcaaacgagagtcagcctttaacgaaatgaccatggttgacacagagatgccattctggcccaccaactttgggatcagctccgtggatctctccgtaatggaagaccactcccactcctttgatatcaagcccttcactactgttgacttctccagcatttctactccacattacgaagacattccattcacaagaacagatccagtggttgcagattacaagtatgacctgaaacttcaagagtaccaaagtgcaatcaaagtggagcctgcatctccaccttattattctgagaagactcagctctacaataagcctcatgaagagccttccaactccctcatggcaattgaatgtcgtgtctgtggagataaagcttctggatttcactatggagttcatgcttgtgaaggatgcaagggtttcttccggagaacaatcagattgaagcttatctatgacagatgtgatcttaactgtcggatccacaaaaaaagtagaaataaatgtcagtactgtcggtttcagaaatgccttgcagtggggatgtctcataatgccatcaggtttgggcggatgccacaggccgagaaggagaagctgttggcggagatctccagtgatatcgaccagctgaatccagagtccgctgacctccgggccctggcaaaacatttgtatgactcatacataaagtccttcccgctgaccaaagcaaaggcgagggcgatcttgacaggaaagacaacagacaaatcaccattcgttatctatgacatgaattccttaatgatgggagaagataaaatcaagttcaaacacatcacccccctgcaggagcagagcaaagaggtggccatccgcatctttcagggctgccagtttcgctccgtggaggctgtgcaggagatcacagagtatgccaaaagcattcctggttttgtaaatcttgacttgaacgaccaagtaactctcctcaaatatggagtccacgagatcatttacacaatgctggcctccttgatgaataaagatggggttctcatatccgagggccaaggcttcatgacaagggagtttctaaagagcctgcgaaagccttttggtgactttatggagcccaagtttgagtttgctgtgaagttcaatgcactggaattagatgacagcgacttggcaatatttattgctgtcattattctcagtggagaccgcccaggtttgctgaatgtgaagcccattgaagacattcaagacaacctgctacaagccctggagctccagctgaagctgaaccaccctgagtcctcacagctgtttgccaagctgctccagaaaatgacagacctcagacagattgtcacggaacacgtgcagctactgcaggtgatcaagaagacggagacagacatgagtcttcacccgctcctgcaggagatctacaaggacttgtactagcagagagtcctgagccactgccaacatttcccttcttccagttgcactattctgagggaaaatctgacacctaagaaatttactgtgaaaaagcattttaaaaagaaaaggttttagaatatgatctattttatgcatattgtttataaagacacatttacaatttacttttaatattaaaaattaccatattatgaaa

SEQ ID NO: 164603 - DNA, 1722 bp, Homo sapiens
  Payload ID: 12428
  Gene Symbol: PPARG
  Gene Name: peroxisome proliferator-activated receptor gamma
  Uniprot ID: P37231
  ENST ID: ENST00000397015
  CDS Start-End: 123-1556
gccgcgggcaggcggggcccagcgcactcggagcccgagcccgagccgcagccgccgcctggggcgcttgggtcggcctcgaggacaccggagaggggcgccacgccgccgtggccgcagaaatgaccatggttgacacagagatgccattctggcccaccaactttgggatcagctccgtggatctctccgtaatggaagaccactcccactcctttgatatcaagcccttcactactgttgacttctccagcatttctactccacattacgaagacattccattcacaagaacagatccagtggttgcagattacaagtatgacctgaaacttcaagagtaccaaagtgcaatcaaagtggagcctgcatctccaccttattattctgagaagactcagctctacaataagcctcatgaagagccttccaactccctcatggcaattgaatgtcgtgtctgtggagataaagcttctggatttcactatggagttcatgcttgtgaaggatgcaagggtttcttccggagaacaatcagattgaagcttatctatgacagatgtgatcttaactgtcggatccacaaaaaaagtagaaataaatgtcagtactgtcggtttcagaaatgccttgcagtggggatgtctcataatgccatcaggtttgggcggatgccacaggccgagaaggagaagctgttggcggagatctccagtgatatcgaccagctgaatccagagtccgctgacctccgggccctggcaaaacatttgtatgactcatacataaagtccttcccgctgaccaaagcaaaggcgagggcgatcttgacaggaaagacaacagacaaatcaccattcgttatctatgacatgaattccttaatgatgggagaagataaaatcaagttcaaacacatcacccccctgcaggagcagagcaaagaggtggccatccgcatctttcagggctgccagtttcgctccgtggaggctgtgcaggagatcacagagtatgccaaaagcattcctggttttgtaaatcttgacttgaacgaccaagtaactctcctcaaatatggagtccacgagatcatttacacaatgctggcctccttgatgaataaagatggggttctcatatccgagggccaaggcttcatgacaagggagtttctaaagagcctgcgaaagccttttggtgactttatggagcccaagtttgagtttgctgtgaagttcaatgcactggaattagatgacagcgacttggcaatatttattgctgtcattattctcagtggagaccgcccaggtttgctgaatgtgaagcccattgaagacattcaagacaacctgctacaagccctggagctccagctgaagctgaaccaccctgagtcctcacagctgtttgccaagctgctccagaaaatgacagacctcagacagattgtcacggaacacgtgcagctactgcaggtgatcaagaagacggagacagacatgagtcttcacccgctcctgcaggagatctacaaggacttgtactagcagagagtcctgagccactgccaacatttcccttcttccagttgcactattctgagggaaaatctgacacctaagaaatttactgtgaaaaagcattttaaaaagaaaaggttttagaatatgatctattttatgcatattgtttataaagacacatttacaattt

SEQ ID NO: 164604 - DNA, 2002 bp, Homo sapiens
  Payload ID: 12428
  Gene Symbol: PPARG
  Gene Name: peroxisome proliferator-activated receptor gamma
  ENST ID: ENST00000397023
  CDS Start-End: 25-147
agcaaacccctattccatgctgttatgggtgaaactctgggagattctcctattgacccagaaagcgattccttcactgatacactgtctgcaaacatatcacaagtgtttcaggatgattcttgtctctggatgtcgctgtcatgatgggagaggaattagtaaattcccaggtcagtttacactgcagagtgatcttgatctgcatgaatcagtaaggatgggctggataaacaagttggaaccacagttatgagtaccatgacattaactgaaacaaatgagaagggattgaaaaatcggcggttaagtgtcttttaaggtcatttccaacaaaactacaaaggacctatgaaaggcttttcagaaatgaccatggttgacacagagatgccattctggcccaccaactttgggatcagctccgtggatctctccgtaatggaagaccactcccactcctttgatatcaagcccttcactactgttgacttctccagcatttctactccacattacgaagacattccattcacaagaacagatccagtggttgcagattacaagtatgacctgaaacttcaagagtaccaaagtgcaatcaaagtggagcctgcatctccaccttattattctgagaagactcagctctacaataagcctcatgaagagccttccaactccctcatggcaattgaatgtcgtgtctgtggagataaagcttctggatttcactatggagttcatgcttgtgaaggatgcaagggtttcttccggagaacaatcagattgaagcttatctatgacagatgtgatcttaactgtcggatccacaaaaaaagtagaaataaatgtcagtactgtcggtttcagaaatgccttgcagtggggatgtctcataatgccatcaggtttgggcggatgccacaggccgagaaggagaagctgttggcggagatctccagtgatatcgaccagctgaatccagagtccgctgacctccgggccctggcaaaacatttgtatgactcatacataaagtccttcccgctgaccaaagcaaaggcgagggcgatcttgacaggaaagacaacagacaaatcaccattcgttatctatgacatgaattccttaatgatgggagaagataaaatcaagttcaaacacatcacccccctgcaggagcagagcaaagaggtggccatccgcatctttcagggctgccagtttcgctccgtggaggctgtgcaggagatcacagagtatgccaaaagcattcctggttttgtaaatcttgacttgaacgaccaagtaactctcctcaaatatggagtccacgagatcatttacacaatgctggcctccttgatgaataaagatggggttctcatatccgagggccaaggcttcatgacaagggagtttctaaagagcctgcgaaagccttttggtgactttatggagcccaagtttgagtttgctgtgaagttcaatgcactggaattagatgacagcgacttggcaatatttattgctgtcattattctcagtggagaccgcccaggtttgctgaatgtgaagcccattgaagacattcaagacaacctgctacaagccctggagctccagctgaagctgaaccaccctgagtcctcacagctgtttgccaagctgctccagaaaatgacagacctcagacagattgtcacggaacacgtgcagctactgcaggtgatcaagaagacggagacagacatgagtcttcacccgctcctgcaggagatctacaaggacttgtactagcagagagtcctgagccactgccaacatttcccttcttccagttgcactattctgagggaaaatctgacacctaagaaatttactgtgaaaaagcattttaaaaagaaaaggttttagaatatgatctattttatgcatattgtttataaagacacatttacaatttacttttaatattaaaaattaccatattatgaaa

SEQ ID NO: 164605 - DNA, 2029 bp, Homo sapiens
  Payload ID: 12428
  Gene Symbol: PPARG
  Gene Name: peroxisome proliferator-activated receptor gamma
  ENST ID: ENST00000397026
  CDS Start-End: 384-1835
ccttaacctctgctggtgaccagaagcctgcatttctgcattctgcttaattccctttccttagatttgaaagaagccaacactaaaccacaaatatacaacaaggccattttctcaaacgagagtcagcctttaacgtgtttcaggatgattcttgtctctggatgtcgctgtcatgatgggagaggaattagtaaattcccaggtcagtttacactgcagagtgatcttgatctgcatgaatcagtaaggatgggctggataaacaagttggaaccacagttatgagtaccatgacattaactgaaacaaatgagaagggattgaaaaatcggcggttaagtgtcttttaaggtcatttccaacaaaactacaaaggacctatgaaaggcttttcagaaatgaccatggttgacacagagatgccattctggcccaccaactttgggatcagctccgtggatctctccgtaatggaagaccactcccactcctttgatatcaagcccttcactactgttgacttctccagcatttctactccacattacgaagacattccattcacaagaacagatccagtggttgcagattacaagtatgacctgaaacttcaagagtaccaaagtgcaatcaaagtggagcctgcatctccaccttattattctgagaagactcagctctacaataagcctcatgaagagccttccaactccctcatggcaattgaatgtcgtgtctgtggagataaagcttctggatttcactatggagttcatgcttgtgaaggatgcaagggtttcttccggagaacaatcagattgaagcttatctatgacagatgtgatcttaactgtcggatccacaaaaaaagtagaaataaatgtcagtactgtcggtttcagaaatgccttgcagtggggatgtctcataatgccatcaggtttgggcggatgccacaggccgagaaggagaagctgttggcggagatctccagtgatatcgaccagctgaatccagagtccgctgacctccgggccctggcaaaacatttgtatgactcatacataaagtccttcccgctgaccaaagcaaaggcgagggcgatcttgacaggaaagacaacagacaaatcaccattcgttatctatgacatgaattccttaatgatgggagaagataaaatcaagttcaaacacatcacccccctgcaggagcagagcaaagaggtggccatccgcatctttcagggctgccagtttcgctccgtggaggctgtgcaggagatcacagagtatgccaaaagcattcctggttttgtaaatcttgacttgaacgaccaagtaactctcctcaaatatggagtccacgagatcatttacacaatgctggcctccttgatgaataaagatggggttctcatatccgagggccaaggcttcatgacaagggagtttctaaagagcctgcgaaagccttttggtgactttatggagcccaagtttgagtttgctgtgaagttcaatgcactggaattagatgacagcgacttggcaatatttattgctgtcattattctcagtggagaccgcccaggtttgctgaatgtgaagcccattgaagacattcaagacaacctgctacaagccctggagctccagctgaagctgaaccaccctgagtcctcacagctgtttgccaagctgctccagaaaatgacagacctcagacagattgtcacggaacacgtgcagctactgcaggtgatcaagaagacggagacagacatgagtcttcacccgctcctgcaggagatctacaaggacttgtactagcagagagtcctgagccactgccaacatttcccttcttccagttgcactattctgagggaaaatctgacacctaagaaatttactgtgaaaaagcattttaaaaagaaaaggttttagaatatgatctattttatgcatattgtttataaagacacatttacaatttacttttaatattaaaaattaccatatta

SEQ ID NO: 164606 - DNA, 686 bp, Homo sapiens
  Payload ID: 12428
  Gene Symbol: PPARG
  Gene Name: peroxisome proliferator-activated receptor gamma
  ENST ID: ENST00000397029
  CDS Start-End: 291-686
tctgaaagtgtgcagcaccaccgatcagaagagaaaaccaagggacccgaaatatgctttaattaaattttcttttaaaatgtcactggaaagaacatcttgggaagacggcctggccgatcgccgtgtgaagggcaagccactctggccgagagggagccccacacctcggtctccccagaccggccctggccgggggcatccccctaaacttcggatccctcctcggaaatgggaccctctctgggccgcctcccagcggtggtggcgaggagcaaacgacaccagaaatgaccatggttgacacagagatgccattctggcccaccaactttgggatcagctccgtggatctctccgtaatggaagaccactcccactcctttgatatcaagcccttcactactgttgacttctccagcatttctactccacattacgaagacattccattcacaagaacagatccagtggttgcagattacaagtatgacctgaaacttcaagagtaccaaagtgcaatcaaagtggagcctgcatctccaccttattattctgagaagactcagctctacaataagcctcatgaagagccttccaactccctcatggcaattgaatgtcgtgtctgtggagataaagcttctggatttcactatggagttcatgcttgtgaaggatgcaag

SEQ ID NO: 164607 - DNA, 560 bp, Homo sapiens
  Payload ID: 12428
  Gene Symbol: PPARG
  Gene Name: peroxisome proliferator-activated receptor gamma
  ENST ID: ENST00000438682
  CDS Start-End: 264-560
ttagtatacaatgaatttataaatgtaaccatacaatttcatgcttagagaacgttttctctccattctctctacctttagaccattctgcagtttaaatcttgaaccaaaatgtcatttaaccatccttctgaacgataactccataattaactcaagcaccaaataagtcatctagctcttgatgatttgaaagaagccaacactaaaccacaaatatacaacaaggccattttctcaaacgagagtcagcctttaacgaaatgaccatggttgacacagagatgccattctggcccaccaactttgggatcagctccgtggatctctccgtaatggaagaccactcccactcctttgatatcaagcccttcactactgttgacttctccagcatttctactccacattacgaagacattccattcacaagaacagatccagtggttgcagattacaagtatgacctgaaacttcaagagtaccaaagtgcaatcaaagtggagcctgcatctccaccttattattctgagaagactcagctctacaataagcctcat

SEQ ID NO: 164608 - DNA, 428 bp, Homo sapiens
  Payload ID: 12428
  Gene Symbol: PPARG
  Gene Name: peroxisome proliferator-activated receptor gamma
  ENST ID: ENST00000455517
  CDS Start-End: 300-428
ctttgtgggctcctgcaagtgccaggcgctgaccactcctcctgggagcctaactgaggggggtagaggcagcagaggttaacagaaatctcaggtcccttggtggaaggtgggtgtgtagtcgtggtactttacgcctcggtgtttagggaggagcctaaggtaaggagtcagaaacggggagtaaccgagctgcggcttttatataaggtcagtggtaggtaaggaaggggccttaacctctgctggtgaccagaagcctgcatttctgcattctgcttaattccctttccttagaaatgaccatggttgacacagagatgccattctggcccaccaactttgggatcagctccgtggatctctccgtaatggaagaccactcccactcctttgatatcaagcccttcactactgttgacttctcc

SEQ ID NO: 164609 - DNA, 6318 bp, Homo sapiens
  Payload ID: 12429
  Gene Symbol: PPARGC1A
  Gene Name: peroxisome proliferator-activated receptor gamma, coactivator 1 alpha
  Uniprot ID: Q9UBK2
  ENST ID: ENST00000264867
  CDS Start-End: 121-2517
tagtaagacaggtgccttcagttcactctcagtaaggggctggttgcctgcatgagtgtgtgctctgtgtcactgtggattggagttgaaaaagcttgactggcgtcattcaggagctggatggcgtgggacatgtgcaaccaggactctgagtctgtatggagtgacatcgagtgtgctgctctggttggtgaagaccagcctctttgcccagatcttcctgaacttgatctttctgaactagatgtgaacgacttggatacagacagctttctgggtggactcaagtggtgcagtgaccaatcagaaataatatccaatcagtacaacaatgagccttcaaacatatttgagaagatagatgaagagaatgaggcaaacttgctagcagtcctcacagagacactagacagtctccctgtggatgaagacggattgccctcatttgatgcgctgacagatggagacgtgaccactgacaatgaggctagtccttcctccatgcctgacggcacccctccaccccaggaggcagaagagccgtctctacttaagaagctcttactggcaccagccaacactcagctaagttataatgaatgcagtggtctcagtacccagaaccatgcaaatcacaatcacaggatcagaacaaaccctgcaattgttaagactgagaattcatggagcaataaagcgaagagtatttgtcaacagcaaaagccacaaagacgtccctgctcggagcttctcaaatatctgaccacaaacgatgaccctcctcacaccaaacccacagagaacagaaacagcagcagagacaaatgcacctccaaaaagaagtcccacacacagtcgcagtcacaacacttacaagccaaaccaacaactttatctcttcctctgaccccagagtcaccaaatgaccccaagggttccccatttgagaacaagactattgaacgcaccttaagtgtggaactctctggaactgcaggcctaactccacccaccactcctcctcataaagccaaccaagataacccttttagggcttctccaaagctgaagtcctcttgcaagactgtggtgccaccaccatcaaagaagcccaggtacagtgagtcttctggtacacaaggcaataactccaccaagaaagggccggagcaatccgagttgtatgcacaactcagcaagtcctcagtcctcactggtggacacgaggaaaggaagaccaagcggcccagtctgcggctgtttggtgaccatgactattgccagtcaattaattccaaaacagaaatactcattaatatatcacaggagctccaagactctagacaactagaaaataaagatgtctcctctgattggcaggggcagatttgttcttccacagattcagaccagtgctacctgagagagactttggaggcaagcaagcaggtctctccttgcagcacaagaaaacagctccaagaccaggaaatccgagccgagctgaacaagcacttcggtcatcccagtcaagctgtttttgacgacgaagcagacaagaccggtgaactgagggacagtgatttcagtaatgaacaattctccaaactacctatgtttataaattcaggactagccatggatggcctgtttgatgacagcgaagatgaaagtgataaactgagctacccttgggatggcacgcaatcctattcattgttcaatgtgtctccttcttgttcttcttttaactctccatgtagagattctgtgtcaccacccaaatccttattttctcaaagaccccaaaggatgcgctctcgttcaaggtccttttctcgacacaggtcgtgttcccgatcaccatattccaggtcaagatcaaggtctccaggcagtagatcctcttcaagatcctgctattactatgagtcaagccactacagacaccgcacgcaccgaaattctcccttgtatgtgagatcacgttcaagatcgccctacagccgtcggcccaggtatgacagctacgaggaatatcagcacgagaggctgaagagggaagaatatcgcagagagtatgagaagcgagagtctgagagggccaagcaaagggagaggcagaggcagaaggcaattgaagagcgccgtgtgatttatgtcggtaaaatcagacctgacacaacacggacagaactgagggaccgttttgaagtttttggtgaaattgaggagtgcacagtaaatctgcgggatgatggagacagctatggtttcattacctaccgttatacctgtgatgcttttgctgctcttgaaaatggatacactttgcgcaggtcaaacgaaactgactttgagctgtacttttgtggacgcaagcaatttttcaagtctaactatgcagacctagattcaaactcagatgactttgaccctgcttccaccaagagcaagtatgactctctggattttgatagtttactgaaagaagctcagagaagcttgcgcaggtaacatgttccctagctgaggatgacagagggatggcgaatacctcatgggacagcgcgtccttccctaaagactattgcaagtcatacttaggaatttctcctactttacactctctgtacaaaaacaaaacaaaacaacaacaatacaacaagaacaacaacaacaataacaacaatggtttacatgaacacagctgctgaagaggcaagagacagaatgatatccagtaagcacatgtttattcatgggtgtcagctttgcttttcctggagtctcttggtgatggagtgtgcgtgtgtgcatgtatgtgtgtgtgtatgtatgtgtgtggtgtgtgtgcttggtttaggggaagtatgtgtgggtacatgtgaggactgggggcacctgaccagaatgcgcaagggcaaaccatttcaaatggcagcagttccatgaagacacgcttaaaacctagaacttcaaaatgttcgtattctattcaaaaggaaatatatatatatatatatatatatatatatatatatataaattaaaaaggaaagaaaactaacaaccaaccaaccaaccaaccaaccacaaaccaccctaaaatgacagccgctgatgtctgggcatcagcctttgtactctgtttttttaagaaagtgcagaatcaacttgaagcaagctttctctcataacgtaatgattatatgacaatcctgaagaaaccacaggttccatagaactaatatcctgtctctctctctctctctctctctctcttttttttttctttttccttttgccatggaatctgggtgggagaggatactgcgggcaccagaatgctaaagtttcctaacattttgaagtttctgtagttcatccttaatcctgacacccatgtaaatgtccaaaatgttgatcttccactgcaaatttcaaaagccttgtcaatggtcaagcgtgcagcttgttcagcggttctttctgaggagcggacaccgggttacattactaatgagagttgggtagaactctctgagatgtgttcagatagtgtaattgctacattctctgatgtagttaagtatttacagatgttaaatggagtatttttattttatgtatatactatacaacaatgttcttttttgttacagctatgcactgtaaatgcagccttcttttcaaaactgctaaatttttcttaatcaagaatattcaaatgtaattatgaggtgaaacaattattgtacactaacatatttagaagctgaacttactgcttatatatatttgattgtaaaaacaaaaagacagtgtgtgtgtctgttgagtgcaacaagagcaaaatgatgctttccgcacatccatcccttaggtgagcttcaatctaagcatcttgtcaagaaatatcctagtcccctaaaggtattaaccacttctgcgatatttttccacattttcttgtcgcttgtttttctttgaagttttatacactggatttgttaggggaatgaaattttctcatctaaaatttttctagaagatatcatgattttatgtaaagtctctcaatgggtaaccattaagaaatgtttttattttctctatcaacagtagttttgaaactagaagtcaaaaatctttttaaaatgctgttttgttttaatttttgtgattttaatttgatacaaaatgctgaggtaataattatagtatgatttttacaataattaatgtgtgtctgaagactatctttgaagccagtatttctttcccttggcagagtatgacgatggtatttatctgtattttttacagttatgcatcctgtataaatactgatatttcattcctttgtttactaaagagacatatttatcagttgcagatagcctatttattataaattatgagatgatgaaaataataaagccagtggaaattttctacctaggatgcatgacaattgtcaggttggagtgtaagtgcttcatttgggaaattcagcttttgcagaagcagtgtttctacttgcactagcatggcctctgacgtgaccatggtgttgttcttgatgacattgcttctgctaaatttaataaaaacttcagaaaaacctccattttgatcatcaggatttcatctgagtgtggagtccctggaatggaattcagtaacatttggagtgtgtattcaagtttctaaattgagattcgattactgtttggctgacatgacttttctggaagacatgatacacctactactcaattgttcttttcctttctctcgcccaacacgatcttgtaagatggatttcacccccaggccaatgcagctaattttgatagctgcattcatttatcaccagcatattgtgttctgagtgaatccactgtttgtcctgtcggatgcttgcttgattttttggcttcttatttctaagtagatagaaagcaataaaaatactatgaaatgaaagaacttgttcacaggttctgcgttacaacagtaacacatctttaatccgcctaattcttgttgttctgtaggttaaatgcaggtattttaactgtgtgaacgccaaactaaagtttacagtctttctttctgaattttgagtatcttctgttgtagaataataataaaaagactattaagagcaataaattatttttaagaaatcgagatttagtaaatcctattatgtgttcaaggaccacatgtgttctctattttgcctttaaatttttgtgaaccaattttaaatacattctcctttttgccctggattgttgacatgagtggaatacttggtttcttttcttacttatcaaaagacagcactacagatatcatattgaggattaatttatcccccctacccccagcctgacaaatattgttaccatgaagatagttttcctcaatggacttcaaattgcatctagaattagtggagcttttgtatcttctgcagacactgtgggtagcccatcaaaatgtaagctgtgctcctctcatttttatttttatttttttgggagagaatatttcaaatgaacacgtgcaccccatcatcactggaggcaaatttcagcatagatctgtaggatttttagaagaccgtgggccattgccttcatgccgtggtaagtaccacatctacaattttggtaaccgaactggtgctttagtaatgtggatttttttcttttttaaaagagatgtagcagaataattcttccagtgcaacaaaatcaattttttgctaaacgactccgagaacaacagttgggctgtcaacattcaaagcagcagagagggaactttgcactattggggtatgatgtttgggtcagttgataaaaggaaaccttttcatgcctttagatgtgagcttccagtaggtaatgattatgtgtcctttcttgatggctgtaatgagaacttcaatcactgtagtctaagacctgatctatagatgacctagaatagccatgtactataatgtgatgattctaaatttgtacctatgtgacagacattttcaataatgtgaactgctgatttgatggagctactttaagatttgtaggtgaaagtgtaatactgttggttgaactatgctgaagagggaaagtgagcgattagttgagcccttgccgggccttttttccacctgccaattctacatgtattgttgtggttttattcattgtatgaaaattcctgtgattttttttaaatgtgcagtacacatcagcctcactgagctaataaagggaaacgaatgtttcaaatcta

SEQ ID NO: 164610 - DNA, 1432 bp, Homo sapiens
  Payload ID: 12429
  Gene Symbol: PPARGC1A
  Gene Name: peroxisome proliferator-activated receptor gamma, coactivator 1 alpha
  Uniprot ID: Q9UBK2
  ENST ID: ENST00000513205
  CDS Start-End: 79-984
gttgcctgcatgagtgtgtgctctgtgtcactgtggattggagttgaaaaagcttgactggcgtcattcaggagctggatggcgtgggacatgtgcaaccaggactctgagtctgtatggagtgacatcgagtgtgctgctctggttggtgaagaccagcctctttgcccagatcttcctgaacttgatctttctgaactagatgtgaacgacttggatacagacagctttctgggtggactcaagtggtgcagtgaccaatcagaaataatatccaatcagtacaacaatgagccttcaaacatatttgagaagatagatgaagagaatgaggcaaacttgctagcagtcctcacagagacactagacagtctccctgtggatgaagacggattgccctcatttgatgcgctgacagatggagacgtgaccactgacaatgaggctagtccttcctccatgcctgacggcacccctccaccccaggaggcagaagagccgtctctacttaagaagctcttactggcaccagccaacactcagctaagttataatgaatgcagtggtctcagtacccagaaccatgcaaatcacaatcacaggatcagaacaaaccctgcaattgttaagactgagaattcatggagcaataaagcgaagagtatttgtcaacagcaaaagccacaaagacgtccctgctcggagcttctcaaatatctgaccacaaacgatgaccctcctcacaccaaacccacagagaacagaaacagcagcagagacaaatgcacctccaaaaagaagtcccacacacagtcgcagtcacaacacttacaagccaaaccaacaactttatctcttcctctgaccccagagtcaccaaatgaccccaagggttccccatttgagaacaagactattgaacgcaccttaagtgtggaactctctggaactgcaggtgtaaaaactaatttgatttcaaaatagctgttagtaaagcaagatgagagaaaagagaatgctcttttggcagaaggcatttaaatctattgcatatggagattttcagagtgctacacttttttgtttctgaaatgggaatggcaaagcaatgtcagctcaacaaggtgacggtttaaaccacagacacgaaggaatttgggcctaactccacccaccactcctcctcataaagccaaccaagataacccttttagggcttctccaaagctgaagtcctcttgcaagactgtggtgccaccaccatcaaagaagcccaggtacagtgagtcttctggtacacaaggcaataactccaccaagaaagggccggagcaatccgagttgtatgcacaactcagcaagtcctcagtcctcactggtggacacgaggaaaggaagaccaagcggcccagtctgcggctgtttggtgacc

SEQ ID NO: 164611 - DNA, 2627 bp, Homo sapiens
  Payload ID: 12429
  Gene Symbol: PPARGC1A
  Gene Name: peroxisome proliferator-activated receptor gamma, coactivator 1 alpha
  Uniprot ID: Q9UBK2
  ENST ID: ENST00000506055
  CDS Start-End: 76-891
gcctgcatgagtgtgtgctctgtgtcactgtggattggagttgaaaaagcttgactggcgtcattcaggagctggatggcgtgggacatgtgcaaccaggactctgagtctgtatggagtgacatcgagtgtgctgctctggttggtgaagaccagcctctttgcccagatcttcctgaacttgatctttctgaactagatgtgaacgacttggatacagacagctttctgggtggactcaagtggtgcagtgaccaatcagaaataatatccaatcagtacaacaatgagccttcaaacatatttgagaagatagatgaagagaatgaggcaaacttgctagcagtcctcacagagacactagacagtctccctgtggatgaagacggattgccctcatttgatgcgctgacagatggagacgtgaccactgacaatgaggctagtccttcctccatgcctgacggcacccctccaccccaggaggcagaagagccgtctctacttaagaagctcttactggcaccagccaacactcagctaagttataatgaatgcagtggtctcagtacccagaaccatgcaaatcacaatcacaggatcagaacaaaccctgcaattgttaagactgagaattcatggagcaataaagcgaagagtatttgtcaacagcaaaagccacaaagacgtccctgctcggagcttctcaaatatctgaccacaaacgatgaccctcctcacaccaaacccacagagaacagaaacagcagcagagacaaatgcacctccaaaaagaagtcccacacacagtcgcagtcacaacacttacaagccaaaccaacaactttatctcttcctctgaccccagagtcaccaaatttgtttttataaatgtgccatatcttccagtgaccccaagggttccccatttgagaacaagactattgaacgcaccttaagtgtggaactctctggaactgcaggcctaactccacccaccactcctcctcataaagccaaccaagataacccttttagggcttctccaaagctgaagtcctcttgcaagactgtggtgccaccaccatcaaagaagcccaggtacagtgagtcttctggtacacaaggcaataactccaccaagaaagggccggagcaatccgagttgtatgcacaactcagcaagtcctcagtcctcactggtggacacgaggaaaggaagaccaagcggcccagtctgcggctgtttggtgaccatgactattgccagtcaattaattccaaaacagaaatactcattaatatatcacaggagctccaagactctagacaactagaaaataaagatgtctcctctgattggcaggggcagatttgttcttccacagattcagaccagtgctacctgagagagactttggaggcaagcaagcaggtctctccttgcagcacaagaaaacagctccaagaccaggaaatccgagccgagctgaacaagcacttcggtcatcccagtcaagctgtttttgacgacgaagcagacaagaccggtgaactgagggacagtgatttcagtaatgaacaattctccaaactacctatgtttataaattcaggactagccatggatggcctgtttgatgacagcgaagatgaaagtgataaactgagctacccttgggatggcacgcaatcctattcattgttcaatgtgtctccttcttgttcttcttttaactctccatgtagagattctgtgtcaccacccaaatccttattttctcaaagaccccaaaggatgcgctctcgttcaaggtccttttctcgacacaggtcgtgttcccgatcaccatattccaggtcaagatcaaggtctccaggcagtagatcctcttcaagatcctgctattactatgagtcaagccactacagacaccgcacgcaccgaaattctcccttgtatgtgagatcacgttcaagatcgccctacagccgtcggcccaggtatgacagctacgaggaatatcagcacgagaggctgaagagggaagaatatcgcagagagtatgagaagcgagagtctgagagggccaagcaaagggagaggcagaggcagaaggcaattgaagagcgccgtgtgatttatgtcggtaaaatcagacctgacacaacacggacagaactgagggaccgttttgaagtttttggtgaaattgaggagtgcacagtaaatctgcgggatgatggagacagctatggtttcattacctaccgttatacctgtgatgcttttgctgctcttgaaaatggatacactttgcgcaggtcaaacgaaactgactttgagctgtacttttgtggacgcaagcaatttttcaagtctaactatgcagacctagattcaaactcagatgactttgaccctgcttccaccaagagcaagtatgactctctggattttgatagtttactgaaagaagctcagagaagcttgcgcaggtaacatgttccctagctgaggatgacagagggatggcgaatacctcatgggacagcgcgtccttccctaaagactattgcaagtcatacttaggaatttctcctactttacactctctgtacaaaaa

SEQ ID NO: 164612 - DNA, 2385 bp, Homo sapiens
  Payload ID: 12429
  Gene Symbol: PPARGC1A
  Gene Name: peroxisome proliferator-activated receptor gamma, coactivator 1 alpha
  ENST ID: ENST00000507380
  CDS Start-End: 79-378
gttgcctgcatgagtgtgtgctctgtgtcactgtggattggagttgaaaaagcttgactggcgtcattcaggagctggatggcgtgggacatgtgcaaccaggactctgagtctgtatggagtgacatcgagtgtgctgctctggttggtgaagaccagcctctttgcccagatcttcctgaacttgatctttctgaactagatgtgaacgacttggatacagacagctttctgggtggactcaagtggtgcagtgaccaatcagaaataatatccaatcagtacaacaatgagccttcaaacatatttgaggtaaggacatcctttggaaacattaatttttcattgagtttggcttgggcccgactaacatggtaatagacctgaatgcataatgagttcttactttgctatcatcaaaagacttttcatcacagttacatactttctaatttatggaaaaacagcatttggaaaacaaatgttttgtttttatttttttaaagatttaaaaaataaatcaactagggactaggaatcaacaactgtgagtgagttaaactgtgttgaaatactaaagggttgtgaaagattagtgacaaagaagaacaaaagtctaaacctgtttattcctgtctatttcccacagaaagaatgagcaataaatggtacctcatataaattaataaataagaaggcctttctttttaaccaagggggtagatgtctacctttgtttgctttactaattaggtgagctcttttgattattattattaattatatttttggttcatatctctaatttctttatataatgggaattgctaaacttgactaatctactgtatacttataaatcagtcaaaattcatttacttttcagtagcaagaattacctccgtgactccggactcttattataagcctaccctataataaagaatgttaatctattcctattaaagtgttactttgagaaaaggaattctttcccacaagatcagtactcatttacttgaaatacattattttttataggaacaaacatttagtgagtactctggcaagtgaattaaacgaaggatgacatatcggctagttttctttatcacaaccgccagtgccatcatcatcatcatctaatgttttctgagcacctactatgtgctggacttttcttattcatcagcaaagacatttcttatacttccatgttatttggttgaaatctgagtcttaagaaagccaagtttaaaatattaactgagttttgctggaacccagcatataatacatgctgaataaatgtttgttaaatcatgagagaatgatgaatatattaatgttgataacaataatagtaatgacaataatggccaacattttggtatactcatgcttaatatatgtcatctcacttatccttgaaaacaacctattgttaggtcctattgttatcattcctgttttacatatgcagacactgaaactcagagaggttatttgttttccccaaatcacacagttgacaataaagacctgggatttgaaccccaaatttatcggacttcaaagtttatatccttgataaaaatagagaacccatgaatttgggtgacagccatcctttacaaagacatatcaagctgcttctttgctcaatatatttaaaaatagaacagaatctttcctttcagtgttggttggcacggaggtagagttagctggtgagccgagacggctgtaggttctgcctatggctgagattttgtaatacctctggagattaagtgggttttagaagaatgcttaaggtagtagagtttggactggggagacagaacaaggtggagggaacactgaaggttgtggttagttctactttcccaggcttctcagccgggtcttagaaagttcatgtgaggacttggccagttagaactggtaaattgaacattcctcactcagtacacttgtcaagttacaggcccattctaagtcatgctgcattaaataaacaatgctttaaaaaatgtccatctccatagacctcttatctaaaaatcacctatttcatatcaggtgaatgccatgcattttgtagaggctagagaataacttagcggtaggggagatggcataggagtcaatgcctctctggtgggctactttaaaaaaaatacaactttctccataacttttatgtccctatattttgtgttgtggtatttgtgagaggtactttgcatttataccttcaggagacttggttcagcatctagttaattatctacatgtaggtgcttaatatatgccatgccaccctttttgtctccctgtatcatattctatgctaataaaattattttcagcactctaaaa

SEQ ID NO: 164613 - DNA, 1026 bp, Homo sapiens
  Payload ID: 12429
  Gene Symbol: PPARGC1A
  Gene Name: peroxisome proliferator-activated receptor gamma, coactivator 1 alpha
  ENST ID: ENST00000617484
  CDS Start-End: 133-1026
tagtaagacaggtgccttcagttcactctcagtaaggggctggttgcctgcatgagtgtgtgctctgtgtcactgtggattggagttgaaaaagcttgactggcgtcattcaggagctggatggcgtgggacatgtgcaaccaggactctgagtctgtatggagtgacatcgagtgtgctgctctggttggtgaagaccagcctctttgcccagatcttcctgaacttgatctttctgaactagatgtgaacgacttggatacagacagctttctgggtggactcaagtggtgcagtgaccaatcagaaataatatccaatcagtacaacaatgagccttcaaacatatttgagaagatagatgaagagaatgaggcaaacttgctagcagtcctcacagagacactagacagtctccctgtggatgaagacggattgccctcatttgatgcgctgacagatggagacgtgaccactgacaatgaggctagtccttcctccatgcctgacggcacccctccaccccaggaggcagaagagccgtctctacttaagaagctcttactggcaccagccaacactcagctaagttataatgaatgcagtggtctcagtacccagaaccatgcaaatcacaatcacaggatcagaacaaaccctgcaattgttaagactgagaattcatggagcaataaagcgaagagtatttgtcaacagcaaaagccacaaagacgtccctgctcggagcttctcaaatatctgaccacaaacgatgaccctcctcacaccaaacccacagagaacagaaacagcagcagagacaaatgcacctccaaaaagaagtcccacacacagtcgcagtcacaacacttacaagccaaaccaacaactttatctcttcctctgaccccagagtcaccaaatgaccccaagggttccccatttgagaacaagactattgaacgcaccttaagtgtggaactctctggaactgcaggtgtaaaaactaatttgatttcaaaatag

SEQ ID NO: 164614 - DNA, 936 bp, Homo sapiens
  Payload ID: 12429
  Gene Symbol: PPARGC1A
  Gene Name: peroxisome proliferator-activated receptor gamma, coactivator 1 alpha
  ENST ID: ENST00000612355
  CDS Start-End: 133-936
tagtaagacaggtgccttcagttcactctcagtaaggggctggttgcctgcatgagtgtgtgctctgtgtcactgtggattggagttgaaaaagcttgactggcgtcattcaggagctggatggcgtgggacatgtgcaaccaggactctgagtctgtatggagtgacatcgagtgtgctgctctggttggtgaagaccagcctctttgcccagatcttcctgaacttgatctttctgaactagatgtgaacgacttggatacagacagctttctgggtggactcaagtggtgcagtgaccaatcagaaataatatccaatcagtacaacaatgagccttcaaacatatttgagaagatagatgaagagaatgaggcaaacttgctagcagtcctcacagagacactagacagtctccctgtggatgaagacggattgccctcatttgatgcgctgacagatggagacgtgaccactgacaatgaggctagtccttcctccatgcctgacggcacccctccaccccaggaggcagaagagccgtctctacttaagaagctcttactggcaccagccaacactcagctaagttataatgaatgcagtggtctcagtacccagaaccatgcaaatcacaatcacaggatcagaacaaaccctgcaattgttaagactgagaattcatggagcaataaagcgaagagtatttgtcaacagcaaaagccacaaagacgtccctgctcggagcttctcaaatatctgaccacaaacgatgaccctcctcacaccaaacccacagagaacagaaacagcagcagagacaaatgcacctccaaaaagaagtcccacacacagtcgcagtcacaacacttacaagccaaaccaacaactttatctcttcctctgaccccagagtcaccaaatttgtttttataa

SEQ ID NO: 164615 - DNA, 3210 bp, Homo sapiens
  Payload ID: 12429
  Gene Symbol: PPARGC1A
  Gene Name: peroxisome proliferator-activated receptor gamma, coactivator 1 alpha
  Uniprot ID: Q9UBK2
  ENST ID: ENST00000613098
  CDS Start-End: 712-2727
agaagccactttaaaaaacaaagcaaaaggctcagaggtaacagcctccagtgaatctgatccatgtgtaaggaaaacaggatgcgtccctggaccggctggtagcaagatttatgtttcagaatattgcaacataacttccttccctctgttgcctttgtgcattgtttgaaggaggagaataaaggactacttttgcagcacagcagtctgtaaagatggatggcatggggttagtttaaatagcatattggcctttctgggtcactgtgggcaaccttgtccctggtttattttaacacctgctttaatgcctccatgatacaactgaatgggcatctttcattcattcgtctgttacttctgaatgaagctacttggggttcgttagaatgatggcaagtgagaatgcagtcgtctctaggtcattacttgtaatacgttctgaggactgcctttgctgatggggggagaaggactctcacagctgtagccagcgttcatgtttggtcattgctggaactctcaggaagcctgaaactgtgaactttgtagcagaaaaggaagatagatgaagagaatgaggcaaacttgctagcagtcctcacagagacactagacagtctccctgtggatgaagacggattgccctcatttgatgcgctgacagatggagacgtgaccactgacaatgaggctagtccttcctccatgcctgacggcacccctccaccccaggaggcagaagagccgtctctacttaagaagctcttactggcaccagccaacactcagctaagttataatgaatgcagtggtctcagtacccagaaccatgcaaatcacaatcacaggatcagaacaaaccctgcaattgttaagactgagaattcatggagcaataaagcgaagagtatttgtcaacagcaaaagccacaaagacgtccctgctcggagcttctcaaatatctgaccacaaacgatgaccctcctcacaccaaacccacagagaacagaaacagcagcagagacaaatgcacctccaaaaagaagtcccacacacagtcgcagtcacaacacttacaagccaaaccaacaactttatctcttcctctgaccccagagtcaccaaatgaccccaagggttccccatttgagaacaagactattgaacgcaccttaagtgtggaactctctggaactgcaggcctaactccacccaccactcctcctcataaagccaaccaagataacccttttagggcttctccaaagctgaagtcctcttgcaagactgtggtgccaccaccatcaaagaagcccaggtacagtgagtcttctggtacacaaggcaataactccaccaagaaagggccggagcaatccgagttgtatgcacaactcagcaagtcctcagtcctcactggtggacacgaggaaaggaagaccaagcggcccagtctgcggctgtttggtgaccatgactattgccagtcaattaattccaaaacagaaatactcattaatatatcacaggagctccaagactctagacaactagaaaataaagatgtctcctctgattggcaggggcagatttgttcttccacagattcagaccagtgctacctgagagagactttggaggcaagcaagcaggtctctccttgcagcacaagaaaacagctccaagaccaggaaatccgagccgagctgaacaagcacttcggtcatcccagtcaagctgtttttgacgacgaagcagacaagaccggtgaactgagggacagtgatttcagtaatgaacaattctccaaactacctatgtttataaattcaggactagccatggatggcctgtttgatgacagcgaagatgaaagtgataaactgagctacccttgggatggcacgcaatcctattcattgttcaatgtgtctccttcttgttcttcttttaactctccatgtagagattctgtgtcaccacccaaatccttattttctcaaagaccccaaaggatgcgctctcgttcaaggtccttttctcgacacaggtcgtgttcccgatcaccatattccaggtcaagatcaaggtctccaggcagtagatcctcttcaagatcctgctattactatgagtcaagccactacagacaccgcacgcaccgaaattctcccttgtatgtgagatcacgttcaagatcgccctacagccgtcggcccaggtatgacagctacgaggaatatcagcacgagaggctgaagagggaagaatatcgcagagagtatgagaagcgagagtctgagagggccaagcaaagggagaggcagaggcagaaggcaattgaagagcgccgtgtgatttatgtcggtaaaatcagacctgacacaacacggacagaactgagggaccgttttgaagtttttggtgaaattgaggagtgcacagtaaatctgcgggatgatggagacagctatggtttcattacctaccgttatacctgtgatgcttttgctgctcttgaaaatggatacactttgcgcaggtcaaacgaaactgactttgagctgtacttttgtggacgcaagcaatttttcaagtctaactatgcagacctagattcaaactcagatgactttgaccctgcttccaccaagagcaagtatgactctctggattttgatagtttactgaaagaagctcagagaagcttgcgcaggtaacatgttccctagctgaggatgacagagggatggcgaatacctcatgggacagcgcgtccttccctaaagactattgcaagtcatacttaggaatttctcctactttacactctctgtacaaaaacaaaacaaaacaacaacaatacaacaagaacaacaacaacaataacaacaatggtttacatgaacacagctgctgaagaggcaagagacagaatgatatccagtaagcacatgtttattcatgggtgtcagctttgcttttcctggagtctcttggtgatggagtgtgcgtgtgtgcatgtatgtgtgtgtgtatgtatgtgtgtggtgtgtgtgcttggtttaggggaagtatgtgtgggtacatgtgaggactgggggcacctgaccagaatgcgcaagggcaaaccatttcaaatggcagcagttccatgaagacacgcttaaaacctagaacttcaaaatgttcgtattctattc

SEQ ID NO: 164616 - DNA, 10568 bp, Homo sapiens
  Payload ID: 12430
  Gene Symbol: PPARGC1B
  Gene Name: peroxisome proliferator-activated receptor gamma, coactivator 1 beta
  Uniprot ID: Q86YN6
  ENST ID: ENST00000309241
  CDS Start-End: 33-3104
actccgccgcacgctgcagccgcggctggaagatggcggggaacgactgcggcgcgctgctggacgaagagctctcctccttcttcctcaactatctcgctgacacgcagggtggagggtccggggaggagcaactctatgctgactttccagaacttgacctctcccagctggatgccagcgactttgactcggccacctgctttggggagctgcagtggtgcccagagaactcagagactgaacccaaccagtacagccccgatgactccgagctcttccagattgacagtgagaatgaggccctcctggcagagctcaccaagaccctggatgacatccctgaagatgacgtgggtctggctgccttcccagccctggatggtggagacgctctatcatgcacctcagcttcgcctgccccctcatctgcaccccccagccctgccccggagaagccctcggccccagcccctgaggtggacgagctctcactgctgcagaagctcctcctggccacatcctacccaacatcaagctctgacacccagaaggaagggaccgcctggcgccaggcaggcctcagatctaaaagtcaacggccttgtgttaaggcggacagcacccaagacaagaaggctcccatgatgcagtctcagagccgaagttgtacagaactacataagcacctcacctcggcacagtgctgcctgcaggatcggggtctgcagccaccatgcctccagagtccccggctccctgccaaggaggacaaggagccgggtgaggactgcccgagcccccagccagctccagcctctccccgggactccctagctctgggcagggcagaccccggtgccccggtttcccaggaagacatgcaggcgatggtgcaactcatacgctacatgcacacctactgcctcccccagaggaagctgcccccacagacccctgagccactccccaaggcctgcagcaacccctcccagcaggtcagatcccggccctggtcccggcaccactccaaagcctcctgggctgagttctccattctgagggaacttctggctcaagacgtgctctgtgatgtcagcaaaccctaccgtctggccacgcctgtttatgcctccctcacacctcggtcaaggcccaggccccccaaagacagtcaggcctcccctggtcgcccgtcctcggtggaggaggtaaggatcgcagcttcacccaagagcaccgggcccagaccaagcctgcgcccactgcggctggaggtgaaaagggaggtccgccggcctgccagactgcagcagcaggaggaggaagacgaggaagaagaggaggaggaagaggaagaagaaaaagaggaggaggaggagtggggcaggaaaaggccaggccgaggcctgccatggacgaagctggggaggaagctggagagctctgtgtgccccgtgcggcgttctcggagactgaaccctgagctgggcccctggctgacatttgcagatgagccgctggtcccctcggagccccaaggtgctctgccctcactgtgcctggctcccaaggcctacgacgtagagcgggagctgggcagccccacggacgaggacagtggccaagaccagcagctcctacggggaccccagatccctgccctggagagcccctgtgagagtgggtgtggggacatggatgaggaccccagctgcccgcagctccctcccagagactctcccaggtgcctcatgctggccttgtcacaaagcgacccaacttttggcaagaagagctttgagcagaccttgacagtggagctctgtggcacagcaggactcaccccacccaccacaccaccgtacaagcccacagaggaggatcccttcaaaccagacatcaagcatagtctaggcaaagaaatagctctcagcctcccctcccctgagggcctctcactcaaggccaccccaggggctgcccacaagctgccaaagaagcacccagagcgaagtgagctcctgtcccacctgcgacatgccacagcccagccagcctcccaggctggccagaagcgtcccttctcctgttcctttggagaccatgactactgccaggtgctccgaccagaaggcgtcctgcaaaggaaggtgctgaggtcctgggagccgtctggggttcaccttgaggactggccccagcagggtgccccttgggctgaggcacaggcccctggcagggaggaagacagaagctgtgatgctggcgccccacccaaggacagcacgctgctgagagaccatgagatccgtgccagcctcaccaaacactttgggctgctggagaccgccctggaggaggaagacctggcctcctgcaagagccctgagtatgacactgtctttgaagacagcagcagcagcagcggcgagagcagcttcctcccagaggaggaagaggaagaaggggaggaggaggaggaggacgatgaagaagaggactcaggggtcagccccacttgctctgaccactgcccctaccagagcccaccaagcaaggccaaccggcagctctgttcccgcagccgctcaagctctggctcttcaccctgccactcctggtcaccagccactcgaaggaacttcagatgtgagagcagagggccgtgttcagacagaacgccaagcatccggcacgccaggaagcggcgggaaaaggccattggggaaggccgcgtggtgtacattcaaaatctctccagcgacatgagctcccgagagctgaagaggcgctttgaagtgtttggtgagattgaggagtgcgaggtgctgacaagaaataggagaggcgagaagtacggcttcatcacctaccggtgttctgagcacgcggccctctctttgacaaagggcgctgccctgaggaagcgcaacgagccctccttccagctgagctacggagggctccggcacttctgctggcccagatacactgactacgattccaattcagaagaggcccttcctgcgtcagggaaaagcaagtatgaagccatggattttgacagcttactgaaagaggcccagcagagcctgcattgataacagccttaaccctcgaggaatacctcaatacctcagacaaggcccttccaatatgtttacgttttcaaagaaatcaagtatatgaggagagcgagcgagcgtgagagaacacccgtgagagagacttgaaactgctgtcctttaaaaaaaaaaaaaatcaatgtttacattgaacaaagctgcttctgtctgtgagtttccatggtgttgacgttccactgccacattagtgtcctcgcttccaacgggttgtcccgggtgcacctcgaagtgccgggtccgtcacccatcgccccttccttcccgactgacttcctctcgtagacttgcagctgtgttcaccataacatttcttgtctgtagtgtgtgatgatgaaattgttacttgtgaatagaatcaggactataaacttcatttttaattgaaaaaaaaagtatatccttaaaataatgtatttatggctcagatgtactgtgcctgggattattgtattgcttccttgattttttaactatgcactgtcatgaggtgtttgccactgagctgccctgctccccttgccagattgccctggaggtgctgggtggccgctaggctggtctgcaggaaagcgcggcctgccgtttccgggccgtatctgccaagccctgccttgtctcttactgagcaagtttggctcaaattataggagcccccatcttgtgcccagctcatgctccaagtgtgtgtctatccatttgtactcagactcttgagtaccttgtaaggaaggcggggcaagctgcatcattcctgttttccaggggaggctggcagctcctcaagaggcgaaatgactgtgggaggtccggttaccagtgaggaggcagagcggtgacccagaccaggccttctggttcttggtcccgtgcttccgtagtagctggggtaaagacaccgtttcagggactggtagaggtgagttcggctaaattgggcaccgggctagaagcctaagggctcattttaggggttacattaggtgttgattcaccagcatcaggtgaattcaagccctggcatgtgtcttggatgcaccatcagctttgatcctgagtggtcctgcggtttgtctgtgcctgtggacacactgtcagaacttcagtgacacccctggcagcggtacagacaggtggtctgggagcagtcatcttttttgggccagccaccagcccatcctactccctcaggtagtccttcgtctttaccttgtccttgtctgtaaagttgttttggtggctggggcaggggagccaggaggagggagtgaaggttgggaatagataggacaatctcctagctctcctccaattgagaaaacactccaattgggctttgctttaaactttgtgttcttaagtgatgtcaaagccatttccagcttaatgttctgtgggtaccttgggggccattcatgcagggagcatggccaggcagggtatgagtacattgtttctgatttctttcatacatcagggttcctcgggaaatttttgtattttttttttaagtcctgctgctttaaaaatttgaaagtggctcattaaactaaacaggctaatgtaatttgttgcttatgccaagcctagactgttgagaattgacgtttttaaagattatcaaatacctcagtaggtaaaatgagcccatgatcttccactgagtggtgagcatactcccagcccatggacaaggccggaagagacaggctttagtaggggtagggaatttgaactgttgtgtgtcacagcagttgacctctctggactccaatttcctttcctgtgaaatgaactgattagacatgtttcaacattgttagcttctgctgaggcagtgtctagcccaagatggcaaatacatagctcatgtgccactactcccacctccttgaccaatacagacataactaatcaatcacaccactcaggttccctgagcctggatgtgctataagaatcctgaaatcagtgctctggtaagtcattactaattgattagagttcaatctatttgacatcttgggctaatctttggaaggtttccaacaatcacacaaaaccatatgctggctgggtttcatgctggcctatccctgtctgtgatgttccgttccatgagagaaaactcccctaatgctattccatggcgtaacactcccaatactattttgacgcccacgtccccttgcagagggtgcagggggcggtagacgaatgacagacaggaacatatttggggaaggcagggcttaggaagatggaccaaaaagggacttcccacagcacagacctgatcattcggatttcctctttagctattcactgcctagcacatagtaggcacacaataaatgattatggaatgggataaaatttagatctttctgctgcctccactaagttaagtcctgatttacatcaaggagagaactgagataggaaagaacactagattccaagtctggagagttgggggagtccagattctaccaagaatttcctttgtaactttggtaagtcccttttactccctggcaccccggtgtgctgaaaggagttggtccatatatgatctcttagcccctcctatttgcttcttccttgattgctcttggtcaaagggtcagccttgggctggtgatactttagagtaaagaaatggagagttttagcaaaggaccagtctgtccctccctgctttggggtcagctaaagctgtcctttcatgtcagattaacctaggacacttgtagttagcttagacgttggcccttgagcagagacctgagcgtggcattgggacatgacatacctaaagtcagggctaggggacgctgcctgccaagggcatcgagtagtctctacttgctatcccgtacataaaatgctacaagttctaaaatttaccgaccctgcagacaacctctatcccgaaggactcattcggtgctgtgtattatttagggcaactccaaggtctattcagaaaaacgagtgaaccttggtctctttcccaccaaattgaggagtaacccagagggagcagctgccattggcaaccatctcgttgtagctctgtcctagtgtttgctcttgatgatgtttacatgtgatcgccataaagcttgctgtagactgtgtcgatagccgcccgcacagggcaggtcgtactgtccgtttctgtgccgtgctggtgttttccaaaaatgtctgatccaaccactaagtggaattcttccatctccttcctcagtctgtacaaggctgaatcagaatccccattctcgggggctctggttaccgaaggaaaatgcatcaaagagttaaagaatatgagtggatggagtgcagctaaggcccccaccccctgctccgtcacaacttgccccctcaaccaaaaagctgctttgagtcaaaaagcacccataagatacctgcatctgccttgaaatcttgcagcatggagtgtcatatgtactcaggagagaggcagggctttgcgggcaggagaaggaagggaggaatgctctgagctgcaaagacccagtactcaagttctgacgtgggaggagatgcagtgagacgtctcttgttgcctaaagcctgttcctgttggttttcttagagtgatttctcctagacatgtgcagtaggcccactggggctgctgtgcagtggtgagtaaaagggcagggaaggcatggacagcctggtccttctgcatggacagctcagtccatggcccatcccaggtatagagttcagttaatcccatttgagcctgcagcttaagagatggctcatcctaactgtgaagcaaaatcagccccagaggatgtattgatctgactcactgatgtcaaaattgcagtatttttttagcatttgagatttagcagctgccttcagtttggggttacccacatcccagcatcagatatgattaaggaaagaaattggatgtacaacagcaaagaaagtgaatgtcatggtttccctggccaaagaagagggaccctgtcatccttaccaatggggaagaagaaaactagtgcatgtgcaatatgtcaaagttagtcccctagtccctgaggggtttttacacacagatgggctccaggtctgctcgtcaagtttggaggtaccgggtaaatggaggggagctgcagagttggaaacccacatgcatggatgtgtccttggcccagaaccaccatgggatgggggaggccctgagccggctacaagacacccaggaagtaggcaaaggctgactttgcattaaacaataaaagcactttgagaaaaccccaacacttcagcctgggtccgtgtttctacactggaaaatacgagtctcctttggctgtgtgaagtgatcttctagagactgggacagggagtttgggaatggggctgctgtcaggtaggagagagcagagatgcctttggagatgtcagcagcaggagagccagtgctggggccaaccctttgctggccttttgttggaagcccttgaaacagggagccatgggtttagatcttggtacctacctttacagaaagatgaaaacagcccagctgagtgaaatgagtttgtagagtaagtcacttaactgtaagccatctcagaatcagaaaccctaatgtttcttacttgctatgtgaccttgggcccctgtttcctcatctaccaaatgagaatgttgaatatgagcattaaagtccctttcacctctgagaggctcagatccccaaccaggagcattgggaatccatcactcctccttgaaactgattccattctctgacttgacccagctcctgttcagggtgagggttctctgcaagaaccaaccagcagtaggttcaatcccactgtgtcctggctgagttgccttatccaagaagaccagctccccgggacagatctaagccatagtttctagtggggacagtaaggaattaaacccccaacttggctaggtaacgatgtcaaatctcacattaaccttgtctttgtccccactggatagctgttaatccgaatgttgtgaccatttggctgtttctctcttgttctcagacaatactagcaatacactttttttttttttttttaaagaaaaacagcttaggagcttttcacacatttctttcaaatgattgtaaaacatatggggcaacaggaggcattgatcgcgctgcatatgtttagggcagcttttgttttttgtttctttaatggtatagcagcagtgactgagccttcgtgattcctggggacagcttttcagatactctgtttcatcagtatgctttgcacatccggaaggagtacaaaaatccaactgcccaaatttggggcttggaaaataggttttataggtggtcggtccctgggctgtgcaacaactcctcaaagaggggtttatataactagaacccccctgggctgtatttttggtcaaaggagtctccaaggcggcttacaaaagcttcctttttcacttgaccacccttgctcattggttacttgtgaagggaattggtcagtttccacctcagcactttgccttatcaacatgcggtcgccatctagtggccaaaggttgtctccaccagctacccagatggaaggcaaataaatcctttcggccaccctgctgtccatcgtgaactttgggaatgaaatataatggcctgaacgaactgcctttgtgttcagagatcagtgcaacactagggtcagaagactccagaagcagccacttagtagactctcacgcagaactgagaaatgcactagctgtcctgtgggcagaagagacaggagtggaccaggagaggtccaggtgcccgggaagggtttactgtaactgcaatactggcagcccagctgctgaccttgttaagtaaacctttgctgggtggtccgaattctgccctcaaggcaagataagaagttgggtgtaaggattttgtggggggcctggccatgatctttgatatgatccccgaatagccaaatagttttttttgttcaattttttgtttctgtattttgtatttttaaaatcttgtcaaatgtttttgtgttaggaataaaaagtcataaactattcccaactttgtttcttgagggatgttctgattccaatggaaacaggtgggaaatctcaaggggagcgtggacaaggtggtatgtgcagcaggggaatagactgcttggatttccaaatggtttctggggaagatgaccatccagaagtccagcttagtgcagtctgctctggaattcacacccaccccctcgcctccttgtgccatgttgttagcattggcttggagcatctgcttcttccagaggcagctgctaatgttgaaaccaacacgagccctctccccaaccccaggtttctaaagaaggtgtctgtagccagccttaatcaactgggcaaggtggtccctatggtcctttccagcatttccaaatcttggactcaaattattttctcttggtgtgaccacacagcctagagaattctgagcaataggagccagggctttccctgactctgcgacagggtcaaaccaaggaatggctaaacctgtgaggttttgtcatccccgggggtactactgtagggggcattatttattaggaagcttaacaaggtaactacggcctgagtgcgtgagtgtaaggctgtgtttgtggtgggggtgtgtgtgtgtgtatctgtgcacacatacacacgtctgtgcctgtgtgtgtgtgtttgtgtgtgtgtgtgtgtgtggaattacattgatgcatttattgagaaaggtgcaagaatttcacctacacagagggacacatctgctttgttatttataatagaaagctaaattttaattttttaaaggacactgctaatgattgagaatcaagtttttagttttgctattttttttaattggtagaggatttttatatattttttccattttgttgggttgtgtccttatttatataaatactttatccgtaagaggcaaggaggaaaccttctttgcttttacatattgtggttgtcatcgtccctattttatttctggtgtgatttctctgtcttaccttctaaatgagaaaatgttttcttgtatttgtacattgtcagattctatagtttcctagataatttaaccaaattgctctatgtattattattctgtgagtataaagttctattttaatgtctgtaaatacttcagaactggcttcttttctcaaactcccactgtggggttattgtttacatcacagaaactgtagaatctctatgctcatgtactgtaaatagtgaagtgatctgcttataaataaacttaacaaatacactatggagattaaaaacaaaataccacccaca

SEQ ID NO: 164617 - DNA, 3004 bp, Homo sapiens
  Payload ID: 12430
  Gene Symbol: PPARGC1B
  Gene Name: peroxisome proliferator-activated receptor gamma, coactivator 1 beta
  Uniprot ID: Q86YN6
  ENST ID: ENST00000360453
  CDS Start-End: 46-3000
cggctcggcgttgactccgccgcacgctgcagccgcggctggaagatggcggggaacgactgcggcgcgctgctggacgaagagctctcctccttcttcctcaactatctcgctgacacgcagggtggagggtccggggaggagcaactctatgctgactttccagaacttgacctctcccagctggatgccagcgactttgactcggccacctgctttggggagctgcagtggtgcccagagaactcagagactgaacccaaccagtacagccccgatgactccgagctcttccagattgacagtgagaatgaggccctcctggcagagctcaccaagaccctggatgacatccctgaagatgacgtgggtctggctgccttcccagccctggatggtggagacgctctatcatgcacctcagcttcgcctgccccctcatctgcaccccccagccctgccccggagaagccctcggccccagcccctgaggtggacgagctctcactggcggacagcacccaagacaagaaggctcccatgatgcagtctcagagccgaagttgtacagaactacataagcacctcacctcggcacagtgctgcctgcaggatcggggtctgcagccaccatgcctccagagtccccggctccctgccaaggaggacaaggagccgggtgaggactgcccgagcccccagccagctccagcctctccccgggactccctagctctgggcagggcagaccccggtgccccggtttcccaggaagacatgcaggcgatggtgcaactcatacgctacatgcacacctactgcctcccccagaggaagctgcccccacagacccctgagccactccccaaggcctgcagcaacccctcccagcaggtcagatcccggccctggtcccggcaccactccaaagcctcctgggctgagttctccattctgagggaacttctggctcaagacgtgctctgtgatgtcagcaaaccctaccgtctggccacgcctgtttatgcctccctcacacctcggtcaaggcccaggccccccaaagacagtcaggcctcccctggtcgcccgtcctcggtggaggaggtaaggatcgcagcttcacccaagagcaccgggcccagaccaagcctgcgcccactgcggctggaggtgaaaagggaggtccgccggcctgccagactgcagcagcaggaggaggaagacgaggaagaagaggaggaggaagaggaagaagaaaaagaggaggaggaggagtggggcaggaaaaggccaggccgaggcctgccatggacgaagctggggaggaagctggagagctctgtgtgccccgtgcggcgttctcggagactgaaccctgagctgggcccctggctgacatttgcagatgagccgctggtcccctcggagccccaaggtgctctgccctcactgtgcctggctcccaaggcctacgacgtagagcgggagctgggcagccccacggacgaggacagtggccaagaccagcagctcctacggggaccccagatccctgccctggagagcccctgtgagagtgggtgtggggacatggatgaggaccccagctgcccgcagctccctcccagagactctcccaggtgcctcatgctggccttgtcacaaagcgacccaacttttggcaagaagagctttgagcagaccttgacagtggagctctgtggcacagcaggactcaccccacccaccacaccaccgtacaagcccacagaggaggatcccttcaaaccagacatcaagcatagtctaggcaaagaaatagctctcagcctcccctcccctgagggcctctcactcaaggccaccccaggggctgcccacaagctgccaaagaagcacccagagcgaagtgagctcctgtcccacctgcgacatgccacagcccagccagcctcccaggctggccagaagcgtcccttctcctgttcctttggagaccatgactactgccaggtgctccgaccagaaggcgtcctgcaaaggaaggtgctgaggtcctgggagccgtctggggttcaccttgaggactggccccagcagggtgccccttgggctgaggcacaggcccctggcagggaggaagacagaagctgtgatgctggcgccccacccaaggacagcacgctgctgagagaccatgagatccgtgccagcctcaccaaacactttgggctgctggagaccgccctggaggaggaagacctggcctcctgcaagagccctgagtatgacactgtctttgaagacagcagcagcagcagcggcgagagcagcttcctcccagaggaggaagaggaagaaggggaggaggaggaggaggacgatgaagaagaggactcaggggtcagccccacttgctctgaccactgcccctaccagagcccaccaagcaaggccaaccggcagctctgttcccgcagccgctcaagctctggctcttcaccctgccactcctggtcaccagccactcgaaggaacttcagatgtgagagcagagggccgtgttcagacagaacgccaagcatccggcacgccaggaagcggcgggaaaaggccattggggaaggccgcgtggtgtacattcaaaatctctccagcgacatgagctcccgagagctgaagaggcgctttgaagtgtttggtgagattgaggagtgcgaggtgctgacaagaaataggagaggcgagaagtacggcttcatcacctaccggtgttctgagcacgcggccctctctttgacaaagggcgctgccctgaggaagcgcaacgagccctccttccagctgagctacggagggctccggcacttctgctggcccagatacactgactacgattccaattcagaagaggcccttcctgcgtcagggaaaagcaagtatgaagccatggattttgacagcttactgaaagaggcccagcagagcctgcattgataac

SEQ ID NO: 164618 - DNA, 4803 bp, Homo sapiens
  Payload ID: 12430
  Gene Symbol: PPARGC1B
  Gene Name: peroxisome proliferator-activated receptor gamma, coactivator 1 beta
  Uniprot ID: Q86YN6
  ENST ID: ENST00000394320
  CDS Start-End: 43-3096
ctcggcgttgactccgccgcacgctgcagccgcggctggaagatggcggggaacgactgcggcgcgctgctggacgaagagctctcctccttcttcctcaactatctcgctgacacgcagggtggagggtccggggaggagcaactctatgctgactttccagaacttgacctctcccagctggatgccagcgactttgactcggccacctgctttggggagctgcagtggtgcccagagaactcagagactgaacccaaccagtacagccccgatgactccgagctcttccagattgacagtgagaatgaggccctcctggcagagctcaccaagaccctggatgacatccctgaagatgacgtgggtctggctgccttcccagccctggatggtggagacgctctatcatgcacctcagcttcgcctgccccctcatctgcaccccccagccctgccccggagaagccctcggccccagcccctgaggtggacgagctctcactgctgcagaagctcctcctggccacatcctacccaacatcaagctctgacacccagaaggaagggaccgcctggcgccaggcaggcctcagatctaaaagtcaacggccttgtgttaaggcggacagcacccaagacaagaaggctcccatgatgcagtctcagagccgaagttgtacagaactacataagcacctcacctcggcacagtgctgcctgcaggatcggggtctgcagccaccatgcctccagagtccccggctccctgccaaggaggacaaggagccgggtgaggactgcccgagcccccagccagctccagcctctccccgggactccctagctctgggcagggcagaccccggtgccccggtttcccaggaagacatgcaggcgatggtgcaactcatacgctacatgcacacctactgcctcccccagaggaagctgcccccacagacccctgagccactccccaaggcctgcagcaacccctcccagcaggtcagatcccggccctggtcccggcaccactccaaagcctcctgggctgagttctccattctgagggaacttctggctcaagacgtgctctgtgatgtcagcaaaccctaccgtctggccacgcctgtttatgcctccctcacacctcggtcaaggcccaggccccccaaagacagtcaggcctcccctggtcgcccgtcctcggtggaggaggtaaggatcgcagcttcacccaagagcaccgggcccagaccaagcctgcgcccactgcggctggaggtgaaaagggaggtccgccggcctgccagactgcagcagcaggaggaggaagacgaggaagaagaggaggaggaagaggaagaagaaaaagaggaggaggaggagtggggcaggaaaaggccaggccgaggcctgccatggacgaagctggggaggaagctggagagctctgtgtgccccgtgcggcgttctcggagactgaaccctgagctgggcccctggctgacatttgcagatgagccgctggtcccctcggagccccaaggtgctctgccctcactgtgcctggctcccaaggcctacgacgtagagcgggagctgggcagccccacggacgaggacagtggccaagaccagcagctcctacggggaccccagatccctgccctggagagcccctgtgagagtgggtgtggggacatggatgaggaccccagctgcccgcagctccctcccagagactctcccaggtgcctcatgctggccttgtcacaaagcgacccaacttttggcaagaagagctttgagcagaccttgacagtggagctctgtggcacagcaggactcaccccacccaccacaccaccgtacaagcccacagaggaggatcccttcaaaccagacatcaagcatagtctaggcaaagaaatagctctcagcctcccctcccctgagggcctctcactcaaggccaccccaggggctgcccacaagctgccaaagaagcacccagagcgaagtgagctcctgtcccacctgcgacatgccacagcccagccagcctcccaggctggccagaagcgtcccttctcctgttcctttggagaccatgactactgccaggtgctccgaccagaaggcgtcctgcaaaggaaggtgctgaggtcctgggagccgtctggggttcaccttgaggactggccccagcagggtgccccttgggctgaggcacaggcccctggcagggaggaagacagaagctgtgatgctggcgccccacccaaggacagcacgctgctgagagaccatgagatccgtgccagcctcaccaaacactttgggctgctggagaccgccctggaggaggaagacctggcctcctgcaagagccctgagtatgacactgtctttgaagacagcagcagcagcagcggcgagagcagcttcctcccagaggaggaagaggaagaaggggaggaggaggaggaggacgatgaagaagaggactcaggggtcagccccacttgctctgaccactgcccctaccagagcccaccaagcaaggccaaccggcagctctgttcccgcagccgctcaagctctggctcttcaccctgccactcctggtcaccagccactcgaaggaacttcagatgtgagagcagagggccgtgttcagacagaacgccaagcatccggcacgccaggaagcggcgggaaaaggccattggggaaggccgcgtggtgtacattcaaaatctctccagcgacatgagctcccgagagctgaagaggcgctttgaagtgtttggtgagattgaggagtgcgaggtgctgacaagaaataggagaggcgagaagtacggcttcatcacctaccggtgttctgagcacgcggccctctctttgacaaagggcgctgccctgaggaagcgcaacgagccctccttccagctgagctacggagggctccggcacttctgctggcccagatacactgactacggtaagcccctgaaacccagccacagtctagtaagactcaaagcttgggaagcagtgccttccttgaacaaaacccagagctaaagcgccttgtggacatagcttccatccccacaccccagtgtgctgcttggtataactttgcagccactttgcctgaagactaccatcctgtttctcttctggcctctggtccaccttatcctgtcctgtgactgctaccaaagagaatccagcctcccacggcctctaggaagattcagtcatgtgcacagccagctggcagaaccgtggctacggtctccttgacttcacagggccagctgctaccctgtccccttcaggggcattccgtggtgaccccagacaaggcagcagccacctggggacaagatgatgaagaaggacaaagaagtacaatgtacgaaagaattacttggccaggctcagtggctcatgcctgtaatcccatcaccttgggaggctgaggcaagaggatcacttgagcccaggagttcgagaccagcttgggcaacatagtgaaatcctgtctctacaaaaaatataaaaattagccaggcatggtggcttgcgcctatagtcccagctactcaggaggcagaggtgggaggatcacctgaacccaagaggttggagctgcagtgagccatgatggcactactgcattccagcctgggcaacagagcaagaccctgtctcaaaaggaaagaaaaaaaaaaaaacacttactggagagaatccaatgcagccttgatggtacaggactgagtgtcagtgacccggctgggtgccaggccaggcggccctgcccttggctgcatgtccatttatgggaatcagtttcccaatctattaaaaaattctagtgttggctgggtgcagttgctcacgcctgtaatcccagcactttgggaggccgaggcaggaagatcatgaggtcaagagatcgagaccatcgtggccaacatggtgaaaccccctctctattaaaaatacaaaaattagctgggcgtggtggcgcacacctgtagtcccagcaacttgggaggctgaggcgggagaatcacttgaacccgagaggcagaggttgcagtgagctgagatcacatccctgcactccagccttggtgacagagcgagactgcatctcaaaaaaaaaaaaattctagtgttgttagccctcccttatgtggcactgcagcaggttactaatggacgagaagctgttgggggaagtagagttgtagggtgttggagctagaaaggctctggagtgctctagtttgggcctccaggtctctagataggacagccaaggccctgagacactgataccatggccaagatgtcccagcaggatggcaggcagtgcccacagtccagcgctcatcccagctccccaaggccttgggctgcagccactccacggtgcccactcatagtggcagattcttcaaccatccggtctttgtaagttgctcactgccttcccctcttccctgcctcttcacccccatgcccagattccaattcagaagaggcccttcctgcgtcagggaaaagcaagtatgaagccatggattttgacagcttactgaaagaggcccagcagagcctgcattgataacagccttaaccctcgaggaatacctcaatacctcagacaaggcccttccaatatgtttacgttttcaaagaaatcaagtatatgaggagagcgagcgagcgtgagagaacacccgtgagagagacttgaaactgctgtccttt

SEQ ID NO: 164619 - DNA, 3146 bp, Homo sapiens
  Payload ID: 12430
  Gene Symbol: PPARGC1B
  Gene Name: peroxisome proliferator-activated receptor gamma, coactivator 1 beta
  Uniprot ID: Q86YN6
  ENST ID: ENST00000403750
  CDS Start-End: 198-3077
acattctcattttaatcctcaagcaactctgaattagttgctgttatcccagacttacaggcaggaagcaggctcagagaagtgaaggtttccaacttagacgtgccaggctgtgcacaggtggggacctctgaggggcctgctctgatctgggttggggctgccccaggacccttggaggagccgccaccagagcaatgggtggagggtccggggaggagcaactctatgctgactttccagaacttgacctctcccagctggatgccagcgactttgactcggccacctgctttggggagctgcagtggtgcccagagaactcagagactgaacccaaccagtacagccccgatgactccgagctcttccagattgacagtgagaatgaggccctcctggcagagctcaccaagaccctggatgacatccctgaagatgacgtgggtctggctgccttcccagccctggatggtggagacgctctatcatgcacctcagcttcgcctgccccctcatctgcaccccccagccctgccccggagaagccctcggccccagcccctgaggtggacgagctctcactggcggacagcacccaagacaagaaggctcccatgatgcagtctcagagccgaagttgtacagaactacataagcacctcacctcggcacagtgctgcctgcaggatcggggtctgcagccaccatgcctccagagtccccggctccctgccaaggaggacaaggagccgggtgaggactgcccgagcccccagccagctccagcctctccccgggactccctagctctgggcagggcagaccccggtgccccggtttcccaggaagacatgcaggcgatggtgcaactcatacgctacatgcacacctactgcctcccccagaggaagctgcccccacagacccctgagccactccccaaggcctgcagcaacccctcccagcaggtcagatcccggccctggtcccggcaccactccaaagcctcctgggctgagttctccattctgagggaacttctggctcaagacgtgctctgtgatgtcagcaaaccctaccgtctggccacgcctgtttatgcctccctcacacctcggtcaaggcccaggccccccaaagacagtcaggcctcccctggtcgcccgtcctcggtggaggaggtaaggatcgcagcttcacccaagagcaccgggcccagaccaagcctgcgcccactgcggctggaggtgaaaagggaggtccgccggcctgccagactgcagcagcaggaggaggaagacgaggaagaagaggaggaggaagaggaagaagaaaaagaggaggaggaggagtggggcaggaaaaggccaggccgaggcctgccatggacgaagctggggaggaagctggagagctctgtgtgccccgtgcggcgttctcggagactgaaccctgagctgggcccctggctgacatttgcagatgagccgctggtcccctcggagccccaaggtgctctgccctcactgtgcctggctcccaaggcctacgacgtagagcgggagctgggcagccccacggacgaggacagtggccaagaccagcagctcctacggggaccccagatccctgccctggagagcccctgtgagagtgggtgtggggacatggatgaggaccccagctgcccgcagctccctcccagagactctcccaggtgcctcatgctggccttgtcacaaagcgacccaacttttggcaagaagagctttgagcagaccttgacagtggagctctgtggcacagcaggactcaccccacccaccacaccaccgtacaagcccacagaggaggatcccttcaaaccagacatcaagcatagtctaggcaaagaaatagctctcagcctcccctcccctgagggcctctcactcaaggccaccccaggggctgcccacaagctgccaaagaagcacccagagcgaagtgagctcctgtcccacctgcgacatgccacagcccagccagcctcccaggctggccagaagcgtcccttctcctgttcctttggagaccatgactactgccaggtgctccgaccagaaggcgtcctgcaaaggaaggtgctgaggtcctgggagccgtctggggttcaccttgaggactggccccagcagggtgccccttgggctgaggcacaggcccctggcagggaggaagacagaagctgtgatgctggcgccccacccaaggacagcacgctgctgagagaccatgagatccgtgccagcctcaccaaacactttgggctgctggagaccgccctggaggaggaagacctggcctcctgcaagagccctgagtatgacactgtctttgaagacagcagcagcagcagcggcgagagcagcttcctcccagaggaggaagaggaagaaggggaggaggaggaggaggacgatgaagaagaggactcaggggtcagccccacttgctctgaccactgcccctaccagagcccaccaagcaaggccaaccggcagctctgttcccgcagccgctcaagctctggctcttcaccctgccactcctggtcaccagccactcgaaggaacttcagatgtgagagcagagggccgtgttcagacagaacgccaagcatccggcacgccaggaagcggcgggaaaaggccattggggaaggccgcgtggtgtacattcaaaatctctccagcgacatgagctcccgagagctgaagaggcgctttgaagtgtttggtgagattgaggagtgcgaggtgctgacaagaaataggagaggcgagaagtacggcttcatcacctaccggtgttctgagcacgcggccctctctttgacaaagggcgctgccctgaggaagcgcaacgagccctccttccagctgagctacggagggctccggcacttctgctggcccagatacactgactacgattccaattcagaagaggcccttcctgcgtcagggaaaagcaagtatgaagccatggattttgacagcttactgaaagaggcccagcagagcctgcattgataacagccttaaccctcgaggaatacctcaatacctcagacaaggcccttccaatatgtttacgttttc

SEQ ID NO: 164620 - DNA, 2457 bp, Homo sapiens
  Payload ID: 12430
  Gene Symbol: PPARGC1B
  Gene Name: peroxisome proliferator-activated receptor gamma, coactivator 1 beta
  ENST ID: ENST00000434684
  CDS Start-End: 1-2245
ggcctgcagcaacccctcccagcaggtcagatcccggccctggtcccggcaccactccaaagcctcctgggctgagttctccattctgagggaacttctggctcaagacgtgctctgtgatgtcagcaaaccctaccgtctggccacgcctgtttatgcctccctcacacctcggtcaaggcccaggccccccaaagacagtcaggcctcccctggtcgcccgtcctcggtggaggaggtaaggatcgcagcttcacccaagagcaccgggcccagaccaagcctgcgcccactgcggctggaggtgaaaagggaggtccgccggcctgccagactgcagcagcaggaggaggaagacgaggaagaagaggaggaggaagaggaagaagaaaaagaggaggaggaggagtggggcaggaaaaggccaggccgaggcctgccatggacgaagctggggaggaagctggagagctctgtgtgccccgtgcggcgttctcggagactgaaccctgagctgggcccctggctgacatttgcagatgagccgctggtcccctcggagccccaaggtgctctgccctcactgtgcctggctcccaaggcctacgacgtagagcgggagctgggcagccccacggacgaggacagtggccaagaccagcagctcctacggggaccccagatccctgccctggagagcccctgtgagagtgggtgtggggacatggatgaggaccccagctgcccgcagctccctcccagagactctcccaggtgcctcatgctggccttgtcacaaagcgacccaacttttggcaagaagagctttgagcagaccttgacagtggagctctgtggcacagcaggactcaccccacccaccacaccaccgtacaagcccacagaggaggatcccttcaaaccagacatcaagcatagtctaggcaaagaaatagctctcagcctcccctcccctgagggcctctcactcaaggccaccccaggggctgcccacaagctgccaaagaagcacccagagcgaagtgagctcctgtcccacctgcgacatgccacagcccagccagcctcccaggctggccagaagcgtcccttctcctgttcctttggagaccatgactactgccaggtgctccgaccagaaggcgtcctgcaaaggaaggtgctgaggtcctgggagccgtctggggttcaccttgaggactggccccagcagggtgccccttgggctgaggcacaggcccctggcagggaggaagacagaagctgtgatgctggcgccccacccaaggacagcacgctgctgagagaccatgagatccgtgccagcctcaccaaacactttgggctgctggagaccgccctggaggaggaagacctggcctcctgcaagagccctgagtatgacactgtctttgaagacagcagcagcagcagcggcgagagcagcttcctcccagaggaggaagaggaagaaggggaggaggaggaggaggacgatgaagaagaggactcaggggtcagccccacttgctctgaccactgcccctaccagagcccaccaagcaaggccaaccggcagctctgttcccgcagccgctcaagctctggctcttcaccctgccactcctggtcaccagccactcgaaggaacttcagatgtgagagcagagggccgtgttcagacagaacgccaagcatccggcacgccaggaagcggcgggaaaaggccattggggaaggccgcgtggtgtacattcaaaatctctccagcgacatgagctcccgagagctgaagaggcgctttgaagtgtttggtgagattgaggagtgcgaggtgctgacaagaaataggagaggcgagaagtacggcttcatcacctaccggtgttctgagcacgcggccctctctttgacaaagggcgctgccctgaggaagcgcaacgagccctccttccagctgagctacggagggctccggcacttctgctggcccagatacactgactacggatggcaggcagtgcccacagtccagcgctcatcccagctccccaaggccttgggctgcagccactccacggtgcccactcatagtggcagattcttcaaccatccggtctttgtaagttgctcactgccttcccctcttccctgcctcttcacccccatgcccagattccaattcagaagaggcccttcctgcgtcagggaaaagcaagtatgaagccatggattttgacagcttactgaaagaggcccagcagagcctgcattgataacagccttaaccctcgaggaatacctcaatacctcagacaaggcccttccaatatgtttacgttttcaaagaaatcaagtatatgaggagagcgagcgagcgtgagagaacacccgtgagagagacttgaaactgctgtcctttaaaaaaaaaaaaaa

SEQ ID NO: 164621 - DNA, 5330 bp, Homo sapiens
  Payload ID: 12431
  Gene Symbol: PPRC1
  Gene Name: peroxisome proliferator-activated receptor gamma, coactivator-related 1
  Uniprot ID: Q5VV67
  ENST ID: ENST00000278070
  CDS Start-End: 40-5034
gccagcgatcagagcagcgctgggtgttcaggggccaagatggcggcgcgccggggacggagagacggagtcgcgccgcccccgagtgggggccccggtccggaccctggcgggggagcccgcggcagtggttggggaagtcgaagccaagcgccgtatgggactttgggcgctgtgagcggcggcgagcaggtgctgctgcatgaggaggcgggtgattctggctttgtcagtctctctcggctgggcccatctctgagggacaaggacctggaaatggaggagctaatgctgcaggatgagacactgctggggaccatgcagagctacatggatgcctcccttatctccctcattgaggattttgggagccttggagagagcaggttatctctggaggaccagaatgaagtgtcgctgctcacggctctgacggagatcttggacaatgcagattctgagaacctttctccatttgacagcattcctgattcggagctgcttgtgtcaccccgggagggctcctctctgcacaagctgcttactctctctcggacacccccagaacgtgacctcatcaccccagttgacccactggggcccagtacaggcagcagtagagggagtggggttgaaatgtctcttccagatccctcttgggacttctccccaccctctttcttagagacctcttcccccaagcttcctagctggagacccccaagatcaagaccacgctggggccaatccccacctccccagcagcgcagtgatggagaagaagaggaggaggtggccagcttcagtggccagattcttgccggggagcttgacaactgtgtgagcagtatcccggacttccccatgcatttggcctgccctgaggaggaagataaagcaacagcagcagagatggcagtgccagcagctggtgatgagagcatctcctccctgagtgagctggtgcgggccatgcacccatactgcctgcccaacctcacccacctggcatcacttgaggatgagcttcaggagcagccagatgatttgacactgcctgagggctgcgtagtgctggagattgtggggcaggcagccacagctggcgatgacctggagatcccagttgtggtgcgacaggtctctcctggaccccggcctgtgctcctggatgactcgctagagactagttctgccttgcagctgcttatgcctacactggagtcagagacagaggctgctgtgcccaaggtaaccctctgctctgagaaagaggggttgtcattgaactcagaggagaagctggactcagcctgcttattgaagcccagggaggtcgtggagccggtggtgcccaaggagcctcagaacccacctgccaatgcagcaccaggttcccagagagctcgaaagggcaggaagaagaagagcaaggagcagccagcagcctgtgtggaaggctatgccaggaggctgaggtcatcttctcgcgggcagtctactgtaggtacagaagtgacctctcaggtagacaacttgcagaaacagcctcaggaagaacttcaaaaagagtctgggcctctccagggtaaggggaagccccgggcttgggctcgggcctgggcagctgccttggagaattctagccctaagaacttggagagaagtgctggacaaagtagtcctgctaaagaaggccctctagacctctacccaaagctggctgacactatccaaaccaatcctataccaacccatctctcattggtcgactctgcccaagccagccccatgccagttgactctgttgaagctgatcccactgcagttggccctgttctagctggccctgtacctgttgaccctgggttggttgaccttgcttcaaccagctcagaactggttgagcctctcccggctgagccagtgctgatcaacccagtcctggctgactcagcagcagttgaccctgcagtggttcccatctcagataacttgccaccagttgatgctgtcccgtctggcccagcaccagttgatctagcactggttgaccctgttcctaatgacctgactccagttgacccagtgctagttaagtccagaccaactgatcccagacgtggtgcagtgtcatcagccctggggggttcagcaccccagctcctcgtggagtcagagtccttggacccaccaaagaccatcatccctgaagtcaaagaggttgtggattctctgaaaattgaaagtggtaccagtgctacaacccatgaagccagacctcggcctctcagcttatctgagtaccggcgacgaaggcagcaacgccaagcagaaacagaagagagaagtccacagcccccaactgggaagtggcctagccttccagagactcccacagggctggcagacatcccttgtcttgtcatcccaccagccccagccaagaagacagctctgcagagaagccctgaaacaccccttgagatttgccttgtgcctgtaggtcccagccctgcttctcctagtcctgagccacctgtaagcaaacctgtggcctcatctcccactgagcaggtgccatcccaggagatgccactgttggcgagaccttcccctcctgtgcagtctgtgtcccctgctgtgcccacacctccctcgatgtctgctgccctgcctttccctgcaggtgggcttggcatgccccccagtctgcccccacctcccttgcagcctcctagtcttccattgtctatggggccagtactacctgatccgtttactcactatgcccccttgccatcctggccttgttatcctcatgtgtccccttctggctatccttgcctgccccccccaccaacggtgcccctagtgtctggtactcctggtgcctatgccgtgcctcccacttgcagtgtgccttgggcaccccctcctgccccagtctcaccttacagttccacatgtacctatgggcccttgggatggggcccagggcctcaacatgctccattctggtctactgttcccccacctcctttgcctccagcctccattgggagagctgttccccaacctaaaatggagtctaggggcactccagctggccctcctgaaaatgtacttcccttgtcgatggctcctcccctcagtcttgggctacctggccatggagctcctcagacagagcctaccaaggtggaggtcaagccagtgcctgcatctccccatccgaaacacaaggtgtctgccctggtgcaaagtccccagatgaaggctctagcatgtgtgtctgctgaaggtgtgactgttgaggagcctgcatcagagaggctaaagcctgagacccaagagaccaggcccagggagaagccccccttgcctgctaccaaggctgttcccacaccaaggcagagcactgtccccaagctgcctgctgtccacccagcccgtctaaggaagctgtccttcctgcctaccccacgtactcagggttctgaagatgtggtacaggctttcatcagtgagattggaattgaggcatcggacctgtccagtctgctggagcagtttgagaaatcagaagccaaaaaggagtgtcctcctccggctcctgctgacagcttggctgtaggaaactcaggcggcgttgacattccccaggagaagaggcccctagaccggttacaagccccagaactggccaacgtggcagggctcacccctccagctacccctccccaccagttatggaagcccctggctgctgtctcactgctggccaaagccaaatctcctaagtccaccgcccaggagggaaccctgaagcctgaaggagttacggaggccaaacatccagctgcagttcgcctccaagaaggggtccatggccctagtcgagtccatgtgggctctggggaccatgactattgtgtccggagcaggacccccccaaaaaagatgcctgccctagtcattccagaggtgggctcccgatggaatgtcaagcgccatcaggacatcaccatcaaacctgtcttgtccttgggcccagctgcccctccgcccccatgcatagctgcctcccgggagccgcttgatcacaggactagcagtgagcaggcagatccctcagcaccctgccttgccccatccagcttgctgtcccctgaggcctcaccctgccggaatgacatgaacactaggactccccctgaaccctcagccaagcagcggtcaatgcgctgttaccgaaaagcctgcaggtcagccagcccctcaagccagggctggcagggccgccgaggccgcaacagccgttctgtcagctctgggtccaaccggactagcgaagcatcttcctcatcctcatcatcgtcttcctcatcccgatctcggtccaggtccctctcccccccacacaagaggtggcgaaggtccagctgtagttcctctggacgttctcgaagatgctcttcctcttcttcgtcatcatcttcctcttcgtcttcctcatcctcatcatccagttctcgaagccgctcacgatccccatccccccgccggagaagtgacaggaggcggcggtacagctcttatcgttcacatgaccattaccaaaggcaaagagtgctacaaaaggagcgtgcaatagaagaaagaagggtggtcttcattggaaagatacctggccgcatgactcgatcagagctgaaacagaggttctccgtttttggagagattgaggagtgcaccatccacttccgtgtccaaggggacaactacggcttcgtcacttatcgctatgctgaggaggcatttgcagccattgagagtggccacaagctgcggcaggcagatgagcagccctttgatctctgctttgggggccgaaggcagttctgcaagaggagctattctgatcttgactccaaccgggaagactttgacccagcacctgtaaagagcaaatttgattctcttgactttgacacattgttgaaacaggcccagaagaacctcaggaggtaaccttgggcccttccctgctatcctttttctcctttggaggtgcccaacctcctccacccccttcccctactctaggggagagagctgctagtgagatgactgttttataaagaaatggaaaaaagtgaaataaaaaatatgttgaatcagattttttaaaaggggtatttgtttttttataacaggtattgaaacaagttaacttgcattcctatgtaagataggaggggctgaggggatccccagtgtttggaacataagtcactatgcagactaataaacatcaactagagaga

SEQ ID NO: 164622 - DNA, 2163 bp, Homo sapiens
  Payload ID: 12431
  Gene Symbol: PPRC1
  Gene Name: peroxisome proliferator-activated receptor gamma, coactivator-related 1
  ENST ID: ENST00000370012
  CDS Start-End: 117-2012
ctactgttcccccacctcctttgcctccagcctccattgggagagctgttccccaacctaaaatggagtctaggggcactccagctggccctcctgaaaatgtacttcccttgtcgatggctcctcccctcagtcttgggctacctggccatggagctcctcagacagagcctaccaaggtggaggtcaagccagtgcctgcatctccccatccgaaacacaaggtgtctgccctggtgcaaagtccccagatgaaggctctagcatgtgtgtctgctgaaggtgtgactgttgaggagcctgcatcagagaggctaaagcctgagacccaagagaccaggcccagggagaagccccccttgcctgctaccaaggctgttcccacaccaaggcagagcactgtccccaagctgcctgctgtccacccagcccgtctaaggaagctgtccttcctgcctaccccacgtactcagggttctgaagatgtggtacaggctttcatcagtgagattggaattgaggcatcggacctgtccagtctgctggagcagtttgagaaatcagaagccaaaaaggagtgtcctcctccggctcctgctgacagcttggctgtaggaaactcaggcggcgttgacattccccaggagaagaggcccctagaccggttacaagccccagaactggccaacgtggcagggctcacccctccagctacccctccccaccagttatggaagcccctggctgctgtctcactgctggccaaagccaaatctcctaagtccaccgcccaggagggaaccctgaagcctgaaggagttacggaggccaaacatccagctgcagttcgcctccaagaaggggtccatggccctagtcgagtccatgtgggctctggggaccatgactattgtgtccggagcaggacccccccaaaaaagatgcctgccctagtcattccagaggtgggctcccgatggaatgtcaagcgccatcaggacatcaccatcaaacctgtcttgtccttgggcccagctgcccctccgcccccatgcatagctgcctcccgggagccgcttgatcacaggactagcagtgagcaggcagatccctcagcaccctgccttgccccatccagcttgctgtcccctgaggcctcaccctgccggaatgacatgaacactaggactccccctgaaccctcagccaagcagcggtcaatgcgctgttaccgaaaagcctgcaggtcagccagcccctcaagccagggctggcagggccgccgaggccgcaacagccgttctgtcagctctgggtccaaccggactagcgaagcatcttcctcatcctcatcatcgtcttcctcatcccgatctcggtccaggtccctctcccccccacacaagaggtggcgaaggtccagctgtagttcctctggacgttctcgaagatgctcttcctcttcttcgtcatcatcttcctcttcgtcttcctcatcctcatcatccagttctcgaagccgctcacgatccccatccccccgccggagaagtgacaggaggcggcggtacagctcttatcgttcacatgaccattaccaaaggcaaagagtgctacaaaaggagcgtgcaatagaagaaagaagggtggtcttcattggaaagatacctggccgcatgactcgatcagagctgaaacagaggttctccgtttttggagagattgaggagtgcaccatccacttccgtgtccaaggggacaactacggcttcgtcacttatcgctatgctgaggaggcatttgcagccattgagagtggccacaagctgcggcaggcagatgagcagccctttgatctctgctttgggggccgaaggcagttctgcaagaggagctattctgatcttgactccaaccgggaagactttgacccagcacctgtaaagagcaaatttgattctcttgactttgacacattgttgaaacaggcccagaagaacctcaggaggtaaccttgggcccttccctgctatcctttttctcctttggaggtgcccaacctcctccacccccttcccctactctaggggagagagctgctagtgagatgactgttttataaagaaatggaaaaaagtgaaataaaaaatatgttgaatcaga

SEQ ID NO: 164623 - DNA, 4580 bp, Homo sapiens
  Payload ID: 12431
  Gene Symbol: PPRC1
  Gene Name: peroxisome proliferator-activated receptor gamma, coactivator-related 1
  ENST ID: ENST00000413464
  CDS Start-End: 76-4278
gtagttcctttcccacaatcggctgggcgaggcggcgccagcgatcagagcagcgctgggtgttcaggggccaagatggcggcgcgccggggacggagagacggagtcgcgccgcccccgagtgggggccccggtccggaccctggcgggggagcccgcggcagtggttggggaagtcgaagccaagcgccgtatgggactttgggcgctgtgagcggcggcgagcaggtgctgctgcatgaggaggcgggtgattctggctttgtcagtctctctcggctgggcccatctctgagggacaaggacctggaaatggaggagctaatgctgcaggatgagacactgctggggaccatgcagagctacatggatgcctcccttatctccctcattgaggattttgggagccttggagagagcaggttatctctggaggaccagaatgaagtgtcgctgctcacggctctgacggagatcttggacaatgcagattctgagaacctttctccatttgacagcattcctgattcggagctgcttgtgtcaccccgggagggctcctctctgcacaagctgcttactctctctcggacacccccagaacgtgacctcatcaccccagttgacccactggggcccagtacaggcagcagtagagggagtggggttgaaatgtctcttccagatccctcttgggacttctccccaccctctttcttagagacctcttcccccaagcttcctagctggagacccccaagatcaagaccacgctggggccaatccccacctccccagcagcgcagtgatggagaagaagaggaggaggtggccagcttcagtggccagattcttgccggggagcttgacaactgtgtgagcagtatcccggacttccccatgcatttggcctgccctgaggaggaagataaagcaacagcagcagagatggcagtgccagcagctggtgatgagagcatctcctccctgagtgagctggtgcgggccatgcacccatactgcctgcccaacctcacccacctggcatcacttgaggatgagcttcaggagcagccagatgatttgacactgcctgagggctgcgtagtgctggagattgtggggcaggcagccacagctggcgatgacctggagatcccagttgtggtgcgacaggtctctcctggaccccggcctgtgctcctggatgactcgctagagactagttctgccttgcagctgcttatgcctacactggagtcagagacagaggctgctgtgcccaaggtaaccctctgctctgagaaagaggggttgtcattgaactcagaggagaagctggactcagcctgcttattgaagcccagggaggtcgtggagccggtggtgcccaaggagcctcagaacccacctgccaatgcagcaccaggttcccagagagctcgaaagggcaggaagaagaagagcaaggagcagccagcagcctgtgtggaaggctatgccaggaggctgaggtcatcttctcgcgggcagtctactgtaggtacagaagtgacctctcaggtagacaacttgcagaaacagcctcaggaagaacttcaaaaagagtctgggcctctccagggtaaggggaagccccgggcttgggctcgggcctgggcagctgccttggagaattctagccctaagaacttggagagaagtgctggacaaagtagtcctgctaaagaaggccctctagacctctacccaaagctggctgacactatccaaaccaatcctataccaacccatctctcattggtcgactctgcccaagccagccccatgccagttgactctgttgaagctgatcccactgcagttggccctgttctagctggccctgtacctgttgaccctgggttggttgaccttgcttcaaccagctcagaactggttgagcctctcccggctgagccagtgctgatcaacccagtcctggctgactcagcagcagttgaccctgcagtggttcccatctcagataacttgccaccagttgatgctgtcccgtctggcccagcaccagttgatctagcactggttgaccctgttcctaatgacctgactccagttgacccagtgctagttaagtccagaccaactgatcccagacgtggtgcagtgtcatcagccctggggggttcagcaccccagctcctcgtggagtcagagtccttggacccaccaaagaccatcatccctgaagtcaaagaggttgtggattctctgaaaattgaaagtggtaccagtgctacaacccatgaagccagacctcggcctctcagcttatctgagtaccggcgacgaaggcagcaacgccaagcagaaacagaagagagaagtccacagcccccaactgggaagtggcctagccttccagagactcccacagggctggcagacatcccttgtcttgtcatcccaccagccccagccaagaagacagctctgcagagaagccctgaaacaccccttgagatttgccttgtgcctgtaggtcccagccctgcttctcctagtcctgagccacctgtaagcaaacctgtggcctcatctcccactgagcaggtgccatcccaggagatgccactgttggcgagaccttcccctcctgtgcagtctgtgtcccctgctgtgcccacacctccctcgatgtctgctgccctgcctttccctgcaggtgggcttggcatgccccccagtctgcccccacctcccttgcagcctcctagtcttccattgtctatggggccagtactacctgatccgtttactcactatgcccccttgccatcctggccttgttatcctcatgtgtccccttctggctatccttgcctgccccccccaccaacggtgcccctagtgtctggtactcctggtgcctatgccgtgcctcccacttgcagtgtgccttgggcaccccctcctgccccagtctcaccttacagttccacatgtacctatgggcccttgggatggggcccagggcctcaacatgctccattctggtctactgttcccccacctcctttgcctccagcctccattgggagagctgttccccaacctaaaatggagtctaggggcactccagctggccctcctgaaaatgtacttcccttgtcgatggctcctcccctcagtcttgggctacctggccatggagctcctcagacagagcctaccaaggtggaggtcaagccagtgcctgcatctccccatccgaaacacaaggtgtctgccctggtgcaaagtccccagatgaaggctctagcatgtgtgtctgctgaaggtgtgactgttgaggagcctgcatcagagaggctaaagcctgagacccaagagaccaggcccagggagaagccccccttgcctgctaccaaggctgttcccacaccaaggcagagcactgtccccaagctgcctgctgtccacccagcccgtctaaggaagctgtccttcctgcctaccccacgtactcagggttctgaagatgtggtacaggctttcatcagtgagattggaattgaggcatcggacctgtccagtctgctggagcagtttgagaaatcagaagccaaaaaggagtgtcctcctccggctcctgctgacagcttggctgtaggaaactcagggtccagctgtagttcctctggacgttctcgaagatgctcttcctcttcttcgtcatcatcttcctcttcgtcttcctcatcctcatcatccagttctcgaagccgctcacgatccccatccccccgccggagaagtgacaggaggcggcggtacagctcttatcgttcacatgaccattaccaaaggcaaagagtgctacaaaaggagcgtgcaatagaagaaagaagggtggtcttcattggaaagatacctggccgcatgactcgatcagagctgaaacagaggttctccgtttttggagagattgaggagtgcaccatccacttccgtgtccaaggggacaactacggcttcgtcacttatcgctatgctgaggaggcatttgcagccattgagagtggccacaagctgcggcaggcagatgagcagccctttgatctctgctttgggggccgaaggcagttctgcaagaggagctattctgatcttgactccaaccgggaagactttgacccagcacctgtaaagagcaaatttgattctcttgactttgacacattgttgaaacaggcccagaagaacctcaggaggtaaccttgggcccttccctgctatcctttttctcctttggaggtgcccaacctcctccacccccttcccctactctaggggagagagctgctagtgagatgactgttttataaagaaatggaaaaaagtgaaataaaaaatatgttgaatcagattttttaaaaggggtatttgtttttttataacaggtattgaaacaagttaacttgcattcctatgtaagataggaggggctgaggggatccccagtgtttggaacataagtcactatgcagactaataaacatcaactagagagaactccc

SEQ ID NO: 164624 - DNA, 4290 bp, Homo sapiens
  Payload ID: 12432
  Gene Symbol: PERP
  Gene Name: PERP, TP53 apoptosis effector
  Uniprot ID: Q96FX8
  ENST ID: ENST00000421351
  CDS Start-End: 172-753
ggaatctaggtggggccgcccggagcggcgtcctcgggagccgcctccccgcggcctcttcgcttttgtggcggcgcccgcgctcgcaggccactctctgctgtcgcccgtcccgcgcgctcctccgacccgctccgctccgctccgctcggccccgcgccgcccgtcaacatgatccgctgcggcctggcctgcgagcgctgccgctggatcctgcccctgctcctactcagcgccatcgccttcgacatcatcgcgctggccggccgcggctggttgcagtctagcgaccacggccagacgtcctcgctgtggtggaaatgctcccaagagggcggcggcagcgggtcctacgaggagggctgtcagagcctcatggagtacgcgtggggtagagcagcggctgccatgctcttctgtggcttcatcatcctggtgatctgtttcatcctctccttcttcgccctctgtggaccccagatgcttgtcttcctgagagtgattggaggtctccttgccttggctgctgtgttccagatcatctccctggtaatttaccccgtgaagtacacccagaccttcacccttcatgccaaccctgctgtcacttacatctataactgggcctacggctttgggtgggcagccacgattatcctgattggctgtgccttcttcttctgctgcctccccaactacgaagatgaccttctgggcaatgccaagcccaggtacttctacacatctgcctaacttgggaatgaatgtgggagaaaatcgctgctgctgagatggactccagaagaagaaactgtttctccaggcgactttgaacccattttttggcagtgttcatattattaaactagtcaaaaatgctaaaataatttgggagaaaatattttttaagtagtgttatagtttcatgtttatcttttattatgttttgtgaagttgtgtcttttcactaattacctatactatgccaatatttccttatatctatccataacatttatactacatttgtaagagaatatgcacgtgaaacttaacactttataaggtaaaaatgaggtttccaagatttaataatctgatcaagttcttgttatttccaaatagaatggactcggtctgttaagggctaaggagaagaggaagataaggttaaaagttgttaatgaccaaacattctaaaagaaatgcaaaaaaaaagtttattttcaagccttcgaactatttaaggaaagcaaaatcatttcctaaatgcatatcatttgtgagaatttctcattaatatcctgaatcattcattttagctaaggcttcatgttgactcgatatgtcatctaggaaagtactatttcatggtccaaacctgttgccatagttggtaaggctttcctttaagtgtgaaatatttagatgaaattttctcttttaaagttctttatagggttagggtgtgggaaaatgctatattaataaatctgtagtgttttgtgtttatatgttcagaaccagagtagactggattgaaagatggactgggtctaatttatcatgactgatagatctggttaagttgtgtagtaaagcattaggagggtcattcttgtcacaaaagtgccactaaaacagcctcaggagaataaatgacttgcttttctaaatctcaggtttatctgggctctatcatatagacaggcttctgatagtttgcaactgtaagcagaaacctacatatagttaaaatcctggtctttcttggtaaacagattttaaatgtctgatataaaacatgccacaggagaattcggggatttgagtttctctgaatagcatatatatgatgcatcggataggtcattatgattttttaccatttcgacttacataatgaaaaccaattcattttaaatatcagattattattttgtaagttgtggaaaaagctaattgtagttttcattatgaagttttcccaataaaccaggtattctaaacttgtttccagtttgtagtttttccatttttcaaatctggggaaaggaattaaaaaaaaaatgggtaataagaacatgggatataatgaaaagtggtttttgtttgtttttttgtttgaagttttaagggccttgctcattttaggtgtccaaaaccaatttttgagtggagattaatgaattctaatagtctattccctgaacttttcctcaatgaacaataccctagacacacattaaacaatttctctgcagtgctatcaaccagaggaaaatggactaagagatttctggcaggttcagacacccgggggacatgtgtgcagtgtagctgaagcctcctccttgtgctggggtccccttccattcaggtggtggggtagcagtctctctattttccccttgccctccttcccattttatcatttgttattttttttcccaccataagtcatatgttacttccactatggtgtatgtcattgtgaggatgggtgcagagaggctgggtgggagaacggaaatatatctccctagggctactgttggccagctagtccttggcagtgaatttttctatgcttttcaaaatgcgaggtgaatgtttctcatagagaaatgtaatctgggtgattataccaaaattgaaaagaaaaacccacacaactatgccgtggctggtggagaatttgaagtggtcattaaaaatgttaaaaatcccatcttttaaagtgataccacagctcattcaagaagatactggatatctagagattaagaaacgtggtctcctgttaaacatgaaaatgactccgtttataagcttctctaccacatgcacttgtctttgcatgatttcccatccagccttcttcccctcctcaatcacacaataccttaacggcgcacatttaggaaaaatgcaacctcctgggaccaacgagcctgatataatagaaccatgtcaacctaaagtatttatgacaaagataaactcttattttgcagaaatggtctgcttccttcagccttgttctagtatagagatctgccattccttgttgatccagattcaccaagacagatacctttatgtcataacagaagggaagttccagaggattctggagagtaatgaagaattgggctgagaaaccacctgaaggctaacagtgcattgcatgagatttcccacagtaaagctgaggtgctttttggttcagtaattaaatattgagttcccaccctttaaataagcagttctaggttcctaagcaattatttcactctgtaagtagccagacatgctaagtggcacttactgctgattgtaacaaagaagtaatatatcaaggtctttccatgttcacacaaggtagcttgtgtgtaataacttagcttcaaaaccatagactgcagaactcacaagttcaacagcctttccttttttaaggaaatgaaaacaatggaaaatatagtcatcataacttaattcggtttattttttttttctgtaaactccccctgaaagacattcctattaatacagtaaatgtgaacactgacttgtttttataagcacatctgaaagggcatatttgagtctcatcccaactttggtccttgctatctgtgcaggcttgggcaggtcatctccctgctggtctcaatatcctcacctgtaaaatgattgtaaatgatccccctaccttcaagattctctgattgatagaattttttctttaattaaaaaattttaaatattccttgagttggaagcactgatcaataagtggattgcttagggaggttggaacgaatagattcagtcccaacttcctcttttaaattccctcttcctcactcttcctgcaacacttatttttacagttgagttttaaaaataagtaatatataaaataatttctgtagtgtggtttcagatttaaaaattcctgcagacaggctgggcttgcaaccccatcagtcgatggtcagagccctttgctttttgagaccatttttaggtgagcttggcttgcctggatacagtgtgcagtgcattcttcctgaattttgcaattctggtatctgggtgtattttctaggtgtgtcagggtgagtgtaatccacctagggtgtggaaaaagccaagaaagggaaattaaaagaggttcctatccagtcatgttaatgatcttccacttgtactatcctgtgcttcgttgttaacctcgaaaacatactttgttggctgcaaaaataaacaaagggaaactca

SEQ ID NO: 164625 - DNA, 471 bp, Homo sapiens
  Payload ID: 12433
  Gene Symbol: PSPN
  Gene Name: persephin
  Uniprot ID: O60542
  ENST ID: ENST00000245810
  CDS Start-End: 1-471
atggccgtagggaagttcctgctgggctccctgctgctcctgtccctgcagctgggacagggctggggccccgatgcccgtggggttcccgtggccgatggagagttctcgtctgaacaggtggcaaaggctggagggacctggctgggcacccaccgcccccttgcccgcctgcgccgagccctgtctggtccatgccagctgtggagcctgaccctgtccgtggcagagctaggcctgggctacgcctcagaggagaaggtcatcttccgctactgcgccggcagctgcccccgtggtgcccgcacccagcatggcctggcgctggcccggctgcagggccagggccgagcccacggcgggccctgctgccggcccactcgctacaccgacgtggccttcctcgatgaccgccaccgctggcagcggctgccccagctctcggcggctgcctgcggctgtggtggctga

SEQ ID NO: 164626 - DNA, 3911 bp, Homo sapiens
  Payload ID: 12433
  Gene Symbol: PSPN
  Gene Name: persephin
  ENST ID: ENST00000597721
  CDS Start-End: 3210-3704
cagcctcccgagtagctgggattacgggcgcccgccaccgcgcctggctaatttttgtatttttagtagagacggtgtttcagcatgttggccaggctggtctcgaactcctggccataggtgatctgcctgcctcgtcctcccaaagtactgggattacaggcgtgagccactgcacccacccacgcctggctgatgtttttattttactcatcctgactgaggtctgacaatcctagaagctgaagttcccgggcatccttttgtttcttctgactccccttagtgatagattttcttgtgatttgggattggatgctcatggccagctgggggctctgtgggaatccggggtggcctactttgcaggcagtccttccagatggttcagccttggctttcgctagctacccaggagcgccagccccagcccattttgtgtgtggttctcagcttgcaggtggccaccaaagccaaccccccccactgccccgattgtgggtccctatgtttgaggttcccggtgatgtttcggggggcttctcccttcttacaagctcggtcatgcatatatttgatctggcgttgccaggcattctgtaagggagggcttttccagttcctggaaatggaactggaaaatgtggctggaaacattaatatggctggaaatggaatttgcctgcagccactacttttgaacccatcttccgggcaatcccttctgtcttgccggtggttggaaacttgcaggtggaagtcttccccacccagttctgcagcccttggctgccgagcaggaatgcctgagatgtctggctaattcctcggaatgtcccagttcaggccaacctccctcccccttctcccaccaggccttcttgggcagcagggaggcagctctggagggagccgctgcctcagcagtttcgccccagccacccccactgcctgggccttcatgtaaggaggctgggtggtgaggccctgtggtgaggagcaggggttttgcattcacggaggacctgggttcaaataccaggaccgttgcttaattctgggtgacttcaggcttttttttttttttttttgagatggggtctcgctctgtcgcccaggctggagtgcagtgacatgatctccgctcactgcagcctccgcctcctgggttcaagcaattctacctcagtctcctgagtagctgggatgacaggcacgccccaccacggtccagctaatttgttttttgggtttctgagacggagtttcatgctgctgcccaggctggagtgcagtggtgcaatcttggctcactgcagcctctgcctcctgggttccaagcgattctcctgcctcagcctcccgagtagctgggactacacccagctaattttttaatagagacggagtttcaccatgttgaccaggctggtcttgaactgacctcaggtgatctgcccacctcggcctcccaaagtgctgggattacaggcgtgagccactgtgcctcgcctaatttttgtattttcgttagagacagggattcaccatgttggcctggctggtctcaaactcccgacctcaagtgatcctcccacctcaccctcccaaagtgctgggattataggcatgagccactgggccccgccaggcttttttgagacagtatcgctctgtcgcccaggtttgagtgcaatggcacaatctcagctcactgcaacctccacctctcaggttcaagcaattctcctgcctcagcctcccgagtagctgggattacaggcgcccaccaccatgcccagctaatttttgtatttttaatagagatggatttcaccatgttggtcaagctggtctcaaactcctgacctcaggtaatccacccgcctcagcctcccgaggcatgagccaccacgccaagcccaggcttttctttccatcggaaaattatcatctcaataagcacttcagtaagaaaaaccacaacataatcatcgaagcaatccctcacggatggagttgaggccacttccagactttcctaatatgaagaaggcatcagatgtccctgtgctggctgtttcacttgcctgtgtgggaggaaccccgcaaacagggctcctggggcagagggtgtaatttacaattccccagtagcagctgctcatccaaagagctgctagcaatttacacccccaccaacagcacagggtgcacctgggtcacacgggttgtgtgtgagggttttctgattttccccaatcttgtgggtgcttagagtcaagcaccccttcggacaatcacaagctgtttgcttgtttttgcattcgaagctacgggcactgccttacactctaagtgcccatctctttcctcaccaagccgagtaggaggggttctgaggagctcccctgtaccggtgaggggactgggctcacacggggctgggtatggaagcctcgagagcccttatctgtctgcatcgtgctagacgttaccatgacctggacagcctccatcgccccgggggctctgacatgctcagatcccaggatggggctgcagttataggggtctcaggttggccttcccgagacaggcgtccctgtccccttgtgtccccacccttggctgtccccaggcctctcccttttcctgttttgatgctggctcagccaggcccggagacaggggcatgatgtcctaatcctccaggcgggagccaccatggagggttcccgtggactcagtcccctgccaagccacctttcccagcactcacatatgctccacctggcacatgatacacgtgggggctcctgagccccagcaccctgacttagtggggagggaccccaccggggtcccatgaagccccctgacttccactccaggcagcaggtcgggggaacaccagttgcctgccctggccgccagcacagcactcgtaaatcagggggtgtctggggcgtcggaaatggctgtgtggaatgtcggggtggggtaggctgggggtgagcccttaactcttagaagggtggggtgtggggcagaaggagcagatgcctggattcgagggtgcaggagatgggctggtgcagacgtggggcctcctggctgcaggggccggcagtgaagaggttagctcccagcccaggcagggcataaatttggggcacagctcccactctcaggacctgcccgtcacaatggccgtagggaagttcctgctgggctccctgctgctcctgtccctgcagctgggacagggctggggccccgatgcccgtggggttcccgtggccgatggagagttctcgtctgaacaggtggcaaaggctggagggacctggctgggtaaggacttccagggaccctctgtgacttcccaactttccccagccctgaccctgctcactgtcagcgcccttccctcccacaggcacccaccgcccccttgcccgcctgcgccgagccctgtctggtccatgccagctgtggagcctgaccctgtccgtggcagagctaggcctgggctacgcctcagaggagaaggtcatcttccgctactgcgccggcagctgcccccgtggtgcccgcacccagcatggcctggcgctggcccggctgcagggccagggccgagcccacggcgggccctgctgccggcccactcgctacaccgacgtggccttcctcgatgaccgccaccgctggcagcggctgccccagctctcggcggctgcctgcggctgtggtggctgagggtgcccggcctggcacccagaagctgcagtgctgggggagctcggctgacttatttattggagacctggatgcagagacaacgaggaggggagtgggctggggcgaccagcagtgagtgcaataaaggacaccactctcccggc

SEQ ID NO: 164627 - DNA, 1988 bp, Homo sapiens
  Payload ID: 12434
  Gene Symbol: PES1
  Gene Name: pescadillo ribosomal biogenesis factor 1
  Uniprot ID: O00541
  ENST ID: ENST00000335214
  CDS Start-End: 26-1777
ctagtcggctcctcaacgtggagcgatgggaggccttgagaagaagaagtatgaacgaggctcggccaccaactacatcacccggaacaaagcccggaagaagctccagctgagcttggctgactttaggcggctgtgcattctgaagggcatttatccccatgaacccaaacacaagaagaaggttaacaagggttctacagcagcccgaacgttttaccttatcaaagacatcaggtttctcctccacgaacccattgtcaacaagttccgtgaatacaaggtgttcgtccggaagctccggaaggcttatgggaagagcgagtggaacactgtagagcgtttaaaggacaataagcccaactacaaactcgaccacatcatcaaggaacggtatcccacgttcatcgatgccctgcgggacctggacgatgccctctccatgtgcttcctgttttccaccttcccgcggactggcaagtgccacgtgcagaccattcagctgtgccgccggctcactgtggagttcatgcactacattatcgctgcccgtgccctgcgcaaggtcttcctgtccatcaaaggcatttactaccaggccgaggtactggggcagcccatcgtgtggatcactccctatgccttctcccatgaccacccgacagacgtggactacagggtcatggccaccttcaccgagttctacaccacgctgctgggctttgtcaacttccgcctttaccagttgctcaacctccactatcccccgaagctcgagggtcaggcccaagcagaggcaaaggccggtgagggcacctacgcgttggactccgagagttgtatggagaaactggcagccctcagtgccagcctggcccgcgtggtggtgcctgccacagaggaggaggccgaggtggatgagtttcccaccgatggggaggaagaccgcaggaaggagctggaggcgcaggagaagcacaagaagctttttgagggcctgaagttcttcctgaaccgagaggtgccccgtgaggccctggccttcatcatcaggagttttggtggggaagtgtcctgggacaaatctttgtgcattggggccacctatgacgtcacagactcccgcatcacccatcagattgtcgaccggcctgggcagcagacctcagtcattggcaggtgctacgtgcagccccagtgggtgtttgactcagtgaacgccaggctccttctccccgtggcagagtacttctctggggtgcagctgcccccacacctttcaccctttgtgaccgagaaggaaggagattacgttccacctgagaagctgaagctgctggctctgcagcggggagaggacccaggaaacctgaatgagtcagaagaggaggaggaagaggacgacaacaacgaaggtgatggtgatgaagagggagaaaatgaggaggaggaggaagatgcagaggctggttcagaaaaggaggaagaggcccggctggcagccctggaagagcagaggatggaggggaagaagcccagggtgatggcaggcaccttgaagctggaggataagcagcggctggcccaggaggaggagagtgaggccaagcgcctggccattatgatgatgaagaagcgggagaagtacctgtaccagaagatcatgtttggcaagaggcgaaaaatccgagaggccaacaagctggcggagaagcggaaagcccacgatgaggcggtgaggtctgagaagaaggccaagaaggcaaggccggagtgagtgcctgcggcccctcacagggctgaggccagcccctagcagctggatgtggcagaggcaggccagaggacctaagtgtgatggaccagagtcacttctcctcctcctttctccagccagccctgacccctcatgctctctggctgggccagtgggcagccctcgcttcccttggatggagctgccctgctggtgcctggtcagagaagag

SEQ ID NO: 164628 - DNA, 2295 bp, Homo sapiens
  Payload ID: 12434
  Gene Symbol: PES1
  Gene Name: pescadillo ribosomal biogenesis factor 1
  Uniprot ID: O00541
  ENST ID: ENST00000354694
  CDS Start-End: 108-1874
agacagcgtggggtggggagggtcctcggggtccttggcagggcacgtgcgggaggaagtggagctccctgtacgcgcggccctagtcggctcctcaacgtggagcgatgggaggccttgagaagaagaagtatgaacgaggctcggccaccaactacatcacccggaacaaagcccggaagaagctccagctgagcttggctgactttaggcggctgtgcattctgaagggcatttatccccatgaacccaaacacaagaagaaggttaacaagggttctacagcagcccgaacgttttaccttatcaaagacatcaggtttctcctccacgaacccattgtcaacaagttccgtgaatacaaggtgttcgtccggaagctccggaaggcttatgggaagagcgagtggaacactgtagagcgtttaaaggacaataagcccaactacaaactcgaccacatcatcaaggaacggtatcccacgttcatcgatgccctgcgggacctggacgatgccctctccatgtgcttcctgttttccaccttcccgcggactggcaagtgccacgtgcagaccattcagctgtgccgccggctcactgtggagttcatgcactacattatcgctgcccgtgccctgcgcaaggtcttcctgtccatcaaaggcatttactaccaggccgaggtactggggcagcccatcgtgtggatcactccctatgccttctcccatgaccacccgacagacgtggactacagggtcatggccaccttcaccgagttctacaccacgctgctgggctttgtcaacttccgcctttaccagttgctcaacctccactatcccccgaagctcgagggtcaggcccaagcagaggcaaaggccggtgagggcacctacgcgttggactccgagagttgtatggagaaactggcagccctcagtgccagcctggcccgcgtggtggtgcctgccacagaggaggaggccgaggtggatgagtttcccaccgatggggagatgtcagcgcaggaggaagaccgcaggaaggagctggaggcgcaggagaagcacaagaagctttttgagggcctgaagttcttcctgaaccgagaggtgccccgtgaggccctggccttcatcatcaggagttttggtggggaagtgtcctgggacaaatctttgtgcattggggccacctatgacgtcacagactcccgcatcacccatcagattgtcgaccggcctgggcagcagacctcagtcattggcaggtgctacgtgcagccccagtgggtgtttgactcagtgaacgccaggctccttctccccgtggcagagtacttctctggggtgcagctgcccccacacctttcaccctttgtgaccgagaaggaaggagattacgttccacctgagaagctgaagctgctggctctgcagcggggagaggacccaggaaacctgaatgagtcagaagaggaggaggaagaggacgacaacaacgaaggtgatggtgatgaagagggagaaaatgaggaggaggaggaagatgcagaggctggttcagaaaaggaggaagaggcccggctggcagccctggaagagcagaggatggaggggaagaagcccagggtgatggcaggcaccttgaagctggaggataagcagcggctggcccaggaggaggagagtgaggccaagcgcctggccattatgatgatgaagaagcgggagaagtacctgtaccagaagatcatgtttggcaagaggcgaaaaatccgagaggccaacaagctggcggagaagcggaaagcccacgatgaggcggtgaggtctgagaagaaggccaagaaggcaaggccggagtgagtgcctgcggcccctcacagggctgaggccagcccctagcagctggatgtggcagaggcaggccagaggacctaagtgtgatggaccagagtcacttctcctcctcctttctccagccagccctgacccctcatgctctctggctgggccagtgggcagccctcgcttcccttggatggagctgccctgctggtgcctggtcagagaagaggcctctgtgcccagcctgattctctgctcccaggagccagtgacatgaggtgcagaggcccacccagccccctacctactgcccccattcatcctggctttccacagccccctcccacacagttggacccgtgattctcagggtgctgtgatggggtgagggtagggggagcatttgttattaaatgactggacttttgtgccaattgca

SEQ ID NO: 164629 - DNA, 2144 bp, Homo sapiens
  Payload ID: 12434
  Gene Symbol: PES1
  Gene Name: pescadillo ribosomal biogenesis factor 1
  ENST ID: ENST00000402284
  CDS Start-End: 48-1763
ggagctccctgtacgcgcggccctagtcggctcctcaacgtggagcgatgggaggccttgagaagaagaagtatgaacgaggctcggccaccaactacatcacccggaacaaagcccggaagaagctccagctgagcttggctgactttaggcggctgtgcattctgaagggcatttatccccatgaacccaaacacaagaagaaggttaacaagggttctacagcagcccgaacgttttaccttatcaaagacatcaggtttctcctccacgaacccattgtcaacaagttccgtgaatacaaggtgttcgtccggaagctccggaaggcttatgggaagagcgagtggaacactgtagagcgtttaaaggacaataagcccaactacaaactcgaccacatcatcaaggaacggtatcccacgttcatcgatgccctgcgggacctggacgatgccctctccatgtgcttcctgttttccaccttcccgcggactggcaagtgccacgtgcagaccattcagctgtgccgccggctcactgtggagttcatgcactacattatcgctgcccgtgccctgcgcaaggtcttcctgtccatcaaaggcatttactaccaggccgagcacccgacagacgtggactacagggtcatggccaccttcaccgagttctacaccacgctgctgggctttgtcaacttccgcctttaccagttgctcaacctccactatcccccgaagctcgagggtcaggcccaagcagaggcaaaggccggtgagggcacctacgcgttggactccgagagttgtatggagaaactggcagccctcagtgccagcctggcccgcgtggtggtgcctgccacagaggaggaggccgaggtggatgagtttcccaccgatggggagatgtcagcgcaggaggaagaccgcaggaaggagctggaggcgcaggagaagcacaagaagctttttgagggcctgaagttcttcctgaaccgagaggtgccccgtgaggccctggccttcatcatcaggagttttggtggggaagtgtcctgggacaaatctttgtgcattggggccacctatgacgtcacagactcccgcatcacccatcagattgtcgaccggcctgggcagcagacctcagtcattggcaggtgctacgtgcagccccagtgggtgtttgactcagtgaacgccaggctccttctccccgtggcagagtacttctctggggtgcagctgcccccacacctttcaccctttgtgaccgagaaggaaggagattacgttccacctgagaagctgaagctgctggctctgcagcggggagaggacccaggaaacctgaatgagtcagaagaggaggaggaagaggacgacaacaacgaaggtgatggtgatgaagagggagaaaatgaggaggaggaggaagatgcagaggctggttcagaaaaggaggaagaggcccggctggcagccctggaagagcagaggatggaggggaagaagcccagggtgatggcaggcaccttgaagctggaggataagcagcggctggcccaggaggaggagagtgaggccaagcgcctggccattatgatgatgaagaagcgggagaagtacctgtaccagaagatcatgtttggcaagaggcgaaaaatccgagaggccaacaagctggcggagaagcggaaagcccacgatgaggcggtgaggtctgagaagaaggccaagaaggcaaggccggagtgagtgcctgcggcccctcacagggctgaggccagcccctagcagctggatgtggcagaggcaggccagaggacctaagtgtgatggaccagagtcacttctcctcctcctttctccagccagccctgacccctcatgctctctggctgggccagtgggcagccctcgcttcccttggatggagctgccctgctggtgcctggtcagagaagaggcctctgtgcccagcctgattctctgctcccaggagccagtgacatgaggtgcagaggcccacccagccccctacctactgcccccattcatcctggctttccacagccccctcccacacagttggacccgtgattctcagggtgctgtgatggggtgagggtaggggga

SEQ ID NO: 164630 - DNA, 2760 bp, Homo sapiens
  Payload ID: 12434
  Gene Symbol: PES1
  Gene Name: pescadillo ribosomal biogenesis factor 1
  ENST ID: ENST00000402281
  CDS Start-End: 993-2342
agggaacaaagggaggaggagggctagtgggaccatgtgagacatcttgaggccattcacgttcctgcttaaagagcccgggaccagcgcagagggcctgatgcctgatctgtcaagtctgtccgaccgtgcctgtctgctgtccccccagctgttccagtggtggattggcaggaccgggtgcctacccggtactccttaccaaaggagcccctggtagtgcccacctagcccaggacaaggagtggaacgggagctgcagctgcagtggtcacgaaggcagcctggaggaggtggccatggaggatagccttcgttatcgtcagcctctgccgcataaccgcgaatgaaccaaagagaacccgaagccggtgggaactcagcgcagtctcaccctgcccctcgggaaccgcttctcagcagcggcagccgaagtctgacgacgcttagcaaccgttaccttgacaacgcaatcctatcgcgcaccatggagtgcggcgcccctctgcatcccagaaggcaccgcgctgtccctaagccttccgcccctctccgtcccaacatgcaacgaggctcacagtcaatgaatcgtcatcaggtatgaacgaggctcggccaccaactacatcacccggaacaaagcccggaagaagctccagctgagcttggctgactttaggcggctgtgcattctgaagggcatttatccccatgaacccaaacacaagaagaaggttaacaagggttctacagcagcccgaacgttttaccttatcaaagacatcaggtttctcctccacgaacccattgtcaacaagttccgtgaatacaaggtgttcgtccggaagctccggaaggcttatgggaagagcgagtggaacactgtagagcgtttaaaggacaataagcccaactacaaactcgaccacatcatcaaggaacggtatcccacgttcatcgatgccctgcgggacctggacgatgccctctccatgtgcttcctgttttccaccttcccgcggactggcaagtgccacgtgcagaccattcagctgtgccgccggctcactgtggagttcatgcactacattatcgctgcccgtgccctgcgcaaggtcttcctgtccatcaaaggcatttactaccaggccgaggtactggggcagcccatcgtgtggatcactccctatgccttctcccatgaccacccgacagacgtggactacagggtcatggccaccttcaccgagttctacaccacgctgctgggctttgtcaacttccgcctttaccagttgctcaacctccactatcccccgaagctcgagggtcaggcccaagcagaggcaaaggccggtgagggcacctacgcgttggactccgagagttgtatggagaaactggcagccctcagtgccagcctggcccgcgtggtggtgcctgccacagaggaggaggccgaggtggatgagtttcccaccgatggggagatgtcagcgcaggaggaagaccgcaggaaggagctggaggcgcaggagaagcacaagaagctttttgagggcctgaagttcttcctgaaccgagaggtgccccgtgaggccctggccttcatcatcaggagttttggtggggaagtgtcctgggacaaatctttgtgcattggggccacctatgacgtcacagactcccgcatcacccatcagattgtcgaccggcctgggcagcagacctcagtcattggcaggtgctacgtgcagccccagtgggtgtttgactcagtgaacgccaggctccttctccccgtggcagagtacttctctggggtgcagctgcccccacacctttcaccctttgtgaccgagaaggaaggagattacgttccacctgagaagctgaagctgctggctctgcagcggggagaggacccaggaaacctgaatgagtcagaagaggaggaggaagaggacgacaacaacgaaggtgatggtgatgaagagggagaaaatgaggaggaggaggaagatgcagaggctggttcagaaaaggaggaagaggcccggctggcagccctggaagagcagaggatggaggggaagaagcccagggtgatggcaggcaccttgaagctggaggataagcagcggctggcccaggaggaggagagtgaggccaagcgcctggccattatgatgatgaagaagcgggagaagtacctgtaccagaagatcatgtttggcaagaggcgaaaaatccgagaggccaacaagctggcggagaagcggaaagcccacgatgaggcggtgaggtctgagaagaaggccaagaaggcaaggccggagtgagtgcctgcggcccctcacagggctgaggccagcccctagcagctggatgtggcagaggcaggccagaggacctaagtgtgatggaccagagtcacttctcctcctcctttctccagccagccctgacccctcatgctctctggctgggccagtgggcagccctcgcttcccttggatggagctgccctgctggtgcctggtcagagaagaggcctctgtgcccagcctgattctctgctcccaggagccagtgacatgaggtgcagaggcccacccagccccctacctactgcccccattcatcctggctttccacagccccctcccacacagttggacccgtgattctcagggtgctgtgatggggtgagggtagggggagcatttgttattaaatgactggacttttgtgccaatt

SEQ ID NO: 164631 - DNA, 871 bp, Homo sapiens
  Payload ID: 12434
  Gene Symbol: PES1
  Gene Name: pescadillo ribosomal biogenesis factor 1
  ENST ID: ENST00000406208
  CDS Start-End: 467-871
gcgcggccctagtcggctcctcaacgtggagcgatgggaggccttgagaagaagaaggtgattgggaaagacgtatgaacgaggctcggccaccaactacatcacccggaacaaagcccggaagaagctccagctgagcttggctgactttaggcggctgtgcattctgaagggcatttatccccatgaacccaaacacaagaagaaggttaacaagggttctacagcagcccgaacgttttaccttatcaaagacatcaggtttctcctccacgaacccattgtcaacaagttccgtgaatacaaggtgttcgtccggaagctccggaaggcttatgggaagagcgagtggaacactgtagagcgtttaaaggacaataagcccaactacaaactcgaccacatcatcaaggaacggtatcccacgttcatcgatgccctgcgggacctggacgatgccctctccatgtgcttcctgttttccaccttcccgcggactggcaagtgccacgtgcagaccattcagctgtgccgccggctcactgtggagttcatgcactacattatcgctgcccgtgccctgcgcaaggtcttcctgtccatcaaaggcatttactaccaggccgaggtactggggcagcccatcgtgtggatcactccctatgccttctcccatgaccacccgacagacgtggactacagggtcatggccaccttcaccgagttctacaccacgctgctgggctttgtcaacttccgcctttaccagttgctcaacctccactatcccccgaagctcgagggtcaggcccaagcagaggcaaaggccggtgagggcacctacgcgttggactccgagagttgtatggag

SEQ ID NO: 164632 - DNA, 2708 bp, Homo sapiens
  Payload ID: 12434
  Gene Symbol: PES1
  Gene Name: pescadillo ribosomal biogenesis factor 1
  ENST ID: ENST00000405677
  CDS Start-End: 945-2294
gcctgatgcctgatctgtcaagtctgtccgaccgtgcctgtctgctgtccccccagctgttccagtggtggattggcaggaccgggtgcctacccggtactccttaccaaaggagcccctggtagtgcccacctagcccaggacaaggagtggaacgggagctgcagctgcagtggtcacgaaggcagcctggaggaggtggccatggaggatagccttcgttatcgtcagcctctggtgagaagcagcagcatccttccagagagtcacttctgatccccaagccgcataaccgcgaatgaaccaaagagaacccgaagccggtgggaactcagcgcagtctcaccctgcccctcgggaaccgcttctcagcagcggcagccgaagtctgacgacgcttagcaaccgttaccttgacaacgcaatcctatcgcgcaccatggagtgcggcgcccctctgcatcccagaaggcaccgcgctgtccctaagccttccgcccctctccgtcccaacatgcaacgaggctcacagtcaatgaatcgtcatcaggtatgaacgaggctcggccaccaactacatcacccggaacaaagcccggaagaagctccagctgagcttggctgactttaggcggctgtgcattctgaagggcatttatccccatgaacccaaacacaagaagaaggttaacaagggttctacagcagcccgaacgttttaccttatcaaagacatcaggtttctcctccacgaacccattgtcaacaagttccgtgaatacaaggtgttcgtccggaagctccggaaggcttatgggaagagcgagtggaacactgtagagcgtttaaaggacaataagcccaactacaaactcgaccacatcatcaaggaacggtatcccacgttcatcgatgccctgcgggacctggacgatgccctctccatgtgcttcctgttttccaccttcccgcggactggcaagtgccacgtgcagaccattcagctgtgccgccggctcactgtggagttcatgcactacattatcgctgcccgtgccctgcgcaaggtcttcctgtccatcaaaggcatttactaccaggccgaggtactggggcagcccatcgtgtggatcactccctatgccttctcccatgaccacccgacagacgtggactacagggtcatggccaccttcaccgagttctacaccacgctgctgggctttgtcaacttccgcctttaccagttgctcaacctccactatcccccgaagctcgagggtcaggcccaagcagaggcaaaggccggtgagggcacctacgcgttggactccgagagttgtatggagaaactggcagccctcagtgccagcctggcccgcgtggtggtgcctgccacagaggaggaggccgaggtggatgagtttcccaccgatggggagatgtcagcgcaggaggaagaccgcaggaaggagctggaggcgcaggagaagcacaagaagctttttgagggcctgaagttcttcctgaaccgagaggtgccccgtgaggccctggccttcatcatcaggagttttggtggggaagtgtcctgggacaaatctttgtgcattggggccacctatgacgtcacagactcccgcatcacccatcagattgtcgaccggcctgggcagcagacctcagtcattggcaggtgctacgtgcagccccagtgggtgtttgactcagtgaacgccaggctccttctccccgtggcagagtacttctctggggtgcagctgcccccacacctttcaccctttgtgaccgagaaggaaggagattacgttccacctgagaagctgaagctgctggctctgcagcggggagaggacccaggaaacctgaatgagtcagaagaggaggaggaagaggacgacaacaacgaaggtgatggtgatgaagagggagaaaatgaggaggaggaggaagatgcagaggctggttcagaaaaggaggaagaggcccggctggcagccctggaagagcagaggatggaggggaagaagcccagggtgatggcaggcaccttgaagctggaggataagcagcggctggcccaggaggaggagagtgaggccaagcgcctggccattatgatgatgaagaagcgggagaagtacctgtaccagaagatcatgtttggcaagaggcgaaaaatccgagaggccaacaagctggcggagaagcggaaagcccacgatgaggcggtgaggtctgagaagaaggccaagaaggcaaggccggagtgagtgcctgcggcccctcacagggctgaggccagcccctagcagctggatgtggcagaggcaggccagaggacctaagtgtgatggaccagagtcacttctcctcctcctttctccagccagccctgacccctcatgctctctggctgggccagtgggcagccctcgcttcccttggatggagctgccctgctggtgcctggtcagagaagaggcctctgtgcccagcctgattctctgctcccaggagccagtgacatgaggtgcagaggcccacccagccccctacctactgcccccattcatcctggctttccacagccccctcccacacagttggacccgtgattctcagggtgctgtgatggggtgagggtagggggagcatttgttattaaatgactggacttttgtgcc

SEQ ID NO: 164633 - DNA, 999 bp, Homo sapiens
  Payload ID: 12434
  Gene Symbol: PES1
  Gene Name: pescadillo ribosomal biogenesis factor 1
  ENST ID: ENST00000441668
  CDS Start-End: 1-583
gccccagtgggtgtttgactcagtgaacgccaggctccttctccccgtggcagagtacttctctggggtgcagctgcccccacacctttcaccctttgtgaccgagaaggaaggagattacgttccacctgagaagctgaagctgctggctctgcagcggggagaggacccaggaaacctgaatgagtcagaagaggaggaggaagaggacgacaacaacgaaggtgatggtgatgaagagggagaaaatgaggaggaggaggaagatgcagaggctggttcagaaaaggaggaagaggcccggctggcagccctggaagagcagaggatggaggggaagcccagggtgatggcaggcaccttgaagctggaggataagcagcggctggcccaggaggaggagagtgaggccaagcgcctggccattatgatgatgaagaagcgggagaagtacctgtaccagaagatcatgtttggcaagaggcgaaaaatccgagaggccaacaagctggcggagaagcggaaagcccacgatgaggcggtgaggtctgagaagaaggccaagaaggcaaggccggagtgagtgcctgcggcccctcacagggctgaggccagcccctagcagctggatgtggcagaggcaggccagaggacctaagtgtgatggaccagagtcacttctcctcctcctttctccagccagccctgacccctcatgctctctggctgggccagtgggcagccctcgcttcccttggatggagctgccctgctggtgcctggtcagagaagaggcctctgtgcccagcctgattctctgctcccaggagccagtgacatgaggtgcagaggcccacccagccccctacctactgcccccattcatcctggctttccacagccccctcccacacagttggacccgtgattctcagggtgctgtgatggggtgagggtagggggagcatttgttattaaatgactggacttttgtgccaa

SEQ ID NO: 164634 - DNA, 2342 bp, Homo sapiens
  Payload ID: 12435
  Gene Symbol: PCNP
  Gene Name: PEST proteolytic signal containing nuclear protein
  Uniprot ID: Q8WW12
  ENST ID: ENST00000265260
  CDS Start-End: 122-658
ttttcattcctcgggaccgctctaggctgccaccacgccggctggccccaaaaactcgatggttgttgggcggggtcgtgacgtccttggcgtggctgcaggggaggccgcggcggggaaaatggcggacgggaaggcgggagacgagaagcctgaaaagtcgcagcgagctggagccgccggaggacctgaagaagaagcagaaaaacctgtgaaaactaagactgtttcttccagtaatggaggggaaagttccagtcgcagcgctgagaagcgatcagctgaagaagaagctgccgacctcccaacaaagcctacaaagatctccaagtttggatttgccataggtagtcagacgacaaagaaagcatcagccatatccatcaaacttggatcaagtaagcctaaagaaactgttccaactcttgctccaaaaactctttcagtagcagcagcttttaatgaagatgaagatagtgaaccagaggaaatgcctccagaagcaaagatgaggatgaagaatattggaagggatacaccaacatcagctggaccaaactccttcaataaaggaaagcatgggttttctgataaccagaagctgtgggagcgaaatataaaatctcatcttggaaatgtccatgaccaagacaattaaatgatgttttgaaattggggtgtggggtgggtgtaaagttaaaaggaacagtttccttttttaaagaatggtataagactatctttggagccgctttttttttctttttcatttttttaaaagattgagtggtacactaataaatgagagtttgaaattagaggtaatttatgttttatatacagatttcaagacatttgctaattttgtagtttcatgtgattagtttccaaaggttacagataataaagaaatcagaaatggtacctttttaagaattgcatatttttttagacacaactattagtacattaagagggaagcaaagttactgtctatttaaaactgcaagcagttaactctcttaactcccttattacctaaacttgtctggctcccaggaacagccttatagagagagggagtattgtattgggaagaaaatgttactgaactattgactgaaagtaaatttagataaaatacagcttttttccttatgggcatttgttttgtttcaagtcatcataaactaggtattgcattgctatccgtggatacagacgcttagctcttaaaagattttttttttatgtaaactgttgaatatttgaaatagtccacttcaccttaatgggtcttgtctatcttcattagtcttcaaagaaaaaccatttgctaccaaagtaaatcagtattttgaatgtgcttctcttgttttttgtttattagctagttcctgtaagcatttccaccagaacttgaggcaaatcgtaaggaagctgtttcttttaaaacacaaaccaccaccaaaaatttaaatgtacatattgcttaagtatttggctgtttttattttttaaaaggtataaacaccaaaaaaaaaattaacattgtatgaagatggaaaataagaagatgcactttctgtaactttgtctaaggatttaaattactaacttatgaactccaatttgaattgaacttaactatcggctttcttactggtaaaattatatggtttattttaaatgcgtacatattgaccaatggcctctgaaaaagcacattttagatactgaaattgaaggaaagaaaatgcatcttcaaacattttttggaatctcaccacatatactttgttagatttgtgtattgtagggtgtttgttttgtatttttgtattgtatatgaactttttttaaatgtgacagttaaacacatctttaaaagcatagtcacagacaaaagcatacagtataaaaatttccttgaaaactcctacaatattatatttggaggcagcttcagactgttttattggtggtagctgcttgctgaggtcttttagttggtaataactccagagaagcagcctgtgtatattcctaacactttgttcactagcatttaagtttagaataagcccaagtaagacaatggaaatgtatatagaactcttagttcttacatgatttaattatatcgatacatgaatttaacttactttaatgtaggcaaactatcaattttttgtccattttcctgtttgttaaaataacatacctctcctacgtattattttcttgacccaaatgaaatattaacctaaggtcaagctgggagagagaaatgactgagatgaatgtctttactaaagtaccaataaatttgtcaaactcaa

SEQ ID NO: 164635 - DNA, 786 bp, Homo sapiens
  Payload ID: 12435
  Gene Symbol: PCNP
  Gene Name: PEST proteolytic signal containing nuclear protein
  ENST ID: ENST00000498274
  CDS Start-End: 31-153
gtggctgcaggggaggccgcggcggggaaaatggcggacgggaaggcgggagacgagaagcctgaaaagtcgcagcgagctggagccgccggagttaattcatgggagcctcttctactgccacacaatctcagttcctgctgtatactctaacaaacagtggaagagactgttgggtcagtaggtgacaactgcagaggtatcttccttataacgatgctttttgaggttgctgctcccatcaatctgctcagtaaaaatagctcatcttggtaagttgtttcgacttcaccaggacctgaagaagaagcagaaaaacctgtgaaaactaagactgtttcttccagtaatggaggggaaagttccagtcgcagcgctgagaagcgatcagctgaagaagaagctgccgacctcccaacaaagcctacaaagatctccaagtttggatttgccataggtagtcagacgacaaagaaagcatcagccatatccatcaaacttggatcaagtaagcctaaagaaactgttccaactcttgctccaaaaactctttcagtagcagcagcttttaatgaagatgaagatagtgaaccagaggaaatgcctccagaagcaaagatgaggatgaagaatattggaagggatacaccaacatcagctggaccaaactccttcaataaaggaaagcatgggttttctgataaccagaagctgtgggagcgaaatataaaatctcatcttggaaatgtccatgaccaagacaattaaatgatgttttgaaattgg

SEQ ID NO: 164636 - DNA, 2165 bp, Homo sapiens
  Payload ID: 12435
  Gene Symbol: PCNP
  Gene Name: PEST proteolytic signal containing nuclear protein
  ENST ID: ENST00000460231
  CDS Start-End: 27-200
ctgcaggggaggccgcggcggggaaaatggcggacgggaaggcgggagacgagaagcctgaaaagtcgcagcgagctggagccgccggagtaatggaggggaaagttccagtcgcagcgctgagaagcgatcagctgaagaagaagctgccgacctcccaacaaagcctacaaagatctccaagtttggatttgccataggtagtcagacgacaaagaaagcatcagccatatccatcaaacttggatcaagtaagcctaaagaaactgttccaactcttgctccaaaaactctttcagtagcagcagcttttaatgaagatgaagatagtgaaccagaggaaatgcctccagaagcaaagatgaggatgaagaatattggaagggatacaccaacatcagctggaccaaactccttcaataaaggaaagcatgggttttctgataaccagaagctgtgggagcgaaatataaaatctcatcttggaaatgtccatgaccaagacaattaaatgatgttttgaaattggggtgtggggtgggtgtaaagttaaaaggaacagtttccttttttaaagaatggtataagactatctttggagccgctttttttttctttttcatttttttaaaagattgagtggtacactaataaatgagagtttgaaattagaggtaatttatgttttatatacagatttcaagacatttgctaattttgtagtttcatgtgattagtttccaaaggttacagataataaagaaatcagaaatggtacctttttaagaattgcatatttttttagacacaactattagtacattaagagggaagcaaagttactgtctatttaaaactgcaagcagttaactctcttaactcccttattacctaaacttgtctggctcccaggaacagccttatagagagagggagtattgtattgggaagaaaatgttactgaactattgactgaaagtaaatttagataaaatacagcttttttccttatgggcatttgttttgtttcaagtcatcataaactaggtattgcattgctatccgtggatacagacgcttagctcttaaaagattttttttttatgtaaactgttgaatatttgaaatagtccacttcaccttaatgggtcttgtctatcttcattagtcttcaaagaaaaaccatttgctaccaaagtaaatcagtattttgaatgtgcttctcttgttttttgtttattagctagttcctgtaagcatttccaccagaacttgaggcaaatcgtaaggaagctgtttcttttaaaacacaaaccaccaccaaaaatttaaatgtacatattgcttaagtatttggctgtttttattttttaaaaggtataaacaccaaaaaaaaaattaacattgtatgaagatggaaaataagaagatgcactttctgtaactttgtctaaggatttaaattactaacttatgaactccaatttgaattgaacttaactatcggctttcttactggtaaaattatatggtttattttaaatgcgtacatattgaccaatggcctctgaaaaagcacattttagatactgaaattgaaggaaagaaaatgcatcttcaaacattttttggaatctcaccacatatactttgttagatttgtgtattgtagggtgtttgttttgtatttttgtattgtatatgaactttttttaaatgtgacagttaaacacatctttaaaagcatagtcacagacaaaagcatacagtataaaaatttccttgaaaactcctacaatattatatttggaggcagcttcagactgttttattggtggtagctgcttgctgaggtcttttagttggtaataactccagagaagcagcctgtgtatattcctaacactttgttcactagcatttaagtttagaataagcccaagtaagacaatggaaatgtatatagaactcttagttcttacatgatttaattatatcgatacatgaatttaacttactttaatgtaggcaaactatcaattttttgtccattttcctgtttgttaaaataacatacctctcctacgtattattttcttgacccaaatgaaatattaacctaaggtcaagctgggagagagaaatgactgagatgaatgtcttta

SEQ ID NO: 164637 - DNA, 2028 bp, Homo sapiens
  Payload ID: 12435
  Gene Symbol: PCNP
  Gene Name: PEST proteolytic signal containing nuclear protein
  Uniprot ID: Q8WW12
  ENST ID: ENST00000469941
  CDS Start-End: 177-344
aggggaggccgcggcggggaaaatggcggacgggaaggcgggagacgagaagcctgaaaagtcgcagcgagctggagccgccggagaagcctaaagaaactgttccaactcttgctccaaaaactctttcagtagcagcagcttttaatgaagatgaagatagtgaaccagaggaaatgcctccagaagcaaagatgaggatgaagaatattggaagggatacaccaacatcagctggaccaaactccttcaataaaggaaagcatgggttttctgataaccagaagctgtgggagcgaaatataaaatctcatcttggaaatgtccatgaccaagacaattaaatgatgttttgaaattggggtgtggggtgggtgtaaagttaaaaggaacagtttccttttttaaagaatggtataagactatctttggagccgctttttttttctttttcatttttttaaaagattgagtggtacactaataaatgagagtttgaaattagaggtaatttatgttttatatacagatttcaagacatttgctaattttgtagtttcatgtgattagtttccaaaggttacagataataaagaaatcagaaatggtacctttttaagaattgcatatttttttagacacaactattagtacattaagagggaagcaaagttactgtctatttaaaactgcaagcagttaactctcttaactcccttattacctaaacttgtctggctcccaggaacagccttatagagagagggagtattgtattgggaagaaaatgttactgaactattgactgaaagtaaatttagataaaatacagcttttttccttatgggcatttgttttgtttcaagtcatcataaactaggtattgcattgctatccgtggatacagacgcttagctcttaaaagattttttttttatgtaaactgttgaatatttgaaatagtccacttcaccttaatgggtcttgtctatcttcattagtcttcaaagaaaaaccatttgctaccaaagtaaatcagtattttgaatgtgcttctcttgttttttgtttattagctagttcctgtaagcatttccaccagaacttgaggcaaatcgtaaggaagctgtttcttttaaaacacaaaccaccaccaaaaatttaaatgtacatattgcttaagtatttggctgtttttattttttaaaaggtataaacaccaaaaaaaaaattaacattgtatgaagatggaaaataagaagatgcactttctgtaactttgtctaaggatttaaattactaacttatgaactccaatttgaattgaacttaactatcggctttcttactggtaaaattatatggtttattttaaatgcgtacatattgaccaatggcctctgaaaaagcacattttagatactgaaattgaaggaaagaaaatgcatcttcaaacattttttggaatctcaccacatatactttgttagatttgtgtattgtagggtgtttgttttgtatttttgtattgtatatgaactttttttaaatgtgacagttaaacacatctttaaaagcatagtcacagacaaaagcatacagtataaaaatttccttgaaaactcctacaatattatatttggaggcagcttcagactgttttattggtggtagctgcttgctgaggtcttttagttggtaataactccagagaagcagcctgtgtatattcctaacactttgttcactagcatttaagtttagaataagcccaagtaagacaatggaaatgtatatagaactcttagttcttacatgatttaattatatcgatacatgaatttaacttactttaatgtaggcaaactatcaattttttgtccattttcctgtttgttaaaataacatacctctcctacgtattattttcttgacccaaatgaaatattaacctaaggtcaagctgggagagagaaatgactgagatgaatgtctttactaaagtaccaataaatttgtcaaactcaa

SEQ ID NO: 164638 - DNA, 136 bp, Homo sapiens
  Payload ID: 12435
  Gene Symbol: PCNP
  Gene Name: PEST proteolytic signal containing nuclear protein
  ENST ID: ENST00000627393
  CDS Start-End: 14-136
cgcggcggggaaaatggcggacgggaaggcgggagacgagaagcctgaaaagtcgcagcgagctggagccgccggagttaattcatgggagcctcttctactgccacacaatctcagttcctgctgtatactctaa

SEQ ID NO: 164639 - DNA, 219 bp, Homo sapiens
  Payload ID: 12436
  Gene Symbol: PET100
  Gene Name: PET100 homolog
  ENST ID: ENST00000456958
  CDS Start-End: 21-155
tgttgaccgggagaaacgagatgggggtgaagctggagatatttcggagggagctgtggccacctgagaagcttcaagagatagaggaattcaaagagaggttacggaagcggcgggaggagaagctccttcgcgacgcccagcagaactcctgaggcctccaagtgggagtcctagcccctcccctgatgaaatatacatatactcagttccttgtta

SEQ ID NO: 164640 - DNA, 375 bp, Homo sapiens
  Payload ID: 12436
  Gene Symbol: PET100
  Gene Name: PET100 homolog
  ENST ID: ENST00000598540
  CDS Start-End: 1-139
ggtgaagctggagatatttcggatgataatctacctcactttccctgtggctatgttctgggtttccaatcaggccgagtggtttgaggacgatgtcatacagcgcaagagggagctgtggccacctgagaagccatgagtaaggaaccgagagcagaggagtagatggtttccttattgccttctcctggaagagtgaagcggatcccacgcggacccctttcttcaagagatagaggaattcaaagagaggttacggaagcggcgggaggagaagctccttcgcgacgcccagcagaactcctgaggcctccaagtgggagtcctagcccctcccctgatgaaatatacatatactcagttccttgttattca

SEQ ID NO: 164641 - DNA, 719 bp, Homo sapiens
  Payload ID: 12436
  Gene Symbol: PET100
  Gene Name: PET100 homolog
  Uniprot ID: P0DJ07
  ENST ID: ENST00000594797
  CDS Start-End: 98-319
agcttcagcaatggagcgtgcaaaacaccagtgagcttctgtcttgctggagggtcggctttgggcggaactggctttgttgaccgggagaaacgagatgggggtgaagctggagatatttcggatgataatctacctcactttccctgtggctatgttctgggtttccaatcaggccgagtggtttgaggacgatgtcatacagcgcaagagggagctgtggccacctgagaagcttcaagagatagaggaattcaaagagaggttacggaagcggcgggaggagaagctccttcgcgacgcccagcagaactcctgaggcctccaagtgggagtcctagcccctcccctgatgaaatatacatatactcagttccttgttattcatttaagtgttttattcttttatcagtttttgggggccgagtgagacccaggatgcctcaggccctcagggggcttgtgtcgggggctgggggctgctgttccgacggaagccgagagcggtcgggtcctgaggggtgagcaggggttggggactgagggtcccagctcgtttctgtgctccgtcctgtggatgaagaggggtcagccagggggagggctcaagggcagtgccggccacaggtggcgaacaatggagagagggtgcaggtagccaccgtgtcccacctcattgtgagcactggtctatgtttaccctcaatatctgccattta

SEQ ID NO: 164642 - DNA, 332 bp, Homo sapiens
  Payload ID: 12436
  Gene Symbol: PET100
  Gene Name: PET100 homolog
  ENST ID: ENST00000601406
  CDS Start-End: 11-217
gagaaacgagatgggggtgaagctggagatatttcggatgataatctacctcactttccctgtggctatgttctgggtttccaatcaggccgagtggtttgaggacgatgtcatacagcgcaagagggagctgtggccacctgagaaggtaagtgatctcttcttcctgccagagggatggaggaggctggattcttgtatccgggatgggttttagatgaaaattttaggccaggcgcagtggctcatgcttgtaatcccagggcatgggaggctgaggtgggtagatcacttgaggtcaggagttcaaaaccagcctggccaacatggcg

SEQ ID NO: 164643 - DNA, 1141 bp, Homo sapiens
  Payload ID: 12437
  Gene Symbol: PET117
  Gene Name: PET117 homolog
  Uniprot ID: Q6UWS5
  ENST ID: ENST00000432901
  CDS Start-End: 84-329
agtacaggcggcggtgcgcactctgcggcggcctctgcgcctcgggcgggcgggagagagaggccgcggccgccagcgtggggatgtctaggagctcgaaggtggtgctgggcctctcggtgctgctgacggcggccacagtggccggcgtacatgtgaagcagcagtgggaccagcagaggcttcgtgacggagttatcagagacattgagaggcaaattcggaaaaaagaaaacattcgtcttttgggagaacagattattttgactgagcaacttgaagcagaaagagagaagatgttattggcaaaaggatctcaaaaatcatgacttgaatgtgaaatatctgttggacagacaacacgagtttgtgtgtgtgtgttgatggagagtagcttagtagtatcttcatctttttttttggtcactgtccttttaaacttgatcaaataaaggacagtgggtcatataagttactgctttcagggtcccttatatctgaataaaggagtgtgggcagacactttttggaagagtctgtctgggtgatcctggtagaagccccattagggtcactgtccagtgcttagggttgttactgagaagcactgccgagcttgtgagaaggaagggatggatagtagcatccacctgagtagtctgatcagtcggcatgatgacgaagccacgagaacatcgacctcagaaggactggaggaaggtgaagtggagggagagacgctcctgatcgtcgaatccgaggatcaggcatcagtggacttatcgcacgaccagagtggggattccctcaacagtgatgaaggagacgtgtcttggatggaggagcagctgtcctacttctgtgacaagtgccaaaaatggataccagccagtaaggagcttctcaattcctttgatttgtcaattcctgtgtgaaggtttgtttttccaacctgtgaaagaaacgtgaatgtaaaagagacctaaataaaaggataattatatttattctctagttgatcagctataaatttatataaaacataggcatgtttgtactaatgaaacgtactgtcaacctctatcacattgttaaattaacacttttggtggtaactcaataaaattgagaaaattggaaa

SEQ ID NO: 164644 - DNA, 1657 bp, Homo sapiens
  Payload ID: 12438
  Gene Symbol: PPAN
  Gene Name: peter pan homolog (Drosophila)
  Uniprot ID: Q9NQ55
  ENST ID: ENST00000253107
  CDS Start-End: 107-1528
gcccgcctgatgtcgtcccacgccgtgccggctctcaggcgccggaagtgagctgcgcagcgccggaagcggcggacgcaggaggcctcgtggaggacacagcagcatgggacagtcagggaggtcccggcaccagaagcgcgcccgcgcccaggcgcagctccgcaacctcgaggcctatgccgcgaacccgcactcgttcgtgttcacgcgaggctgcacgggtcgcaacatccggcagctcagcctggacgtgcggcgggtcatggagccgctcactgccagccgtctgcaggttcgtaagaagaactcgctgaaggactgcgtggcagtggctgggcccctcggggtcacacactttctgatcctgagcaaaacagagaccaatgtctactttaagctgatgcgcctcccaggaggccccaccttgaccttccaggtcaagaagtactcgctggtgcgtgatgtggtctcctcactgcgccggcaccgcatgcacgagcagcagtttgcccacccacccctcctggtactcaacagctttggcccccatggtatgcatgtgaagctcatggccaccatgttccagaacctgttcccctccatcaacgtgcacaaggtgaacctgaacaccatcaagcgctgcctcctcatcgactacaaccccgactcccaggagctggacttccgccactatagcatcaaagttgttcctgtgggcgcgagtcgcgggatgaagaagctgctccaggagaagttccccaacatgagccgcctgcaggacatcagcgagctgctggccacgggcgcggggctgtcggagagcgaggcagagcctgacggcgaccacaacatcacagagctgcctcaggctgtcgctggccgtggcaacatgcgggcccagcagagtgcagtgcggctcaccgagatcggcccgcggatgacactgcagctcatcaaggtccaggagggcgtcggggagggcaaagtgatgttccacagttttgtgagcaagacggaggaggagctgcaggccatcctggaagccaaggagaagaagctgcggctgaaggcgcagaggcaggcccagcaggcccagaatgtgcagcgcaagcaggagcagcgggaggcccacagaaagaagagcctggagggcatgaagaaggcacgggtcgggggtagtgatgaagaggcctctgggatcccttcaaggacggcgagcctggagttgggtgaggacgatgatgaacaggaagatgatgacatcgagtatttctgccaggcggtgggcgaggcgcccagtgaggacctgttccccgaggccaagcagaaacggcttgccaagtctccagggcggaagcggaagcggtgggaaatggatcgaggcaggggtcgcctttgtgaccagaagtttcccaagaccaaggacaagtcccagggagcccaggccaggcgggggcccagaggggcttcccgggatggtgggcgaggccggggccggggccgcccagggaagagagtggcctgagcccaagccgcaccggagcagcggctggattgaacgccccagattggggcccgagatgtggccctcggtttcctttcataaaggagttgtgtccccagcccttccactccagtaaagaactgaattggc

SEQ ID NO: 164645 - DNA, 1575 bp, Homo sapiens
  Payload ID: 12438
  Gene Symbol: PPAN
  Gene Name: peter pan homolog (Drosophila)
  ENST ID: ENST00000393793
  CDS Start-End: 224-1486
cccggcagcttgggaggcaggtggcgcaggtggggtcccggccgaggtcgcggcgctgaccctttgtctctcgtcgccgcagtcccggcaccagaagcgcgcccgcgcccaggcgcagctccgcaacctcgaggcctatgccgcgaacccgcactcgttcgtgttcacgcgaggctgcacgggtcgcaacatccggcagctcagcctggacgtgcggcgggtcatggagccgctcactgccagccgtctgcaggttcgtaagaagaactcgctgaaggactgcgtggcagtggctgggcccctcggggtcacacactttctgatcctgagcaaaacagagaccaatgtctactttaagctgatgcgcctcccaggaggccccaccttgaccttccaggtcaagaagtactcgctggtgcgtgatgtggtctcctcactgcgccggcaccgcatgcacgagcagcagtttgcccacccacccctcctggtactcaacagctttggcccccatggtatgcatgtgaagctcatggccaccatgttccagaacctgttcccctccatcaacgtgcacaaggtgaacctgaacaccatcaagcgctgcctcctcatcgactacaaccccgactcccaggagctggacttccgccactatagcatcaaagttgttcctgtgggcgcgagtcgcgggatgaagaagctgctccaggagaagttccccaacatgagccgcctgcaggacatcagcgagctgctggccacgggcgcggggctgtcggagagcgaggcagagcctgacggcgaccacaacatcacagagctgcctcaggctgtcgctggccgtggcaacatgcgggcccagcagagtgcagtgcggctcaccgagatcggcccgcggatgacactgcagctcatcaaggtccaggagggcgtcggggagggcaaagtgatgttccacagttttgtgagcaagacggaggaggagctgcaggccatcctggaagccaaggagaagaagctgcggctgaaggcgcagaggcaggcccagcaggcccagaatgtgcagcgcaagcaggagcagcgggaggcccacagaaagaagagcctggagggcatgaagaaggcacgggtcgggggtagtgatgaagaggcctctgggatcccttcaaggacggcgagcctggagttgggtgaggacgatgatgaacaggaagatgatgacatcgagtatttctgccaggcggtgggcgaggcgcccagtgaggacctgttccccgaggccaagcagaaacggcttgccaagtctccagggcggaagcggaagcggtgggaaatggatcgaggcaggggtcgcctttgtgaccagaagtttcccaagaccaaggacaagtcccagggagcccaggccaggcgggggcccagaggggcttcccgggatggtgggcgaggccggggccggggccgcccagggaagagagtggcctgagcccaagccgcaccggagcagcggctggattgaacgccccagattggggcccgagatgtggccctcggtttcctttcataaaggagttg

SEQ ID NO: 164646 - DNA, 844 bp, Homo sapiens
  Payload ID: 12438
  Gene Symbol: PPAN
  Gene Name: peter pan homolog (Drosophila)
  ENST ID: ENST00000446223
  CDS Start-End: 214-844
gtcatggagccgctcactgccagccgtctgcagggcttttgctgggctggagtgagggcgcgcagcttgggagatagatagtcgcctaagcctgacagttaagactggaatctggagccgggcgtggtggctcatgcctgtattcccagcatttggggatgctgatgcgggaggatcacttgagcccaggaattcgagaccagcctgagcagcatggttcgtaagaagaactcgctgaaggactgcgtggcagtggctgggcccctcggggtcacacactttctgatcctgagcaaaacagagaccaatgtctactttaagctgatgcgcctcccaggaggccccaccttgaccttccaggtcaagaagtactcgctggtgcgtgatgtggtctcctcactgcgccggcaccgcatgcacgagcagcagtttgcccacccacccctcctggtactcaacagctttggcccccatggtatgcatgtgaagctcatggccaccatgttccagaacctgttcccctccatcaacgtgcacaaggtgaacctgaacaccatcaagcgctgcctcctcatcgactacaaccccgactcccaggagctggacttccgccactatagcatcaaagttgttcctgtgggcgcgagtcgcgggatgaagaagctgctccaggagaagttccccaacatgagccgcctgcaggacatcagcgagctgctggccacgggcgcggggctgtcggagagcgaggcagagcctgacggcgaccacaacatcacagagctgcctcaggctgtcgctggccgtggcaacatgcgggcccagcagagtgcagtgcggctca

SEQ ID NO: 164647 - DNA, 757 bp, Homo sapiens
  Payload ID: 12438
  Gene Symbol: PPAN
  Gene Name: peter pan homolog (Drosophila)
  ENST ID: ENST00000444703
  CDS Start-End: 1-626
aggcagagcctgacggcgaccacaacatcacagagctgcctcaggctgtcgctggccgtggcaacatgcgggcccagcagagtgcagtgcggctcaccgagatcggcccgcggatgacactgcagctcatcaaggtccaggagggcgtcggggagggcaaagtgatgttccacagttttgtgagcaagacggaggaggagctgcaggccatcctggaagccaaggagaagaagctgcggctgaaggcgcagaggcaggcccagcaggcccagaatgtgcagcgcaagcaggagcagcgggaggcccacagaaagaagagcctggagggcatgaagaaggcacgggtcgggggtagtgatgaagaggcctctgggatcccttcaaggacggcgagcctggagttggacctgttccccgaggccaagcagaaacggcttgccaagtctccagggcggaagcggaagcggtgggaaatggatcgaggcaggggtcgcctttgtgaccagaagtttcccaagaccaaggacaagtcccagggagcccaggccaggcgggggcccagaggggcttcccgggatggtgggcgaggccggggccggggccgcccagggaagagagtggcctgagcccaagccgcaccggagcagcggctggattgaacgccccagattggggcccgagatgtggccctcggtttcctttcataaaggagttgtgtccccagcccttccactccagtaaagaactgaattggcca

SEQ ID NO: 164648 - DNA, 594 bp, Homo sapiens
  Payload ID: 12438
  Gene Symbol: PPAN
  Gene Name: peter pan homolog (Drosophila)
  ENST ID: ENST00000430370
  CDS Start-End: 304-594
acccaccctcggcctagtcttcgtagctgcagtaatggctcccgctgtaaaactgtgggaggacttaagtctccccagctggaaaaaaagaccctcatggggagcatcatttctgcctttcagggcttttgctgggctggagtgagggcgcgcagcttgggagatagatagtcgcctaagcctgacagttaagactggaatctggagccgggcgtggtggctcatgcctgtattcccagcatttggggatgctgatgcgggaggatcacttgagcccaggaattcgagaccagcctgagcagcatggttcgtaagaagaactcgctgaaggactgcgtggcagtggctgggcccctcggggtcacacactttctgatcctgagcaaaacagagaccaatgtctactttaagctgatgcgcctcccaggaggccccaccttgaccttccaggtcaagaagtactcgctggtgcgtgatgtggtctcctcactgcgccggcaccgcatgcacgagcagcagtttgcccacccacccctcctggtactcaacagctttggcccccatggtatgcatgtgaagctcatggccaccatg

SEQ ID NO: 164649 - DNA, 1182 bp, Homo sapiens
  Payload ID: 12439
  Gene Symbol: PGAM5
  Gene Name: PGAM family member 5, serine/threonine protein phosphatase, mitochondrial
  Uniprot ID: Q96HS1
  ENST ID: ENST00000317555
  CDS Start-End: 59-826
tcgcggagcgccgtcggggccgtgggcgcctgcgcgggccggcgcgggagcaagcggcatggcgttccggcaggcgctgcagctggcggcctgcgggctggccgggggctcggccgccgtgctcttctcggccgtggcggtagggaagccgcgcgcaggcggggacgcggagccacgcccggctgagccgccggcctgggcggggggcgcgcggccgggccccggtgtctgggaccccaactgggacaggcgagaaccactgtctctgatcaacgtgcggaagaggaacgtggaatctggggaagaagagctggcgtccaagctggaccactacaaagccaaggccacgcggcacatcttcctcatcaggcattcccagtaccacgtggatggctccctggagaaggaccgcactctgaccccgctgggtcgggagcaggctgaactcactgggctccgcctggcaagcttggggttgaagtttaataaaatcgtccattcgtctatgacgcgcgccatagagaccaccgatatcatcagccggcacctgccaggcgtctgcaaagtcagcacagatctgctgcgggaaggcgcccccatcgagccagacccgcccgtgtctcattggaagccggaagctgtgcagtattacgaagacggagcccggatcgaggccgccttccggaactacatccaccgcgcagatgccaggcaggaggaggacagttacgagatcttcatctgtcacgccaacgtcatccgctacatcgtgtgcagcatcccgccgctgttgtccgctggggattttgtgcttctggggtcctgacctctttcacttgctgatctgtgggcgctcccacccgtgtgccagcgtgacggctcggggtgtccgctcccctctgggtcgaggccacagctgagtcacgttgctgctcgggctgctccctcggggggcccttgtccctcaacctgctctggtgccccactctcagcaccacagaatgatccgggttcaggttgcgttttccctgccaccaccctgcaatcagccacttctttaaggagctccagggctgcagccacgttagagggccccttggggggcagggccagctctacggttacatgcctgaaacagtcagaagggttggccaaatctcactaaatgcaaatttgaaacaa

SEQ ID NO: 164650 - DNA, 1084 bp, Homo sapiens
  Payload ID: 12439
  Gene Symbol: PGAM5
  Gene Name: PGAM family member 5, serine/threonine protein phosphatase, mitochondrial
  ENST ID: ENST00000454808
  CDS Start-End: 362-784
catgctcttcccaaatagtctgacaatttggaaataacatcttgtcagaaaaactcaaacttgggaacagaggtctcaaggacatatcttgtatttcaacatcaggcgagaaccactgtctctgatcaacgtgcggaagaggaacgtggaatctggggaagaagagctggcgtccaagctggaccactacaaagccaaggccacgcggcacatcttcctcatcaggcattcccagtaccacgtggatggctccctggagaaggaccgcactctgaccccgctgggtcgggagcaggctgaactcactgggctccgcctggcaagcttggggttgaagtttaataaaatcgtccattcgtctatgacgcgcgccatagagaccaccgatatcatcagccggcacctgccaggcgtctgcaaagtcagcacagatctgctgcgggaaggcgcccccatcgagccagacccgcccgtgtctcattggaagccggaagctgtgcagtattacgaagacggagcccggatcgaggccgccttccggaactacatccaccgcgcagatgccaggcaggaggaggacagttacgagatcttcatctgtcacgccaacgtcatccgctacatcgtgtgcagagcactgcagtttcctcctgaaggctggctccggctctccctcaataatggcagcatcacccacctggtgatccgacccaacggccgagttgcgctcaggaccctcggggacacggggttcatgcctcccgacaagatcactcgatcctgagggctccggcctctccttccctctgtcctccctgcacaggccgcacacacttaacgttttgttcccaaggagaccggcggaaagtagaaacctgcaatgctgcatctgggaactgacttgtgaccaggctgagaaggggagagttgggatcagacagcctgacttctctgcagggttttatacctgaccatgaacccccaggatggcgtggggtttaaggtgaaagcgtctcacgcacaagtcaggcctgttgtggggacttgaaagaggcctgacccagaccaccatgttcgcacccac

SEQ ID NO: 164651 - DNA, 2834 bp, Homo sapiens
  Payload ID: 12439
  Gene Symbol: PGAM5
  Gene Name: PGAM family member 5, serine/threonine protein phosphatase, mitochondrial
  Uniprot ID: Q96HS1
  ENST ID: ENST00000498926
  CDS Start-End: 59-928
tcgcggagcgccgtcggggccgtgggcgcctgcgcgggccggcgcgggagcaagcggcatggcgttccggcaggcgctgcagctggcggcctgcgggctggccgggggctcggccgccgtgctcttctcggccgtggcggtagggaagccgcgcgcaggcggggacgcggagccacgcccggctgagccgccggcctgggcggggggcgcgcggccgggccccggtgtctgggaccccaactgggacaggcgagaaccactgtctctgatcaacgtgcggaagaggaacgtggaatctggggaagaagagctggcgtccaagctggaccactacaaagccaaggccacgcggcacatcttcctcatcaggcattcccagtaccacgtggatggctccctggagaaggaccgcactctgaccccgctgggtcgggagcaggctgaactcactgggctccgcctggcaagcttggggttgaagtttaataaaatcgtccattcgtctatgacgcgcgccatagagaccaccgatatcatcagccggcacctgccaggcgtctgcaaagtcagcacagatctgctgcgggaaggcgcccccatcgagccagacccgcccgtgtctcattggaagccggaagctgtgcagtattacgaagacggagcccggatcgaggccgccttccggaactacatccaccgcgcagatgccaggcaggaggaggacagttacgagatcttcatctgtcacgccaacgtcatccgctacatcgtgtgcagagcactgcagtttcctcctgaaggctggctccggctctccctcaataatggcagcatcacccacctggtgatccgacccaacggccgagttgcgctcaggaccctcggggacacggggttcatgcctcccgacaagatcactcgatcctgagggctccggcctctccttccctctgtcctccctgcacaggccgcacacacttaacgttttgttcccaaggagaccggcggaaagtagaaacctgcaatgctgcatctgggaactgacttgtgaccaggctgagaaggggagagttgggatcagacagcctgacttctctgcagggttttatacctgaccatgaacccccaggatggcgtggggtttaaggtgaaagcgtctcacgcacaagtcaggcctgttgtggggacttgaaagaggcctgacccagaccaccatgttcgcacccacagctgacccgtgctgagggtccaggctccattggcaaagccggtcaggcacgagggcgactgaggcacgtggatgaggagggcacccaggttctgttcacaactcacttcacttcatacatccttttaatttcttaaaaccctcttgtcccttaaatatttgtcaattaaagattttctggctgggcacagtggctcacacctgtattcccagctactcaggaggccagggtgggaggatcacttgagctcaggagttcaagaccagcctggacaaggcaacatagcgagaccctgtctctactaaaaatacagaacttagctgggtgtgtcgtgggcatctagagtcccagctacttgggaggctgaggtgggtggatcacttgggcccgggagctggaggctgcagtgagctgtgattgtgtcactgcactccagcctgggcaagcgagggagacttaaagcaattttttcttttgaaacggagtttcactcttgttgcccaggctggagtgcagtggtgcgatctcggctcaccgcaacctctgcctcctgggttcaagtgattctcctgcctcagctcccgagtagctgggattacagtcgcccaccaccatacctggctaattttttgtatttttagtaaagacagggtttcatggagaaaccaatatagaattgttcaggctggtctcgaactcccaacctcaggtgattcacccaccttggcctcccaaagtgctgggattaaaggtgtgagccatcgtgcctggcctaaaaaatttttttttcttcatctgggtttttgctttgaaaacaagtttctccaaatttacagatttcctgatgatgttgggtctgaactcaccaacttgattaggtctttaggggccgagggactagccagctgcacaggtgactggatgggggaggggcaggtgaggtgggtctacagaggtggcttcgcctttgaccttcatgctggtctcggctgaggtgacacgctagtgacagcccaatagggggttacccttattgagtaaaatacttcagattgacagctcaatcttagtttgcctccagttaatcttttatgcttagggattaaatgtgtggttttttttttgtttttttttttttggagacggagtctcgctctgtcacccaggctggagtgcagtggcgcgatctcggctcactgcaacctctgcctcctgggttcaaacgattctcctgcctcagcctcccaagtagctgggattataggcgcccaccaccatgcctggctaattttttatttttagtagagatggggtttcaccgtgttggccaggctggtctcgaactcctgacctcgtgatctacccacctcggcctccccaagtgctgggattacaggcgtgagctagcatgcctggccagggattaaaatattcaaacatgttgtgtgtacccagatatgctgttaatttaggaaaaacagtacaatttctatgaagtggttgtgactattttctgtagtcaatacagttgggatatctgatctatttctctgtctactttggaaatgattgcataataaataaaattttactgtttttttaaaa

SEQ ID NO: 164652 - DNA, 1773 bp, Homo sapiens
  Payload ID: 12439
  Gene Symbol: PGAM5
  Gene Name: PGAM family member 5, serine/threonine protein phosphatase, mitochondrial
  ENST ID: ENST00000543955
  CDS Start-End: 865-1287
gtttggggccggggtcgggatgggggtcagggcaggtgttaccgttgggatcgagatcgggaccaggtttaaggttgcgatcgggtcgggatctggggtcgccgtctgctttccccagcggaggagccgctttccggggccgctctgcgcggagggttccgggggcggctgacccttcccgccggcttctgtggccgagctccgtcgcgtcctcgcccttctccccgcccctgcgagtccgccctgggtgccatcgccggagcgcgggccggggcgaggctgaggtggaagccgggcctccttcaggggcgtttgcaggagcgcgcccgcgagctgcgtgcggttattgagcgtttgaaatatggctcgtgtgattcctgaagggaatgcttagtttacgtcaatttaaacttaacgcaagcagggccgggtgcggtagctcaggcctgtaatcccagcgtttgggaggctgaggccggaggatcgcttgagaaatttgaaaccagcctgggcaacatagtgagacccccatctctacaaaaaatacaaaaaaaattggccgagcgaggtggcgcgcgcctgtggtcccagctactcgggaggctgaggcgagaaccactgtctctgatcaacgtgcggaagaggaacgtggaatctggggaagaagagctggcgtccaagctggaccactacaaagccaaggccacgcggcacatcttcctcatcaggcattcccagtaccacgtggatggctccctggagaaggaccgcactctgaccccgctgggtcgggagcaggctgaactcactgggctccgcctggcaagcttggggttgaagtttaataaaatcgtccattcgtctatgacgcgcgccatagagaccaccgatatcatcagccggcacctgccaggcgtctgcaaagtcagcacagatctgctgcgggaaggcgcccccatcgagccagacccgcccgtgtctcattggaagccggaagctgtgcagtattacgaagacggagcccggatcgaggccgccttccggaactacatccaccgcgcagatgccaggcaggaggaggacagttacgagatcttcatctgtcacgccaacgtcatccgctacatcgtgtgcagagcactgcagtttcctcctgaaggctggctccggctctccctcaataatggcagcatcacccacctggtgatccgacccaacggccgagttgcgctcaggaccctcggggacacggggttcatgcctcccgacaagatcactcgatcctgagggctccggcctctccttccctctgtcctccctgcacaggccgcacacacttaacgttttgttcccaaggagaccggcggaaagtagaaacctgcaatgctgcatctgggaactgacttgtgaccaggctgagaaggggagagttgggatcagacagcctgacttctctgcagggttttatacctgaccatgaacccccaggatggcgtggggtttaaggtgaaagcgtctcacgcacaagtcaggcctgttgtggggacttgaaagaggcctgacccagaccaccatgttcgcacccacagctgacccgtgctgagggtccaggctccattggcaaagccggtcaggcacgagggcgactgaggcacgtggatgaggagggcacccaggttctgttcacaactcacttcacttcatacatccttttaatttcttaaaaccctcttgtcccttaaatatttgtcaattaaagattttctggctggg

SEQ ID NO: 164653 - DNA, 6390 bp, Homo sapiens
  Payload ID: 12440
  Gene Symbol: PHLPP1
  Gene Name: PH domain and leucine rich repeat protein phosphatase 1
  Uniprot ID: O60346
  ENST ID: ENST00000262719
  CDS Start-End: 235-5388
gcggggagggcgtgtgtcgggggggcggtggcggcgaggcgggcgcgcgggatggaacactgagacaccgacggaatgctccgaatcgccacataatcccctggaacggccgcgcacaacgccattggcttctcccttctccgcgcgccgccgccgtctcccacctccgcctcatcgcctccctctccgcccgctgcctccggagctgggggggaaacgcgaagccccactgcaatggagcccgccgccgcggccacggtacagcgactccccgagctcggcagggaggaccgagcttcggctccggcggccgccgctgcggcagcagcagcagcagcggcggccgcggcggctctggcggcggcggccgggggcggccggagtccggagcccgcgctgaccccggcggccccgagcggcgggaacggcagcggcagcggggcgcgggaagaggccccaggcgaggcgccgccggggccgctgccgggcagagcggggggtgccgggcgcaggaggcggcgcggggcgccccagcccattgccggcggggctgcccccgtacccggggccggcggcggcgccaactccctcctgctgaggagagggcggctgaagaggaatctgtccgcggccgccgcggccgcctcctcgtcgtcgtcgtcctcggccgctgctgcctcgcactcccccggcgctgccggcctccccgcctcctgctcggcctcggcgtcgctgtgcacccggagcctggacaggaagacgctgcttctgaagcaccggcagacgctgcagctgcagccgtcggaccgggactgggtgaggcaccagctccagcgcggctgcgtgcacgtcttcgaccgccacatggcctcgacctacctgcgcccggtgctctgcacactggacaccacggccggcgaggtggccgcccgcctgctgcagctgggccacaaaggcggcggcgtggtgaaggtgctgggccaggggcccggagccgccgccgcccgggagcccgctgaaccgccccccgaggccggcccccggctggcgcccccggagccgcgggactcggaggtaccgcccgcgaggagcgcgccgggtgccttcggggggcctccgcgcgcgccccccgccgacctacccctgcccgtcggcggcccgggcgggtggtcgcgccgcgccagcccagcgccctcggactccagccccggcgagccgttcgttgggggccctgtctcttcgccccgcgccccacggcctgtggtctccgacaccgagagcttcagtctgagtcccagcgccgagagcgtgtctgaccggttggacccctacagcagcggcggcggctcctcgtcgtcgtcggaagagctcgaggccgacgcagcctcggccccgacgggggtcccgggccagccccgccgtcccggccaccccgcgcagcccctcccgcttccccagacggcttcctcgcctcagccgcagcagaaagccccgagggccattgacagcccgggcggggccgtccgcgaggggtcgtgcgaggagaaggcagcggcagccgtggccccgggaggcctccagtctacccccgggaggagcggggtgaccgcggagaaggcgcctccgccgcccccgccgcccaccctgtacgtgcagctccacggagagaccacccggcgcttggaggcggaggagaagccattgcagatccaaaatgactacctcttccaactgggatttggggagctgtggagggtgcaggaggaaggcatggactcggagattggctgcctcatccgcttctatgcaggaaaacctcacagcacgggtagctctgaacggattcagctctcaggaatgtataatgtccgtaaaggcaagatgcagttgccagtgaaccgatggacaagacgccaagtcatcctatgtgggacctgcctgatagtatcatctgtgaaagacagcttgaccggaaagatgcatgttctgccactaattggtggaaaagtagaagaagtgaaaaagcaccaacactgtttagcatttagctcctctggaccccaaagccagacttactacatttgctttgatactttcacagaatacttaaggtggctgcgacaagtctccaaggttgcatcccagcgcattagctcagtggacctctcgtgttgtagcctggaacatctgcctgccaacctcttctacagccaagacctcactcatctcaatttaaaacaaaacttcctaaggcagaaccctagccttccagctgccagggggcttaatgaactgcaaaggttcaccaagttgaagagtcttaacctttccaataatcatttaggggacttcccactggcagtctgcagtattccaaccctggcagagctgaacgtgtcctgcaatgccctgcgatcagtcccggcagccgttggagtgatgcacaacttacagacatttttgttggatggaaactttctccaatcccttcctgctgagttggagaacatgaagcagcttagttatctgggtctttctttcaatgaatttactgacattcccgaagtattggagaaattgactgctgtggataaactttgtatgtctggaaactgtgtggagacccttaggctacaggctttaagaaaaatgcctcacattaaacatgtggatctaaggttgaacgtaattaggaagctgatagcagatgaagtggactttctacagcatgttactcagcttgacctacgagacaataagcttggtgatctagatgctatgattttcaacaacattgaagttttacactgtgaaaggaatcaactggtcacattagacatctgtggctatttcctaaaagcgctctatgcctcttctaatgaacttgttcaacttgatgtttacccagttccaaattatctgtcctacatggatgtttcaaggaaccgcttagaaaatgtgcctgagtgggtatgtgaaagccgaaagctagaagttttggatattggccataatcaaatatgtgaacttcctgcccgcttattttgtaatagcagtctccggaaactactggcaggacacaaccagttggcaaggctgcctgaaaggctagaaagaacctcggtggaggtcttggatgtgcaacacaaccagctccttgagctcccacctaaccttctgatgaaggctgacagcctgagattcctgaacgcctctgcgaacaaactggaaagccttcctccagccacgctttccgaagagacaaacagtatcttacaagagttgtatttgacaaataacagcctcacagacaaatgtgtgcccttgttaacgggacacccccatttgaagatccttcacatggcctataaccgacttcagagttttccagcaagtaaaatggcgaaactggaggaacttgaagaaattgatctcagtgggaataagctgaaagccatcccaacaacgatcatgaattgcaggcgcatgcacaccgtgattgctcactccaactgcatcgaggtctttcccgaagttatgcagctcccagagatcaagtgtgtggacctgagctgtaatgagctaagtgaagtcacattaccagaaaacctgcctcccaaactgcaggagctagacctgactggaaacccgcgccttgtccttgatcacaaaaccctggaactactgaataatatccgctgtttcaagattgatcagccttctacaggagacgcttccggagccccagctgtatggagtcatggttacactgaagcttcgggggtaaaaaacaagttgtgtgtcgcagccctgtcggtgaataacttctgtgacaaccgcgaagccctgtatggtgtgtttgacggagaccggaatgtggaggtgccctaccttctccagtgcactatgagtgacattttggctgaagagctgcaaaaaacaaaaaacgaagaagaatacatggtcaatacattcattgtcatgcaaaggaaacttggaactgctgggcagaagcttggtggtgccgctgtcctttgtcatatcaagcatgaccctgtggatccaggaggatccttcaccttgacctctgctaatgtgggcaagtgccaaacagttctctgtcgaaatggaaagccgctgcctctgtccagatcttacatcatgagctgtgaagaagagctgaagaggattaaacagcacaaggccattatcactgaggatggcaaggtgaacggagtgactgagtccacgcgcatcctgggctacaccttcctccatcccagtgtggtgcctcgcccccacgtgcagtccgtgctcctgactccccaggatgagttcttcatcctaggcagtaaggggttgtgggacagcctgtccgtcgaggaggccgtggaagccgtgcgcaacgtgcccgatgccctggctgctgccaagaagctgtgtaccctggcccagagctacggctgccacgacagcatcagcgctgtggtggtgcagctcagtgtcactgaggacagcttctgctgctgcgagctcagcgccggtggggctgtgccaccacccagtcctggcatctttcctccctcagtgaacatggtgatcaaggatcggccctcagatgggctgggcgtgccgtcctccagcagcggcatggcttccgagattagcagtgagctctccacttctgagatgagcagcgaggtggggtcaacagcctccgatgagcccccgcccggagccctaagcgagaacagccctgcctaccccagtgagcagcgctgcatgctccaccccatctgtctgtccaactccttccagcgccagctatccagcgccacgttctctagcgccttctccgacaacggccttgacagtgacgatgaggagcccatcgagggcgtcttcaccaacggcagccgggtggaggtggaggtggacatccactgcagccgggccaaggagaaggagaaacagcagcacctgcttcaggtgccagcagaggccagtgatgagggcattgtcatcagcgccaacgaggatgagccaggtctgcccaggaaggcagacttctctgccgttgggaccattgggcgccggagggccaatggctctgttgcgccccaggaaaggagccacaatgtgatagaggtggctacagacgcacctcttcgaaagcctggaggctattttgctgccccggctcagccggatcctgatgatcagtttatcatacccccggagctggaagaggaggtcaaagaaatcatgaagcatcaccaggagcaacagcagcagcagcagccgccaccaccccctcagctccagccgcagctgccgcggcactaccagctggaccagctgccagattattacgacacgccactatgacccagccgagctgtttaacaaataaactaaccacaaaagactgagttgcaagagtctcccaggctcacattaaaccaggggttttactccacatccttcccccagacactgttcccaacctgtcatcgcagctaatctgtaggttctctttctttgggttatttttttaagtaatcaccactttcttctagtgatgctttaccaatatgatttacatttgttaacttctccccctaacatatcagatatgtaaagacaaagaacaaaaggtttaatatattacagagaaacagttaatgataatgtaatattttttaaaatggctttttgttgtttgtttggaaggcagggcaggctgccgttgctaaatgatttaataatattgtaattctgtatttctttggggggaaaaggcttttgttttgttttgttttgttttgttttgtttttgtcttgaaaataatagacatttgtagaatatggagactaactcctaggagttgctttactctgtcaggtgacttaagtcactgggattcactaattttctctgagagaacagctgattgagaatttccattgtaaatagctcagtgttgtatagtgaggcttacgatgttttgtagtcttggcgtaaggacacagcccaagtaactgacgtttcccctccccctcccctctgaggagcctgcctgcctcacaactcaccctcacttcactgaatgaggaggctgagcagctgcagtgtttctgtccggaggaaatggatcttaggccactggacaagaacctgcacccaagggccctgaacccattttcctcccctgtcccagccttcccactttgacagacacttttaactgtgttccttactgctgccacaatcagcatggttgtatagtgccccattaggccatttacatacccagagttatactcaagcagaatgcacaaatggacatgtcataatttttgttacaataaatatgaaatttacaagta

SEQ ID NO: 164654 - DNA, 591 bp, Homo sapiens
  Payload ID: 12440
  Gene Symbol: PHLPP1
  Gene Name: PH domain and leucine rich repeat protein phosphatase 1
  ENST ID: ENST00000591386
  CDS Start-End: 1-591
ctatgcctcttctaatgaacttgttcaacttgatgtttacccagttccaaattatctgtcctacatggatgtttcaaggaaccgcttagaaaatgtgcctgagtgggtatgtgaaagccgaaagctagaagttttggatattggccataatcaaatatgtgaacttcctgcccgcttattttgtaatagcagtctccggaaactactggcaggacacaaccagttggcaaggctgcctgaaaggctagaaagaacctcggtggaggtcttggatgtgcaacacaaccagctccttgagctcccacctaaccttctgatgaaggctgacagtaaaatggcgaaactggaggaacttgaagaaattgatctcagtgggaataagctgaaagccatcccaacaacgatcatgaattgcaggcgcatgcacaccgtgattgctcactccaactgcatcgaggtctttcccgaagttatgcagctcccagagatcaagtgtgtggacctgagctgtaatgagctaagtgaagtcacattaccagaaaacctgcctcccaaactgcaggagctagacctgactggaaacccgcgcct

SEQ ID NO: 164655 - DNA, 8467 bp, Homo sapiens
  Payload ID: 12441
  Gene Symbol: PHLPP2
  Gene Name: PH domain and leucine rich repeat protein phosphatase 2
  Uniprot ID: Q6ZVD8
  ENST ID: ENST00000393524
  CDS Start-End: 735-4505
tttttttgtattttttagtagagatagggtttcaccatgctggccaggctggtctcgaattcctgacctcaggtgatccgccagccttggcctcccaaagtgctgggattacagatgtgagccactgtgcccaggcaaaatattaaaatttctatttttgagagacaaggtctcgctctgtcacccagatagggttgcagtggcacaatcacggctcactgcaacctcaatctcccgggttcaatctgttctccaactcaatctgttctccaccctcaagtagctgggactacaggcgtgtgccaccatgcctggctaatatataaaaaaaaatttcttttgtagagatgggatgttgccatcttacctaggctagtcttgaactcctggcctcaagcagtcctcttaccttggccccccaaagtgctgggattacaggcctgagccactgcaacccgctgtttcgttattcttgacacgtttctgaaaacacaaggaaaagagaggtcaacgaagatgatggatggaaacacagacagcagtaaagaaaattaagttatctgagttattacgaatgagcatgatagatgtgaagtgctccacaaaaggaggggatacttgagcagaatgttggggaatataaagtagagagaggtggggtgaggactgaaatgtctaattcagtcagatgttctagctaacgatttctttctcttgatattttttagagaaatatgaaacgcaatgggagcagaaattgtttgaataggagaagtaggtttggttctcgagaaagagactggctaagagaagatgtaaagagaggctgtgtttacctttatggagcagacactaccactgccactacaaccaccaccacctcctcttcctcttcctcctcctcctcttcctctgacttacatctcgtcctttgcactgtagagacaccagcatcagaaatatgtgctggagagggaagagaaagtctttatttacagcttcatggagacctggtcaggagactggaacctactgaacgacctcttcagatcgtttatgattacttatccaggctgggatttgatgatcctgtgcgcatacaggaggaggctacaaatcctgacctcggctgtatgattcgattttatggtgaaaaaccatgccacatggatcgtttggatcgaatcctattgtctggcatctataatgtacgcaagggaaagacccagctgcataagtgggctgagcgcctagttgtcctctgtggtacctgccttatcgtttcctcagtgaaggattgtcaaactggaaagatgcacattttgcctctggttggtggaaagatagaagaagtgaagcgacggcaatactcccttgctttcagctcagcaggagcccaagctcagacctatcatgtcagcttcgagactttggccgagtaccagcgatggcaacggcaagcatccaaggtggtgtcccagcgaatcagtaccgtggatctctcgtgttacagcctcgaggaggttcctgagcatctcttctatagtcaagatattacctacctcaacttgcgacacaacttcatgcagttagaaagacccggaggcctcgatacactctacaaattttctcaactgaagggcctgaacttgtcccataataaacttgggttgtttcctatattgttatgcgagatctctaccctgactgagctcaacctttcctgtaatggatttcatgacctaccaagtcaaattggcaatctgctaaatcttcaaaccctctgtcttgatggcaactttctgactactttacctgaagaattgggaaatctacaacagctttcctccttgggaatttccttcaacaactttagtcaaattcctgaggtttatgagaaactcactatgttagatagagtggttatggcaggaaattgcctggaagtcctgaacttaggggtgctgaataggatgaaccatatcaagcatgtggatttaaggatgaaccatttgaaaaccatggttattgaaaatctggagggaaataaacacatcacccacgtggatctgcgggacaaccgactgactgacttggatcttagctccttatgcagcttggaacagctgcactgtgggcggaatcagctgagggagctaacactcagtggcttttcccttcggaccctctatgccagttccaacaggctgacagcagtgaacgtctatccagtacccagcctgctcactttcttggatctctcccgaaacctgctagagtgtgtccctgactgggcctgtgaagcaaagaagatagaagtattagatgtgagctataatcttctcacagaggttcccgtgagaattctgagtagcttgagtcttagaaaactgatgctgggacacaatcatgtgcaaaaccttccaacactggtagagcacatccccctcgaggtgctggatcttcagcataatgcactcacgaggctgccagacaccctcttctccaaggccttaaacaaactaaataaattggagcaattggaggaactgaacctaagtggcaacaagcttaaaaccattcccacaaccatagcaaactgtaaaaggctgcacacccttgttgcacactccaacaacatcagcattttcccagaaatactgcagttgcctcagatccagtttgtagacctaagttgcaacgacttgacagaaatcctgattccagaggctttgcctgctacattacaagaccttgacctgactggaaatacaaatctggttctggaacacaagacactggacatatttagccatatcacaaccctgaaaattgatcagaaacctttgccaaccacagattctacagttacgtcaaccttctggagccatggactggctgagatggcagggcagagaaataagctgtgtgtctcagcacttgctatggatagctttgcagagggggtgggagctgtgtatggcatgtttgatggagaccgaaatgaggagctcccgcgcctgctgcagtgtacgatggcagatgtgcttttagaagaggtacagcagtcaactaatgacacagttttcatggctaacaccttcttggtatctcacaggaaattaggaatggctggccagaagttgggctcctccgctctcctgtgctacatccgccctgacactgccgatccagcaagtagctttagcttgactgtagccaatgttggcacgtgccaagcagtcctgtgccgaggtgggaagccagtgcccctctctaaagtcttcagcctggagcaggacccagaggaggctcaaagggtgaaggaccaaaaagccatcatcacagaggacaacaaagtgaatggggtaacctgctgtacccggatgctgggctgtacatacctctacccttggatcctccccaagccccacatatcttccactccgctgaccattcaagatgagttgctgattctgggaaacaaagcattgtgggaacacttgtcctacacagaagctgtcaatgctgtacgtcacgtacaagacccattagcagctgctaagaagctgtgcacattagcgcagagctatggctgtcaggacaatgtaggggcgatggtagtttatttgaatattggtgaggaaggctgcacttgtgaaatgaatgggctcaccctcccaggtcctgtgggatttgcttcaaccaccactatcaaggatgcccctaagccagccactccatcctctagcagtgggattgcctctgagttcagcagtgagatgtccacctcagaggtgagcagtgaagtggggtccactgcttctgatgagcataatgctgggggcctggacactgccttgcttccgaggccagagcggcgctgcagcctccacccaacacccacctctgggctgtttcagcgccagccttcttctgctaccttctccagtaaccagtctgacaacggcctggacagtgatgatgaccagcccgttgagggggtcataaccaatggcagcaaggtagaggtggaagtagacatccactgctgcagggggagggatctggagaactcaccccctctcatagagagttctcctaccctgtgttctgaggaacatgctagagggtcgtgttttgggatccgaagacagaacagtgtgaatagtggcatgctcctgccaatgagcaaggacaggatggagttacagaagtctccctccacctcctgcctctatgggaagaaactctccaatggctctattgtgcccctagaggacagcctgaacctcattgaagtggccacagaagtgcccaagaggaaaactggctattttgctgcccccactcagatggaaccagaggaccagtttgttgtgcctcatgacctggaagaagaagtgaaggaacaaatgaaacagcaccaggacagccggctcgagcctgagccccatgaagaggatcggaccgagcccccggaggagttcgacacagcactatgactgccccactgggcacagtgtgggaggaggctgtgcagggttggggtagggacttgctagaggcattctgcctctacatttctttttgtttgttcgttttttttttgtttgtttgttttgagacggagtcttgctcagtcgctcaggctggagtgcaatggtggggtctcgggtcactgcagcctctgtccctgggttcaagccattctcctgtctcagcctcccgagtagctgggattacaggcacctgccattatgcccggctaagttttattttttttttttagagacggggtttcaccatgttggccaggctggtgttgaactcttgacctcaggtgatccaccctcctctgcctcccaaagtgctgtgattacaggcctcagccaccatgcccagccctgcgtctacatttctaaaccatagctgtgtggggttgaactcggagccaaaaagtgtgagagccatcaggggctggctctggataaactggtagccactatcagtgttaagtttcacatttaacctgcattggaattcccaggggtactgggaagaaagcagctgttctgtatcagtcctaccacctgccattaaccctttctctcctaggatcattttgagaatttgcctgcctgggcaggaaagggactatttctgtggaggaaaaaagtgaagattgattctctttactagttgctgctgatggatctctgtgacagagaaatcaccttatctcagactaatggggtgtgatgtgactagtcacatggcttttcattcttctctacgagaatacagcctatcaaaatgatgtctgttggaaatgtagaaccaatcaaacagataatttatgtatgtaatgtaatgagagcacttttcattgactgtgaactttttatttttgaatctgcactcgagccaatcttcttagaggcagcccggcaccttcatccataggcagagagagaactgggtgttggagacttattcgagggtataggaagggccctgtgaagttgatttaacttttggatgtcagactgtgaaagctcctgagaaacttggggtaataggatcttcttttggggatgaaaatggggaaggcgtgaggacctagactacttctccctagatcagaaaaagagaattaccccttgacaaatatgatacctgctaggtatttcccagggaaatttagggattggcgtctttccctagcatgtggaggaattggcagacagcttcctaagggcggggagcgggggcccaaggctgacactgcttgcatccacgtgaccttaagttatggcagatgactctgaaacggactgaggccaatgagaacagatggatggagcactcaggttagacttgttccttctcctatgctggaggagagggatggttctctagaatgttggaggtgagttgagagctcgcctcttgaatgttgaacagtgtactcttctgaaaactgcatattcactttatgtggtttcagaatactgggctcaatactaacataagaaagacacttcattgagaaattcttaagcttacagaaaacctatactctttgcacattccacataaccctagcaaaatgcagtttcttcatacttctgtcactttttccattggaagatttgcttaggaaaattaattcctatttattcccacaaaatgttggcattgcttgattttacccaatggggaatgtgctttgaatttttggaacacttttacaattaaaaataaagtagggccatttttaatttgtttcatcagaaactatgttaaagagagggttaaatataaatatattttcgtgtgtatttttgggaagatttttgttcaaagcaatagtcaaaatcagatgacctgtccataataattatgtgtcttcatcttctcagaggccccatgctcatatgcacgtgtcattgggatacactcttgggggatttggtacactctaatggatgtctaatgttcaacccctcgagaatctgaacttgagtccccagattgtcaaactactggtcagctattgagaattttagaactcaggtctttgatttgaagtagggaacatagtggctcacacagagtttaggtgctgttagaaagatgggaacaagagtgttttgccaccttatttttatatgggaaattttttttaatgaagaaaaaatgaaaatgaaataacaggatgatagtgatgagtgatgtaaaacatcttacttagatggcagaaccttcgggttgtagaatagtgatgtctaaaaattaaagttattttgggaatacaccactttaatagtatagtcttataaaaattattcattatggtgaacccttcttgtctgctattcgtttcccaacctacttattggaaccacctcaaaacccagttctgaaatgaccttaccaaaagtaaatgtatttattttttagtcagcagaactctgtaattccaaatgttgttctgtgtggtagaattttttttcaggaaccattaggttgtattgaaaatctttgttataggcgataccaaaactgattattcttttttgcagtctgctttaattcatgtccttctgcagttgctctgtattaaaacagggtaaaaaggccatagcccattatgaaaaatataatacaaaactctttgacctatgaggtaacttacagacattgtgttttctaaacaggctgtcagtgaaagcccgtatctgtctccaggtgaatgtaatttacttccgagtactttacccagaggatgtgttccccaggtgggcagagtacagttgatctctagcacagacagagattctggcctctgcatattctcaggtctctgtgtgtacctcccattgagtagagaagcttaagataatttctgagagaagaacactgctgattgtgggagcagtttaggagtccatggaagaaagaaaaatacatgtgtcttggcagccatggtgtatttttgtccaaatggattggaaggatatttgaatatttgaatgttggtatgacataaagctgcagtgcactatagagtcaagtcattgaattaccactcctgatacagggctttattgtactactgtgaagtgtatgtgtgcaatacattggtgagttcatttactggtgtacggaagagccagcaggagcagcgtggtcattgctgggtgctattacagttgcttgtagtgagtgctgttttccaggagatggagccagttgggtgtggcagatctactgaatatcaaatgatgctcttcttcccatgtagaccttcagcaaaagccggtacttggaagccacaggctcaccttctctatctatccaataattattaatgaagagacctccataagggagcagctggctgttatcgataaatgtaccaattattaaataattagtctccaagccattcagtgatgtcttcagcatcactataggactgtctagtgtcactttttacttccttctgggtggaggctttccgactcccaatcatgaaggcaagttaatctttccagttagtgacttttgccccatagttggggtaagcacttcctagattgagaaaaagcagctacagtcaatcctgctctgtttgcctcatttggtgatcagtcagtcacacataagttccttgtattctaaatttcatgcacttctcccagatgctatagggttttctctcactgttgccagtggatgtcatccagacagtgggctcatatcttacggttttgtgcaatcattgtcgtattgtagtcttaagactcattatagtgtatttttgatatttttgaaatgtgttaaattttttaattcaataatatgagccagagcatgttgcagcaaatctattgtttgtaaaaataacaataacaataataaataaaataaagtggaatctttttcatggctttgtttt

SEQ ID NO: 164656 - DNA, 4812 bp, Homo sapiens
  Payload ID: 12441
  Gene Symbol: PHLPP2
  Gene Name: PH domain and leucine rich repeat protein phosphatase 2
  ENST ID: ENST00000567016
  CDS Start-End: 16-4092
aatcctgggtcgccgatgggggaggtggagccggggcccgcgggcccgctggagcccccggagccgcccgaagcgcccgcgagccgccggccgggagggatccgggtcctgaagagaaatatgaaacgcaatgggagcagaaattgtttgaataggagaagtaggtttggttctcgagaaagagactggctaagagaagatgtaaagagaggctgtgtttacctttatggagcagacactaccactgccactacaaccaccaccacctcctcttcctcttcctcctcctcctcttcctctgacttacatctcgtcctttgcactgtagagacaccagcatcagaaatatgtgctggagagggaagagaaagtctttatttacagcttcatggagacctggtcaggagactggaacctactgaacgacctcttcagatcgtttatgattacttatccaggctgggatttgatgatcctgtgcgcatacaggaggaggctacaaatcctgacctcggctgtatgattcgattttatggtgaaaaaccatgccacatggatcgtttggatcgaatcctattgtctggcatctataatgtacgcaagggaaagacccagctgcataagtgggctgagcgcctagttgtcctctgtggtacctgccttatcgtttcctcagtgaaggattgtcaaactggaaagatgcacattttgcctctggttggtggaaagatagaagaagtgaagcgacggcaatactcccttgctttcagctcagcaggagcccaagctcagacctatcatgtcagcttcgagactttggccgagtaccagcgatggcaacggcaagcatccaaggtggtgtcccagcgaatcagtaccgtggatctctcgtgttacagcctcgaggaggttcctgagcatctcttctatagtcaagatattacctacctcaacttgcgacacaacttcatgcagttagaaagacccggaggcctcgatacactctacaaattttctcaactgaagggcctgaacttgtcccataataaacttgggttgtttcctatattgttatgcgagatctctaccctgactgagctcaacctttcctgtaatggatttcatgacctaccaagtcaaattggcaatctgctaaatcttcaaaccctctgtcttgatggcaactttctgactactttacctgaagaattgggaaatctacaacagctttcctccttgggaatttccttcaacaactttagtcaaattcctgaggtttatgagaaactcactatgttagatagagtggttatggcaggaaattgcctggaagtcctgaacttaggggtgctgaataggatgaaccatatcaagcatgtggatttaaggatgaaccatttgaaaaccatggttattgaaaatctggagggaaataaacacatcacccacgtggatctgcgggacaaccgactgactgacttggatcttagctccttatgcagcttggaacagctgcactgtgggcggaatcagctgagggagctaacactcagtggcttttcccttcggaccctctatgccagttccaacaggctgacagcagtgaacgtctatccagtacccagcctgctcactttcttggatctctcccgaaacctgctagagtgtgtccctgactgggcctgtgaagcaaagaagatagaagtattagatgtgagctataatcttctcacagaggttcccgtgagaattctgagtagcttgagtcttagaaaactgatgctgggacacaatcatgtgcaaaaccttccaacactggtagagcacatccccctcgaggtgctggatcttcagcataatgcactcacgaggctgccagacaccctcttctccaaggccttaaatctcagatacttgaatgcatctgcaaatagtctggagtctttaccatccgcctgcactggagaggagagtttgagtatgctgcagctgctttatctgaccaacaatctcctgacggatcagtgcatacctgtcctggtagggcacctgcacctgcgaatcttgcaccttgcaaacaatcagttacagacctttcctgcaagcaaactaaataaattggagcaattggaggaactgaacctaagtggcaacaagcttaaaaccattcccacaaccatagcaaactgtaaaaggctgcacacccttgttgcacactccaacaacatcagcattttcccagaaatactgcagttgcctcagatccagtttgtagacctaagttgcaacgacttgacagaaatcctgattccagaggctttgcctgctacattacaagaccttgacctgactggaaatacaaatctggttctggaacacaagacactggacatatttagccatatcacaaccctgaaaattgatcagaaacctttgccaaccacagattctacagttacgtcaaccttctggagccatggactggctgagatggcagggcagagaaataagctgtgtgtctcagcacttgctatggatagctttgcagagggggtgggagctgtgtatggcatgtttgatggagaccgaaatgaggagctcccgcgcctgctgcagtgtacgatggcagatgtgcttttagaagaggtacagcagtcaactaatgacacagttttcatggctaacaccttcttggtatctcacaggaaattaggaatggctggccagaagttgggctcctccgctctcctgtgctacatccgccctgacactgccgatccagcaagtagctttagcttgactgtagccaatgttggcacgtgccaagcagtcctgtgccgaggtgggaagccagtgcccctctctaaagtcttcagcctggagcaggacccagaggaggctcaaagggtgaaggaccaaaaagccatcatcacagaggacaacaaagtgaatggggtaacctgctgtacccggatgctgggctgtacatacctctacccttggatcctccccaagccccacatatcttccactccgctgaccattcaagatgagttgctgattctgggaaacaaagcattgtgggaacacttgtcctacacagaagctgtcaatgctgtacgtcacgtacaagacccattagcagctgctaagaagctgtgcacattagcgcagagctatggctgtcaggacaatgtaggggcgatggtagtttatttgaatattggtgaggaaggctgcacttgtgaaatgaatgggctcaccctcccaggtcctgtgggatttgcttcaaccaccactatcaaggatgcccctaagccagccactccatcctctagcagtgggattgcctctgagttcagcagtgagatgtccacctcagaggtgagcagtgaagtggggtccactgcttctgatgagcataatgctgggggcctggacactgccttgcttccgaggccagagcggcgctgcagcctccacccaacacccacctctgggctgtttcagcgccagccttcttctgctaccttctccagtaaccagtctgacaacggcctggacagtgatgatgaccagcccgttgagggggtcataaccaatggcagcaaggtagaggtggaagtagacatccactgctgcagggggagggatctggagaactcaccccctctcatagagagttctcctaccctgtgttctgaggaacatgctagagggtcgtgttttgggatccgaagacagaacagtgtgaatagtggcatgctcctgccaatgagcaaggacaggatggagttacagaagtctccctccacctcctgcctctatgggaagaaactctccaatggctctattgtgcccctagaggacagcctgaacctcattgaagtggccacagaagtgcccaagaggaaaactggctattttgctgcccccactcagatggaaccagaggaccagtttgttgtgcctcatgacctggaagaagaagtgaaggaacaaatgaaacagcaccaggacagccggctcgagcctgagccccatgaagaggatcggaccgagcccccggaggagttcgacacagcactatgactgccccactgggcacagtgtgggaggaggctgtgcagggttggggtagggacttgctagaggcattctgcctctacatttctttttgtttgttcgttttttttttgtttgtttgttttgagacggagtcttgctcagtcgctcaggctggagtgcaatggtggggtctcgggtcactgcagcctctgtccctgggttcaagccattctcctgtctcagcctcccgagtagctgggattacaggcacctgccattatgcccggctaagttttattttttttttttagagacggggtttcaccatgttggccaggctggtgttgaactcttgacctcaggtgatccaccctcctctgcctcccaaagtgctgtgattacaggcctcagccaccatgcccagccctgcgtctacatttctaaaccatagctgtgtggggttgaactcggagccaaaaagtgtgagagccatcaggggctggctctggataaactggtagccactatcagtgttaagtttcacatttaacctgcattggaattcccaggggtactgggaagaaagcagctgttctgtatcagtcctaccacctgccattaaccctttctctcctaggatcattttgagaatttgcctgcctgggcaggaaagggactatttctgtggaggaaaaaagtgaagattgattctctttactagttgctgctgatggatctctgtga

SEQ ID NO: 164657 - DNA, 2077 bp, Homo sapiens
  Payload ID: 12441
  Gene Symbol: PHLPP2
  Gene Name: PH domain and leucine rich repeat protein phosphatase 2
  ENST ID: ENST00000564884
  CDS Start-End: 1-959
ctgtcctggtagggcacctgcacctgcgaatcttgcaccttgcaaacaatcagttacagacctttcctgcaagcaaactaaataaattggagcaattggaggaactgaacctaagtggcaacaagcttaaaaccattcccacaaccatagcaaactgtaaaaggctgcacacccttgttgcacactccaacaacatcagcattttcccagaaatactgcagttgcctcagatccagtttgtagacctaagttgcaacgacttgacagaaatcctgattccagaggctttgcctgctacattacaagaccttgacctgactggaaatacaaatctggttctggaacacaagacactggacatatttagccatatcacaaccctgaaaattgatcagaaacctttgccaaccacagattctacagttacgtcaaccttctggagccatggactggctgagatggcagggcagagaaataagctgtgtgtctcagcacttgctatggatagctttgcagagggggtgggagctgtgtatggcatgtttgatggagaccgaaatgaggagctcccgcgcctgctgcagtgtacgatggcagatgtgcttttagaagaggtacagcagtcaactaatgacacagttttcatggctaacaccttcttggtatctcacaggaaattaggaatggctggccagaagttgggctcctccgctctcctgtgctacatccgccctgacactgccgatccagcaagtagctttagcttgactgtagccaatgttggcacgtgccaagcagtcctgtgccgaggtgggaagccagtgcccctctctaaagtcttcagcctggagcaggacccagaggaggctcaaagggtgaaggaccaaaaagccatcatcacagagaattgggttcttaaccaaaagcacctgcaggattttcctggggaagataagtgagaacaaacacatgaaaccacattccctgacactgcaaagctatgagttaaggttccggaagatctcaaagagttccagaccacagatattccggtgcatcactgtaacttccgggctgttctcggctgcctttgtagcgcttctgttctcggtagctacgcagggccagcaccacgctggcgccgtacatgatcacgagaagacaagcaaaggtggctgctgctccgtcggtgcctgccagctggcagtccatccaggtgagacccttgcgggcatagagcctctctcttgttttgcaagtgtcggtgctattgatctgcagagccacgtggaggtaaacaccaatgcctgtgcagtagcccactgccgctaggaggctgaaggcggcctccgtgaggagccacttccctgacaacattgttcgactcttggctccttggagtaaaacacccatggtgaggacccccagacccagagaaacagccacgccaccgtatatcaggggcgagcggaggatcgtgtactgctggtccagctgccgaacctgctctagctcagtgccctcgaacgatgttttcagatcagttcctacaagaggagccacattttgttaagtggccttcgacttcattgtatggatggatttgtctattcaaccaggaccttactgatagatatttggactgaaaggaacccacaaatggcacgaggcagaggaagccaacaggccaacagactgaagatcttcttgtccgaggtcagcttttatttgttactgacagaggccccaaatccttcttaggtgtccttctgggagagggtctcctgccattcccgtggtgttcagggatgagcatgaagagaaatacaaatgaaccgagagcaggaccaccaggttcaagtccccgctttttactgccttgtcatcttggccaagccattcagtccttctaagcctcagacaatatgacaaatgaagctaagtctgccaatcttcacccacagggatgtggggaggctcaaatgaaagcaaccgtgtgatactgtgggaagttaacaacaacaacaaaaaagcaagtatgtgaaaatactctaaaaataaaataatgtacaaatgg

SEQ ID NO: 164658 - DNA, 8317 bp, Homo sapiens
  Payload ID: 12441
  Gene Symbol: PHLPP2
  Gene Name: PH domain and leucine rich repeat protein phosphatase 2
  Uniprot ID: Q6ZVD8
  ENST ID: ENST00000568954
  CDS Start-End: 380-4351
gcacaggggtatagatctaaagaagggcagaggggagatctggaaacaggctggctgactccaaatttggcccattggcaacaaaactactatcactgcgagaacgaaaagaaaaacaaaacaaagaaaagaaaagaagttaacttttaaaagtttttttctgaatcagccttgcaaataaatcataaaccgggtcacaggccatattactgcttgaagcagagcaccgaattctgataattttgctccaggaggaggcaagggaattaaaacatggctgggaggtgagcggacgttttgtacgaggttgggttgaatttgcttaagaaggtcgcacgcatctctgataaggaagagaaaaggccttgccaagagaaatatgaaacgcaatgggagcagaaattgtttgaataggagaagtaggtttggttctcgagaaagagactggctaagagaagatgtaaagagaggctgtgtttacctttatggagcagacactaccactgccactacaaccaccaccacctcctcttcctcttcctcctcctcctcttcctctgacttacatctcgtcctttgcactgtagagacaccagcatcagaaatatgtgctggagagggaagagaaagtctttatttacagcttcatggagacctggtcaggagactggaacctactgaacgacctcttcagatcgtttatgattacttatccaggctgggatttgatgatcctgtgcgcatacaggaggaggctacaaatcctgacctcggctgtatgattcgattttatggtgaaaaaccatgccacatggatcgtttggatcgaatcctattgtctggcatctataatgtacgcaagggaaagacccagctgcataagtgggctgagcgcctagttgtcctctgtggtacctgccttatcgtttcctcagtgaaggattgtcaaactggaaagatgcacattttgcctctggttggtggaaagatagaagaagtgaagcgacggcaatactcccttgctttcagctcagcaggagcccaagctcagacctatcatgtcagcttcgagactttggccgagtaccagcgatggcaacggcaagcatccaaggtggtgtcccagcgaatcagtaccgtggatctctcgtgttacagcctcgaggaggttcctgagcatctcttctatagtcaagatattacctacctcaacttgcgacacaacttcatgcagttagaaagacccggaggcctcgatacactctacaaattttctcaactgaagggcctgaacttgtcccataataaacttgggttgtttcctatattgttatgcgagatctctaccctgactgagctcaacctttcctgtaatggatttcatgacctaccaagtcaaattggcaatctgctaaatcttcaaaccctctgtcttgatggcaactttctgactactttacctgaagaattgggaaatctacaacagctttcctccttgggaatttccttcaacaactttagtcaaattcctgaggtttatgagaaactcactatgttagatagagtggttatggcaggaaattgcctggaagtcctgaacttaggggtgctgaataggatgaaccatatcaagcatgtggatttaaggatgaaccatttgaaaaccatggttattgaaaatctggagggaaataaacacatcacccacgtggatctgcgggacaaccgactgactgacttggatcttagctccttatgcagcttggaacagctgcactgtgggcggaatcagctgagggagctaacactcagtggcttttcccttcggaccctctatgccagttccaacaggctgacagcagtgaacgtctatccagtacccagcctgctcactttcttggatctctcccgaaacctgctagagtgtgtccctgactgggcctgtgaagcaaagaagatagaagtattagatgtgagctataatcttctcacagaggttcccgtgagaattctgagtagcttgagtcttagaaaactgatgctgggacacaatcatgtgcaaaaccttccaacactggtagagcacatccccctcgaggtgctggatcttcagcataatgcactcacgaggctgccagacaccctcttctccaaggccttaaatctcagatacttgaatgcatctgcaaatagtctggagtctttaccatccgcctgcactggagaggagagtttgagtatgctgcagctgctttatctgaccaacaatctcctgacggatcagtgcatacctgtcctggtagggcacctgcacctgcgaatcttgcaccttgcaaacaatcagttacagacctttcctgcaagcaaactaaataaattggagcaattggaggaactgaacctaagtggcaacaagcttaaaaccattcccacaaccatagcaaactgtaaaaggctgcacacccttgttgcacactccaacaacatcagcattttcccagaaatactgcagttgcctcagatccagtttgtagacctaagttgcaacgacttgacagaaatcctgattccagaggctttgcctgctacattacaagaccttgacctgactggaaatacaaatctggttctggaacacaagacactggacatatttagccatatcacaaccctgaaaattgatcagaaacctttgccaaccacagattctacagttacgtcaaccttctggagccatggactggctgagatggcagggcagagaaataagctgtgtgtctcagcacttgctatggatagctttgcagagggggtgggagctgtgtatggcatgtttgatggagaccgaaatgaggagctcccgcgcctgctgcagtgtacgatggcagatgtgcttttagaagaggtacagcagtcaactaatgacacagttttcatggctaacaccttcttggtatctcacaggaaattaggaatggctggccagaagttgggctcctccgctctcctgtgctacatccgccctgacactgccgatccagcaagtagctttagcttgactgtagccaatgttggcacgtgccaagcagtcctgtgccgaggtgggaagccagtgcccctctctaaagtcttcagcctggagcaggacccagaggaggctcaaagggtgaaggaccaaaaagccatcatcacagaggacaacaaagtgaatggggtaacctgctgtacccggatgctgggctgtacatacctctacccttggatcctccccaagccccacatatcttccactccgctgaccattcaagatgagttgctgattctgggaaacaaagcattgtgggaacacttgtcctacacagaagctgtcaatgctgtacgtcacgtacaagacccattagcagctgctaagaagctgtgcacattagcgcagagctatggctgtcaggacaatgtaggggcgatggtagtttatttgaatattggtgaggaaggctgcacttgtgaaatgaatgggctcaccctcccaggtcctgtgggatttgcttcaaccaccactatcaaggatgcccctaagccagccactccatcctctagcagtgggattgcctctgagttcagcagtgagatgtccacctcagaggtgagcagtgaagtggggtccactgcttctgatgagcataatgctgggggcctggacactgccttgcttccgaggccagagcggcgctgcagcctccacccaacacccacctctgggctgtttcagcgccagccttcttctgctaccttctccagtaaccagtctgacaacggcctggacagtgatgatgaccagcccgttgagggggtcataaccaatggcagcaaggtagaggtggaagtagacatccactgctgcagggggagggatctggagaactcaccccctctcatagagagttctcctaccctgtgttctgaggaacatgctagagggtcgtgttttgggatccgaagacagaacagtgtgaatagtggcatgctcctgccaatgagcaaggacaggatggagttacagaagtctccctccacctcctgcctctatgggaagaaactctccaatggctctattgtgcccctagaggacagcctgaacctcattgaagtggccacagaagtgcccaagaggaaaactggctattttgctgcccccactcagatggaaccagaggaccagtttgttgtgcctcatgacctggaagaagaagtgaaggaacaaatgaaacagcaccaggacagccggctcgagcctgagccccatgaagaggatcggaccgagcccccggaggagttcgacacagcactatgactgccccactgggcacagtgtgggaggaggctgtgcagggttggggtagggacttgctagaggcattctgcctctacatttctttttgtttgttcgttttttttttgtttgtttgttttgagacggagtcttgctcagtcgctcaggctggagtgcaatggtggggtctcgggtcactgcagcctctgtccctgggttcaagccattctcctgtctcagcctcccgagtagctgggattacaggcacctgccattatgcccggctaagttttattttttttttttagagacggggtttcaccatgttggccaggctggtgttgaactcttgacctcaggtgatccaccctcctctgcctcccaaagtgctgtgattacaggcctcagccaccatgcccagccctgcgtctacatttctaaaccatagctgtgtggggttgaactcggagccaaaaagtgtgagagccatcaggggctggctctggataaactggtagccactatcagtgttaagtttcacatttaacctgcattggaattcccaggggtactgggaagaaagcagctgttctgtatcagtcctaccacctgccattaaccctttctctcctaggatcattttgagaatttgcctgcctgggcaggaaagggactatttctgtggaggaaaaaagtgaagattgattctctttactagttgctgctgatggatctctgtgacagagaaatcaccttatctcagactaatggggtgtgatgtgactagtcacatggcttttcattcttctctacgagaatacagcctatcaaaatgatgtctgttggaaatgtagaaccaatcaaacagataatttatgtatgtaatgtaatgagagcacttttcattgactgtgaactttttatttttgaatctgcactcgagccaatcttcttagaggcagcccggcaccttcatccataggcagagagagaactgggtgttggagacttattcgagggtataggaagggccctgtgaagttgatttaacttttggatgtcagactgtgaaagctcctgagaaacttggggtaataggatcttcttttggggatgaaaatggggaaggcgtgaggacctagactacttctccctagatcagaaaaagagaattaccccttgacaaatatgatacctgctaggtatttcccagggaaatttagggattggcgtctttccctagcatgtggaggaattggcagacagcttcctaagggcggggagcgggggcccaaggctgacactgcttgcatccacgtgaccttaagttatggcagatgactctgaaacggactgaggccaatgagaacagatggatggagcactcaggttagacttgttccttctcctatgctggaggagagggatggttctctagaatgttggaggtgagttgagagctcgcctcttgaatgttgaacagtgtactcttctgaaaactgcatattcactttatgtggtttcagaatactgggctcaatactaacataagaaagacacttcattgagaaattcttaagcttacagaaaacctatactctttgcacattccacataaccctagcaaaatgcagtttcttcatacttctgtcactttttccattggaagatttgcttaggaaaattaattcctatttattcccacaaaatgttggcattgcttgattttacccaatggggaatgtgctttgaatttttggaacacttttacaattaaaaataaagtagggccatttttaatttgtttcatcagaaactatgttaaagagagggttaaatataaatatattttcgtgtgtatttttgggaagatttttgttcaaagcaatagtcaaaatcagatgacctgtccataataattatgtgtcttcatcttctcagaggccccatgctcatatgcacgtgtcattgggatacactcttgggggatttggtacactctaatggatgtctaatgttcaacccctcgagaatctgaacttgagtccccagattgtcaaactactggtcagctattgagaattttagaactcaggtctttgatttgaagtagggaacatagtggctcacacagagtttaggtgctgttagaaagatgggaacaagagtgttttgccaccttatttttatatgggaaattttttttaatgaagaaaaaatgaaaatgaaataacaggatgatagtgatgagtgatgtaaaacatcttacttagatggcagaaccttcgggttgtagaatagtgatgtctaaaaattaaagttattttgggaatacaccactttaatagtatagtcttataaaaattattcattatggtgaacccttcttgtctgctattcgtttcccaacctacttattggaaccacctcaaaacccagttctgaaatgaccttaccaaaagtaaatgtatttattttttagtcagcagaactctgtaattccaaatgttgttctgtgtggtagaattttttttcaggaaccattaggttgtattgaaaatctttgttataggcgataccaaaactgattattcttttttgcagtctgctttaattcatgtccttctgcagttgctctgtattaaaacagggtaaaaaggccatagcccattatgaaaaatataatacaaaactctttgacctatgaggtaacttacagacattgtgttttctaaacaggctgtcagtgaaagcccgtatctgtctccaggtgaatgtaatttacttccgagtactttacccagaggatgtgttccccaggtgggcagagtacagttgatctctagcacagacagagattctggcctctgcatattctcaggtctctgtgtgtacctcccattgagtagagaagcttaagataatttctgagagaagaacactgctgattgtgggagcagtttaggagtccatggaagaaagaaaaatacatgtgtcttggcagccatggtgtatttttgtccaaatggattggaaggatatttgaatatttgaatgttggtatgacataaagctgcagtgcactatagagtcaagtcattgaattaccactcctgatacagggctttattgtactactgtgaagtgtatgtgtgcaatacattggtgagttcatttactggtgtacggaagagccagcaggagcagcgtggtcattgctgggtgctattacagttgcttgtagtgagtgctgttttccaggagatggagccagttgggtgtggcagatctactgaatatcaaatgatgctcttcttcccatgtagaccttcagcaaaagccggtacttggaagccacaggctcaccttctctatctatccaataattattaatgaagagacctccataagggagcagctggctgttatcgataaatgtaccaattattaaataattagtctccaagccattcagtgatgtcttcagcatcactataggactgtctagtgtcactttttacttccttctgggtggaggctttccgactcccaatcatgaaggcaagttaatctttccagttagtgacttttgccccatagttggggtaagcacttcctagattgagaaaaagcagctacagtcaatcctgctctgtttgcctcatttggtgatcagtcagtcacacataagttccttgtattctaaatttcatgcacttctcccagatgctatagggttttctctcactgttgccagtggatgtcatccagacagtgggctcatatcttacggttttgtgcaatcattgtcgtattgtagtcttaagactcattatagtgtatttttgatatttttgaaatgtgttaaattttttaattcaataatatgagccagagcatgttgcagcaaatctattgtttgtaaaaataacaataacaataataaataaaataaagtggaatctttttcatggctttgttttaaaa

SEQ ID NO: 164659 - DNA, 3099 bp, Homo sapiens
  Payload ID: 12441
  Gene Symbol: PHLPP2
  Gene Name: PH domain and leucine rich repeat protein phosphatase 2
  ENST ID: ENST00000568004
  CDS Start-End: 1-2172
gaggttcctgagcatctcttctatagtcaagatattacctacctcaacttgcgacacaacttcatgcagttagaaagacccggaggcctcgatacactctacaaattttctcaactgaagggcctgaacttgtcccataataaacttgggttgtttcctatattgttatgcgagatctctaccctgactgagctcaacctttcctgtaatggatttcatgacctaccaagtcaaattggcaatctgctaaatcttcaaaccctctgtcttgatggcaactttctgactactttacctgaagaattgggaaatctacaacagctttcctccttgggaatttccttcaacaactttagtcaaattcctgaggtttatgagaaactcactatgttagatagagtggttatggcaggaaattgcctggaagtcctgaacttaggggtgctgaataggatgaaccatatcaagcatgtggatttaaggatgaaccatttgaaaaccatggttattgaaaatctggagggaaataaacacatcacccacgtggatctgcgggacaaccgactgactgacttggatcttagctccttatgcagcttggaacagctgcactgtgggcggaatcagctgagggagctaacactcagtggcttttcccttcggaccctctatgccagttccaacaggctgacagcagtgaacgtctatccagtacccagcctgctcactttcttggatctctcccgaaacctgctagagtgtgtccctgactgggcctgtgaagcaaagaagatagaagtattagatgtgagctataatcttctcacagaggttcccgtgagaattctgagtagcttgagtcttagaaaactgatgctgggacacaatcatgtgcaaaaccttccaacactggtagagcacatccccctcgaggtgctggatcttcagcataatgcactcacgaggctgccagacaccctcttctccaaggccttaaatctcagatacttgaatgcatctgcaaatagtctggagtctttaccatccgcctgcactggagaggagagtttgagtatgctgcagctgctttatctgaccaacaatctcctgacggatcagtgcatacctgtcctggtagggcacctgcacctgcgaatcttgcaccttgcaaacaatcagttacagacctttcctgcaagcaaactaaataaattggagcaattggaggaactgaacctaagtggcaacaagcttaaaaccattcccacaaccatagcaaactgtaaaaggctgcacacccttgttgcacactccaacaacatcagcattttcccagaaatactgcagttgcctcagatccagtttgtagacctaagttgcaacgacttgacagaaatcctgattccagaggctttgcctgctacattacaagaccttgacctgactggaaatacaaatctggttctggaacacaagacactggacatatttagccatatcacaaccctgaaaattgatcagaaacctttgccaaccacagattctacagttacgtcaaccttctggagccatggactggctgagatggcagggcagagaaataagctgtgtgtctcagcacttgctatggatagctttgcagagggggtgggagctgtgtatggcatgtttgatggagaccgaaatgaggagctcccgcgcctgctgcagtgtacgatggcagatgtgcttttagaagaggtacagcagtcaactaatgacacagttttcatggctaacaccttcttggtatctcacaggaaattaggaatggctggccagaagttgggctcctccgctctcctgtgctacatccgccctgacactgccgatccagcaagtagctttagcttgactgtagccaatgttggcacgtgccaagcagtcctgtgccgaggtgggaagccagtgcccctctctaaagtcttcagcctggagcaggacccagaggaggctcaaagggtgaaggaccaaaaagccatcatcacagaggttccggaagatctcaaagagttccagaccacagatattccggtgcatcactgtaacttccgggctgttctcggctgcctttgtagcgcttctgttctcggtagctacgcagggccagcaccacgctggcgccgtacatgatcacgagaagacaagcaaaggtggctgctgctccgtcggtgcctgccagctggcagtccatccaggtgagacccttgcgggcatagagcctctctcttgttttgcaagtgtcggtgctattgatctgcagagccacgtggaggtaaacaccaatgcctgtgcagtagcccactgccgctaggaggctgaaggcggcctccgtgaggagccacttccctgacaacattgttcgactcttggctccttggagtaaaacacccatggtgaggacccccagacccagagaaacagccacgccaccgtatatcaggggcgagcggaggatcgtgtactgctggtccagctgccgaacctgctctagctcagtgccctcgaacgatgttttcagatcagttcctacaagaggagccacattttgttaagtggccttcgacttcattgtatggatggatttgtctattcaaccaggaccttactgatagatatttggactgaaaggaacccacaaatggcacgaggcagaggaagccaacaggccaacagactgaagatcttcttgtccgaggtcagcttttatttgttactgacagaggccccaaatccttcttaggtgtccttctgggagagggtctcctgccattcccgtggtgttcagggatgagcatgaagagaaatacaaatgaaccgagagcaggaccaccaggttcaagtccccgctttttactgccttgtcatcttggccaagccattcagtccttctaagcctcagacaatatgacaaatgaagctaagtctgccaatcttcacccacagggatgtggggaggctcaaatgaaagcaaccgtgtgatactgtgggaagttaacaacaacaacaaaaaagcaagtatgtgaaaatactctaaaaataaaataatgtacaaatgga

SEQ ID NO: 164660 - DNA, 760 bp, Homo sapiens
  Payload ID: 12442
  Gene Symbol:
  Gene Name: PHACTR1
  ENST ID: ENST00000635196
  CDS Start-End: 1-693
aacctgggaaggattttcaagccttggaaatggaggaagaagaaaagcgaaaagttcaaacacacgtcagcagccctggaaaggaaaatatctatgaggcaaagcagagaagagctgataaagcgaggagtcctgaaggaaatctatgataaagatggggaactctctatatccaatgaagaggactccctagaaaatgggcagtccctgagctccagccagctgtctctgcctgccctgtccgaaatggagccagtcccaatgcccagggatccctgctcatatgaggtgctccaaccgtcagacatcatggatgggccagtgtctgaagagagtccctctgccagtgagtctggagtcctcctgtcccaagatccttcagccaaaccagtcctgctactgccccccaaaaaacctgctgctttccctggagaccatgaagagaccccagtgaagcagctgccccttctcaagcagcccccggccctgcctcccaaacccactaccaggattgccaaccacttaacagattggcaccaagctcaccaggtaggacagcggcaccctctgcctccctggcagtgggcctttagctctccaggttctagcaaaagaattcagtctcggccgggcgcagtagcttatgcctgtaatcccagcactttgggaggccgaggcaggtggatcacatgaggtcaggagttcaagaccagcctggccaacatggtgaaaccccatctctactaaaaatgcaaaaatt

SEQ ID NO: 164661 - DNA, 943 bp, Homo sapiens
  Payload ID: 12442
  Gene Symbol:
  Gene Name: PHACTR1
  ENST ID: ENST00000634261
  CDS Start-End: 106-540
gtgcctctcctgggcttgaaattgaggaactgaggaggcggtggtggcgagagtcagtctttcagagcacaggatggaacaagaactccagccactgactgtctcatgtatctgcaagggccgaggaaattaatgacccaaggaggctatgatatggtccaaaaacttttcctggattttttccgtaggcggctgagccagaggccaactgcagaggaactggaacagaggaacattttgaaacctcggaatgaacaagaggaacaggaggagaagagagagatcaagaggaggctaacccgaaagctcagtcaaaggcccacggtggaagagcttcgggaaagaaagatcctcatccgcttcagtgactacgtggaggtggctgacgctcaggactatgaccgcagggcagataagccgtggacccgcctcaccgctgcagacaaagctgccatccgaaaggagctcaatgaattcaaaagcactgagatggaagttcatgaattgagtagacacttaacaaggtttcaccgaccttaacagtcgaattcctcttgagtgctatgctgtcttcaaaacataaatttataagaaccataagtgctggtatttattcacttccccattacgatgtaaatcttctgaactgccttttttttaaaaagaagaaaaatcaaggaaacacaatcaggattttatgtgtgaaaacgcaaaagtgatggctcggcggtccgagctgctggtcccacttctgacaccaaaatgcatcccaacccccggcagtgccaagggcaccagcagggccctgactgaagactgtctggcaggtggaacggtccttgtcctctccagccaggcccagcaggcactaccttcatgaagtctccagcaaacctcttcctcacaagtgtctgtcatctgagtccaaagaaagctgaagggg

SEQ ID NO: 164662 - DNA, 792 bp, Homo sapiens
  Payload ID: 12442
  Gene Symbol:
  Gene Name: PHACTR1
  ENST ID: ENST00000635715
  CDS Start-End: 1-792
ctctcccttcacccctttctctcctttgctctctttctttctctctcccttttttttcctttttccctctctttcccactccctccccaccccttcccttcctctcccctcccccttcccctccccctcccccgtgcgcgagcctcttcctctcccctcctcccccttccgcctctctccctctccctccgtctccttctccctctcagctcgccgggcgaccctgctcctgcctcccacattaatggcggcatcctcggaggatgatatagaccggcggcccatccggagagtgcgctccaagagcgacacgccgtacctcgcagaggccaggatctcctttaacctgggggcagctgaggaagtggagaggctggcggcgatgcgttctgactccctcgtcccaggcacccacaccccacccatccgcaggagaagtaagtttgccaacctgggaaggattttcaagccttggaaatggaggaagaagaaaagcgaaaagttcaaacacacgtcagcagccctggaaaggaaaatatctatgaggcaaagcagagaagagctgataaagcgaggagtcctgaaggaaatctatgataaagatggggaactctctatatccaatgaagaggactccctagaaaatgggcagtccctgagctccagccagctgtctctgcctgccctgtccgaaatggagccagtcccaatgcccagggatccctgctcatatgaggtgctccaaccgtcagacatcatggatgggccagtgtctgaagagagtccctctgc

SEQ ID NO: 164663 - DNA, 4784 bp, Homo sapiens
  Payload ID: 12442
  Gene Symbol:
  Gene Name: PHACTR1
  ENST ID: ENST00000635308
  CDS Start-End: 130-1584
tatttagcaagatcaaagacactctggctggaacggctcttgttttaccgctgacagatagcctttgatttttattttttgcagtgttccagtgttttctctcaaaactctgtgtttggaacatcaaggatggattatcccaaaatggattattttctggatgtagagtctgctcacagactcttggatgttgagtcagctcaaagattcttctacagtcaaggagctcaagctcgccgggcgaccctgctcctgcctcccacattaatggcggcatcctcggaggatgatatagaccggcggcccatccggagagtgcgctccaagagcgacacgccgtacctcgcagaggccaggatctcctttaacctgggggcagctgaggaagtggagaggctggcggcgatgcgttctgactccctcgtcccaggcacccacaccccacccatccgcaggagaagtaagtttgccaacctgggaaggattttcaagccttggaaatggaggaagaagaaaagcgaaaagttcaaacacacgtcagcagccctggaaaggaaaatatctatgaggcaaagcagagaagagctgataaagcgaggagtcctgaaggaaatctatgataaagatggggaactctctatatccaatgaagaggactccctagaaaatgggcagtccctgagctccagccagctgtctctgcctgccctgtccgaaatggagccagtcccaatgcccagggatccctgctcatatgaggtgctccaaccgtcagacatcatggatgggccagatcctggcgcccctgtgaaattgccttgtctgccagtgaaactgtcgcctccgctacctccaaagaaagtcatgatctgtatgcccgtgggggggccagacctctcactggtgtcctacacagcccagaagagtggccagcagggtgtggcccagcaccaccacactgtcctgccctcccagatccagcaccagctgcagtacggcagccacggccagcacctcccctccaccaccggctccctccccatgcacccctcgggctgcagaatgatagacgagctcaacaaaacgctggccatgaccatgcagaggctggaaagctctgagcagcgggtcccctgttccacttcttaccacagctctgggttgcactcgggtgatggggtcaccaaagcaggacctatgggccttccagaaataagacaagtgccaactgttgtgattgaatgtgatgacaataaagaaaatgtgcctcatgagtcagactacgaagactcttcttgcctgtatacaagagaagaggaggaagaggaggaggacgaagacgacgacagctcattatacaccagctccctggccatgaaggtctgcaggaaggactccttagccatcaaactcagcaacaggccctccaagcgagagctggaagaaaagaacatccttcccaggcagacggatgaggagcggctggagctgaggcaacagattggcaccaagctcaccaggcggctgagccagaggccaactgcagaggaactggaacagaggaacattttgaaacgtaagtgactaagcccatggcaatccctgatgttttgtggcggcttttgttattatttaatggtaggccacaaggtttctaccttgcgcctctgcggaaagcattgaaaacctttctaacggttgaagcttcatgtgtgcatgttagaacaccaaagacgacctccccaaagagaaggcaaattttattccactttattctttagaagctcacgggcggcaggcagaaccttccttttagtgagttgtaaagtcagagagaagctgaaaaattagagtgagaccacttattatttaatgatttttaagagcagggtcacctttaaaccagaattggcttgaaaatggagactgtgatatgcacggctaaaataagggaaatgtccatttgaactgagactagaaagcatgactttgcattgcagctggctgctgttgataaaaatccctcatccctttgaatgttaaattgaaagactaagaaagcatttccaagtgaagtgcttcatgtctgtctctcaggattcccacagctggtcccgggcatgcctgtctgatgctctcattcgaggaaaactgcctttcaccattgctgcagacagaaaaaaataaatgagccccttgtttggtttaggacacagagacatttgaatatgtacagaggatccacttggtgctttaaaaaaaaaaagagaaaacaggatacaaaatactaaaagagatcaagcatttgatggacagcagtatgcgtcagtttagtggtagatattaaataacttaaatatcaaaccattctattcattcattgctaccattctcgccaacactggcctcaagatagtgaacaaatatttctggcttaattcatgaccctgttccccctaccccacaacacacttctaatttctctccagaagagaaagatatatactatgcagagttttctagaaatgctatgttgtacagactgactccttgcctcccccggcccccccgccccgccccgccccgtgcccagtaaatcacatgcaaccgcagtgtgagtttgccgggaatttccactgaaaccacactaagatattcttgactttacctttctaccgtgctcactgtggccttgtgacttggtcggcatttcgtagtctgctgaaggtgggtgctgggttccgctttggtggggagacctgttgcctacagcacccacccccgcccgacgcccccgcatgtccgtttatgtcaactctgcctttatcaatgtcttgcctcccgtccccacgccagccgccacttcctcaactctcagtagaagttattttcaggattagccttcctcagtcgtgggggaaccctacgctttgcctaggtctctaggaatgtgtgtttacttttttctgcccaaggggtaccctttaaagtttccaagcttaatattctatataatgaattcagagctttttcaaagcatttccaaggtcagggaagcatttggcttgtaggatgtcttcctttcggccccaatctggtacctgagccattataaacttcccattgttggagagaaagataaacagccaggtgaacctgtacaacttactcacagcccgctgctgtacttgtggcctctgacctgagacctaaactcaaagaagctaaaagcctccgggggattatttaggtttcagaaaatagtgcttatcacaccaggagtacggtttctggagagatctaaaatcccctagctcagctctgggctctctcaaagatatcagatccccgctgtggcttgtccagatccctgggagactacaggtcctttgagcttgggtttttaccgccatcaaccagggaacttagattcaggggaccaaaaaggagttgtgaaagattgttcccatggttctcttttattctcttccctaatccctcttgtcctggccacatagttgcaaattaaagaactacttgaccaattctaacaggttggtcatttcatagttttgaaacttttcagaaatcaacttgttttcccataggttcttatttttccctgtattctggaactatgttctcctaaatatttttttaaatttaatctattgcgattgttaaacaaaaaaaatgtctagtggtataagaaaacatcctccaatagtttgttttaaaactgattttctgagctttcagccatttgaggaactgctcggtgttgggtggtggggaacagggcacagagatgccatggctcagccctggagctttgagagccttgggttggtttccagccccaccctgcctggtcctgggagcagcccctgttctgtccagcagccagtgaggccctgtgcacctctgagcacataatgaaccctctgacggtggcagctgtaatgacgacatcgtaggcctttcctggcctgtcttcctagttgcctaatggggttgtcttggtaccttctgcctgaaaattcatgaacctgggttggtcaatggctttgaactaaaggtatcaattctgtaggtggtagcttgtggccccacccctcagagtgacctaagaaacgcacataggagatgaaggctccatgctgtgtcagctgtgtcacaggatgcccgccttcacggctctgaagggacctgtaggatcagaagtctgaggctagtaatgaggaggagagccggccccacacaaaacatgaccacaggaaaaaacctatctgtgtaaccactgagccaggtagggtgtgactggccacttaacacccctgaggcttcagatcctcagttataaaccaggagtggtagacgaggtggtcactaggtcccctcatggccctagtattctgtgcttctgtaaattttcaccgtgtgccctctagctgtccctggtgacccaacatccagaccaccttttcttccatccgttttcccacctgagacatcgcaaaatgggagttccctccttctggttcttgctgtctgcctccccatttaactctgctagattaattcatactaagatattaatggctgactagtttaataggttttatcccactgaaatttgcatttgtacaaatgtcactgtctgggggctccctacttccgggtgttgctgtctgccccccagtttatctctactagattaattcatactgagctattaatggctgactagtttaatgggcttttattcaagagaaatttgcatt

SEQ ID NO: 164664 - DNA, 707 bp, Homo sapiens
  Payload ID: 12442
  Gene Symbol:
  Gene Name: PHACTR1
  ENST ID: ENST00000634449
  CDS Start-End: 21-443
ctccagccactgactgtctcatgtatctgcaagggccgaggaaattaatgacccaaggaggctatgatatggtccaaaaacttttcctggattttttccgtaggcggctgagccagaggccaactgcagaggaactggaacagaggaacattttgaaacctcggaatgaacaagaggaacaggaggagaagagagagatcaagaggaggctaacccgaaagctcagtcaaaggcccacggtggaagagcttcgggaaagaaagatcctcatccgcttcagtgactacgtggaggtggctgacgctcaggactatgaccgcagggcagataagccgtggacccgcctcaccgctgcagacaaagtaagcagaggggagtgctggagagtgggaggcaggaccgtctgctgggtctcgctgggctcaccgctggggagcgtgtagggagacctgcagccaggcctcagccgcagtccccataatggagtgttgagaccccaacacctttccccaggggccacagataatctgcggaaaggctgctgaatcggagaaaacacaaggcacataatactgtgcccattttacaggaggaggagcagcagcctgggaggctgtgcccagagaaagagaatagcactggataggtgtagacaggtgaaggcaagaggctccaggctcatcacagcccttccgtataggggatgg

SEQ ID NO: 164665 - DNA, 2257 bp, Homo sapiens
  Payload ID: 12442
  Gene Symbol:
  Gene Name: PHACTR1
  ENST ID: ENST00000635526
  CDS Start-End: 29-1495
agctgaggaagtggagaggctggcggcgatgcgttctgactccctcgtcccaggcacccacaccccacccatccgcaggagaagtaagtttgccaacctgggaaggattttcaagccttggaaatggaggaagaagaaaagcgaaaagttcaaacacacgtcagcagccctggaaaggaaaatatctatgaggcaaagcagagaagagctgataaagcgaggagtcctgaaggaaatctatgataaagatggggaactctctatatccaatgaagaggactccctagaaaatgggcagtccctgagctccagccagctgtctctgcctgccctgtccgaaatggagccagtcccaatgcccagggatccctgctcatatgaggtgctccaaccgtcagacatcatggatgggccagatcctggcgcccctgtgaaattgccttgtctgccagtgaaactgtcgcctccgctacctccaaagaaagtcatgatctgtatgcccgtgggggggccagacctctcactggtgtcctacacagcccagaagagtggccagcagggtgtggcccagcaccaccacactgtcctgccctcccagatccagcaccagctgcagtacggcagccacggccagcacctcccctccaccaccggctccctccccatgcacccctcgggctgcagaatgatagacgagctcaacaaaacgctggccatgaccatgcagaggctggaaagctctgagcagcgggtcccctgttccacttcttaccacagctctgggttgcactcgggtgatggggtcaccaaagcaggacctatgggccttccagaaataagacaagtgccaactgttgtgattgaatgtgatgacaataaagaaaatgtgcctcatgagtcagactacgaagactcttcttgcctgtatacaagagaagaggaggaagaggaggaggacgaagacgacgacagctcattatacaccagctccctggccatgaaggtctgcaggaaggactccttagccatcaaactcagcaacaggccctccaagcgagagctggaagaaaagaacatccttcccaggcagacggatgaggagcggctggagctgaggcaacagattggcaccaagctcaccaggcggctgagccagaggccaactgcagaggaactggaacagaggaacattttgaaacctcggaatgaacaagaggaacaggaggagaagagagagatcaagaggaggctaacccgaaagctcagtcaaaggcccacggtggaagagcttcgggaaagaaagatcctcatccgcttcagtgactacgtggaggtggctgacgctcaggactatgaccgcagggcagataagccgtggacccgcctcaccgctgcagacaaagctgccatccgaaaggagctcaatgaattcaaaagcactgagatggaagttcatgaattgagtagacacttaacaaggtttcaccgaccttaacagtcgaattcctcttgagtgctatgctgtcttcaaaacataaatttataagaaccataagtgctggtatttattcacttccccattacgatgtaaatcttctgaactgccttttttttaaaaagaagaaaaatcaaggaaacacaatcaggattttatgtgtgaaaacgcaaaagtgatggctcggcggtccgagctgctggtcccacttctgacaccaaaatgcatcccaacccccggcagtgccaagggcaccagcagggccctgactgaagactgtctggcaggtggaacggtccttgtcctctccagccaggcccagcaggcactaccttcatgaagtctccagcaaacctcttcctcacaagtgtctgtcatctgagtccaaagaaagctgaaggggtgggtttgttttgggggtactgtgcaaagctaatgatctggttggacttctacacttggccaaatgtactggctccagacatgacatttggtttgggggccctttgaagttgatgccaagaaggagtgaacacttctcagttgcccctggcttttccctcctttcagccaccacccacacaatgaacaaaagggaagggcccatttctgggggagtctggctgcctcttggctacgaaggctggcactgagcacccatcctgctccctctgcctgagctgagctgcctttcaggaagctctggtttagaaggggaaagatgtcatatgctcagttcaaataatcaacccaactgtgtcc

SEQ ID NO: 164666 - DNA, 5332 bp, Homo sapiens
  Payload ID: 12442
  Gene Symbol:
  Gene Name: PHACTR1
  ENST ID: ENST00000634438
  CDS Start-End: 184-1926
aagctgttcatttgtgcttgcgggctcagaagcgtcgcactgctttgttttgtactctaccgtgtcctgttgaaaggggtcaacaagtgccggggagggtgcagaggctgaggctggcgtcaccttccgttgctaaggtgttccagtgttttctctcaaaactctgtgtttggaacatcaaggatggattatcccaaaatggattattttctggatgtagagtctgctcacagactcttggatgttgagtcagctcaaagattcttctacagtcaaggagctcaagctcgccgggcgaccctgctcctgcctcccacattaatggcggcatcctcggaggatgatatagaccggcggcccatccggagagtgcgctccaagagcgacacgccgtacctcgcagaggccaggatctcctttaacctgggggcagctgaggaagtggagaggctggcggcgatgcgttctgactccctcgtcccaggcacccacaccccacccatccgcaggagaagtaagtttgccaacctgggaaggattttcaagccttggaaatggaggaagaagaaaagcgaaaagttcaaacacacgtcagcagccctggaaaggaaaatatctatgaggcaaagcagagaagagctgataaagcgaggagtcctgaaggaaatctatgataaagatggggaactctctatatccaatgaagaggactccctagaaaatgggcagtccctgagctccagccagctgtctctgcctgccctgtccgaaatggagccagtcccaatgcccagggatccctgctcatatgaggtgctccaaccgtcagacatcatggatgggccagatcctggcgcccctgtgaaattgccttgtctgccagtgaaactgtcgcctccgctacctccaaagaaagtcatgatctgtatgcccgtgggggggccagacctctcactggtgtcctacacagcccagaagagtggccagcagggtgtggcccagcaccaccacactgtcctgccctcccagatccagcaccagctgcagtacggcagccacggccagcacctcccctccaccaccggctccctccccatgcacccctcgggctgcagaatgatagacgagctcaacaaaacgctggccatgaccatgcagaggctggaaagctctgagcagcgggtcccctgttccacttcttaccacagctctgggttgcactcgggtgatggggtcaccaaagcaggacctatgggccttccagaaataagacaagtgccaactgttgtgattgaatgtgatgacaataaagaaaatgtgcctcatgagtcagactacgaagactcttcttgcctgtatacaagagaagaggaggaagaggaggaggacgaagacgacgacagctcattatacaccagctccctggccatgaaggtctgcaggaaggactccttagccatcaaactcagcaacaggccctccaagcgagagctggaagaaaagaacatccttcccaggcagacggatgaggagcggctggagctgaggcaacagattggcaccaagctcaccaggcggctgagccagaggccaactgcagaggaactggaacagaggaacattttgaaacctcggaatgaacaagaggaacaggaggagaagagagagatcaagaggaggctaacccgaaagctcagtcaaaggcccacggtggaagagcttcgggaaagaaagatcctcatccgcttcagtgactacgtggaggtggctgacgctcaggactatgaccgcagggcagataagccgtggacccgcctcaccgctgcagacaaagctgccatccgaaaggagctcaatgaattcaaaagcactgagatggaagttcatgaattgagtagacacttaacaaggtttcaccgaccttaacagtcgaattcctcttgagtgctatgctgtcttcaaaacataaatttataagaaccataagtgctggtatttattcacttccccattacgatgtaaatcttctgaactgccttttttttaaaaagaagaaaaatcaaggaaacacaatcaggattttatgtgtgaaaacgcaaaagtgatggctcggcggtccgagctgctggtcccacttctgacaccaaaatgcatcccaacccccggcagtgccaagggcaccagcagggccctgactgaagactgtctggcaggtggaacggtccttgtcctctccagccaggcccagcaggcactaccttcatgaagtctccagcaaacctcttcctcacaagtgtctgtcatctgagtccaaagaaagctgaaggggtgggtttgttttgggggtactgtgcaaagctaatgatctggttggacttctacacttggccaaatgtactggctccagacatgacatttggtttgggggccctttgaagttgatgccaagaaggagtgaacacttctcagttgcccctggcttttccctcctttcagccaccacccacacaatgaacaaaagggaagggcccatttctgggggagtctggctgcctcttggctacgaaggctggcactgagcacccatcctgctccctctgcctgagctgagctgcctttcaggaagctctggtttagaaggggaaagatgtcatatgctcagttcaaataatcaacccaactgtgtccagagtgtccagtgtcatgagtgacccacgcacacacacagccattgctaaggtactcctgtgctgtttataagtctgagtgggaggaccctattgaatcctgtggggtcagaaactgcttggctgacatttattttctctgtgcgccttgaagctgattatatggcttgggagttcttagcttctgtgtataggaccagtgcatgcaggccagaaaccactcctgtaggactggctttccagccactgagggacttggaaccactccatggccttctcttttttttttttttttttttttttttttttttttttgcactgaagagtttctgtgaaggagccccagagttgggcatgtgccagaatcaggccaacaccagccacacctgtccacagtgccccttcctgctccagttgatccagagagctcctccctctaccctcatgatgccagggagcgtgactgtgggtgtgtctctgactgggacacccaggatagggtgtgcgatgaggccaggaccctcctaaaccctaacagcatcctaacgaggcccattgcagctttcgatttccttcataacagagctcgcaggccctcagttgcagagctctctcaccttctggagtgactccatcgttactccagtctttctaggtggtggaactctccaccacacatgccatttagaaagacgccagcttggcctttccaaaaagttaaccagtcgtctccccaccacaaaccctgtgggagcaggttactcttaggatgcacacccgtcaacgaggccattgcatttttttgcaggcatgaacggctcccatctaggcactaacccaggagccaaacaactgctggggagagttcagggcagctctttgggcggtgcctccagctgcagctttgccttgccacctggagccagcacgcctctgcccgacccaaggaggatgccatcactagatcctattttttttttttttttttaactcttgaatctgaatagttcctgccgtggggagaggtattgttcagggaaaatgtgatcgggattttagtgtggctgtaaacacagtcttcccgaaaggcttactgacgtttgaatgtgcaaatggtatgacgaaagatgtagggctctttcgttgaacttctctacggcgggcgggcggacacgtgttccaggtggacttgcctgccggccaggctttgagtctgaacttcctctaactgcagctgggctcctggcacacgcggtgccctggcatgatggtcctccctggccaggagcgagtcctaaggaaattcattccattgaccggactcctcccatgataggcccatggcttctctgctggccttagttcttggcccttcagattccctggggatataaggcccaagcggatctccctgcagccagccagcagacagcccagggtttccgcccaaagtgccctcatgttgcagtccactttgtgcatggaagatattgaacacaatttccactgctcttcctgcagggcctcctttccagcagtcacttgctcagactgaggggtgcacctcccctgccattgacaggtcctgcgccttcaggatgggctatttcaagcccgttttaagtggctcttacacaggctcagcaacctctgtggcctgcaggatgggccttctgctgtctctttcctttcttaaaaccttaaggtctttctagagacctattcaattttctttttttttttttttcactacaatgtcatgacaactgcagcaatttgtgttactttccaagatgacaatttgacattaattaagggaaaaaataaaaaggtgagctagatgacttaaaatgcatctcttttttgaaaaagctgtagctggcaagtcaaagtttattttatgtgtgtaaattcccagttgagcatttttttcatttggattagcgtgagaggaaaaatgtgaaatgtctcaaatcaaatgcttccttctaaagattagacattgcccaaccctgcccccgcccccaatcaatcagtgacagaagagaccgccatcagccaactagctttttttaaatggctgatatattcatctctaaaggccctcaaagcactgtaaaacttttaaaactttagcctttatgtcagattagagaaaccaaacaatgtgacggtacatgtgatgaaaagctctgggtttatttttctcccgcttatgaacatgtatttttatttgccgaatgaaaatcgtggtgtgttgctttgatgaatggaatttcaggctctccctgtgcacagccggtgggcaaaggtcaccttaaatgactttttctccctatctgtctgttaatccccagaccggttgcattttccagttgcttcctgggtgtctgtacatagtttgtctttgtataggagtgagtgtggtgaccgtcaatcccctaatctcccaggttctaatttaacagatgatggctgtatgaggaaaacgatgtaaatagagaatacaaattaaactggatctctgtggcctaggttttgtacatacagaaactgcatggtatttaaattattgtttgtctctgatgatgtatgcagtttctttaaaaacaaaccaaaaaaaagtaaaaaaaaaaaaaaaaaaa

SEQ ID NO: 164667 - DNA, 795 bp, Homo sapiens
  Payload ID: 12442
  Gene Symbol:
  Gene Name: PHACTR1
  ENST ID: ENST00000635242
  CDS Start-End: 178-687
gatgagctgaggatcaacactcacaacggctgacacttaatgacgctatttatcaaatagaccttttgaaaactgatagcatgtgaatttaacagtatatgttccagagaatataaagcaaggaaaggctggtgttccagtgttttctctcaaaactctgtgtttggaacatcaaggatggattatcccaaaatggattattttctggatgtagagtctgctcacagactcttggatgttgagtcagctcaaagattcttctacagtcaaggagctcaagctcgccgggcgaccctgctcctgcctcccacattaatggcggcatcctcggaggatgatatagaccggcggcccatccggagagtgcgctccaagagcgacacgccgtacctcgcagaggccaggatctcctttaacctgggggcaggcgtttccctttttggggatatggatgaagcaagaatgggaccagcagtgccaactcttgggcgtcctcttgggctcgaactgtgttccctggaaaaccacggcctcctgaagacagcccctacatacactacatcagcccacatctgctcaggccccagtacaggtggacaattctctactcagggtatgagccctgttcaaggagctaagagaaggagggtggtttggctgcctttagagggggaagagtttggctgagaggacatttactctttggtccatatgggaagggaaaatgcgggttggcgtgtgtattcatttcctagagttgctgtaacaaagtaccacaaactacatgacataaaa

SEQ ID NO: 164668 - DNA, 5523 bp, Homo sapiens
  Payload ID: 12443
  Gene Symbol: PHRF1
  Gene Name: PHD and ring finger domains 1
  Uniprot ID: Q9P1Y6
  ENST ID: ENST00000264555
  CDS Start-End: 129-5078
gagcgcacggcggcggcagaggcggcggcggccgggcctaggagcgactctcggtcgtgcagcggcggcgagcgctcgcgagcggctgcgggacgcgaggtttccggagctgagctcaatgtgcagcaatggatgacgacagcctggatgagcttgtggcccggagcccagggccggatggacacccacaggtcggccctgcggacccggcaggtgactttgaagaaagcagcgtgggcagcagtggggactctggggacgacagtgacagcgagcatggagatggcacagacggagaagacgagggggcgtctgaggaggaagacctggaagacagatctggttccgaggattctgaagacgacggggagacattgctggaggtagcgggtactcaggggaaactggaagccgctggctctttcaattctgatgatgatgcagagagctgcccaatctgtctcaacgcattcagagaccaggccgtggggacgccggagaactgtgcccattacttctgcctggactgcattgtcgaatggtccaagaatgccaattcctgtccagttgatcgaactctatttaagtgcatttgtattcgagctcaatttggtggtaaaatcttaagaaagatcccagtggagaacaccaaagcgagcgaggaggaggaggacccgaccttctgtgaggtgtgcggcaggagcgaccgtgaggacaggcttttgctctgcgacggctgcgatgcggggtaccacatggaatgcttggacccccctctccaggaggtgccggtggacgagtggttctgcccggaatgtgctgcgcctggtgttgtccttgccgctgatgcgggtcccgtgagtgaggaggaggtctccctgctcttggctgatgtggtgcccaccaccagcaggcttcggcctcgagcaggtaggacccgggcgatagccaggacacggcagagtgagagagtgagagcaaccgtgaaccggaaccggatctccacggccaggagggtccagcacacaccagggcgcctcgggtcttccctgctggatgaagccatcgaggctgtggcgactggcctgagcactgccgtgtatcagcgccccctgacgccgcgcactcccgcccgacggaagaggaagacaagaagacggaagaaagtgccgggaagaaagaaaaccccgtccggaccatccgcaaaaagtaagagctcagcgacaagatctaagaaacgccaacatcgagtgaagaagagaagagggaagaaggtaaagagtgaagccaccactcgctctcgaatcgcgcggacgctgggcctgcgcaggcctgttcacagcagctgcatcccgtcagtgttgaagccagtggagccctctttggggctgctgagagcggatattggagctgcctctctgtctctgtttggagatccttatgagctggatcccttcgacagcagtgaagagctttctgcaaaccctctttcccctctgagtgccaagagacgggctctgtcccggtcagccctgcagtcccaccagcccgtggccaggcccgtctccgtggggctttccaggaggcgcctccctgccgcggtgccagagccagacttggaggaggagccagtgcctgacctgctgggcagcatcctgtcgggccagagcctcctgatgctgggcagcagtgatgtcatcatccaccgcgacggctccctcagcgccaagagggcggctccagtttcttttcagcgaaactcaggcagtctgtccagaggggaagaaggattcaagggctgcctgcagccccgagcactgccctccgggagcccggcccaaggcccgtcaggaaacaggccacagagcacagggctcagctgtcaaggcaggtcccgcacccccgcccgcaccgcgggggcgcctgtgaggctggacttgccagcagcccctggggcggttcaggctcggaacttgtcaaatgggagtgtgcctggcttcagacagagccacagcccctggttcaacggcaccaacaagcacaccttgccccttgcctctgccgcgtctaagatctcaagcagagattctaagcccccatgtcgcagtgtggtgccggggcctcccctgaagccagcgcccagaagaacagacatctctgagctacccaggataccaaagatcaggagagatgacggtggtggcagacgggatgcggccccggcccacgggcagagcattgagatccccagtgcctgcatcagccgactgactggcagggagggcaccgggcagccagggcgaggcacacgggcagagagcgaggccagcagcagggtgccccgggagcccggggtgcacacgggcagctcccggcccccagcccccagctcccatggcagtttggccccactgggaccatcaagagggaaaggggtcgggtcgacctttgagagcttccggatcaatattcctggaaacatggcacattccagccagctctccagccctggcttctgtaacacgttccggcctgtggacgataaggagcagaggaaggagaacccctcacccctcttctccatcaagaagacgaagcagctgcggagcgaggtctacgacccatccgaccccaccggctccgactccagcgcccctggcagcagccccgagaggtctggccccggcctcctgccctctgagatcacacgaaccatctccatcaacagcccgaaggcccagacggtgcaggctgtgcgctgcgtcacctcctacacggtggagagcatctttggtacagagcccgaaccccctctcggaccgtcctccgccatgtccaagctccggggtgcagtggctgccgagggggcctctgacacggagcgagaggagcccacagagagccagggcctggctgcccggctgcggaggccatcccccccagagccctgggatgaggaggatggggcgtcttgcagcaccttctttggctctgaggagcggacggtgacctgtgtgactgtcgtggagccggaagccccacccagcccggacgtgctgcaggctgccacccacagagtcgtggagctcaggcccccttcccggtcccgctccacatccagctcccgcagcaggaagaaggccaagaggaagagggtgtccagggagcacggacggacgcgctctgggacgcgctctgaatccagggacaggagctcgaggtcagcgtcaccatcagtgggtgaggagcgccccaggaggcagcggtccaaggccaagagccggcggtcctccagtgaccgctccagcagccgagagcgagctaagaggaagaaagccaaggacaagagcagggagcacaggcggggcccctggggccacagccggaggacgtcccggtcgcggtcggggagccctggcagctcttcctatgagcactatgagagtaggaagaagaagaaaaggagatcagcgtccagacctcggggaagggagtgctcccccaccagcagcctggagaggctctgcaggcacaagcatcagcgggaacgcagccacgagcggccagacaggaaggagagtgtggcgtggccccgagaccggaggaagcggaggtcccggtccccaagctcggagcacagggcacgggagcacaggcggcctcggtcccgtgagaagtggccgcagacccggtcccattccccagagaggaagggggctgtgagggaggcttccccagcgccccttgcacagggggagccagggcgggaagacctccccaccaggttgccagccttgggggaagcacatgtctcgccggaggtggctacggccgacaaggcccccctgcaggctccccctgtcctggaggtggcagctgagtgtgagccggacgacctggacctggattatggcgactccgtggaggccggacacgtctttgatgatttctcaagcgacgccgttttcatccagctcgatgacatgagctcgccaccttctcccgaaagcacagactcttccccggagcgagacttcccactgaagcctgcgttgcccccagccagcctggccgtggccgccatccagagggaggtgtcattgatgcacgatgaagacccttcgcagcccccacccctgccagagggcacccaggagccacatttgctcaggccggacgcggctgagaaggctgaggcacccagttccccggatgtggcgcctgcggggaaggaagacagcccctctgcgagtgggagggtacaggaggcagcccggcctgaggaggtggtttcgcagacccccctgctgcggtccagagccctggtgaagcgggtcacctggaacctgcaggagtcggagagcagcgcccccgccgaggacagagccccccgggcaccacttcacaggccacagaagccccgagaaggagcctgggacatggaggatgtggcccccacaggggtcaggcaggtgttctccgagctgccctttcccagtcacgtgcttccggaacccgggttcccagacacagacccctctcaggtttacagccccggcctgccgcctgccccggcccagccctcaagcatcccaccctgcgcactggtcagccagcccacggtccagttcatccttcaggggagcctgccgctagtgggctgtggggcagcacagaccctggccccagtgcccgctgccctgaccccagcctcagagccagccagtcaagccactgcagccagcaactcggaggagaagaccccggcccccaggctagctgcggagaaaaccaagaaggaggagtacatgaagaagctgcacatgcaggagcgtgctgtggaggaggtgaagctggccatcaagcccttctaccagaagagggaggtgaccaaggaggagtacaaggacatcctgcgcaaggccgtgcagaagatctgccacagcaagagtggagagatcaaccccgtgaaggtggccaacctggtgaaggcgtacgtggacaagtacaggcacatgcgcaggcacaagaaaccagaggccggggaggagccgcccacgcagggggccgagggctgaggccaggcaatcacgggctatgcccggggagctgtcgggagtggcgggaatcggggccatgcccggggagctgtcgggagtggcgggaatcggggccatgcccggggagctgtcgggagtggcgggaaatggggggcatcaccatgcctgccgtcgggttcctgcgctgacacctggtctgtgcacctgtgttgctcacagttgaaaactggacacttttgtatgtatattatagagacactgtttccattctaatttatcaaaaatggattatctttagaaacctcttgattgacttactacttggaagataaagcacttggtgatcaagaggggctcctggtggggtggcgcgtccttgataaatctctaggtggcctcccgccaacagctgctgtgtacctttggctctgaattaggaatatctttactttctcttttccaa

SEQ ID NO: 164669 - DNA, 5224 bp, Homo sapiens
  Payload ID: 12443
  Gene Symbol: PHRF1
  Gene Name: PHD and ring finger domains 1
  ENST ID: ENST00000413872
  CDS Start-End: 94-5037
gcctaggagcgactctcggtcgtgcagcggcggcgagcgctcgcgagcggctgcgggacgcgaggtttccggagctgagctcaatgtgcagcaatggatgacgacagcctggatgagcttgtggcccggagcccagggccggatggacacccacaggtcggccctgcggacccggcaggtgactttgaaagcagcgtgggcagcagtggggactctggggacgacagtgacagcgagcatggagatggcacagacggagaagacgagggggcgtctgaggaggaagacctggaagacagatctggttccgaggattctgaagacgacggggagacattgctggaggtagcgggtactcaggggaaactggaagccgctggctctttcaattctgatgatgatgcagagagctgcccaatctgtctcaacgcattcagagaccaggccgtggggacgccggagaactgtgcccattacttctgcctggactgcattgtcgaatggtccaagaatgccaattcctgtccagttgatcgaactctatttaagtgcatttgtattcgagctcaatttggtggtaaaatcttaagaaagatcccagtggagaacaccaaagcgagcgaggaggaggaggacccgaccttctgtgaggtgtgcggcaggagcgaccgtgaggacaggcttttgctctgcgacggctgcgatgcggggtaccacatggaatgcttggacccccctctccaggaggtgccggtggacgagtggttctgcccggaatgtgctgcgcctggtgttgtccttgccgctgatgcgggtcccgtgagtgaggaggaggtctccctgctcttggctgatgtggtgcccaccaccagcaggcttcggcctcgagcaggtaggacccgggcgatagccaggacacggcagagtgagagagtgagagcaaccgtgaaccggaaccggatctccacggccaggagggtccagcacacaccagggcgcctcgggtcttccctgctggatgaagccatcgaggctgtggcgactggcctgagcactgccgtgtatcagcgccccctgacgccgcgcactcccgcccgacggaagaggaagacaagaagacggaagaaagtgccgggaagaaagaaaaccccgtccggaccatccgcaaaaagtaagagctcagcgacaagatctaagaaacgccaacatcgagtgaagaagagaagagggaagaaggtaaagagtgaagccaccactcgctctcgaatcgcgcggacgctgggcctgcgcaggcctgttcacagcagctgcatcccgtcagtgttgaagccagtggagccctctttggggctgctgagagcggatattggagctgcctctctgtctctgtttggagatccttatgagctggatcccttcgacagtgaagagctttctgcaaaccctctttcccctctgagtgccaagagacgggctctgtcccggtcagccctgcagtcccaccagcccgtggccaggcccgtctccgtggggctttccaggaggcgcctccctgccgcggtgccagagccagacttggaggaggagccagtgcctgacctgctgggcagcatcctgtcgggccagagcctcctgatgctgggcagcagtgatgtcatcatccaccgcgacggctccctcagcgccaagagggcggctccagtttcttttcagcgaaactcaggcagtctgtccagaggggaagaaggattcaagggctgcctgcagccccgagcactgccctccgggagcccggcccaaggcccgtcaggaaacaggccacagagcacagggctcagctgtcaaggcaggtcccgcacccccgcccgcaccgcgggggcgcctgtgaggctggacttgccagcagcccctggggcggttcaggctcggaacttgtcaaatgggagtgtgcctggcttcagacagagccacagcccctggttcaacggcaccaacaagcacaccttgccccttgcctctgccgcgtctaagatctcaagcagagattctaagcccccatgtcgcagtgtggtgccggggcctcccctgaagccagcgcccagaagaacagacatctctgagctacccaggataccaaagatcaggagagatgacggtggtggcagacgggatgcggccccggcccacgggcagagcattgagatccccagtgcctgcatcagccgactgactggcagggagggcaccgggcagccagggcgaggcacacgggcagagagcgaggccagcagcagggtgccccgggagcccggggtgcacacgggcagctcccggcccccagcccccagctcccatggcagtttggccccactgggaccatcaagagggaaaggggtcgggtcgacctttgagagcttccggatcaatattcctggaaacatggcacattccagccagctctccagccctggcttctgtaacacgttccggcctgtggacgataaggagcagaggaaggagaacccctcacccctcttctccatcaagaagacgaagcagctgcggagcgaggtctacgacccatccgaccccaccggctccgactccagcgcccctggcagcagccccgagaggtctggccccggcctcctgccctctgagatcacacgaaccatctccatcaacagcccgaaggcccagacggtgcaggctgtgcgctgcgtcacctcctacacggtggagagcatctttggtacagagcccgaaccccctctcggaccgtcctccgccatgtccaagctccggggtgcagtggctgccgagggggcctctgacacggagcgagaggagcccacagagagccagggcctggctgcccggctgcggaggccatcccccccagagccctgggatgaggaggatggggcgtcttgcagcaccttctttggctctgaggagcggacggtgacctgtgtgactgtcgtggagccggaagccccacccagcccggacgtgctgcaggctgccacccacagagtcgtggagctcaggcccccttcccggtcccgctccacatccagctcccgcagcaggaagaaggccaagaggaagagggtgtccagggagcacggacggacgcgctctgggacgcgctctgaatccagggacaggagctcgaggtcagcgtcaccatcagtgggtgaggagcgccccaggaggcagcggtccaaggccaagagccggcggtcctccagtgaccgctccagcagccgagagcgagctaagaggaagaaagccaaggacaagagcagggagcacaggcggggcccctggggccacagccggaggacgtcccggtcgcggtcggggagccctggcagctcttcctatgagcactatgagagtaggaagaagaagaaaaggagatcagcgtccagacctcggggaagggagtgctcccccaccagcagcctggagaggctctgcaggcacaagcatcagcgggaacgcagccacgagcggccagacaggaaggagagtgtggcgtggccccgagaccggaggaagcggaggtcccggtccccaagctcggagcacagggcacgggagcacaggcggcctcggtcccgtgagaagtggccgcagacccggtcccattccccagagaggaagggggctgtgagggaggcttccccagcgccccttgcacagggggagccagggcgggaagacctccccaccaggttgccagccttgggggaagcacatgtctcgccggaggtggctacggccgacaaggcccccctgcaggctccccctgtcctggaggtggcagctgagtgtgagccggacgacctggacctggattatggcgactccgtggaggccggacacgtctttgatgatttctcaagcgacgccgttttcatccagctcgatgacatgagctcgccaccttctcccgaaagcacagactcttccccggagcgagacttcccactgaagcctgcgttgcccccagccagcctggccgtggccgccatccagagggaggtgtcattgatgcacgatgaagacccttcgcagcccccacccctgccagagggcacccaggagccacatttgctcaggccggacgcggctgagaaggctgaggcacccagttccccggatgtggcgcctgcggggaaggaagacagcccctctgcgagtgggagggtacaggaggcagcccggcctgaggaggtggtttcgcagacccccctgctgcggtccagagccctggtgaagcgggtcacctggaacctgcaggagtcggagagcagcgcccccgccgaggacagagccccccgggcaccacttcacaggccacagaagccccgagaaggagcctgggacatggaggatgtggcccccacaggggtcaggcaggtgttctccgagctgccctttcccagtcacgtgcttccggaacccgggttcccagacacagacccctctcaggtttacagccccggcctgccgcctgccccggcccagccctcaagcatcccaccctgcgcactggtcagccagcccacggtccagttcatccttcaggggagcctgccgctagtgggctgtggggcagcacagaccctggccccagtgcccgctgccctgaccccagcctcagagccagccagtcaagccactgcagccagcaactcggaggagaagaccccggcccccaggctagctgcggagaaaaccaagaaggaggagtacatgaagaagctgcacatgcaggagcgtgctgtggaggaggtgaagctggccatcaagcccttctaccagaagagggaggtgaccaaggaggagtacaaggacatcctgcgcaaggccgtgcagaagatctgccacagcaagagtggagagatcaaccccgtgaaggtggccaacctggtgaaggcgtacgtggacaagtacaggcacatgcgcaggcacaagaaaccagaggccggggaggagccgcccacgcagggggccgagggctgaggccaggcaatcacgggctatgcccggggagctgtcgggagtggcgggaatcggggccatgcccggggagctgtcgggagtggcgggaatcggggccatgcccggggagctgtcgggagtggcgggaaatggggggcatcaccatgcctgccgtcgggttcctgcgctgacacctggtctgtgcacc

SEQ ID NO: 164670 - DNA, 5227 bp, Homo sapiens
  Payload ID: 12443
  Gene Symbol: PHRF1
  Gene Name: PHD and ring finger domains 1
  Uniprot ID: Q9P1Y6
  ENST ID: ENST00000416188
  CDS Start-End: 94-5040
gcctaggagcgactctcggtcgtgcagcggcggcgagcgctcgcgagcggctgcgggacgcgaggtttccggagctgagctcaatgtgcagcaatggatgacgacagcctggatgagcttgtggcccggagcccagggccggatggacacccacaggtcggccctgcggacccggcaggtgactttgaagaaagcagcgtgggcagcagtggggactctggggacgacagtgacagcgagcatggagatggcacagacggagaagacgagggggcgtctgaggaggaagacctggaagacagatctggttccgaggattctgaagacgacggggagacattgctggaggtagcgggtactcaggggaaactggaagccgctggctctttcaattctgatgatgatgcagagagctgcccaatctgtctcaacgcattcagagaccaggccgtggggacgccggagaactgtgcccattacttctgcctggactgcattgtcgaatggtccaagaatgccaattcctgtccagttgatcgaactctatttaagtgcatttgtattcgagctcaatttggtggtaaaatcttaagaaagatcccagtggagaacaccaaagcgagcgaggaggaggaggacccgaccttctgtgaggtgtgcggcaggagcgaccgtgaggacaggcttttgctctgcgacggctgcgatgcggggtaccacatggaatgcttggacccccctctccaggaggtgccggtggacgagtggttctgcccggaatgtgctgcgcctggtgttgtccttgccgctgatgcgggtcccgtgagtgaggaggaggtctccctgctcttggctgatgtggtgcccaccaccagcaggcttcggcctcgagcaggtaggacccgggcgatagccaggacacggcagagtgagagagtgagagcaaccgtgaaccggaaccggatctccacggccaggagggtccagcacacaccagggcgcctcgggtcttccctgctggatgaagccatcgaggctgtggcgactggcctgagcactgccgtgtatcagcgccccctgacgccgcgcactcccgcccgacggaagaggaagacaagaagacggaagaaagtgccgggaagaaagaaaaccccgtccggaccatccgcaaaaagtaagagctcagcgacaagatctaagaaacgccaacatcgagtgaagaagagaagagggaagaaggtaaagagtgaagccaccactcgctctcgaatcgcgcggacgctgggcctgcgcaggcctgttcacagcagctgcatcccgtcagtgttgaagccagtggagccctctttggggctgctgagagcggatattggagctgcctctctgtctctgtttggagatccttatgagctggatcccttcgacagtgaagagctttctgcaaaccctctttcccctctgagtgccaagagacgggctctgtcccggtcagccctgcagtcccaccagcccgtggccaggcccgtctccgtggggctttccaggaggcgcctccctgccgcggtgccagagccagacttggaggaggagccagtgcctgacctgctgggcagcatcctgtcgggccagagcctcctgatgctgggcagcagtgatgtcatcatccaccgcgacggctccctcagcgccaagagggcggctccagtttcttttcagcgaaactcaggcagtctgtccagaggggaagaaggattcaagggctgcctgcagccccgagcactgccctccgggagcccggcccaaggcccgtcaggaaacaggccacagagcacagggctcagctgtcaaggcaggtcccgcacccccgcccgcaccgcgggggcgcctgtgaggctggacttgccagcagcccctggggcggttcaggctcggaacttgtcaaatgggagtgtgcctggcttcagacagagccacagcccctggttcaacggcaccaacaagcacaccttgccccttgcctctgccgcgtctaagatctcaagcagagattctaagcccccatgtcgcagtgtggtgccggggcctcccctgaagccagcgcccagaagaacagacatctctgagctacccaggataccaaagatcaggagagatgacggtggtggcagacgggatgcggccccggcccacgggcagagcattgagatccccagtgcctgcatcagccgactgactggcagggagggcaccgggcagccagggcgaggcacacgggcagagagcgaggccagcagcagggtgccccgggagcccggggtgcacacgggcagctcccggcccccagcccccagctcccatggcagtttggccccactgggaccatcaagagggaaaggggtcgggtcgacctttgagagcttccggatcaatattcctggaaacatggcacattccagccagctctccagccctggcttctgtaacacgttccggcctgtggacgataaggagcagaggaaggagaacccctcacccctcttctccatcaagaagacgaagcagctgcggagcgaggtctacgacccatccgaccccaccggctccgactccagcgcccctggcagcagccccgagaggtctggccccggcctcctgccctctgagatcacacgaaccatctccatcaacagcccgaaggcccagacggtgcaggctgtgcgctgcgtcacctcctacacggtggagagcatctttggtacagagcccgaaccccctctcggaccgtcctccgccatgtccaagctccggggtgcagtggctgccgagggggcctctgacacggagcgagaggagcccacagagagccagggcctggctgcccggctgcggaggccatcccccccagagccctgggatgaggaggatggggcgtcttgcagcaccttctttggctctgaggagcggacggtgacctgtgtgactgtcgtggagccggaagccccacccagcccggacgtgctgcaggctgccacccacagagtcgtggagctcaggcccccttcccggtcccgctccacatccagctcccgcagcaggaagaaggccaagaggaagagggtgtccagggagcacggacggacgcgctctgggacgcgctctgaatccagggacaggagctcgaggtcagcgtcaccatcagtgggtgaggagcgccccaggaggcagcggtccaaggccaagagccggcggtcctccagtgaccgctccagcagccgagagcgagctaagaggaagaaagccaaggacaagagcagggagcacaggcggggcccctggggccacagccggaggacgtcccggtcgcggtcggggagccctggcagctcttcctatgagcactatgagagtaggaagaagaagaaaaggagatcagcgtccagacctcggggaagggagtgctcccccaccagcagcctggagaggctctgcaggcacaagcatcagcgggaacgcagccacgagcggccagacaggaaggagagtgtggcgtggccccgagaccggaggaagcggaggtcccggtccccaagctcggagcacagggcacgggagcacaggcggcctcggtcccgtgagaagtggccgcagacccggtcccattccccagagaggaagggggctgtgagggaggcttccccagcgccccttgcacagggggagccagggcgggaagacctccccaccaggttgccagccttgggggaagcacatgtctcgccggaggtggctacggccgacaaggcccccctgcaggctccccctgtcctggaggtggcagctgagtgtgagccggacgacctggacctggattatggcgactccgtggaggccggacacgtctttgatgatttctcaagcgacgccgttttcatccagctcgatgacatgagctcgccaccttctcccgaaagcacagactcttccccggagcgagacttcccactgaagcctgcgttgcccccagccagcctggccgtggccgccatccagagggaggtgtcattgatgcacgatgaagacccttcgcagcccccacccctgccagagggcacccaggagccacatttgctcaggccggacgcggctgagaaggctgaggcacccagttccccggatgtggcgcctgcggggaaggaagacagcccctctgcgagtgggagggtacaggaggcagcccggcctgaggaggtggtttcgcagacccccctgctgcggtccagagccctggtgaagcgggtcacctggaacctgcaggagtcggagagcagcgcccccgccgaggacagagccccccgggcaccacttcacaggccacagaagccccgagaaggagcctgggacatggaggatgtggcccccacaggggtcaggcaggtgttctccgagctgccctttcccagtcacgtgcttccggaacccgggttcccagacacagacccctctcaggtttacagccccggcctgccgcctgccccggcccagccctcaagcatcccaccctgcgcactggtcagccagcccacggtccagttcatccttcaggggagcctgccgctagtgggctgtggggcagcacagaccctggccccagtgcccgctgccctgaccccagcctcagagccagccagtcaagccactgcagccagcaactcggaggagaagaccccggcccccaggctagctgcggagaaaaccaagaaggaggagtacatgaagaagctgcacatgcaggagcgtgctgtggaggaggtgaagctggccatcaagcccttctaccagaagagggaggtgaccaaggaggagtacaaggacatcctgcgcaaggccgtgcagaagatctgccacagcaagagtggagagatcaaccccgtgaaggtggccaacctggtgaaggcgtacgtggacaagtacaggcacatgcgcaggcacaagaaaccagaggccggggaggagccgcccacgcagggggccgagggctgaggccaggcaatcacgggctatgcccggggagctgtcgggagtggcgggaatcggggccatgcccggggagctgtcgggagtggcgggaatcggggccatgcccggggagctgtcgggagtggcgggaaatggggggcatcaccatgcctgccgtcgggttcctgcgctgacacctggtctgtgcacc

SEQ ID NO: 164671 - DNA, 5218 bp, Homo sapiens
  Payload ID: 12443
  Gene Symbol: PHRF1
  Gene Name: PHD and ring finger domains 1
  ENST ID: ENST00000533464
  CDS Start-End: 94-5031
gcctaggagcgactctcggtcgtgcagcggcggcgagcgctcgcgagcggctgcgggacgcgaggtttccggagctgagctcaatgtgcagcaatggatgacgacagcctggatgagcttgtggcccggagcccagggccggatggacacccacaggtcggccctgcggacccggcagaaagcagcgtgggcagcagtggggactctggggacgacagtgacagcgagcatggagatggcacagacggagaagacgagggggcgtctgaggaggaagacctggaagacagatctggttccgaggattctgaagacgacggggagacattgctggaggtagcgggtactcaggggaaactggaagccgctggctctttcaattctgatgatgatgcagagagctgcccaatctgtctcaacgcattcagagaccaggccgtggggacgccggagaactgtgcccattacttctgcctggactgcattgtcgaatggtccaagaatgccaattcctgtccagttgatcgaactctatttaagtgcatttgtattcgagctcaatttggtggtaaaatcttaagaaagatcccagtggagaacaccaaagcgagcgaggaggaggaggacccgaccttctgtgaggtgtgcggcaggagcgaccgtgaggacaggcttttgctctgcgacggctgcgatgcggggtaccacatggaatgcttggacccccctctccaggaggtgccggtggacgagtggttctgcccggaatgtgctgcgcctggtgttgtccttgccgctgatgcgggtcccgtgagtgaggaggaggtctccctgctcttggctgatgtggtgcccaccaccagcaggcttcggcctcgagcaggtaggacccgggcgatagccaggacacggcagagtgagagagtgagagcaaccgtgaaccggaaccggatctccacggccaggagggtccagcacacaccagggcgcctcgggtcttccctgctggatgaagccatcgaggctgtggcgactggcctgagcactgccgtgtatcagcgccccctgacgccgcgcactcccgcccgacggaagaggaagacaagaagacggaagaaagtgccgggaagaaagaaaaccccgtccggaccatccgcaaaaagtaagagctcagcgacaagatctaagaaacgccaacatcgagtgaagaagagaagagggaagaaggtaaagagtgaagccaccactcgctctcgaatcgcgcggacgctgggcctgcgcaggcctgttcacagcagctgcatcccgtcagtgttgaagccagtggagccctctttggggctgctgagagcggatattggagctgcctctctgtctctgtttggagatccttatgagctggatcccttcgacagcagtgaagagctttctgcaaaccctctttcccctctgagtgccaagagacgggctctgtcccggtcagccctgcagtcccaccagcccgtggccaggcccgtctccgtggggctttccaggaggcgcctccctgccgcggtgccagagccagacttggaggaggagccagtgcctgacctgctgggcagcatcctgtcgggccagagcctcctgatgctgggcagcagtgatgtcatcatccaccgcgacggctccctcagcgccaagagggcggctccagtttcttttcagcgaaactcaggcagtctgtccagaggggaagaaggattcaagggctgcctgcagccccgagcactgccctccgggagcccggcccaaggcccgtcaggaaacaggccacagagcacagggctcagctgtcaaggcaggtcccgcacccccgcccgcaccgcgggggcgcctgtgaggctggacttgccagcagcccctggggcggttcaggctcggaacttgtcaaatgggagtgtgcctggcttcagacagagccacagcccctggttcaacggcaccaacaagcacaccttgccccttgcctctgccgcgtctaagatctcaagcagagattctaagcccccatgtcgcagtgtggtgccggggcctcccctgaagccagcgcccagaagaacagacatctctgagctacccaggataccaaagatcaggagagatgacggtggtggcagacgggatgcggccccggcccacgggcagagcattgagatccccagtgcctgcatcagccgactgactggcagggagggcaccgggcagccagggcgaggcacacgggcagagagcgaggccagcagcagggtgccccgggagcccggggtgcacacgggcagctcccggcccccagcccccagctcccatggcagtttggccccactgggaccatcaagagggaaaggggtcgggtcgacctttgagagcttccggatcaatattcctggaaacatggcacattccagccagctctccagccctggcttctgtaacacgttccggcctgtggacgataaggagcagaggaaggagaacccctcacccctcttctccatcaagaagacgaagcagctgcggagcgaggtctacgacccatccgaccccaccggctccgactccagcgcccctggcagcagccccgagaggtctggccccggcctcctgccctctgagatcacacgaaccatctccatcaacagcccgaaggcccagacggtgcaggctgtgcgctgcgtcacctcctacacggtggagagcatctttggtacagagcccgaaccccctctcggaccgtcctccgccatgtccaagctccggggtgcagtggctgccgagggggcctctgacacggagcgagaggagcccacagagagccagggcctggctgcccggctgcggaggccatcccccccagagccctgggatgaggaggatggggcgtcttgcagcaccttctttggctctgaggagcggacggtgacctgtgtgactgtcgtggagccggaagccccacccagcccggacgtgctgcaggctgccacccacagagtcgtggagctcaggcccccttcccggtcccgctccacatccagctcccgcagcaggaagaaggccaagaggaagagggtgtccagggagcacggacggacgcgctctgggacgcgctctgaatccagggacaggagctcgaggtcagcgtcaccatcagtgggtgaggagcgccccaggaggcagcggtccaaggccaagagccggcggtcctccagtgaccgctccagcagccgagagcgagctaagaggaagaaagccaaggacaagagcagggagcacaggcggggcccctggggccacagccggaggacgtcccggtcgcggtcggggagccctggcagctcttcctatgagcactatgagagtaggaagaagaagaaaaggagatcagcgtccagacctcggggaagggagtgctcccccaccagcagcctggagaggctctgcaggcacaagcatcagcgggaacgcagccacgagcggccagacaggaaggagagtgtggcgtggccccgagaccggaggaagcggaggtcccggtccccaagctcggagcacagggcacgggagcacaggcggcctcggtcccgtgagaagtggccgcagacccggtcccattccccagagaggaagggggctgtgagggaggcttccccagcgccccttgcacagggggagccagggcgggaagacctccccaccaggttgccagccttgggggaagcacatgtctcgccggaggtggctacggccgacaaggcccccctgcaggctccccctgtcctggaggtggcagctgagtgtgagccggacgacctggacctggattatggcgactccgtggaggccggacacgtctttgatgatttctcaagcgacgccgttttcatccagctcgatgacatgagctcgccaccttctcccgaaagcacagactcttccccggagcgagacttcccactgaagcctgcgttgcccccagccagcctggccgtggccgccatccagagggaggtgtcattgatgcacgatgaagacccttcgcagcccccacccctgccagagggcacccaggagccacatttgctcaggccggacgcggctgagaaggctgaggcacccagttccccggatgtggcgcctgcggggaaggaagacagcccctctgcgagtgggagggtacaggaggcagcccggcctgaggaggtggtttcgcagacccccctgctgcggtccagagccctggtgaagcgggtcacctggaacctgcaggagtcggagagcagcgcccccgccgaggacagagccccccgggcaccacttcacaggccacagaagccccgagaaggagcctgggacatggaggatgtggcccccacaggggtcaggcaggtgttctccgagctgccctttcccagtcacgtgcttccggaacccgggttcccagacacagacccctctcaggtttacagccccggcctgccgcctgccccggcccagccctcaagcatcccaccctgcgcactggtcagccagcccacggtccagttcatccttcaggggagcctgccgctagtgggctgtggggcagcacagaccctggccccagtgcccgctgccctgaccccagcctcagagccagccagtcaagccactgcagccagcaactcggaggagaagaccccggcccccaggctagctgcggagaaaaccaagaaggaggagtacatgaagaagctgcacatgcaggagcgtgctgtggaggaggtgaagctggccatcaagcccttctaccagaagagggaggtgaccaaggaggagtacaaggacatcctgcgcaaggccgtgcagaagatctgccacagcaagagtggagagatcaaccccgtgaaggtggccaacctggtgaaggcgtacgtggacaagtacaggcacatgcgcaggcacaagaaaccagaggccggggaggagccgcccacgcagggggccgagggctgaggccaggcaatcacgggctatgcccggggagctgtcgggagtggcgggaatcggggccatgcccggggagctgtcgggagtggcgggaatcggggccatgcccggggagctgtcgggagtggcgggaaatggggggcatcaccatgcctgccgtcgggttcctgcgctgacacctggtctgtgcacc

SEQ ID NO: 164672 - DNA, 5178 bp, Homo sapiens
  Payload ID: 12443
  Gene Symbol: PHRF1
  Gene Name: PHD and ring finger domains 1
  Uniprot ID: Q9P1Y6
  ENST ID: ENST00000534320
  CDS Start-End: 129-4613
gagcgcacggcggcggcagaggcggcggcggccgggcctaggagcgactctcggtcgtgcagcggcggcgagcgctcgcgagcggctgcgggacgcgaggtttccggagctgagctcaatgtgcagcaatggatgacgacagcctggatgagcttgtggcccggagcccagggccggatggacacccacaggtcggccctgcggacccggcaggtgactttgaagaaagcagcgtgggcagcagtggggactctggggacgacagtgacagcgagcatggagatggcacagacggagaagacgagggggcgtctgaggaggaagacctggaagacagatctggttccgaggattctgaagacgacggggagacattgctggaggtagcgggtactcaggggaaactggaagccgctggctctttcaattctgatgatgatgcagagagctgcccaatctgtctcaacgcattcagagaccaggccgtggggacgccggagaactgtgcccattacttctgcctggactgcattgtcgaatggtccaagaatgccaattcctgtccagttgatcgaactctatttaagtgcatttgtattcgagctcaatttggtggtaaaatcttaagaaagatcccagtggagaacaccaaagcgagcgaggaggaggaggacccgaccttctgtgaggtgtgcggcaggagcgaccgtgaggacaggcttttgctctgcgacggctgcgatgcggggtaccacatggaatgcttggacccccctctccaggaggtgccggtggacgagtggttctgcccggaatgtgctgcgcctggtgttgtccttgccgctgatgcgggtcccgtgagtgaggaggaggtctccctgctcttggctgatgtggtgcccaccaccagcaggcttcggcctcgagcaggtaggacccgggcgatagccaggacacggcagagtgagagagtgagagcaaccgtgaaccggaaccggatctccacggccaggagggtccagcacacaccagggcgcctcgggtcttccctgctggatgaagccatcgaggctgtggcgactggcctgagcactgccgtgtatcagcgccccctgacgccgcgcactcccgcccgacggaagaggaagacaagaagacggaagaaagtgccgggaagaaagaaaaccccgtccggaccatccgcaaaaagtaagagctcagcgacaagatctaagaaacgccaacatcgagtgaagaagagaagagggaagaaggtaaagagtgaagccaccactcgctctcgaatcgcgcggacgctgggcctgcgcaggcctgttcacagcagctgcatcccgtcagtgttgaagccagtggagccctctttggggctgctgagagcggatattggagctgcctctctgtctctgtttggagatccttatgagctggatcccttcgacagcagtgaagagctttctgcaaaccctctttcccctctgagtgccaagagacgggctctgtcccggtcagccctgcagtcccaccagcccgtggccaggcccgtctccgtggggctttccaggaggcgcctccctgccgcggtgccagagccagacttggaggaggagccagtgcctgacctgctgggcagcatcctgtcgggccagagcctcctgatgctgggcagcagtgatgtcatcatccaccgcgacggctccctcagcgccaagagggcggctccagtttcttttcagcgaaactcaggcagtctgtccagaggggaagaaggattcaagggctgcctgcagccccgagcactgccctccgggagcccggcccaaggcccgtcaggaaacaggccacagagcacagggctcagctgtcaaggcaggtcccgcacccccgcccgcaccgcgggggcgcctgtgaggctggacttgccagcagcccctggggcggttcaggctcggaacttgtcaaatgggagtgtgcctggcttcagacagagccacagcccctggttcaacggcaccaacaagcacaccttgccccttgcctctgccgcgtctaagatctcaagcagagattctaagcccccatgtcgcagtgtggtgccggggcctcccctgaagccagcgcccagaagaacagacatctctgagctacccaggataccaaagatcaggagagatgacggtggtggcagacgggatgcggccccggcccacgggcagagcattgagatccccagtgcctgcatcagccgactgactggcagggagggcaccgggcagccagggcgaggcacacgggcagagagcgaggccagcagcagggtgccccgggagcccggggtgcacacgggcagctcccggcccccagcccccagctcccatggcagtttggccccactgggaccatcaagagggaaaggggtcgggtcgacctttgagagcttccggatcaatattcctggaaacatggcacattccagccagctctccagccctggcttctgtaacacgttccggcctgtggacgataaggagcagaggaaggagaacccctcacccctcttctccatcaagaagacgaagcagctgcggagcgaggtctacgacccatccgaccccaccggctccgactccagcgcccctggcagcagccccgagaggtctggccccggcctcctgccctctgagatcacacgaaccatctccatcaacagcccgaaggcccagacggtgcaggctgtgcgctgcgtcacctcctacacggtggagagcatctttggtacagagcccgaaccccctctcggaccgtcctccgccatgtccaagctccggggtgcagtggctgccgagggggcctctgacacggagcgagaggagcccacagagagccagggcctggctgcccggctgcggaggccatcccccccagagccctgggatgaggaggatggggcgtcttgcagcaccttctttggctctgaggagcggacggtgacctgtgtgactgtcgtggagccggaagccccacccagcccggacgtgctgcaggctgccacccacagagtcgtggagctcaggcccccttcccggtcccgctccacatccagctcccgcagcaggaagaaggccaagaggaagagggtgtccagggagcacggacggacgcgctctgggacgcgctctgaatccagggacaggagctcgaggtcagcgtcaccatcagtgggtgaggagcgccccaggaggcagcggtccaaggccaagagccggcggtcctccagtgaccgctccagcagccgagagcgagctaagaggaagaaagccaaggacaagagcagggagcacaggcggggcccctggggccacagccggaggacgtcccggtcgcggtcggggagccctggcagctcttcctatgagcactatgagagtaggaagaagaagaaaaggagatcagcgtccagacctcggggaagggagtgctcccccaccagcagcctggagaggctctgcaggcacaagcatcagcgggaacgcagccacgagcggccagacaggaaggagagtgtggcgtggccccgagaccggaggaagcggaggtcccggtccccaagctcggagcacagggcacgggagcacaggcggcctcggtcccgtgagaagtggccgcagacccggtcccattccccagagaggaagggggctgtgagggaggcttccccagcgccccttgcacagggggagccagggcgggaagacctccccaccaggttgccagccttgggggaagcacatgtctcgccggaggtggctacggccgacaaggcccccctgcaggctccccctgtcctggaggtggcagctgagtgtgagccggacgacctggacctggattatggcgactccgtggaggccggacacgtctttgatgatttctcaagcgacgccgttttcatccagctcgatgacatgagctcgccaccttctcccgaaagcacagactcttccccggagcgagacttcccactgaagcctgcgttgcccccagccagcctggccgtggccgccatccagagggaggtgtcattgatgcacgatgaagacccttcgcagcccccacccctgccagagggcacccaggagccacatttgctcaggccggacgcggctgagaaggctgaggcacccagttccccggatgtggcgcctgcggggaaggaagacagcccctctgcgagtgggagggtacaggaggcagcccggcctgaggaggtggtttcgcagacccccctgctgcggtccagagccctggtgaagcgggtcacctggaacctgcaggagtcggagagcagcgcccccgccgaggacagagccccccgggcaccacttcacaggccacagaagccccgagaaggagcctgggacatggaggatgtggcccccacaggggtcaggcaggtgttctccgagctgccctttcccagtcacgtgcttccggaacccgggttcccagacacagacccctctcagcctcagagccagccagtcaagccactgcagccagcaactcggaggagaagaccccggcccccaggctagctgcggagaaaaccaagaaggaggagtacatgaagaagctgcacatgcaggagcgtgctgtggaggaggtgaagctggccatcaagcccttctaccagaagagggaggtgaccaaggaggagtacaaggacatcctgcgcaaggccgtgcagaagatctgccacagcaagagtggagagatcaaccccgtgaaggtggccaacctggtgaaggcgtacgtggacaagtacaggcacatgcgcaggcacaagaaaccagaggccggggaggagccgcccacgcagggggccgagggctgaggccaggcaatcacgggctatgcccggggagctgtcgggagtggcgggaatcggggccatgcccggggagctgtcgggagtggcgggaatcggggccatgcccggggagctgtcgggagtggcgggaaatggggggcatcaccatgcctgccgtcgggttcctgcgctgacacctggtctgtgcacctgtgttgctcacagttgaaaactggacacttttgtatgtatattatagagacactgtttccattctaatttatcaaaaa

SEQ ID NO: 164673 - DNA, 5523 bp, Homo sapiens
  Payload ID: 12443
  Gene Symbol: PHRF1
  Gene Name: PHD and ring finger domains 1
  Uniprot ID: Q9P1Y6
  ENST ID: ENST00000616346
  CDS Start-End: 129-5078
gagcgcacggcggcggcagaggcggcggcggccgggcctaggagcgactctcggtcgtgcagcggcggcgagcgctcgcgagcggctgcgggacgcgaggtttccggagctgagctcaatgtgcagcaatggatgacgacagcctggatgagcttgtggcccggagcccagggccggatggacacccacaggtcggccctgcggacccggcaggtgactttgaagaaagcagcgtgggcagcagtggggactctggggacgacagtgacagcgagcatggagatggcacagacggagaagacgagggggcgtctgaggaggaagacctggaagacagatctggttccgaggattctgaagacgacggggagacattgctggaggtagcgggtactcaggggaaactggaagccgctggctctttcaattctgatgatgatgcagagagctgcccaatctgtctcaacgcattcagagaccaggccgtggggacgccggagaactgtgcccattacttctgcctggactgcattgtcgaatggtccaagaatgccaattcctgtccagttgatcgaactctatttaagtgcatttgtattcgagctcaatttggtggtaaaatcttaagaaagatcccagtggagaacaccaaagcgagcgaggaggaggaggacccgaccttctgtgaggtgtgcggcaggagcgaccgtgaggacaggcttttgctctgcgacggctgcgatgcggggtaccacatggaatgcttggacccccctctccaggaggtgccggtggacgagtggttctgcccggaatgtgctgcgcctggtgttgtccttgccgctgatgcgggtcccgtgagtgaggaggaggtctccctgctcttggctgatgtggtgcccaccaccagcaggcttcggcctcgagcaggtaggacccgggcgatagccaggacacggcagagtgagagagtgagagcaaccgtgaaccggaaccggatctccacggccaggagggtccagcacacaccagggcgcctcgggtcttccctgctggatgaagccatcgaggctgtggcgactggcctgagcactgccgtgtatcagcgccccctgacgccgcgcactcccgcccgacggaagaggaagacaagaagacggaagaaagtgccgggaagaaagaaaaccccgtccggaccatccgcaaaaagtaagagctcagcgacaagatctaagaaacgccaacatcgagtgaagaagagaagagggaagaaggtaaagagtgaagccaccactcgctctcgaatcgcgcggacgctgggcctgcgcaggcctgttcacagcagctgcatcccgtcagtgttgaagccagtggagccctctttggggctgctgagagcggatattggagctgcctctctgtctctgtttggagatccttatgagctggatcccttcgacagcagtgaagagctttctgcaaaccctctttcccctctgagtgccaagagacgggctctgtcccggtcagccctgcagtcccaccagcccgtggccaggcccgtctccgtggggctttccaggaggcgcctccctgccgcggtgccagagccagacttggaggaggagccagtgcctgacctgctgggcagcatcctgtcgggccagagcctcctgatgctgggcagcagtgatgtcatcatccaccgcgacggctccctcagcgccaagagggcggctccagtttcttttcagcgaaactcaggcagtctgtccagaggggaagaaggattcaagggctgcctgcagccccgagcactgccctccgggagcccggcccaaggcccgtcaggaaacaggccacagagcacagggctcagctgtcaaggcaggtcccgcacccccgcccgcaccgcgggggcgcctgtgaggctggacttgccagcagcccctggggcggttcaggctcggaacttgtcaaatgggagtgtgcctggcttcagacagagccacagcccctggttcaacggcaccaacaagcacaccttgccccttgcctctgccgcgtctaagatctcaagcagagattctaagcccccatgtcgcagtgtggtgccggggcctcccctgaagccagcgcccagaagaacagacatctctgagctacccaggataccaaagatcaggagagatgacggtggtggcagacgggatgcggccccggcccacgggcagagcattgagatccccagtgcctgcatcagccgactgactggcagggagggcaccgggcagccagggcgaggcacacgggcagagagcgaggccagcagcagggtgccccgggagcccggggtgcacacgggcagctcccggcccccagcccccagctcccatggcagtttggccccactgggaccatcaagagggaaaggggtcgggtcgacctttgagagcttccggatcaatattcctggaaacatggcacattccagccagctctccagccctggcttctgtaacacgttccggcctgtggacgataaggagcagaggaaggagaacccctcacccctcttctccatcaagaagacgaagcagctgcggagcgaggtctacgacccatccgaccccaccggctccgactccagcgcccctggcagcagccccgagaggtctggccccggcctcctgccctctgagatcacacgaaccatctccatcaacagcccgaaggcccagacggtgcaggctgtgcgctgcgtcacctcctacacggtggagagcatctttggtacagagcccgaaccccctctcggaccgtcctccgccatgtccaagctccggggtgcagtggctgccgagggggcctctgacacggagcgagaggagcccacagagagccagggcctggctgcccggctgcggaggccatcccccccagagccctgggatgaggaggatggggcgtcttgcagcaccttctttggctctgaggagcggacggtgacctgtgtgactgtcgtggagccggaagccccacccagcccggacgtgctgcaggctgccacccacagagtcgtggagctcaggcccccttcccggtcccgctccacatccagctcccgcagcaggaagaaggccaagaggaagagggtgtccagggagcacggacggacgcgctctgggacgcgctctgaatccagggacaggagctcgaggtcagcgtcaccatcagtgggtgaggagcgccccaggaggcagcggtccaaggccaagagccggcggtcctccagtgaccgctccagcagccgagagcgagctaagaggaagaaagccaaggacaagagcagggagcacaggcggggcccctggggccacagccggaggacgtcccggtcgcggtcggggagccctggcagctcttcctatgagcactatgagagtaggaagaagaagaaaaggagatcagcgtccagacctcggggaagggagtgctcccccaccagcagcctggagaggctctgcaggcacaagcatcagcgggaacgcagccacgagcggccagacaggaaggagagtgtggcgtggccccgagaccggaggaagcggaggtcccggtccccaagctcggagcacagggcacgggagcacaggcggcctcggtcccgtgagaagtggccgcagacccggtcccattccccagagaggaagggggctgtgagggaggcttccccagcgccccttgcacagggggagccagggcgggaagacctccccaccaggttgccagccttgggggaagcacatgtctcgccggaggtggctacggccgacaaggcccccctgcaggctccccctgtcctggaggtggcagctgagtgtgagccggacgacctggacctggattatggcgactccgtggaggccggacacgtctttgatgatttctcaagcgacgccgttttcatccagctcgatgacatgagctcgccaccttctcccgaaagcacagactcttccccggagcgagacttcccactgaagcctgcgttgcccccagccagcctggccgtggccgccatccagagggaggtgtcattgatgcacgatgaagacccttcgcagcccccacccctgccagagggcacccaggagccacatttgctcaggccggacgcggctgagaaggctgaggcacccagttccccggatgtggcgcctgcggggaaggaagacagcccctctgcgagtgggagggtacaggaggcagcccggcctgaggaggtggtttcgcagacccccctgctgcggtccagagccctggtgaagcgggtcacctggaacctgcaggagtcggagagcagcgcccccgccgaggacagagccccccgggcaccacttcacaggccacagaagccccgagaaggagcctgggacatggaggatgtggcccccacaggggtcaggcaggcgttctccgagctgccctttcccagtcacgtgcttccggaacccgggttcccagacacagacccctctcaggtttacagccccggcctgccgcctgccccggcccagccctcaagcatcccaccctgcgcactggtcagccagcccacggtccagttcatccttcaggggagcctgccgctagtgggctgtggggcagcacagaccctggccccagtgcccgctgccctgaccccagcctcagagccagccagtcaagccactgcagccagcaactcggaggagaagaccccggcccccaggctagctgcggagaaaaccaagaaggaggagtacatgaagaagctgcacatgcaggagcgtgctgtggaggaggtgaagctggccatcaagcccttctaccagaagagggaggtgaccaaggaggagtacaaggacatcctgcgcaaggccgtgcagaagatctgccacagcaagagtggagagatcaaccccgtgaaggtggccaacctggtgaaggcgtacgtggacaagtacaggcacatgcgcaggcacaagaaaccagaggccggggaggagccgcccacgcagggggccgagggctgaggccaggcaatcacgggctatgcccggggagctgtcgggagtggcgggaatcggggccatgcccggggagctgtcgggagtggcgggaatcggggccatgcccggggagctgtcgggagtggcgggaaatggggggcatcaccatgcctgccgtcgggttcctgcgctgacacctggtctgtgcacctgtgttgctcacagttgaaaactggacacttttgtatgtatattatagagacactgtttccattctaatttatcaaaaatggattatctttagaaacctcttgattgacttactacttggaagataaagcacttggtgatcaagaggggctcctggtggggtggcgcgtccttgataaatctctaggtggcctcccgccaacagctgctgtgtacctttggctctgaattaggaatatctttactttctcttttccaa

SEQ ID NO: 164674 - DNA, 5218 bp, Homo sapiens
  Payload ID: 12443
  Gene Symbol: PHRF1
  Gene Name: PHD and ring finger domains 1
  ENST ID: ENST00000632297
  CDS Start-End: 94-5031
gcctaggagcgactctcggtcgtgcagcggcggcgagcgctcgcgagcggctgcgggacgcgaggtttccggagctgagctcaatgtgcagcaatggatgacgacagcctggatgagcttgtggcccggagcccagggccggatggacacccacaggtcggccctgcggacccggcagaaagcagcgtgggcagcagtggggactctggggacgacagtgacagcgagcatggagatggcacagacggagaagacgagggggcgtctgaggaggaagacctggaagacagatctggttccgaggattctgaagacgacggggagacattgctggaggtagcgggtactcaggggaaactggaagccgctggctctttcaattctgatgatgatgcagagagctgcccaatctgtctcaacgcattcagagaccaggccgtggggacgccggagaactgtgcccattacttctgcctggactgcattgtcgaatggtccaagaatgccaattcctgtccagttgatcgaactctatttaagtgcatttgtattcgagctcaatttggtggtaaaatcttaagaaagatcccagtggagaacaccaaagcgagcgaggaggaggaggacccgaccttctgtgaggtgtgcggcaggagcgaccgtgaggacaggcttttgctctgcgacggctgcgatgcggggtaccacatggaatgcttggacccccctctccaggaggtgccggtggacgagtggttctgcccggaatgtgctgcgcctggtgttgtccttgccgctgatgcgggtcccgtgagtgaggaggaggtctccctgctcttggctgatgtggtgcccaccaccagcaggcttcggcctcgagcaggtaggacccgggcgatagccaggacacggcagagtgagagagtgagagcaaccgtgaaccggaaccggatctccacggccaggagggtccagcacacaccagggcgcctcgggtcttccctgctggatgaagccatcgaggctgtggcgactggcctgagcactgccgtgtatcagcgccccctgacgccgcgcactcccgcccgacggaagaggaagacaagaagacggaagaaagtgccgggaagaaagaaaaccccgtccggaccatccgcaaaaagtaagagctcagcgacaagatctaagaaacgccaacatcgagtgaagaagagaagagggaagaaggtaaagagtgaagccaccactcgctctcgaatcgcgcggacgctgggcctgcgcaggcctgttcacagcagctgcatcccgtcagtgttgaagccagtggagccctctttggggctgctgagagcggatattggagctgcctctctgtctctgtttggagatccttatgagctggatcccttcgacagcagtgaagagctttctgcaaaccctctttcccctctgagtgccaagagacgggctctgtcccggtcagccctgcagtcccaccagcccgtggccaggcccgtctccgtggggctttccaggaggcgcctccctgccgcggtgccagagccagacttggaggaggagccagtgcctgacctgctgggcagcatcctgtcgggccagagcctcctgatgctgggcagcagtgatgtcatcatccaccgcgacggctccctcagcgccaagagggcggctccagtttcttttcagcgaaactcaggcagtctgtccagaggggaagaaggattcaagggctgcctgcagccccgagcactgccctccgggagcccggcccaaggcccgtcaggaaacaggccacagagcacagggctcagctgtcaaggcaggtcccgcacccccgcccgcaccgcgggggcgcctgtgaggctggacttgccagcagcccctggggcggttcaggctcggaacttgtcaaatgggagtgtgcctggcttcagacagagccacagcccctggttcaacggcaccaacaagcacaccttgccccttgcctctgccgcgtctaagatctcaagcagagattctaagcccccatgtcgcagtgtggtgccggggcctcccctgaagccagcgcccagaagaacagacatctctgagctacccaggataccaaagatcaggagagatgacggtggtggcagacgggatgcggccccggcccacgggcagagcattgagatccccagtgcctgcatcagccgactgactggcagggagggcaccgggcagccagggcgaggcacacgggcagagagcgaggccagcagcagggtgccccgggagcccggggtgcacacgggcagctcccggcccccagcccccagctcccatggcagtttggccccactgggaccatcaagagggaaaggggtcgggtcgacctttgagagcttccggatcaatattcctggaaacatggcacattccagccagctctccagccctggcttctgtaacacgttccggcctgtggacgataaggagcagaggaaggagaacccctcacccctcttctccatcaagaagacgaagcagctgcggagcgaggtctacgacccatccgaccccaccggctccgactccagcgcccctggcagcagccccgagaggtctggccccggcctcctgccctctgagatcacacgaaccatctccatcaacagcccgaaggcccagacggtgcaggctgtgcgctgcgtcacctcctacacggtggagagcatctttggtacagagcccgaaccccctctcggaccgtcctccgccatgtccaagctccggggtgcagtggctgccgagggggcctctgacacggagcgagaggagcccacagagagccagggcctggctgcccggctgcggaggccatcccccccagagccctgggatgaggaggatggggcgtcttgcagcaccttctttggctctgaggagcggacggtgacctgtgtgactgtcgtggagccggaagccccacccagcccggacgtgctgcaggctgccacccacagagtcgtggagctcaggcccccttcccggtcccgctccacatccagctcccgcagcaggaagaaggccaagaggaagagggtgtccagggagcacggacggacgcgctctgggacgcgctctgaatccagggacaggagctcgaggtcagcgtcaccatcagtgggtgaggagcgccccaggaggcagcggtccaaggccaagagccggcggtcctccagtgaccgctccagcagccgagagcgagctaagaggaagaaagccaaggacaagagcagggagcacaggcggggcccctggggccacagccggaggacgtcccggtcgcggtcggggagccctggcagctcttcctatgagcactatgagagtaggaagaagaagaaaaggagatcagcgtccagacctcggggaagggagtgctcccccaccagcagcctggagaggctctgcaggcacaagcatcagcgggaacgcagccacgagcggccagacaggaaggagagtgtggcgtggccccgagaccggaggaagcggaggtcccggtccccaagctcggagcacagggcacgggagcacaggcggcctcggtcccgtgagaagtggccgcagacccggtcccattccccagagaggaagggggctgtgagggaggcttccccagcgccccttgcacagggggagccagggcgggaagacctccccaccaggttgccagccttgggggaagcacatgtctcgccggaggtggctacggccgacaaggcccccctgcaggctccccctgtcctggaggtggcagctgagtgtgagccggacgacctggacctggattatggcgactccgtggaggccggacacgtctttgatgatttctcaagcgacgccgttttcatccagctcgatgacatgagctcgccaccttctcccgaaagcacagactcttccccggagcgagacttcccactgaagcctgcgttgcccccagccagcctggccgtggccgccatccagagggaggtgtcattgatgcacgatgaagacccttcgcagcccccacccctgccagagggcacccaggagccacatttgctcaggccggacgcggctgagaaggctgaggcacccagttccccggatgtggcgcctgcggggaaggaagacagcccctctgcgagtgggagggtacaggaggcagcccggcctgaggaggtggtttcgcagacccccctgctgcggtccagagccctggtgaagcgggtcacctggaacctgcaggagtcggagagcagcgcccccgccgaggacagagccccccgggcaccacttcacaggccacagaagccccgagaaggagcctgggacatggaggatgtggcccccacaggggtcaggcaggcgttctccgagctgccctttcccagtcacgtgcttccggaacccgggttcccagacacagacccctctcaggtttacagccccggcctgccgcctgccccggcccagccctcaagcatcccaccctgcgcactggtcagccagcccacggtccagttcatccttcaggggagcctgccgctagtgggctgtggggcagcacagaccctggccccagtgcccgctgccctgaccccagcctcagagccagccagtcaagccactgcagccagcaactcggaggagaagaccccggcccccaggctagctgcggagaaaaccaagaaggaggagtacatgaagaagctgcacatgcaggagcgtgctgtggaggaggtgaagctggccatcaagcccttctaccagaagagggaggtgaccaaggaggagtacaaggacatcctgcgcaaggccgtgcagaagatctgccacagcaagagtggagagatcaaccccgtgaaggtggccaacctggtgaaggcgtacgtggacaagtacaggcacatgcgcaggcacaagaaaccagaggccggggaggagccgcccacgcagggggccgagggctgaggccaggcaatcacgggctatgcccggggagctgtcgggagtggcgggaatcggggccatgcccggggagctgtcgggagtggcgggaatcggggccatgcccggggagctgtcgggagtggcgggaaatggggggcatcaccatgcctgccgtcgggttcctgcgctgacacctggtctgtgcacc

SEQ ID NO: 164675 - DNA, 5227 bp, Homo sapiens
  Payload ID: 12443
  Gene Symbol: PHRF1
  Gene Name: PHD and ring finger domains 1
  ENST ID: ENST00000633631
  CDS Start-End: 94-5040
gcctaggagcgactctcggtcgtgcagcggcggcgagcgctcgcgagcggctgcgggacgcgaggtttccggagctgagctcaatgtgcagcaatggatgacgacagcctggatgagcttgtggcccggagcccagggccggatggacacccacaggtcggccctgcggacccggcaggtgactttgaagaaagcagcgtgggcagcagtggggactctggggacgacagtgacagcgagcatggagatggcacagacggagaagacgagggggcgtctgaggaggaagacctggaagacagatctggttccgaggattctgaagacgacggggagacattgctggaggtagcgggtactcaggggaaactggaagccgctggctctttcaattctgatgatgatgcagagagctgcccaatctgtctcaacgcattcagagaccaggccgtggggacgccggagaactgtgcccattacttctgcctggactgcattgtcgaatggtccaagaatgccaattcctgtccagttgatcgaactctatttaagtgcatttgtattcgagctcaatttggtggtaaaatcttaagaaagatcccagtggagaacaccaaagcgagcgaggaggaggaggacccgaccttctgtgaggtgtgcggcaggagcgaccgtgaggacaggcttttgctctgcgacggctgcgatgcggggtaccacatggaatgcttggacccccctctccaggaggtgccggtggacgagtggttctgcccggaatgtgctgcgcctggtgttgtccttgccgctgatgcgggtcccgtgagtgaggaggaggtctccctgctcttggctgatgtggtgcccaccaccagcaggcttcggcctcgagcaggtaggacccgggcgatagccaggacacggcagagtgagagagtgagagcaaccgtgaaccggaaccggatctccacggccaggagggtccagcacacaccagggcgcctcgggtcttccctgctggatgaagccatcgaggctgtggcgactggcctgagcactgccgtgtatcagcgccccctgacgccgcgcactcccgcccgacggaagaggaagacaagaagacggaagaaagtgccgggaagaaagaaaaccccgtccggaccatccgcaaaaagtaagagctcagcgacaagatctaagaaacgccaacatcgagtgaagaagagaagagggaagaaggtaaagagtgaagccaccactcgctctcgaatcgcgcggacgctgggcctgcgcaggcctgttcacagcagctgcatcccgtcagtgttgaagccagtggagccctctttggggctgctgagagcggatattggagctgcctctctgtctctgtttggagatccttatgagctggatcccttcgacagtgaagagctttctgcaaaccctctttcccctctgagtgccaagagacgggctctgtcccggtcagccctgcagtcccaccagcccgtggccaggcccgtctccgtggggctttccaggaggcgcctccctgccgcggtgccagagccagacttggaggaggagccagtgcctgacctgctgggcagcatcctgtcgggccagagcctcctgatgctgggcagcagtgatgtcatcatccaccgcgacggctccctcagcgccaagagggcggctccagtttcttttcagcgaaactcaggcagtctgtccagaggggaagaaggattcaagggctgcctgcagccccgagcactgccctccgggagcccggcccaaggcccgtcaggaaacaggccacagagcacagggctcagctgtcaaggcaggtcccgcacccccgcccgcaccgcgggggcgcctgtgaggctggacttgccagcagcccctggggcggttcaggctcggaacttgtcaaatgggagtgtgcctggcttcagacagagccacagcccctggttcaacggcaccaacaagcacaccttgccccttgcctctgccgcgtctaagatctcaagcagagattctaagcccccatgtcgcagtgtggtgccggggcctcccctgaagccagcgcccagaagaacagacatctctgagctacccaggataccaaagatcaggagagatgacggtggtggcagacgggatgcggccccggcccacgggcagagcattgagatccccagtgcctgcatcagccgactgactggcagggagggcaccgggcagccagggcgaggcacacgggcagagagcgaggccagcagcagggtgccccgggagcccggggtgcacacgggcagctcccggcccccagcccccagctcccatggcagtttggccccactgggaccatcaagagggaaaggggtcgggtcgacctttgagagcttccggatcaatattcctggaaacatggcacattccagccagctctccagccctggcttctgtaacacgttccggcctgtggacgataaggagcagaggaaggagaacccctcacccctcttctccatcaagaagacgaagcagctgcggagcgaggtctacgacccatccgaccccaccggctccgactccagcgcccctggcagcagccccgagaggtctggccccggcctcctgccctctgagatcacacgaaccatctccatcaacagcccgaaggcccagacggtgcaggctgtgcgctgcgtcacctcctacacggtggagagcatctttggtacagagcccgaaccccctctcggaccgtcctccgccatgtccaagctccggggtgcagtggctgccgagggggcctctgacacggagcgagaggagcccacagagagccagggcctggctgcccggctgcggaggccatcccccccagagccctgggatgaggaggatggggcgtcttgcagcaccttctttggctctgaggagcggacggtgacctgtgtgactgtcgtggagccggaagccccacccagcccggacgtgctgcaggctgccacccacagagtcgtggagctcaggcccccttcccggtcccgctccacatccagctcccgcagcaggaagaaggccaagaggaagagggtgtccagggagcacggacggacgcgctctgggacgcgctctgaatccagggacaggagctcgaggtcagcgtcaccatcagtgggtgaggagcgccccaggaggcagcggtccaaggccaagagccggcggtcctccagtgaccgctccagcagccgagagcgagctaagaggaagaaagccaaggacaagagcagggagcacaggcggggcccctggggccacagccggaggacgtcccggtcgcggtcggggagccctggcagctcttcctatgagcactatgagagtaggaagaagaagaaaaggagatcagcgtccagacctcggggaagggagtgctcccccaccagcagcctggagaggctctgcaggcacaagcatcagcgggaacgcagccacgagcggccagacaggaaggagagtgtggcgtggccccgagaccggaggaagcggaggtcccggtccccaagctcggagcacagggcacgggagcacaggcggcctcggtcccgtgagaagtggccgcagacccggtcccattccccagagaggaagggggctgtgagggaggcttccccagcgccccttgcacagggggagccagggcgggaagacctccccaccaggttgccagccttgggggaagcacatgtctcgccggaggtggctacggccgacaaggcccccctgcaggctccccctgtcctggaggtggcagctgagtgtgagccggacgacctggacctggattatggcgactccgtggaggccggacacgtctttgatgatttctcaagcgacgccgttttcatccagctcgatgacatgagctcgccaccttctcccgaaagcacagactcttccccggagcgagacttcccactgaagcctgcgttgcccccagccagcctggccgtggccgccatccagagggaggtgtcattgatgcacgatgaagacccttcgcagcccccacccctgccagagggcacccaggagccacatttgctcaggccggacgcggctgagaaggctgaggcacccagttccccggatgtggcgcctgcggggaaggaagacagcccctctgcgagtgggagggtacaggaggcagcccggcctgaggaggtggtttcgcagacccccctgctgcggtccagagccctggtgaagcgggtcacctggaacctgcaggagtcggagagcagcgcccccgccgaggacagagccccccgggcaccacttcacaggccacagaagccccgagaaggagcctgggacatggaggatgtggcccccacaggggtcaggcaggcgttctccgagctgccctttcccagtcacgtgcttccggaacccgggttcccagacacagacccctctcaggtttacagccccggcctgccgcctgccccggcccagccctcaagcatcccaccctgcgcactggtcagccagcccacggtccagttcatccttcaggggagcctgccgctagtgggctgtggggcagcacagaccctggccccagtgcccgctgccctgaccccagcctcagagccagccagtcaagccactgcagccagcaactcggaggagaagaccccggcccccaggctagctgcggagaaaaccaagaaggaggagtacatgaagaagctgcacatgcaggagcgtgctgtggaggaggtgaagctggccatcaagcccttctaccagaagagggaggtgaccaaggaggagtacaaggacatcctgcgcaaggccgtgcagaagatctgccacagcaagagtggagagatcaaccccgtgaaggtggccaacctggtgaaggcgtacgtggacaagtacaggcacatgcgcaggcacaagaaaccagaggccggggaggagccgcccacgcagggggccgagggctgaggccaggcaatcacgggctatgcccggggagctgtcgggagtggcgggaatcggggccatgcccggggagctgtcgggagtggcgggaatcggggccatgcccggggagctgtcgggagtggcgggaaatggggggcatcaccatgcctgccgtcgggttcctgcgctgacacctggtctgtgcacc

SEQ ID NO: 164676 - DNA, 5178 bp, Homo sapiens
  Payload ID: 12443
  Gene Symbol: PHRF1
  Gene Name: PHD and ring finger domains 1
  ENST ID: ENST00000633057
  CDS Start-End: 129-4613
gagcgcacggcggcggcagaggcggcggcggccgggcctaggagcgactctcggtcgtgcagcggcggcgagcgctcgcgagcggctgcgggacgcgaggtttccggagctgagctcaatgtgcagcaatggatgacgacagcctggatgagcttgtggcccggagcccagggccggatggacacccacaggtcggccctgcggacccggcaggtgactttgaagaaagcagcgtgggcagcagtggggactctggggacgacagtgacagcgagcatggagatggcacagacggagaagacgagggggcgtctgaggaggaagacctggaagacagatctggttccgaggattctgaagacgacggggagacattgctggaggtagcgggtactcaggggaaactggaagccgctggctctttcaattctgatgatgatgcagagagctgcccaatctgtctcaacgcattcagagaccaggccgtggggacgccggagaactgtgcccattacttctgcctggactgcattgtcgaatggtccaagaatgccaattcctgtccagttgatcgaactctatttaagtgcatttgtattcgagctcaatttggtggtaaaatcttaagaaagatcccagtggagaacaccaaagcgagcgaggaggaggaggacccgaccttctgtgaggtgtgcggcaggagcgaccgtgaggacaggcttttgctctgcgacggctgcgatgcggggtaccacatggaatgcttggacccccctctccaggaggtgccggtggacgagtggttctgcccggaatgtgctgcgcctggtgttgtccttgccgctgatgcgggtcccgtgagtgaggaggaggtctccctgctcttggctgatgtggtgcccaccaccagcaggcttcggcctcgagcaggtaggacccgggcgatagccaggacacggcagagtgagagagtgagagcaaccgtgaaccggaaccggatctccacggccaggagggtccagcacacaccagggcgcctcgggtcttccctgctggatgaagccatcgaggctgtggcgactggcctgagcactgccgtgtatcagcgccccctgacgccgcgcactcccgcccgacggaagaggaagacaagaagacggaagaaagtgccgggaagaaagaaaaccccgtccggaccatccgcaaaaagtaagagctcagcgacaagatctaagaaacgccaacatcgagtgaagaagagaagagggaagaaggtaaagagtgaagccaccactcgctctcgaatcgcgcggacgctgggcctgcgcaggcctgttcacagcagctgcatcccgtcagtgttgaagccagtggagccctctttggggctgctgagagcggatattggagctgcctctctgtctctgtttggagatccttatgagctggatcccttcgacagcagtgaagagctttctgcaaaccctctttcccctctgagtgccaagagacgggctctgtcccggtcagccctgcagtcccaccagcccgtggccaggcccgtctccgtggggctttccaggaggcgcctccctgccgcggtgccagagccagacttggaggaggagccagtgcctgacctgctgggcagcatcctgtcgggccagagcctcctgatgctgggcagcagtgatgtcatcatccaccgcgacggctccctcagcgccaagagggcggctccagtttcttttcagcgaaactcaggcagtctgtccagaggggaagaaggattcaagggctgcctgcagccccgagcactgccctccgggagcccggcccaaggcccgtcaggaaacaggccacagagcacagggctcagctgtcaaggcaggtcccgcacccccgcccgcaccgcgggggcgcctgtgaggctggacttgccagcagcccctggggcggttcaggctcggaacttgtcaaatgggagtgtgcctggcttcagacagagccacagcccctggttcaacggcaccaacaagcacaccttgccccttgcctctgccgcgtctaagatctcaagcagagattctaagcccccatgtcgcagtgtggtgccggggcctcccctgaagccagcgcccagaagaacagacatctctgagctacccaggataccaaagatcaggagagatgacggtggtggcagacgggatgcggccccggcccacgggcagagcattgagatccccagtgcctgcatcagccgactgactggcagggagggcaccgggcagccagggcgaggcacacgggcagagagcgaggccagcagcagggtgccccgggagcccggggtgcacacgggcagctcccggcccccagcccccagctcccatggcagtttggccccactgggaccatcaagagggaaaggggtcgggtcgacctttgagagcttccggatcaatattcctggaaacatggcacattccagccagctctccagccctggcttctgtaacacgttccggcctgtggacgataaggagcagaggaaggagaacccctcacccctcttctccatcaagaagacgaagcagctgcggagcgaggtctacgacccatccgaccccaccggctccgactccagcgcccctggcagcagccccgagaggtctggccccggcctcctgccctctgagatcacacgaaccatctccatcaacagcccgaaggcccagacggtgcaggctgtgcgctgcgtcacctcctacacggtggagagcatctttggtacagagcccgaaccccctctcggaccgtcctccgccatgtccaagctccggggtgcagtggctgccgagggggcctctgacacggagcgagaggagcccacagagagccagggcctggctgcccggctgcggaggccatcccccccagagccctgggatgaggaggatggggcgtcttgcagcaccttctttggctctgaggagcggacggtgacctgtgtgactgtcgtggagccggaagccccacccagcccggacgtgctgcaggctgccacccacagagtcgtggagctcaggcccccttcccggtcccgctccacatccagctcccgcagcaggaagaaggccaagaggaagagggtgtccagggagcacggacggacgcgctctgggacgcgctctgaatccagggacaggagctcgaggtcagcgtcaccatcagtgggtgaggagcgccccaggaggcagcggtccaaggccaagagccggcggtcctccagtgaccgctccagcagccgagagcgagctaagaggaagaaagccaaggacaagagcagggagcacaggcggggcccctggggccacagccggaggacgtcccggtcgcggtcggggagccctggcagctcttcctatgagcactatgagagtaggaagaagaagaaaaggagatcagcgtccagacctcggggaagggagtgctcccccaccagcagcctggagaggctctgcaggcacaagcatcagcgggaacgcagccacgagcggccagacaggaaggagagtgtggcgtggccccgagaccggaggaagcggaggtcccggtccccaagctcggagcacagggcacgggagcacaggcggcctcggtcccgtgagaagtggccgcagacccggtcccattccccagagaggaagggggctgtgagggaggcttccccagcgccccttgcacagggggagccagggcgggaagacctccccaccaggttgccagccttgggggaagcacatgtctcgccggaggtggctacggccgacaaggcccccctgcaggctccccctgtcctggaggtggcagctgagtgtgagccggacgacctggacctggattatggcgactccgtggaggccggacacgtctttgatgatttctcaagcgacgccgttttcatccagctcgatgacatgagctcgccaccttctcccgaaagcacagactcttccccggagcgagacttcccactgaagcctgcgttgcccccagccagcctggccgtggccgccatccagagggaggtgtcattgatgcacgatgaagacccttcgcagcccccacccctgccagagggcacccaggagccacatttgctcaggccggacgcggctgagaaggctgaggcacccagttccccggatgtggcgcctgcggggaaggaagacagcccctctgcgagtgggagggtacaggaggcagcccggcctgaggaggtggtttcgcagacccccctgctgcggtccagagccctggtgaagcgggtcacctggaacctgcaggagtcggagagcagcgcccccgccgaggacagagccccccgggcaccacttcacaggccacagaagccccgagaaggagcctgggacatggaggatgtggcccccacaggggtcaggcaggcgttctccgagctgccctttcccagtcacgtgcttccggaacccgggttcccagacacagacccctctcagcctcagagccagccagtcaagccactgcagccagcaactcggaggagaagaccccggcccccaggctagctgcggagaaaaccaagaaggaggagtacatgaagaagctgcacatgcaggagcgtgctgtggaggaggtgaagctggccatcaagcccttctaccagaagagggaggtgaccaaggaggagtacaaggacatcctgcgcaaggccgtgcagaagatctgccacagcaagagtggagagatcaaccccgtgaaggtggccaacctggtgaaggcgtacgtggacaagtacaggcacatgcgcaggcacaagaaaccagaggccggggaggagccgcccacgcagggggccgagggctgaggccaggcaatcacgggctatgcccggggagctgtcgggagtggcgggaatcggggccatgcccggggagctgtcgggagtggcgggaatcggggccatgcccggggagctgtcgggagtggcgggaaatggggggcatcaccatgcctgccgtcgggttcctgcgctgacacctggtctgtgcacctgtgttgctcacagttgaaaactggacacttttgtatgtatattatagagacactgtttccattctaatttatcaaaaa

SEQ ID NO: 164677 - DNA, 5224 bp, Homo sapiens
  Payload ID: 12443
  Gene Symbol: PHRF1
  Gene Name: PHD and ring finger domains 1
  ENST ID: ENST00000634091
  CDS Start-End: 94-5037
gcctaggagcgactctcggtcgtgcagcggcggcgagcgctcgcgagcggctgcgggacgcgaggtttccggagctgagctcaatgtgcagcaatggatgacgacagcctggatgagcttgtggcccggagcccagggccggatggacacccacaggtcggccctgcggacccggcaggtgactttgaaagcagcgtgggcagcagtggggactctggggacgacagtgacagcgagcatggagatggcacagacggagaagacgagggggcgtctgaggaggaagacctggaagacagatctggttccgaggattctgaagacgacggggagacattgctggaggtagcgggtactcaggggaaactggaagccgctggctctttcaattctgatgatgatgcagagagctgcccaatctgtctcaacgcattcagagaccaggccgtggggacgccggagaactgtgcccattacttctgcctggactgcattgtcgaatggtccaagaatgccaattcctgtccagttgatcgaactctatttaagtgcatttgtattcgagctcaatttggtggtaaaatcttaagaaagatcccagtggagaacaccaaagcgagcgaggaggaggaggacccgaccttctgtgaggtgtgcggcaggagcgaccgtgaggacaggcttttgctctgcgacggctgcgatgcggggtaccacatggaatgcttggacccccctctccaggaggtgccggtggacgagtggttctgcccggaatgtgctgcgcctggtgttgtccttgccgctgatgcgggtcccgtgagtgaggaggaggtctccctgctcttggctgatgtggtgcccaccaccagcaggcttcggcctcgagcaggtaggacccgggcgatagccaggacacggcagagtgagagagtgagagcaaccgtgaaccggaaccggatctccacggccaggagggtccagcacacaccagggcgcctcgggtcttccctgctggatgaagccatcgaggctgtggcgactggcctgagcactgccgtgtatcagcgccccctgacgccgcgcactcccgcccgacggaagaggaagacaagaagacggaagaaagtgccgggaagaaagaaaaccccgtccggaccatccgcaaaaagtaagagctcagcgacaagatctaagaaacgccaacatcgagtgaagaagagaagagggaagaaggtaaagagtgaagccaccactcgctctcgaatcgcgcggacgctgggcctgcgcaggcctgttcacagcagctgcatcccgtcagtgttgaagccagtggagccctctttggggctgctgagagcggatattggagctgcctctctgtctctgtttggagatccttatgagctggatcccttcgacagtgaagagctttctgcaaaccctctttcccctctgagtgccaagagacgggctctgtcccggtcagccctgcagtcccaccagcccgtggccaggcccgtctccgtggggctttccaggaggcgcctccctgccgcggtgccagagccagacttggaggaggagccagtgcctgacctgctgggcagcatcctgtcgggccagagcctcctgatgctgggcagcagtgatgtcatcatccaccgcgacggctccctcagcgccaagagggcggctccagtttcttttcagcgaaactcaggcagtctgtccagaggggaagaaggattcaagggctgcctgcagccccgagcactgccctccgggagcccggcccaaggcccgtcaggaaacaggccacagagcacagggctcagctgtcaaggcaggtcccgcacccccgcccgcaccgcgggggcgcctgtgaggctggacttgccagcagcccctggggcggttcaggctcggaacttgtcaaatgggagtgtgcctggcttcagacagagccacagcccctggttcaacggcaccaacaagcacaccttgccccttgcctctgccgcgtctaagatctcaagcagagattctaagcccccatgtcgcagtgtggtgccggggcctcccctgaagccagcgcccagaagaacagacatctctgagctacccaggataccaaagatcaggagagatgacggtggtggcagacgggatgcggccccggcccacgggcagagcattgagatccccagtgcctgcatcagccgactgactggcagggagggcaccgggcagccagggcgaggcacacgggcagagagcgaggccagcagcagggtgccccgggagcccggggtgcacacgggcagctcccggcccccagcccccagctcccatggcagtttggccccactgggaccatcaagagggaaaggggtcgggtcgacctttgagagcttccggatcaatattcctggaaacatggcacattccagccagctctccagccctggcttctgtaacacgttccggcctgtggacgataaggagcagaggaaggagaacccctcacccctcttctccatcaagaagacgaagcagctgcggagcgaggtctacgacccatccgaccccaccggctccgactccagcgcccctggcagcagccccgagaggtctggccccggcctcctgccctctgagatcacacgaaccatctccatcaacagcccgaaggcccagacggtgcaggctgtgcgctgcgtcacctcctacacggtggagagcatctttggtacagagcccgaaccccctctcggaccgtcctccgccatgtccaagctccggggtgcagtggctgccgagggggcctctgacacggagcgagaggagcccacagagagccagggcctggctgcccggctgcggaggccatcccccccagagccctgggatgaggaggatggggcgtcttgcagcaccttctttggctctgaggagcggacggtgacctgtgtgactgtcgtggagccggaagccccacccagcccggacgtgctgcaggctgccacccacagagtcgtggagctcaggcccccttcccggtcccgctccacatccagctcccgcagcaggaagaaggccaagaggaagagggtgtccagggagcacggacggacgcgctctgggacgcgctctgaatccagggacaggagctcgaggtcagcgtcaccatcagtgggtgaggagcgccccaggaggcagcggtccaaggccaagagccggcggtcctccagtgaccgctccagcagccgagagcgagctaagaggaagaaagccaaggacaagagcagggagcacaggcggggcccctggggccacagccggaggacgtcccggtcgcggtcggggagccctggcagctcttcctatgagcactatgagagtaggaagaagaagaaaaggagatcagcgtccagacctcggggaagggagtgctcccccaccagcagcctggagaggctctgcaggcacaagcatcagcgggaacgcagccacgagcggccagacaggaaggagagtgtggcgtggccccgagaccggaggaagcggaggtcccggtccccaagctcggagcacagggcacgggagcacaggcggcctcggtcccgtgagaagtggccgcagacccggtcccattccccagagaggaagggggctgtgagggaggcttccccagcgccccttgcacagggggagccagggcgggaagacctccccaccaggttgccagccttgggggaagcacatgtctcgccggaggtggctacggccgacaaggcccccctgcaggctccccctgtcctggaggtggcagctgagtgtgagccggacgacctggacctggattatggcgactccgtggaggccggacacgtctttgatgatttctcaagcgacgccgttttcatccagctcgatgacatgagctcgccaccttctcccgaaagcacagactcttccccggagcgagacttcccactgaagcctgcgttgcccccagccagcctggccgtggccgccatccagagggaggtgtcattgatgcacgatgaagacccttcgcagcccccacccctgccagagggcacccaggagccacatttgctcaggccggacgcggctgagaaggctgaggcacccagttccccggatgtggcgcctgcggggaaggaagacagcccctctgcgagtgggagggtacaggaggcagcccggcctgaggaggtggtttcgcagacccccctgctgcggtccagagccctggtgaagcgggtcacctggaacctgcaggagtcggagagcagcgcccccgccgaggacagagccccccgggcaccacttcacaggccacagaagccccgagaaggagcctgggacatggaggatgtggcccccacaggggtcaggcaggcgttctccgagctgccctttcccagtcacgtgcttccggaacccgggttcccagacacagacccctctcaggtttacagccccggcctgccgcctgccccggcccagccctcaagcatcccaccctgcgcactggtcagccagcccacggtccagttcatccttcaggggagcctgccgctagtgggctgtggggcagcacagaccctggccccagtgcccgctgccctgaccccagcctcagagccagccagtcaagccactgcagccagcaactcggaggagaagaccccggcccccaggctagctgcggagaaaaccaagaaggaggagtacatgaagaagctgcacatgcaggagcgtgctgtggaggaggtgaagctggccatcaagcccttctaccagaagagggaggtgaccaaggaggagtacaaggacatcctgcgcaaggccgtgcagaagatctgccacagcaagagtggagagatcaaccccgtgaaggtggccaacctggtgaaggcgtacgtggacaagtacaggcacatgcgcaggcacaagaaaccagaggccggggaggagccgcccacgcagggggccgagggctgaggccaggcaatcacgggctatgcccggggagctgtcgggagtggcgggaatcggggccatgcccggggagctgtcgggagtggcgggaatcggggccatgcccggggagctgtcgggagtggcgggaaatggggggcatcaccatgcctgccgtcgggttcctgcgctgacacctggtctgtgcacc

SEQ ID NO: 164678 - DNA, 2224 bp, Homo sapiens
  Payload ID: 12444
  Gene Symbol: PHF1
  Gene Name: PHD finger protein 1
  Uniprot ID: O43189
  ENST ID: ENST00000374512
  CDS Start-End: 272-1645
caccctcccccccaaccggtccgtccctcccctccctccctcccccccgccgcctcctcctcctgccgctgccgctgctttggctgctgcgtcatacgccccagagccgccgggacggaggggctgggcctggggaccccccggcctccgcctgcacgcccccccacgcccggacgtgccctctccgcgcgggggactcgcctaggtctcctacgtctgcccctgcccggctcccggcggccccagctgtcaccggcccccccaggatgcaatggcgcagcccccccggctgagccgctctggtgcctcctcactttgggacccagcttctcctgctcccacctctggccccaggcctcggctttgggagggtcaagatgtgctggccagatggactgatgggctgctatacttgggtaccatcaaaaaggtggacagtgctagggaggtgtgtctggtccagtttgaggatgattcgcagtttctggttctatggaaagacattagccctgctgccctccctggagaggaactcctctgttgtgtctgtcgctctgagactgtggtccctgggaaccggctggtcagctgtgagaagtgtcgccatgcttatcaccaggactgccatgttcccagggctccagcccctggagagggagagggcacatcctgggtatgccgccagtgtgtctttgcgatcgccaccaagaggggaggtgccctgaagaagggcccctatgcccgggccatgctgggtatgaagctttctctgccatatggactgaaggggctggactgggatgctggacatctgagcaaccgacagcagagttactgttactgtggtggccctggggagtggaacctgaaaatgctgcagtgccggagctgcctgcagtggttccatgaggcctgcacccagtgtctgagcaagcccctcctctatggggacaggttctatgaatttgaatgctgtgtgtgtcgcgggggccctgagaaagtccggagactacagcttcgctgggtggatgtggcccatcttgtcctgtatcacctcagtgtttgctgtaagaagaaatactttgattttgatcgtgagatcctccccttcacttctgagaattgggacagtttgctcctgggggagctttcagacacccccaaaggagaacgttcttccaggctcctctctgctcttaacagccacaaggaccgtttcatttcagggagagagattaagaagaggaaatgtttgtttggtctccatgctcggatgcctccccctgtggagccccctactggagatggagcactcaccagggcagggccctgggggaggggtctcacgtcccctggggaagcgccggaggccggagccagagcccctgaggaggaggcagaaggggaaagtggaggagctggggccaccctcagcagtgcgcaatcagcccgagccccaggagcagagggagcgggctcatctgcagagggcactgcagcagccccatccggatgtttgcttccttccacccttctgccagcaccgcagggacctctggggacagtggacccccagacaggtcacccctggaacttcacattggtttccccacagacatccctaaaagtgccccccactcgatgactgcctcatcttcctcagtttcatccccatccccaggtcttcctagacgctcagcacccccttctcccctgtgccgtagtttgtctcctgggactgggggaggagtccgaggtggggttggttacctgtcccgaggggaccctgtccgggtccttgctcggagagtacggcctgatggctctgtgcagtacctggttgagtggggaggagggggcatcttctgaacagcctgcctctgcccagctccccattcacacacaccggcactttcataccctgacctctgacctcacctacagctgggatgtacctggagagatagggggtagttctccctactgcccaggctggaatccaagagtggggagtggggaagaggccctcttctctaccctccttcatgattcctgacccctcccatccttcccatttcctttgatgttattttgttacagctttttaaatattttttaaaattatttaacccctgggggcagagactgaggagggaggatgataagggatcccggactctgtatgattgaaataaagagaaataaacaaatctagcagctctga

SEQ ID NO: 164679 - DNA, 2330 bp, Homo sapiens
  Payload ID: 12444
  Gene Symbol: PHF1
  Gene Name: PHD finger protein 1
  Uniprot ID: O43189
  ENST ID: ENST00000374516
  CDS Start-End: 272-1975
caccctcccccccaaccggtccgtccctcccctccctccctcccccccgccgcctcctcctcctgccgctgccgctgctttggctgctgcgtcatacgccccagagccgccgggacggaggggctgggcctggggaccccccggcctccgcctgcacgcccccccacgcccggacgtgccctctccgcgcgggggactcgcctaggtctcctacgtctgcccctgcccggctcccggcggccccagctgtcaccggcccccccaggatgcaatggcgcagcccccccggctgagccgctctggtgcctcctcactttgggacccagcttctcctgctcccacctctggccccaggcctcggctttgggagggtcaagatgtgctggccagatggactgatgggctgctatacttgggtaccatcaaaaaggtggacagtgctagggaggtgtgtctggtccagtttgaggatgattcgcagtttctggttctatggaaagacattagccctgctgccctccctggagaggaactcctctgttgtgtctgtcgctctgagactgtggtccctgggaaccggctggtcagctgtgagaagtgtcgccatgcttatcaccaggactgccatgttcccagggctccagcccctggagagggagagggcacatcctgggtatgccgccagtgtgtctttgcgatcgccaccaagaggggaggtgccctgaagaagggcccctatgcccgggccatgctgggtatgaagctttctctgccatatggactgaaggggctggactgggatgctggacatctgagcaaccgacagcagagttactgttactgtggtggccctggggagtggaacctgaaaatgctgcagtgccggagctgcctgcagtggttccatgaggcctgcacccagtgtctgagcaagcccctcctctatggggacaggttctatgaatttgaatgctgtgtgtgtcgcgggggccctgagaaagtccggagactacagcttcgctgggtggatgtggcccatcttgtcctgtatcacctcagtgtttgctgtaagaagaaatactttgattttgatcgtgagatcctccccttcacttctgagaattgggacagtttgctcctgggggagctttcagacacccccaaaggagaacgttcttccaggctcctctctgctcttaacagccacaaggaccgtttcatttcagggagagagattaagaagaggaaatgtttgtttggtctccatgctcggatgcctccccctgtggagccccctactggagatggagcactcaccagcttcccttcagggcagggccctgggggaggggtctcacgtcccctggggaagcgccggaggccggagccagagcccctgaggaggaggcagaaggggaaagtggaggagctggggccaccctcagcagtgcgcaatcagcccgagccccaggagcagagggagcgggctcatctgcagagggcactgcaggcctcagtgtctccaccatcccccagccctaaccagagttaccagggcagcagcggctacaacttccggcccacagatgcccgctgcctgcccagcagccccatccggatgtttgcttccttccacccttctgccagcaccgcagggacctctggggacagtggacccccagacaggtcacccctggaacttcacattggtttccccacagacatccctaaaagtgccccccactcgatgactgcctcatcttcctcagtttcatccccatccccaggtcttcctagacgctcagcacccccttctcccctgtgccgtagtttgtctcctgggactgggggaggagtccgaggtggggttggttacctgtcccgaggggaccctgtccgggtccttgctcggagagtacggcctgatggctctgtgcagtacctggttgagtggggaggagggggcatcttctgaacagcctgcctctgcccagctccccattcacacacaccggcactttcataccctgacctctgacctcacctacagctgggatgtacctggagagatagggggtagttctccctactgcccaggctggaatccaagagtggggagtggggaagaggccctcttctctaccctccttcatgattcctgacccctcccatccttcccatttcctttgatgttattttgttacagctttttaaatattttttaaaattatttaacccctgggggcagagactgaggagggaggatgataagggatcccggactctgtatgattgaaataaagagaaataaacaaatctagcagctctga

SEQ ID NO: 164680 - DNA, 2330 bp, Homo sapiens
  Payload ID: 12444
  Gene Symbol: PHF1
  Gene Name: PHD finger protein 1
  Uniprot ID: O43189
  ENST ID: ENST00000427869
  CDS Start-End: 272-1975
caccctcccccccaaccggtccgtccctcccctccctccctcccccccgccgcctcctcctcctgccgctgccgctgctttggctgctgcgtcatacgccccagagccgccgggacggaggggctgggcctggggaccccccggcctccgcctgcacgcccccccacgcccggacgtgccctctccgcgcgggggactcgcctaggtctcctacgtctgcccctgcccggctcccggcggccccagctgtcaccggcccccccaggatgcaatggcgcagcccccccggctgagccgctctggtgcctcctcactttgggacccagcttctcctgctcccacctctggccccaggcctcggctttgggagggtcaagatgtgctggccagatggactgatgggctgctatacttgggtaccatcaaaaaggtggacagtgctagggaggtgtgtctggtccagtttgaggatgattcgcagtttctggttctatggaaagacattagccctgctgccctccctggagaggaactcctctgttgtgtctgtcgctctgagactgtggtccctgggaaccggctggtcagctgtgagaagtgtcgccatgcttatcaccaggactgccatgttcccagggctccagcccctggagagggagagggcacatcctgggtatgccgccagtgtgtctttgcgatcgccaccaagaggggaggtgccctgaagaagggcccctatgcccgggccatgctgggtatgaagctttctctgccatatggactgaaggggctggactgggatgctggacatctgagcaaccgacagcagagttactgttactgtggtggccctggggagtggaacctgaaaatgctgcagtgccggagctgcctgcagtggttccatgaggcctgcacccagtgtctgagcaagcccctcctctatggggacaggttctatgaatttgaatgctgtgtgtgtcgcgggggccctgagaaagtccggagactacagcttcgctgggtggatgtggcccatcttgtcctgtatcacctcagtgtttgctgtaagaagaaatactttgattttgatcgtgagatcctccccttcacttctgagaattgggacagtttgctcctgggggagctttcagacacccccaaaggagaacgttcttccaagctcctctctgctcttaacagccacaaggaccgtttcatttcagggagagagattaagaagaggaaatgtttgtttggtctccatgctcggatgcctccccctgtggagccccctactggagatggagcactcaccagcttcccttcagggcagggccctgggggaggggtctcacgtcccctggggaagcgccggaggccggagccagagcccctgaggaggaggcagaaggggaaagtggaggagctggggccaccctcagcagtgcgcaatcagcccgagccccaggagcagagggagcgggctcatctgcagagggcactgcaggcctcagtgtctccaccatcccccagccctaaccagagttaccagggcagcagcggctacaacttccggcccacagatgcccgctgcctgcccagcagccccatccggatgtttgcttccttccacccttctgccagcaccgcagggacctctggggacagtggacccccagacaggtcacccctggaacttcacattggtttccccacagacatccctaaaagtgccccccactcgatgactgcctcatcttcctcagtttcatccccatccccaggtcttcctagacgctcagcacccccttctcccctgtgccgtagtttgtctcctgggactgggggaggagtccgaggtggggttggttacctgtcccgaggggaccctgtccgggtccttgctcggagagtacggcctgatggctctgtgcagtacctggttgagtggggaggagggggcatcttctgaacagcctgcctctgcccagctccccattcacacacaccggcactttcataccctgacctctgacctcacctacagctgggatgtacctggagagatagggggtagttctccctactgcccaggctggaatccaagagtggggagtggggaagaggccctcttctctaccctccttcatgattcctgacccctcccatccttcccatttcctttgatgttattttgttacagctttttaaatattttttaaaattatttaacccctgggggcagagactgaggagggaggatgataagggatcccggactctgtatgattgaaataaagagaaataaacaaatctagcagctctga

SEQ ID NO: 164681 - DNA, 836 bp, Homo sapiens
  Payload ID: 12444
  Gene Symbol: PHF1
  Gene Name: PHD finger protein 1
  ENST ID: ENST00000428274
  CDS Start-End: 154-836
ttccctcgtgccccaagggcgaatctcaggtcggaggaaggggctgaggggattccctctcccaccgggtccgactcttcgctccccaagccgcggagggccagcctcttcttcggcgccctccaggcctgttggaggcccccccaggatgcaatggcgcagcccccccggctgagccgctctggtgcctcctcactttgggacccagcttctcctgctcccacctctggccccaggcctcggctttgggagggtcaagatgtgctggccagatggactgatgggctgctatacttgggtaccatcaaaaaggtggacagtgctagggaggtgtgtctggtccagtttgaggatgattcgcagtttctggttctatggaaagacattagccctgctgccctccctggagaggaactcctctgttgtgtctgtcgctctgagactgtggtccctgggaaccggctggtcagctgtgagaagtgtcgccatgcttatcaccaggactgccatgttcccagggctccagcccctggagagggagagggcacatcctgggtatgccgccagtgtgtctttgcgatcgccaccaagaggggaggtgccctgaagaagggcccctatgcccgggccatgctgggtatgaagctttctctgccatatggactgaaggggctggactgggatgctggacatctgagcaaccgacagcagagttactgttactgtggtggccctggggagtggaacctgaaaatgctgcagtgccggagctgcctgcagtggttccatgaggcctgcacccagtgtctgagcaagcccctcctctatggggacag

SEQ ID NO: 164682 - DNA, 609 bp, Homo sapiens
  Payload ID: 12444
  Gene Symbol: PHF1
  Gene Name: PHD finger protein 1
  ENST ID: ENST00000421466
  CDS Start-End: 174-609
aagcacggggcgggacgtccacgggaagcggcgcgcacgcccgccgactccctcgcgccaaccgccgacggccgccgcccggtgaaggaggggctcagtcctcccaggtctcctacgtctgcccctgcccggctcccggcggccccagctgtcaccggcccccccaggatgcaatggcgcagcccccccggctgagccgctctggtgcctcctcactttgggacccagcttctcctgctcccacctctggccccaggcctcggctttgggagggtcaagatgtgctggccagatggactgatgggctgctatacttgggtaccatcaaaaaggtggacagtgctagggaggtgtgtctggtccagtttgaggatgattcgcagtttctggttctatggaaagacattagccctgctgccctccctggagaggaactcctctgttgtgtctgtcgctctgagactgtggtccctgggaaccggctggtcagctgtgagaagtgtcgccatgcttatcaccaggactgccatgttcccagggctccagcccctggagagggagagggcacatcctgggtatgccgccagtgtgtctttgcgatcgccacca

SEQ ID NO: 164683 - DNA, 836 bp, Homo sapiens; identical to SEQ ID NO: 164681
  Payload ID: 12444
  Gene Symbol: PHF1
  Gene Name: PHD finger protein 1
  ENST ID: ENST00000447305
  CDS Start-End: 154-836

SEQ ID NO: 164684 - DNA, 862 bp, Homo sapiens
  Payload ID: 12444
  Gene Symbol: PHF1
  Gene Name: PHD finger protein 1
  ENST ID: ENST00000423868
  CDS Start-End: 1-546
tggggccaccctcagcagtgcgcaatcagcccgagccccaggagcagagggagcgggctcatctgcagagggcactgcaggcctcagtgtctccaccatcccccagccctaaccagagttaccagggcagcagcggctacaacttccggcccacagatgcccgctgcctgcccaggtcaccccatccggatgtttgcttccttccacccttctgccagcaccgcagggacctctggggacagtggacccccagacaggtcacccctggaacttcacattggtttccccacagacatccctaaaagtgccccccactcgatgactgcctcatcttcctcagtttcatccccatccccaggtcttcctagacgctcagcacccccttctcccctgtgccgtagtttgtctcctgggactgggggaggagtccgaggtggggttggttacctgtcccgaggggaccctgtccgggtccttgctcggagagtacggcctgatggctctgtgcagtacctggttgagtggggaggagggggcatcttctgaacagcctgcctctgcccagctccccattcacacacaccggcactttcataccctgacctctgacctcacctacagctgggatgtacctggagagatagggggtagttctccctactgcccaggctggaatccaagagtggggagtggggaagaggccctcttctctaccctccttcatgattcctgacccctcccatccttcccatttcctttgatgttattttgttacagctttttaaatattttttaaaattatttaacccctgggggcagagactgaggagggaggatgataagggatcccggactctgtatg

SEQ ID NO: 164685 - DNA, 862 bp, Homo sapiens; identical to SEQ ID NO: 164684
  Payload ID: 12444
  Gene Symbol: PHF1
  Gene Name: PHD finger protein 1
  ENST ID: ENST00000427826
  CDS Start-End: 1-112

SEQ ID NO: 164686 - DNA, 2224 bp, Homo sapiens
  Payload ID: 12444
  Gene Symbol: PHF1
  Gene Name: PHD finger protein 1
  Uniprot ID: O43189
  ENST ID: ENST00000454914
  CDS Start-End: 272-1645
caccctcccccccaaccggtccgtccctcccctccctccctcccccccgccgcctcctcctcctgccgctgccgctgctttggctgctgcgtcatacgccccagagccgccgggacggaggggctgggcctggggaccccccggcctccgcctgcacgcccccccacgcccggacgtgccctctccgcgcgggggactcgcctaggtctcctacgtctgcccctgcccggctcccggcggccccagctgtcaccggcccccccaggatgcaatggcgcagcccccccggctgagccgctctggtgcctcctcactttgggacccagcttctcctgctcccacctctggccccaggcctcggctttgggagggtcaagatgtgctggccagatggactgatgggctgctatacttgggtaccatcaaaaaggtggacagtgctagggaggtgtgtctggtccagtttgaggatgattcgcagtttctggttctatggaaagacattagccctgctgccctccctggagaggaactcctctgttgtgtctgtcgctctgagactgtggtccctgggaaccggctggtcagctgtgagaagtgtcgccatgcttatcaccaggactgccatgttcccagggctccagcccctggagagggagagggcacatcctgggtatgccgccagtgtgtctttgcgatcgccaccaagaggggaggtgccctgaagaagggcccctatgcccgggccatgctgggtatgaagctttctctgccatatggactgaaggggctggactgggatgctggacatctgagcaaccgacagcagagttactgttactgtggtggccctggggagtggaacctgaaaatgctgcagtgccggagctgcctgcagtggttccatgaggcctgcacccagtgtctgagcaagcccctcctctatggggacaggttctatgaatttgaatgctgtgtgtgtcgcgggggccctgagaaagtccggagactacagcttcgctgggtggatgtggcccatcttgtcctgtatcacctcagtgtttgctgtaagaagaaatactttgattttgatcgtgagatcctccccttcacttctgagaattgggacagtttgctcctgggggagctttcagacacccccaaaggagaacgttcttccaagctcctctctgctcttaacagccacaaggaccgtttcatttcagggagagagattaagaagaggaaatgtttgtttggtctccatgctcggatgcctccccctgtggagccccctactggagatggagcactcaccagggcagggccctgggggaggggtctcacgtcccctggggaagcgccggaggccggagccagagcccctgaggaggaggcagaaggggaaagtggaggagctggggccaccctcagcagtgcgcaatcagcccgagccccaggagcagagggagcgggctcatctgcagagggcactgcagcagccccatccggatgtttgcttccttccacccttctgccagcaccgcagggacctctggggacagtggacccccagacaggtcacccctggaacttcacattggtttccccacagacatccctaaaagtgccccccactcgatgactgcctcatcttcctcagtttcatccccatccccaggtcttcctagacgctcagcacccccttctcccctgtgccgtagtttgtctcctgggactgggggaggagtccgaggtggggttggttacctgtcccgaggggaccctgtccgggtccttgctcggagagtacggcctgatggctctgtgcagtacctggttgagtggggaggagggggcatcttctgaacagcctgcctctgcccagctccccattcacacacaccggcactttcataccctgacctctgacctcacctacagctgggatgtacctggagagatagggggtagttctccctactgcccaggctggaatccaagagtggggagtggggaagaggccctcttctctaccctccttcatgattcctgacccctcccatccttcccatttcctttgatgttattttgttacagctttttaaatattttttaaaattatttaacccctgggggcagagactgaggagggaggatgataagggatcccggactctgtatgattgaaataaagagaaataaacaaatctagcagctctga

SEQ ID NO: 164687 - DNA, 609 bp, Homo sapiens; identical to SEQ ID NO: 164682
  Payload ID: 12444
  Gene Symbol: PHF1
  Gene Name: PHD finger protein 1
  ENST ID: ENST00000427004
  CDS Start-End: 174-609

SEQ ID NO: 164688 - DNA, 728 bp, Homo sapiens
  Payload ID: 12444
  Gene Symbol: PHF1
  Gene Name: PHD finger protein 1
  ENST ID: ENST00000419154
  CDS Start-End: 1-728
ctctctgctcttaacagccacaaggaccgtttcatttcagggagagagattaagaagaggaaatgtttgtttggtctccatgctcggatgcctccccctgtggagccccctactggagatggagcactcaccagggcagggccctgggggaggggtctcacgtcccctggggaagcgccggaggccggagccagagcccctgaggaggaggcagaaggggaaagtggaggagctggggccaccctcagcagtgcgcaatcagcccgagccccaggagcagagggagcgggctcatctgcagagggcactgcaggcctcagtgtctccaccatcccccagccctaaccagagttaccagggcagcagcggctacaacttccggcccacagatgcccgctgcctgcccagccccatccggatgtttgcttccttccacccttctgccagcaccgcagggacctctggggacagtggacccccagacaggtcacccctggaacttcacattggtttccccacagacatccctaaaagtgccccccactcgatgactgcctcatcttcctcagtttcatccccatccccaggtcttcctagacgctcagcacccccttctcccctgtgccgtagtttgtctcctgggactgggggaggagtccgaggtggggttggttacctgtcccgaggggaccctgtccgggtccttgctcggagagtacggcctgatg

SEQ ID NO: 164689 - DNA, 1930 bp, Homo sapiens
  Payload ID: 12444
  Gene Symbol: PHF1
  Gene Name: PHD finger protein 1
  ENST ID: ENST00000487667
  CDS Start-End: 543-1724
agctaacggatgtggcatggggcgggggaccaggccggaggcgggctgccgggaggggggattccctcgtgccccaagggcgaatctcaggtcggaggaaggggctgaggggattccctctcccaccgggtccgactcttcgctccccaagccgcggagggccagcctcttcttcggcgccctccaggcctgttggaggtgagggaggtggggtgaggtggtgcccgcccccccctccggctcctcctttcccccagtcctcccctcccaccaccctcccccccaaccggtccgtccctcccctccctccctcccccccgccgcctcctcctcctgccgctgccgctgctttggctgctgcgtcatacgccccagagccgccgggacggaggggctgggcctggggaccccccggcctccgcctgcacgcccccccacgcccggacgtgccctctccgcgcgggggactcgcctaggtctcctacgtctgcccctgcccggctcccggcggccccagctgtcaccggcccccccaggatgcaatggcgcagcccccccggctgagccgctctggtgcctcctcactttgggacccagcttctcctgctcccacctctggccccaggcctcggctttgggagggtcaagatgtgctggccagatggactgatgggctgctatacttgggtaccatcaaaaaggtggacagtgctagggaggtgtgtctggtccagtttgaggatgattcgcagtttctggttctatggaaagacattagccctgctgccctccctggagaggaactcctctgttgtgtctgtcgctctgagactgtggtccctgggaaccggctggtcagctgtgagaagtgtcgccatgcttatcaccaggactgccatgttcccagggctccagcccctggagagggagagggcacatcctgggtatgccgccagtgtgtctttgcgatcgccaccaagaggggaggtgccctgaagaagggcccctatgcccgggccatgctgggtatgaagctttctctgccatatggactgaaggggctggactgggatgctggacatctgagcaaccgacagcagagttactgttactgtggtggccctggggagtggaacctgaaaatgctgcagtgccggagctgcctgcagtggttccatgaggcctgcacccagtgtctgagcaagcccctcctctatggggacaggttctatgaatttgaatgctgtgtgtgtcgcgggggccctgagaaagtccggagactacagcttcgctgggtggatgtggcccatcttgtcctgtatcacctcagtgtttgctgtaagaagaaatactttgattttgatcgtgagatcctccccttcacttctgagaattgggacagtttgctcctgggggagctttcagacacccccaaaggagaacgttcttccaggctcctctctgctcttaacagccacaaggaccgtttcatttcagggagagagattaagaagaggaaatgtttgtttggtctccatgctcggatgcctccccctgtggagccccctactggagatggagcactcaccagcttcccttcagggcagggccctgggggaggggtctcacgtcccctggggaagcgccggaggccggagccagagcccctgaggaggaggcagaaggggaaagtggaggagctggggccaccctcagcaccctaaccagagttaccagggcagcagcggctacaacttccggcccacagatgcccgctgcctgcccagcagccccatccggatgtttgcttccttccacccttctgccagcaccgcagggacctctggggacagtggacccccagacaggtcacccctggaacttcacattggtttccccacagacatccctaaaagtgccccccactcga

SEQ ID NO: 164690 - DNA, 1930 bp, Homo sapiens
  Payload ID: 12444
  Gene Symbol: PHF1
  Gene Name: PHD finger protein 1
  ENST ID: ENST00000495185
  CDS Start-End: 543-1724
agctaacggatgtggcatggggcgggggaccaggccggaggcgggctgccgggaggggggattccctcgtgccccaagggcgaatctcaggtcggaggaaggggctgaggggattccctctcccaccgggtccgactcttcgctccccaagccgcggagggccagcctcttcttcggcgccctccaggcctgttggaggtgagggaggtggggtgaggtggtgcccgcccccccctccggctcctcctttcccccagtcctcccctcccaccaccctcccccccaaccggtccgtccctcccctccctccctcccccccgccgcctcctcctcctgccgctgccgctgctttggctgctgcgtcatacgccccagagccgccgggacggaggggctgggcctggggaccccccggcctccgcctgcacgcccccccacgcccggacgtgccctctccgcgcgggggactcgcctaggtctcctacgtctgcccctgcccggctcccggcggccccagctgtcaccggcccccccaggatgcaatggcgcagcccccccggctgagccgctctggtgcctcctcactttgggacccagcttctcctgctcccacctctggccccaggcctcggctttgggagggtcaagatgtgctggccagatggactgatgggctgctatacttgggtaccatcaaaaaggtggacagtgctagggaggtgtgtctggtccagtttgaggatgattcgcagtttctggttctatggaaagacattagccctgctgccctccctggagaggaactcctctgttgtgtctgtcgctctgagactgtggtccctgggaaccggctggtcagctgtgagaagtgtcgccatgcttatcaccaggactgccatgttcccagggctccagcccctggagagggagagggcacatcctgggtatgccgccagtgtgtctttgcgatcgccaccaagaggggaggtgccctgaagaagggcccctatgcccgggccatgctgggtatgaagctttctctgccatatggactgaaggggctggactgggatgctggacatctgagcaaccgacagcagagttactgttactgtggtggccctggggagtggaacctgaaaatgctgcagtgccggagctgcctgcagtggttccatgaggcctgcacccagtgtctgagcaagcccctcctctatggggacaggttctatgaatttgaatgctgtgtgtgtcgcgggggccctgagaaagtccggagactacagcttcgctgggtggatgtggcccatcttgtcctgtatcacctcagtgtttgctgtaagaagaaatactttgattttgatcgtgagatcctccccttcacttctgagaattgggacagtttgctcctgggggagctttcagacacccccaaaggagaacgttcttccaagctcctctctgctcttaacagccacaaggaccgtttcatttcagggagagagattaagaagaggaaatgtttgtttggtctccatgctcggatgcctccccctgtggagccccctactggagatggagcactcaccagcttcccttcagggcagggccctgggggaggggtctcacgtcccctggggaagcgccggaggccggagccagagcccctgaggaggaggcagaaggggaaagtggaggagctggggccaccctcagcaccctaaccagagttaccagggcagcagcggctacaacttccggcccacagatgcccgctgcctgcccagcagccccatccggatgtttgcttccttccacccttctgccagcaccgcagggacctctggggacagtggacccccagacaggtcacccctggaacttcacattggtttccccacagacatccctaaaagtgccccccactcga

SEQ ID NO: 164691 - DNA, 1752 bp, Homo sapiens
  Payload ID: 12444
  Gene Symbol: PHF1
  Gene Name: PHD finger protein 1
  ENST ID: ENST00000495509
  CDS Start-End: 107-1366
acgcccggacgtgccctctccgcgcgggggactcgcctaggtctcctacgtctgcccctgcccggctcccggcggccccagctgtcaccggcccccccaggatgcaatggcgcagcccccccggctgagccgctctggtgcctcctcactttgggacccagcttctcctgctcccacctctggccccaggcctcggctttgggagggtcaagatgtgctggccagatggactgatgggctgctatacttgggtaccatcaaaaaggtggacagtgctagggaggtgtgtctggtccagtttgaggatgattcgcagtttctggttctatggaaagacattagccctgctgccctccctggagaggaactcctctgttgtgtctgtcgctctgagactgtggtccctgggaaccggctggtcagctgtgagaagtgtcgccatgcttatcaccaggactgccatgttcccagggctccagcccctggagagggagagggcacatcctgggtatgccgccagtgtgtctttgcgatcgccaccaagaggggaggtgccctgaagaagggcccctatgcccgggccatgctgggtatgaagctttctctgccatatggactgaaggggctggactgggatgctggacatctgagcaaccgacagcagagttactgttactgtggtggccctggggagtggaacctgaaaatgctgcagtgccggagctgcctgcagtggttccatgaggcctgcacccagtgtctgagcaagcccctcctctatggggacaggttctatgaatttgaatgctgtgtgtgtcgcgggggccctgagaaagtccggagactacagcttcgctgggtggatgtggcccatcttgtcctgtatcacctcagtgtttgctgtaagaagaaatactttgattttgatcgtgagatcctccccttcacttctgagaattgggacagtttgctcctgggggagctttcagacacccccaaaggagaacgttcttccaggctcctctctgctcttaacagccacaaggaccgtttcatttcagggagagagattaagaagaggaaatgtttgtttggtctccatgctcggatgcctccccctgtggagccccctactggagatggagcactcaccagggcagggccctgggggaggggtctcacgtcccctggggaagcgccggaggccggagccagagcccctgaggaggaggcagaaggggaaagtggaggagctggggccaccctcagcagtgcgcaatcagcccgagccccaggagcagagggagcgggctcatctgcagagggcactgcaggcctcagtgtctccaccatcccccagccctaaccagagttaccagggcagcagcggctacaacttccggcccacagatgcccgctgcctgcccagcagccccatccggatgtttgcttccttccacccttctgccagcaccgcagggacctctggggacagtggacccccagacaggtcacccctggaacttcacattggtttccccacagacatccctaaaagtgccccccactcgatgactgcctcatcttcctcagtttcatccccatccccaggtcttcctagacgctcagcacccccttctcccctgtgccgtagtttgtctcctgggactgggggaggagtccgaggtggggttggttacctgtcccgaggggaccctgtccgggtccttgctcggagagtacggcctgatg

SEQ ID NO: 164692 - DNA, 1189 bp, Homo sapiens
  Payload ID: 12444
  Gene Symbol: PHF1
  Gene Name: PHD finger protein 1
  ENST ID: ENST00000475137
  CDS Start-End: 685-849
cctgcagtggttccatgaggcctgcacccagtgtctgagcaagcccctcctctatggggacaggttctatgaatttgaatgctgtgtgtgtcgcgggggccctgagaaagtccggagactacagcttcgctgggtggatgtggcccatcttgtcctgtatcacctcagtgtttgctgtaagaagaaatactttgattttgatcgtgagatcctccccttcacttctgagaattgggacagtttgctcctgggggagctttcagacacccccaaaggagaacgttcttccaagctcctctctgctcttaacagccacaaggaccgtttcatttcagggagagagattaagaagaggaaatgtttgtttggtctccatgctcggatgcctccccctgtggagccccctactggagatggagcactcaccagggcagggccctgggggaggggtctcacgtcccctggggaagcgccggaggccggagccagagcccctgaggaggaggcagaaggggaaagtggaggagctggggccaccctcagcagtgcgcaatcagcccgagccccaggagcagagggagcgggctcatctgcagagggcactgcaggcctcagtgtctccaccatcccccagccctaaccagagttaccagggcagcagcggctacaacttccggcccacagatgcccgctgcctgcccagcagccccatccggatgtttgcttccttccacccttctgccagcaccgcagggacctctggggacagtggacccccagacaggtcacccctggaacttcacattggtttccccacagacatccctaaaagtgccccccactcgatgactgcctcatcttcctcagtttcatccccatccccaggtcttcctagacgctcagcacccccttctcccctgtgccgtagtttgtctcctgggactgggggaggagtccgaggtggggttggttacctgtcccgaggggaccctgtccgggtccttgctcggagagtacggcctgatggctctgtgcagtacctggttgagtggggaggagggggcatcttctgaacagcctgcctctgcccagctccccattcacacacaccggcactttcataccctgacctctgacctcacctacagctgggatgtacctggagagatagggggtagttctccctact

SEQ ID NO: 164693 - DNA, 461 bp, Homo sapiens
  Payload ID: 12444
  Gene Symbol: PHF1
  Gene Name: PHD finger protein 1
  ENST ID: ENST00000459809
  CDS Start-End: 147-311
gtgccccaagggcgaatctcaggtcggaggaaggggctgaggggattccctctcccaccgggtccgactcttcgctccccaagccgcggagggccagcctcttcttcggcgccctccaggcctgttggaggcccccccaggatgcaatggcgcagcccccccggctgagccgctctggtgcctcctcactttgggacccagcttctcctgctcccacctctggccccaggcctcggctttgggagggtcaagatgtgctggccagatggactgatgggctgctatacttgggtaccatcaaaaagtgctagggaggtgtgtctggtccagtttgaggatgattcgcagtttctggttctatggaaagacattagccctgctgccctccctggagaggaactcctctgttgtgtctgtcgctctgagactgtggtccctgggaaccggctggtcagctgtga

SEQ ID NO: 164694 - DNA, 1719 bp, Homo sapiens
  Payload ID: 12445
  Gene Symbol: PHF10
  Gene Name: PHD finger protein 10
  Uniprot ID: Q8WUB8
  ENST ID: ENST00000339209
  CDS Start-End: 125-1621
gggggcggggccggggcggcggggggcccgcgcggcggcggcggcggcggcggcggcagcggcggcggcggccgggacaaggcggaggcgacggcggcggcggcggcgcggggcgctcgggctgatggcggcggcggccgggcccggggctgcgctgtccccgcggccgtgcgacagcgacccagccacccccggagcgcagtccccgaaggatgataatgaagataattcaaatgatgggacccagccatccaaaaggaggcgaatgggctcaggagatagttctaggagttgtgaaacttcaagtcaagatcttggttttagttactatccagcagaaaacttgatagagtacaaatggccacctgatgaaacaggagaatactatatgcttcaagaacaagtcagtgaatatttgggtgtgacctcctttaaaaggaaatatccagatttagagcgacgagatttgtctcacaaggagaaactctacctgagagagctaaatgtcattactgaaactcagtgcactctaggcttaacagcattgcgcagtgatgaagtgattgatttaatgataaaagaatatccagccaaacatgctgagtattctgttattctacaagaaaaagaacgtcaacgaattacagaccattataaagagtattcccaaatgcaacaacagaatactcagaaagttgaagccagtaaagtgcctgagtatattaagaaagctgccaaaaaagcagcagaatttaatagcaacttaaaccgggaacgcatggaagaaagaagagcttattttgacttgcagacacatgttatccaggtacctcaagggaagtacaaagttttgccaacagagcgaacaaaggtcagttcttacccagtggctctcatccccggacagttccaggaatattataagaggtactcaccagatgagctgcggtatctgccattaaacacagccctgtatgagccccctctggatcctgagctccctgctctagacagtgatggtgattcagatgatggcgaagatggtcgaggtgatgagaaacggaaaaataaaggcacttcggacagctcctctggcaatgtatctgaaggggaaagccctcctgacagccaggaggactctttccagggaagacagaaatcaaaagacaaagctgccactccaagaaaagatggtcccaaacgttctgtactgtccaagtcagttcctgggtacaagccaaaggtcattccaaatgctatatgtggaatttgtctgaagggtaaggagtccaacaagaaaggaaaggctgaatcacttatacactgctcccaatgtgagaatagtggccatccttcttgcctggatatgacaatggagcttgtttctatgattaagacctacccatggcagtgtatggaatgtaaaacatgcattatatgtggacaaccccaccatgaagaagaaatgatgttctgtgatatgtgtgacagaggttatcatactttttgtgtgggccttggtgctattccatcaggtcgctggatttgtgactgttgtcagcgggcccccccaacacccaggaaagtgggcagaagggggaaaaacagcaaagagggataaaatagtttttgactctaatactgtatatgcatttaagtggaatatttggtgccatttacaacattattttcatgccaataaaagattttttttgcaaa

SEQ ID NO: 164695 - DNA, 1589 bp, Homo sapiens
  Payload ID: 12445
  Gene Symbol: PHF10
  Gene Name: PHD finger protein 10
  Uniprot ID: Q8WUB8
  ENST ID: ENST00000366780
  CDS Start-End: 1-1491
atggcggcggcggccgggcccggggctgcgctgtccccgcggccgtgcgacagcgacccagccacccccggagcgcagtccccgaaggatgataatgaagataattcaaatgatgggacccagccatccaaaaggaggcgaatgggctcaggagatagttctaggagttgtgaaacttcaagtcaagatcttggttttagttactatccagcagaaaacttgatagagtacaaatggccacctgatgaaacaggagaatactatatgcttcaagaacaagtcagtgaatatttgggtgtgacctcctttaaaaggaaatatccagagcgacgagatttgtctcacaaggagaaactctacctgagagagctaaatgtcattactgaaactcagtgcactctaggcttaacagcattgcgcagtgatgaagtgattgatttaatgataaaagaatatccagccaaacatgctgagtattctgttattctacaagaaaaagaacgtcaacgaattacagaccattataaagagtattcccaaatgcaacaacagaatactcagaaagttgaagccagtaaagtgcctgagtatattaagaaagctgccaaaaaagcagcagaatttaatagcaacttaaaccgggaacgcatggaagaaagaagagcttattttgacttgcagacacatgttatccaggtacctcaagggaagtacaaagttttgccaacagagcgaacaaaggtcagttcttacccagtggctctcatccccggacagttccaggaatattataagaggtactcaccagatgagctgcggtatctgccattaaacacagccctgtatgagccccctctggatcctgagctccctgctctagacagtgatggtgattcagatgatggcgaagatggtcgaggtgatgagaaacggaaaaataaaggcacttcggacagctcctctggcaatgtatctgaaggggaaagccctcctgacagccaggaggactctttccagggaagacagaaatcaaaagacaaagctgccactccaagaaaagatggtcccaaacgttctgtactgtccaagtcagttcctgggtacaagccaaaggtcattccaaatgctatatgtggaatttgtctgaagggtaaggagtccaacaagaaaggaaaggctgaatcacttatacactgctcccaatgtgagaatagtggccatccttcttgcctggatatgacaatggagcttgtttctatgattaagacctacccatggcagtgtatggaatgtaaaacatgcattatatgtggacaaccccaccatgaagaagaaatgatgttctgtgatatgtgtgacagaggttatcatactttttgtgtgggccttggtgctattccatcaggtcgctggatttgtgactgttgtcagcgggcccccccaacacccaggaaagtgggcagaagggggaaaaacagcaaagagggataaaatagtttttgactctaatactgtatatgcatttaagtggaatatttggtgccatttacaacattattttcatgccaataaaagattttttttgcaaa

SEQ ID NO: 164696 - DNA, 4395 bp, Homo sapiens
  Payload ID: 12445
  Gene Symbol: PHF10
  Gene Name: PHD finger protein 10
  ENST ID: ENST00000612128
  CDS Start-End: 75-1208
cggcggcagcggcggcggcggccgggacaaggcggaggcgacggcggcggcggcggcgcggggcgctcgggctgatggcggcggcggccgggcccggggctgcgctgtccccgcggccgtgcgacagcgacccagccacccccggagcgcagtccccgaaggatgataatgaagataattcaaatgatgggacccagccatccaaaaggaggcgaatgggctcaggagatagttctaggagttgtgaaacttcaagtcaagatcttggttttagttactatccagcagaaaacttgatagagtacaaatggccacctgatgaaacaggagaatactatatgcttcaagaacaagtcagtgaatatttgggtgtgacctcctttaaaaggaaatatccagatttagagcgacgagatttgtctcacaaggagaaactctacctgagagagctaaatgtcattactgaaactcagtgcactctaggcttaacagcattgcgcagtgatgaagtgattgatttaatgataaaagaatatccagccaaacatgctgagtattctgttattctacaagaaaaagaacgtcaacgaattacagaccattataaagagtattcccaaatgcaacaacagaatactcagaaagttgaagccagtaaagtgcctgagtatattaagaaagctgccaaaaaagcagcagaatttaatagcaacttaaaccgggaacgcatggaagaaagaagagcttattttgacttgcagacacatgttatccaggtacctcaagggaagtacaaagttttgccaacagagcgaacaaaggtcagttcttacccagtggctctcatccccggacagttccaggaatattataagaggtactcaccagatgagctgcggtatctgccattaaacacagccctgtatgagccccctctggatcctgagctccctgctctagacagtgatggtgattcagatgatggcgaagatggtcgaggtgatgagaaacggaaaaataaaggcacttcggacagctcctctggcaatgtatctgaaggggaaagccctcctgacagccaggaggactctttccagggaagacagaaatcaaaagacaaagctgccactccaagaaaagatggtcccaaacgttctgtactgtccaagtcagttcctgggtacaaggtagaagaaaaaagcccctgactcagcttctttactgaccagcctctccctgaaatattttaacttgactttcacgattgtggagcttctgcctgctgtacctcactagctgttcttctatggtgtgccctttgtccgctgctttcttttttgctttatttccttggtggcttttctgtcacttttggctatggtttaccttctgttttctgtatatgtacaatttataagtctttttttttctttgaaagaataaccaggcaagtatgggtttttaaaacattatttcataggcagaagtttatattttctttccttggagtaaagatcataattatttggcattttaaatgccccagcatttagtgtagctaaagctgctgagctataaagtatgagtggatatactgttagactaagttgcattttttttagtgcctttcattaagaaagatctgggtttaatctaaggattatttgatccatatgctaaatttagctaactctgggatagaaaataataaaacctgttacttacattgtagtgatttttagcataaccttggtaaagagcctatatgattctatggcaagaattaaaacatacttgttaacttgttgatctgattatcctcagagtaaaggagtaggttgtcagcaactattattatattttgaacttttcctccctctgtctgcccctcccttttcttctgaagaaaaggtgaggtgagagatgagtagccttatttgcatatagggatttaagaatatcataaaaggaagaattagctgtacagtttcatatttgggatggtggtagtaaaatagactaccttttgattcttttggtctgaaatgtattagaacatgcttttattgcacttatgaaggtgtattgaaggaaaattttagagtaagctgatgagaaagttttgccaagtgaaattgttaaacaccttgtatgtcagaactgtgattgtggtaaataattcacaagaacaggctgaagtaagtcacctttccctcaaactaactagaacacgttctaacatgttcatttacctttcttcaagtaaaaaaagcgacattaagttagtgtatttcatattttattaggaaatgcttttatgtaattaacttaaaaattcttttttttttttgtagcctatagcaagcaaattttaagcttaattcagcaagggttggcttccaagggtggctgcaataggctgcagctatgtgatttttgtacttgtttttacatatatagcttatgtaatttctttatataaattaatgcttaataactgaaagcaagtgagctccaaagatgaaatttcagaagcagtatacatgaatgagtgtgttctactggtctgctaagagctttaaatggaagtggccgctcaaagcacagtgtcctgttaactcttgagtgctaagtagatctttgcaacagtaagcttgattgatcatgggttaaaaagagagaatattgaaatagatgttttaatacaggctggaaatcagctattcaacactatcattgatttagtatacaagaaatcatatggattaactgaacttaatagtactcaagtaggatatgcaaaatttatattttacataatctgtgaacatttttagtacctaaaaatgtttcaggtatttcaaagatgggaacaaccagtatctagtcatcatacattaatgtgaacatgcttattaaaagttaacctctttataaaaagtattaataaaccaagatgtgcctaaatattagggtacttcaagctaaaggtcatagtttatatataaaaagtacgagattcaaggaagtaatgtatctgatgctttgcttaataagattcactagtgcttgcccttaattcatagaacagtattgtttaggttacattaacctgaaatttaaagcataattattaggattccggcctataaatacaataattaaaatctatactatattattgctaccatgaaagtcttatctttggctgtttttcaagtagaaaagtaagtgtactgtgagccttttatttgagatgctgagagctattaggatgagtatttcagttttcttgtcaatagtgatactctgatgatgttgcagttatttgaagtagaactgattgtctaaaccagacacacataggagtgtgctccattggtcttgtggagagtgctgcacattaacccctccctcaactgtgcaatccacttgagactggcttctctaagccacagttgttatctgctgtgtaaagtcctggatgccagcactgtggcttcttagagagggcagatgctttgtatatcgagctgcagcattcatcgtagaaaatgctacaaagctgtctctcttccccttctctcatgtttccctcttttcatcaagatgaaggctgttgggtaagaaaaactaagtgatttaacaaatcattatgatttaaacttagaaataaacctagaattttttggtgtcccttttatcataggtgtttaatgtatattttaatgattgtagaacttgaattgctctagaatgtgaatgactacccttgtgttttactccttttggcttttgttttgtaaagaatctcctgtgaggagttctgtttttagaatttaatattgtttggttacttccctgactttagtgaaagatattagagtatttactatgccagtatctaacttaaactattagtattaaataagtatatcttttacatttagtacaggtaccataaccaagagatttcttagttttgatggattaagagagagcattctgctgtatattatggcaggtacagatatgatcataactgaaccagaatttggattatagaagtgcacttcctagctgttttttatttaggtataggaacacacaatgagaaccttatgtttagaatgtagcagtaacaacagagggtaactacactgcaagacttaaatggtttgagcatgtgacactatccttttgttggggggagcagggtataaaaatatacatacaggagattagtttaatagtaaagttttatatgtatgtttaacttccatgatatttattattttgtagagacatttgtgattgtttagagttcttgtttttattctatttatgtataaggttgactttttttaaataaataagccaaaaattctttttgaa

SEQ ID NO: 164697 - DNA, 1651 bp, Homo sapiens
  Payload ID: 12445
  Gene Symbol: PHF10
  Gene Name: PHD finger protein 10
  Uniprot ID: Q8WUB8
  ENST ID: ENST00000621772
  CDS Start-End: 201-1556
cagacaagaagtgcggcggaagcttacacctgcacgtggtgggacagaggcaagaacggatggtctggctgaggctgagagaaccaagctggattaggatcggcttgagggcccggcgtcgtcagtggtgacctctctgacctgaggatgataatgaagataattcaaatgatgggacccagccatccaaaaggaggcgaatgggctcaggagatagttctaggagttgtgaaacttcaagtcaagatcttggttttagttactatccagcagaaaacttgatagagtacaaatggccacctgatgaaacaggagaatactatatgcttcaagaacaagtcagtgaatatttgggtgtgacctcctttaaaaggaaatatccagatttagagcgacgagatttgtctcacaaggagaaactctacctgagagagctaaatgtcattactgaaactcagtgcactctaggcttaacagcattgcgcagtgatgaagtgattgatttaatgataaaagaatatccagccaaacatgctgagtattctgttattctacaagaaaaagaacgtcaacgaattacagaccattataaagagtattcccaaatgcaacaacagaatactcagaaagttgaagccagtaaagtgcctgagtatattaagaaagctgccaaaaaagcagcagaatttaatagcaacttaaaccgggaacgcatggaagaaagaagagcttattttgacttgcagacacatgttatccaggtacctcaagggaagtacaaagttttgccaacagagcgaacaaaggtcagttcttacccagtggctctcatccccggacagttccaggaatattataagaggtactcaccagatgagctgcggtatctgccattaaacacagccctgtatgagccccctctggatcctgagctccctgctctagacagtgatggtgattcagatgatggcgaagatggtcgaggtgatgagaaacggaaaaataaaggcacttcggacagctcctctggcaatgtatctgaaggggaaagccctcctgacagccaggaggactctttccagggaagacagaaatcaaaagacaaagctgccactccaagaaaagatggtcccaaacgttctgtactgtccaagtcagttcctgggtacaagccaaaggtcattccaaatgctatatgtggaatttgtctgaagggtaaggagtccaacaagaaaggaaaggctgaatcacttatacactgctcccaatgtgagaatagtggccatccttcttgcctggatatgacaatggagcttgtttctatgattaagacctacccatggcagtgtatggaatgtaaaacatgcattatatgtggacaaccccaccatgaagaagaaatgatgttctgtgatatgtgtgacagaggttatcatactttttgtgtgggccttggtgctattccatcaggtcgctggatttgtgactgttgtcagcgggcccccccaacacccaggaaagtgggcagaagggggaaaaacagcaaagagggataaaatagtttttgactctaatactgtatatgcatttaagtggaatatttggtgccatttacaacattattttcatgccaataaaagattttttttgc

SEQ ID NO: 164698 - DNA, 1471 bp, Homo sapiens
  Payload ID: 12446
  Gene Symbol: PHF11
  Gene Name: PHD finger protein 11
  Uniprot ID: Q9UIL8
  ENST ID: ENST00000357596
  CDS Start-End: 277-1155
agcccagtgcttccaccacaaccgatgtcaactctcctagcgcccctccgctcaccggtaaaccaggacagtggaggggcgccctgatgcgggcaagactcagccaaaggtggaaaagttgaaggggtgttcccagcagagaggatgacacaaaggcaccaaaccacaaaacgtcacacgtaaacatcatacgtggcaaccacaagccaatcagttggatatttcattcattggtatacatatggactgtaaggtgtctttcaggttgcagaaaagatggaaaaaaggacatgtgcactctgccccaaagatgtcgaatataatgtcctatactttgcacaatcagagaatatagctgctcatgagaattgtttgctgtattcttcaggacttgtggaatgtgaggatcaggatccacttaatcctgatagaagttttgatgtggaatcagtaaagaaagaaatccagagaggaaggaagttgaaatgcaaattttgtcataaaagaggagccaccgtgggatgtgatttaaaaaactgtaacaagaattaccactttttctgtgccaagaaggacgacgcagttccacagtctgatggagttcgaggaatttataaactgctttgccagcaacatgctcaattcccgatcatcgctcaaagtgctaaattttcaggagtgaaaagaaaaagaggaaggaagaaacccctctcaggcaatcatgtacagccacccgaaacaatgaaatgtaatacattcataagacaagtgaaagaagagcatggcagacacacagatgcaactgtgaaagttccttttcttaagaaatgcaaggaagcaggacttcttaattacttacttgaagaaatattagacaaagttcattcaattccagaaaaactcatggatgagactacttcagaatcagactatgaagaaatcgggagtgcactttttgactgtagattgttcgaagacacatttgtaaattttcaagcagcaatagagaaaaaaattcatgcatctcaacaaaggtggcagcagttgaaggaagagattgagctacttcaggacttaaaacaaaccttgtgctcttttcaagaaaatagagatcttatgtcaagttctacatcaatatcatccctgtcttattagggattaccgtttcctaagccaagagtcatgtcaaattgcaatcaggctcaaaaccagagaccaggctgtgaaatccacacatctttagaactagtcgtctcctcttggcctcagcagctcttccctgttcttactggttgacattttgatcactctttgcacactcttgtgttttttgctcactgtcacattcccagcacctagtatgctcagtaaatgtttgtggaataagtgcataaaatgttcttaacctttgattctacttacagcccatgatagcctcttagatataataaatttggattatactacttta

SEQ ID NO: 164699 - DNA, 1359 bp, Homo sapiens
  Payload ID: 12446
  Gene Symbol: PHF11
  Gene Name: PHD finger protein 11
  Uniprot ID: Q9UIL8
  ENST ID: ENST00000378319
  CDS Start-End: 42-1037
gatctcgctatccggccgccacccgcagctgcagcacagtcatggcccaggcgtcgccgccccggcccgagagggtgctcggcgccagcagcccggaggcccggcccgcgcaggaggcgctcctccttcccaccggtgtctttcaggttgcagaaaagatggaaaaaaggacatgtgcactctgccccaaagatgtcgaatataatgtcctatactttgcacaatcagagaatatagctgctcatgagaattgtttgctgtattcttcaggacttgtggaatgtgaggatcaggatccacttaatcctgatagaagttttgatgtggaatcagtaaagaaagaaatccagagaggaaggaagttgaaatgcaaattttgtcataaaagaggagccaccgtgggatgtgatttaaaaaactgtaacaagaattaccactttttctgtgccaagaaggacgacgcagttccacagtctgatggagttcgaggaatttataaactgctttgccagcaacatgctcaattcccgatcatcgctcaaagtgctaaattttcaggagtgaaaagaaaaagaggaaggaagaaacccctctcaggcaatcatgtacagccacccgaaacaatgaaatgtaatacattcataagacaagtgaaagaagagcatggcagacacacagatgcaactgtgaaagttccttttcttaagaaatgcaaggaagcaggacttcttaattacttacttgaagaaatattagacaaagttcattcaattccagaaaaactcatggatgagactacttcagaatcagactatgaagaaatcgggagtgcactttttgactgtagattgttcgaagacacatttgtaaattttcaagcagcaatagagaaaaaaattcatgcatctcaacaaaggtggcagcagttgaaggaagagattgagctacttcaggacttaaaacaaaccttgtgctcttttcaagaaaatagagatcttatgtcaagttctacatcaatatcatccctgtcttattagggattaccgtttcctaagccaagagtcatgtcaaattgcaatcaggctcaaaaccagagaccaggctgtgaaatccacacatctttagaactagtcgtctcctcttggcctcagcagctcttccctgttcttactggttgacattttgatcactctttgcacactcttgtgttttttgctcactgtcacattcccagcacctagtatgctcagtaaatgtttgtggaataagtgcataaaatgttcttaacctttgattctacttacagcccatgatagcctcttagatataataaatttggattatactactttacttgta

SEQ ID NO: 164700 - DNA, 903 bp, Homo sapiens
  Payload ID: 12446
  Gene Symbol: PHF11
  Gene Name: PHD finger protein 11
  ENST ID: ENST00000426879
  CDS Start-End: 1-860
gccgccccggcccgagagggtgctcggcgccagcagcccggaggcccggcccgcgcaggaggcgctcctccttcccaccgctgtattcttcaggacttgtggaatgtgaggatcaggatccacttaatcctgatagaagttttgatgtggaatcagtaaagaaagaaatccagagaggaaggaagttgaaatgcaaattttgtcataaaagaggagccaccgtgggatgtgatttaaaaaactgtaacaagaattaccactttttctgtgccaagaaggacgacgcagttccacagtctgatggagttcgaggaatttataaactgctttgccagcaacatgctcaattcccgatcatcgctcaaagtgctaaattttcaggagtgaaaagaaaaagaggaaggaagaaacccctctcaggcaatcatgtacagccacccgaaacaatgaaatgtaatacattcataagacaagtgaaagaagagcatggcagacacacagatgcaactgtgaaagttccttttcttaagaaatgcaaggaagcaggacttcttaattacttacttgaagaaatattagacaaagttcattcaattccagaaaaactcatggatgagactacttcagaatcagactatgaagaaatcgggagtgcactttttgactgtagattgttcgaagacacatttgtaaattttcaagcagcaatagagaaaaaaattcatgcatctcaacaaaggtggcagcagttgaaggaagagattgagctacttcaggacttaaaacaaaccttgtgctcttttcaagaaaatagagatcttatgtcaagttctacatcaatatcatccctgtcttattagggattaccgtttcctaagccaagagtcatgtcaaattgcaatc

SEQ ID NO: 164701 - DNA, 610 bp, Homo sapiens
  Payload ID: 12446
  Gene Symbol: PHF11
  Gene Name: PHD finger protein 11
  ENST ID: ENST00000442195
  CDS Start-End: 107-610
gcttccaccacaaccgatgtcaactctcctagcgcccctccgctcaccggtaaaccaggacagtggaggggcgccctgatgcggtgtctttcaggttgcagaaaagatggaaaaaaggacatgtgcactctgccccaaagatgtcgaatataatgtcctatactttgcacaatcagagaatatagctgctcatgagaattgtttgctgtattcttcaggacttgtggaatgtgaggatcaggatccacttaatcctgatagaagttttgatgtggaatcagtaaagaaagaaatccagagaggaaggaagttgaaatgcaaattttgtcataaaagaggagccaccgtgggatgtgatttaaaaaactgtaacaagaattaccactttttctgtgccaagaaggacgacgcagttccacagtctgatggagttcgaggaatttataaactgctttgccagcaacatgctcaattcccgatcatcgctcaaagtgctaaattttcaggagtgaaaagaaaaagaggaaggaagaaacccctctcaggcaatcatgtacagccacccgaaacaatgaaatgtaatacattcataagacaagtgaaagaagag

SEQ ID NO: 164702 - DNA, 1318 bp, Homo sapiens
  Payload ID: 12446
  Gene Symbol: PHF11
  Gene Name: PHD finger protein 11
  Uniprot ID: Q9UIL8
  ENST ID: ENST00000488958
  CDS Start-End: 129-1007
cacaaaggcaccaaaccacaaaacgtcacacgtaaacatcatacgtggcaaccacaagccaatcagttggatatttcattcattggtatacatatggactgtaaggtgtctttcaggttgcagaaaagatggaaaaaaggacatgtgcactctgccccaaagatgtcgaatataatgtcctatactttgcacaatcagagaatatagctgctcatgagaattgtttgctgtattcttcaggacttgtggaatgtgaggatcaggatccacttaatcctgatagaagttttgatgtggaatcagtaaagaaagaaatccagagaggaaggaagttgaaatgcaaattttgtcataaaagaggagccaccgtgggatgtgatttaaaaaactgtaacaagaattaccactttttctgtgccaagaaggacgacgcagttccacagtctgatggagttcgaggaatttataaactgctttgccagcaacatgctcaattcccgatcatcgctcaaagtgctaaattttcaggagtgaaaagaaaaagaggaaggaagaaacccctctcaggcaatcatgtacagccacccgaaacaatgaaatgtaatacattcataagacaagtgaaagaagagcatggcagacacacagatgcaactgtgaaagttccttttcttaagaaatgcaaggaagcaggacttcttaattacttacttgaagaaatattagacaaagttcattcaattccagaaaaactcatggatgagactacttcagaatcagactatgaagaaatcgggagtgcactttttgactgtagattgttcgaagacacatttgtaaattttcaagcagcaatagagaaaaaaattcatgcatctcaacaaaggtggcagcagttgaaggaagagattgagctacttcaggacttaaaacaaaccttgtgctcttttcaagaaaatagagatcttatgtcaagttctacatcaatatcatccctgtcttattagggattaccgtttcctaagccaagagtcatgtcaaattgcaatcaggctcaaaaccagagaccaggctgtgaaatccacacatctttagaactagtcgtctcctcttggcctcagcagctcttccctgttcttactggttgacattttgatcactctttgcacactcttgtgttttttgctcactgtcacattcccagcacctagtatgctcagtaaatgtttgtggaataagtgcataaaatgttcttaacctttgattctacttacagcccatgatagcctcttagatataataaatttggattatacta

SEQ ID NO: 164703 - DNA, 1626 bp, Homo sapiens
  Payload ID: 12446
  Gene Symbol: PHF11
  Gene Name: PHD finger protein 11
  ENST ID: ENST00000465045
  CDS Start-End: 272-952
agtgcttccaccacaaccgatgtcaactctcctagcgcccctccgctcaccggtaaaccaggacagtggaggggcgccctgatgcgggcaagactcagccaaaggtggaaaagttgaaggggtgttcccagcagagaggatgacacaaaggcaccaaaccacaaaacgtcacacgtaaacatcatacgtggcaaccacaagccaatcagttggatatttcattcattggtatacatatggactgtaaggtgtctttcaggttgcagaaaagatggaaaaaaggacatgtgcactctgccccaaagatgtcgaatataatgtcctatactttgcacaatcagagaatatagctgctcatgagaattgtttgctgtattcttcaggacttgtggaatgtgaggatcaggatccacttaatcctgatagaagttttgatgtggaatcagtaaagaaagaaatccagagaggaaggaagttgaaatgcaaattttgtcataaaagaggagccaccgtgggatgtgatttaaaaaactgtaacaagaattaccactttttctgtgccaagaaggacgacgcagttccacagtctgatggagttcgaggaatttataaactgctttgccagcaacatgctcaattcccgatcatcgctcaaagtgctaaattttcaggagtgaaaagaaaaagaggaaggaagaaacccctctcaggcaatcatgtacagccacccgaaacaatgaaatgtaatacattcataagacaagtgaaagaagagcatggcagacacacagatgcaactgtgaaagttccttttcttaagaaatgcaaggaagcaggacttcttaattacttacttgaagaaatattagacaaagttcattcaattccagaaaaactcatggatgagactacttcagaatcagaccaagcacttcccaaacagtgtgcctgagaaccacctgtagggctggtgaggacacagatagctgggcctatcccacagagattctgattcagtacaaataccaagaattgggggccaggcgcggtggctcacgcctgtaatcccagcactttgggagcccgagactatgaagaaatcgggagtgcactttttgactgtagattgttcgaagacacatttgtaaattttcaagcagcaatagagaaaaaaattcatgcatctcaacaaaggtggcagcagttgaaggaagagattgagctacttcaggacttaaaacaaaccttgtgctcttttcaagaaaatagagatcttatgtcaagttctacatcaatatcatccctgtcttattagggattaccgtttcctaagccaagagtcatgtcaaattgcaatcaggctcaaaaccagagaccaggctgtgaaatccacacatctttagaactagtcgtctcctcttggcctcagcagctcttccctgttcttactggttgacattttgatcactctttgcacactcttgtgttttttgctcactgtcacattcccagcacctagtatgctcagtaaatgtttgtggaataagtgcataaaatgttcttaacctttgattctacttacagcccatgatagcctcttagatataataaatttggattatacta

SEQ ID NO: 164704 - DNA, 795 bp, Homo sapiens
  Payload ID: 12446
  Gene Symbol: PHF11
  Gene Name: PHD finger protein 11
  ENST ID: ENST00000496612
  CDS Start-End: 397-795
ggtgggcacgcttcggtttacctcccccgcgggtgacagcccagtgcttccaccacaaccgatgtcaactctcctagcgcccctccgctcaccggtaaaccaggacagtggaggggcgccctgatgcggtgaggcagggggcggccctgagggaagagctgggtctcacgttcacggaggacgtgactggaacccgtctccccttctccagtcgttccagtcctccccggccctctacttgagtggggcaagactcagccaaaggtggaaaagttgaaggggtgttcccagcagagaggatgacacaaaggcaccaaaccacaaaacgtcacacgtaaacatcatacgtggcaaccacaagccaatcagttggatatttcattcattggtatacatatggactgtaagctgtattcttcaggacttgtggaatgtgaggatcaggatccacttaatcctgatagaagttttgatgtggaatcagtaaagaaagaaatccagagaggaaggaagttgaaatgcaaattttgtcataaaagaggagccaccgtgggatgtgatttaaaaaactgtaacaagaattaccactttttctgtgccaagaaggacgacgcagttccacagtctgatggagttcgaggaatttataaactgctttgccagcaacatgctcaattcccgatcatcgctcaaagtgctaaattttcaggagtgaaaagaaaaagaggaaggaagaaacccctctcaggcaatcatgtacagccacccgaaacaatgaaatgtaatacattcata

SEQ ID NO: 164705 - DNA, 566 bp, Homo sapiens
  Payload ID: 12446
  Gene Symbol: PHF11
  Gene Name: PHD finger protein 11
  ENST ID: ENST00000485919
  CDS Start-End: 272-566
agtgcttccaccacaaccgatgtcaactctcctagcgcccctccgctcaccggtaaaccaggacagtggaggggcgccctgatgcgggcaagactcagccaaaggtggaaaagttgaaggggtgttcccagcagagaggatgacacaaaggcaccaaaccacaaaacgtcacacgtaaacatcatacgtggcaaccacaagccaatcagttggatatttcattcattggtatacatatggactgtaaggtgtctttcaggttgcagaaaagatggaaaaaaggacatgtgcactctgccccaaagatgtcgaatataatgtcctatactttgcacaatcagagaatatagctgctcatgagaattgtttgctgtattcttcaggacttgtggaatgtgaggatcaggatccacttaatcctgatagaagttttgatgtggaatcagtaaagaaagaaatccagagaggaaggaagttgaaatgcaaattttgtcataaaagaggagccaccgtgggatgtgatttaaaaaactgtaacaagaattaccactttttctgtgccaaga

SEQ ID NO: 164706 - DNA, 1316 bp, Homo sapiens
  Payload ID: 12446
  Gene Symbol: PHF11
  Gene Name: PHD finger protein 11
  ENST ID: ENST00000621822
  CDS Start-End: 129-701
cacaaaggcaccaaaccacaaaacgtcacacgtaaacatcatacgtggcaaccacaagccaatcagttggatatttcattcattggtatacatatggactgtaaggtgtctttcaggttgcagaaaagatggaaaaaaggacatgtgcactctgccccaaagatgtcgaatataatgtcctatactttgcacaatcagagaatatagctgctcatgagaattgtttgctgtattcttcaggacttgtggaatgtgaggatcaggatccacttaatcctgatagaagttttgatgtggaatcagtaaagaaagaaatccagagaggaaggaagttgaaatgcaaattttgtcataaaagaggagccaccgtgggatgtgatttaaaaaactgtaacaagaattaccactttttctgtgccaagaaggacgacgcagttccacagtctgatggagttcgaggaatttataaactgctttgccagcaacatgctcaattcccgatcatcgctcaaagtgctaaattttcaggagtgaaaagaaaaagaggaaggaagaaacccctctcaggcaatcatgtacagccacccgaaacaatgaaatgtaatacattcataagacaagtgaaagaagagcatggcagacacacagatgcaactgtgaaagttccttttcttaagaaatgcaaggaaaggacttcttaattacttacttgaagaaatattagacaaagttcattcaattccagaaaaactcatggatgagactacttcagaatcagactatgaagaaatcgggagtgcactttttgactgtagattgttcgaagacacatttgtaaattttcaagcagcaatagagaaaaaaattcatgcatctcaacaaaggtggcagcagttgaaggaagagattgagctacttcaggacttaaaacaaaccttgtgctcttttcaagaaaatagagatcttatgtcaagttctacatcaatatcatccctgtcttattagggattaccgtttcctaagccaagagtcatgtcaaattgcaatcaggctcaaaaccagagaccaggctgtgaaatccacacatctttagaactagtcgtctcctcttggcctcagcagctcttccctgttcttactggttgacattttgatcactctttgcacactcttgtgttttttgctcactgtcacattcccagcacctagtatgctcagtaaatgtttgtggaataagtgcataaaatgttcttaacctttgattctacttacagcccatgatagcctcttagatataataaatttggattatacta

SEQ ID NO: 164707 - DNA, 1173 bp, Homo sapiens
  Payload ID: 12446
  Gene Symbol: PHF11
  Gene Name: PHD finger protein 11
  ENST ID: ENST00000496623
  CDS Start-End: 33-512
atccggccgccacccgcagctgcagcacagtcatggcccaggcgtcgccgccccggcccgagagggtgctcggcgccagcagcccggaggcccggcccgcgcaggaggcgctcctccttcccaccggtgtctttcaggttgcagaaaagatggaaaaaaggacatgtgcactctgccccaaagatgtcgaatataatgtcctatactttgcacaatcagagaatatagctgctcatgagaattgtttgctgtattcttcaggacttgtggaatgtgaggatcaggatccacttaatcctgatagaagttttgatgtggaatcagtaaagaaagaaatccagagaggaaggaagttgaaatgcaaattttgtcataaaagaggagccaccgtgggatgtgatttaaaaaactgtaacaagaattaccactttttctgtgccaagaaggacgacgcagttccacagtctgatggagttcgaggaatttataagtatttaataaaacatttttaaaaccacatttgggggattgggataaggaatggttggattaagacaaggagactttgaagactaattttatgtaaatggttttcaaatgagaacaaagccagtttgggggatgcacaggggttatgtgaattttgaatttcagtgaaaaatctatatatatatatatattattttagtcacaatatcttgaataatgagatcaatgttaggacagcatgtttttttaaatatgatttttgtgagctatgttacattcgtaagatgatttttaaaaattccattcagaggctgatgtttttcctgccagtgggcatatattcctaattttcccatagtgttccaggcactattttatttatttatttaataaccacttgctttatgccaggcatagttctaagtgctttacaaatgttaactcatttaatcctcataatagtcaactgaggtagatactattatctccattttccagaggaggaaactggggccttgagacactcagtgacttgtccccaggttacacagctggtcagtggcagagctgggctgcaggacttccaagtcctcgctctttgccaccttgttgtcttcaggtatggggactatatattctaaaacaagagggcaagcctaccattgaaagaagcttgctaaataa

SEQ ID NO: 164708 - DNA, 2957 bp, Homo sapiens
  Payload ID: 12447
  Gene Symbol: PHF12
  Gene Name: PHD finger protein 12
  Uniprot ID: Q96QT6
  ENST ID: ENST00000268756
  CDS Start-End: 531-2645
cgggtggctttgcgggcgctcgcggtaagtttgcgccaagtgcgcggcagccgggacgcagacggcggcggcggcgagaggcggagcccggggaccaccccccatcaccctccccccagtcacctcacgtaccacaacctcacgtaacctctcaccccccctccgatacccccagccccgggatggcagcgcccgccagccttcccggccggaccggctgtcgccagtgccggctttagcctgtgggactaggccccgccgaggcctgacccccggagccgggacccactgtgcagccagcagccgggccgggactgaggggccgctcccccctcgcggcccgtcgggaggacgctgtcgtcccggggactgggggccggggggtgggggggagccagggcgaggaagtcgggacccgtattgggaaaaaagcggggccggggtcaggagcgccccctcccctcacctcccccctccccccggggttgggggggccggagcagagagcacccagcccgggaggtggatgaatgtgggagaaaatggagaccaagacgatcgtgtacgacttggacacatcaggggggctgatggagcaaatccaagctctgctggctccccccaagacggacgaggcagaaaagcgcagtcggaagcctgagaaggagccccggagaagcggcagggccaccaaccacgacagctgcgatagctgcaaggaaggtggagatctcctgtgctgcgaccactgcccggctgccttccacctccagtgctgtaaccctccactgagtgaagaaatgttgcctcctggagagtggatgtgtcaccggtgcactgttcgccgaaagaaacgagagcagaaaaaggagctgggtcatgtcaatggactggtggacaaatctggcaaacggactacatcccccagcagtgacactgacttgttggacagatcggccagcaaaactgaactaaaggccattgcccatgcccggatcctggaaaggagagccagcaggcctggcacacccacatccagcgccagcacagagactcccacctctgagcagaatgatgtcgacgaagacatcattgacgtggatgaggaaccagtagcagcggagccagactatgtgcagccccagctgaggcggccctttgagctgctgattgctgccgccatggagcggaaccccacccaatttcagttgcccaatgaactgacttgtaccactgcactaccaggttctagcaagaggagaagaaaggaggaaaccacagggaaaaatgttaagaagacacagcatgaattagatcacaatggtctcgttcccttacccgtcaaagtctgcttcacgtgtaacaggagttgccgtgtggctcctctcatccagtgtgactattgccctctcctgtttcacatggattgcctcgagccgccgctcactgccatgcccctgggcagatggatgtgtccgaatcacatcgaacatgtggtgctgaaccagaagaatatgacactgagcaatcggtgccaggtgtttgatcgtttccaggacaccgtttcgcagcatgtcgtcaaagtggacttcctgaaccgaatccacaagaagcacccccctaaccggcgtgtgctccagtcggtcaaaagaagaagcttgaaggttcctgatgctataaaatctcagtaccagtttccaccccctctcattgcacccgcggccattcgggacggggagctgatctgcaatgggatccctgaggaatcacagatgcaccttttgaactctgagcacttagccacccaagcagagcagcaagagtggctctgtagtgttgttgcgctccagtgcagcatattgaaacatttatctgctaagcagatgccttcgcattgggactctgaacagacagagaaggctgatattaagcctgttattgtgactgacagctcagtcaccacctccctgcaaacagctgacaagacacctacaccttcccactaccccttgtcctgcccctcagggattagcacccagaattccctgagctgctctccaccccaccagtccccagccctagaggacatcggctgcagttcttgtgcggaaaaatccaagaaaaccccttgtgggactgccaatgggccagtgaacacagaggtgaaagctaatggcccacacctctacagcagccctactgattccacggacccccggcgacttccaggcgctaacaccccactaccaggcctctcacaccggcaaggctggccccggcccctcacgccaccagcggctgggggccttcagaaccacaccgtcggcatcattgtgaagacagagaatgccactggccccagctcttgcccccagaggagtttggttcctgtcccaagcctgcccccttccattcccagctcttgtgccagcatcgagaacaccagcactttgcaaagaaagactgtccaatcacagataggacctccgttgacagattcaaggccactgggctcacccccaaacgccacccgggtgctcactcccccgcaagcagcaggagatggtatcttggccacaacagccaaccaacgattcagctcaccagcgccatcgtcaggtgagtgctgctcagccttgggttgatttggaataattttatgctctttctggcaaataagattctaaaagcacttatatccctgtgaatacttcagaggactttggcctttgtattgtttgtcttactctcatttccgtaatagaagaggaagcacatgttaacttgtcccgtttataaatgggactgcttaggctctgaaagcttcagtgatttccttaaaatgacctactgagtcagtggcaggattggaaccacagcccaggtctcctgactccatcccataccttccaggcctaggcctctgcctgttttgttctgtcaccttaaaagaaggc

SEQ ID NO: 164709 - DNA, 4759 bp, Homo sapiens
  Payload ID: 12447
  Gene Symbol: PHF12
  Gene Name: PHD finger protein 12
  Uniprot ID: Q96QT6
  ENST ID: ENST00000332830
  CDS Start-End: 812-3826
cttagtttgcacacaaacaccaatggatgaacagtccctagcttcctgcggctgcgccttgacccctacaagctttctcaagcgcctgcgcgagacctcaggtcccgcccttttgtctcagtgcgctggcgcagggcagaaaggtggggcttcggtcctccagacgaatgccagcgcggctgcgcgctggggggtactccctcaccgcggctgcgcgggagccaggccgccggctgtcactgcggttgcgcgcggcgagcgccgatcccggggcgcctgcgcgggtggctttgcgggcgctcgcggtaagtttgcgccaagtgcgcggcagccgggacgcagacggcggcggcggcgagaggcggagcccggggaccaccccccatcaccctccccccagtcacctcacgtaccacaacctcacgtaacctctcaccccccctccgatacccccagccccgggatggcagcgcccgccagccttcccggccggaccggctgtcgccagtgccggctttagcctgtgggactaggccccgccgaggcctgacccccggagccgggacccactgtgcagccagcagccgggccgggactgaggggccgctcccccctcgcggcccgtcgggaggacgctgtcgtcccggggactgggggccggggggtgggggggagccagggcgaggaagtcgggacccgtattgggaaaaaagcggggccggggtcaggagcgccccctcccctcacctcccccctccccccggggttgggggggccggagcagagagcacccagcccgggaggtggatgaatgtgggagaaaatggagaccaagacgatcgtgtacgacttggacacatcaggggggctgatggagcaaatccaagctctgctggctccccccaagacggacgaggcagaaaagcgcagtcggaagcctgagaaggagccccggagaagcggcagggccaccaaccacgacagctgcgatagctgcaaggaaggtggagatctcctgtgctgcgaccactgcccggctgccttccacctccagtgctgtaaccctccactgagtgaagaaatgttgcctcctggagagtggatgtgtcaccggtgcactgttcgccgaaagaaacgagagcagaaaaaggagctgggtcatgtcaatggactggtggacaaatctggcaaacggactacatcccccagcagtgacactgacttgttggacagatcggccagcaaaactgaactaaaggccattgcccatgcccggatcctggaaaggagagccagcaggcctggcacacccacatccagcgccagcacagagactcccacctctgagcagaatgatgtcgacgaagacatcattgacgtggatgaggaaccagtagcagcggagccagactatgtgcagccccagctgaggcggccctttgagctgctgattgctgccgccatggagcggaaccccacccaatttcagttgcccaatgaactgacttgtaccactgcactaccaggttctagcaagaggagaagaaaggaggaaaccacagggaaaaatgttaagaagacacagcatgaattagatcacaatggtctcgttcccttacccgtcaaagtctgcttcacgtgtaacaggagttgccgtgtggctcctctcatccagtgtgactattgccctctcctgtttcacatggattgcctcgagccgccgctcactgccatgcccctgggcagatggatgtgtccgaatcacatcgaacatgtggtgctgaaccagaagaatatgacactgagcaatcggtgccaggtgtttgatcgtttccaggacaccgtttcgcagcatgtcgtcaaagtggacttcctgaaccgaatccacaagaagcacccccctaaccggcgtgtgctccagtcggtcaaaagaagaagcttgaaggttcctgatgctataaaatctcagtaccagtttccaccccctctcattgcacccgcggccattcgggacggggagctgatctgcaatgggatccctgaggaatcacagatgcaccttttgaactctgagcacttagccacccaagcagagcagcaagagtggctctgtagtgttgttgcgctccagtgcagcatattgaaacatttatctgctaagcagatgccttcgcattgggactctgaacagacagagaaggctgatattaagcctgttattgtgactgacagctcagtcaccacctccctgcaaacagctgacaagacacctacaccttcccactaccccttgtcctgcccctcagggattagcacccagaattccctgagctgctctccaccccaccagtccccagccctagaggacatcggctgcagttcttgtgcggaaaaatccaagaaaaccccttgtgggactgccaatgggccagtgaacacagaggtgaaagctaatggcccacacctctacagcagccctactgattccacggacccccggcgacttccaggcgctaacaccccactaccaggcctctcacaccggcaaggctggccccggcccctcacgccaccagcggctgggggccttcagaaccacaccgtcggcatcattgtgaagacagagaatgccactggccccagctcttgcccccagaggagtttggttcctgtcccaagcctgcccccttccattcccagctcttgtgccagcatcgagaacaccagcactttgcaaagaaagactgtccaatcacagataggacctccgttgacagattcaaggccactgggctcacccccaaacgccacccgggtgctcactcccccgcaagcagcaggagatggtatcttggccacaacagccaaccaacgattcagctcaccagcgccatcgtcagatggcaaggtcagccccggcacgttatccataggaagcgctttaaccgtaccctctttcccagccaactctactgccatggtggacctcaccaactcacttcgagcatttatggatgtcaatggagaaatcgagataaatatgctggacgagaagctgatcaagtttctggccttgcagagaatacatcagcttttcccctcccgggtccaaccttcaccgggcagtgtcgggacacatcagctggcttctggagggcaccacatagaagtgcaaagaaaggaggtacaggcccgagctgtgttctaccccctcttagggttgggaggagctgtgaacatgtgctatcgaaccctctacatcgggacaggagctgacatggatgtgtgccttacaaactatggtcactgtaactacgtgtccgggaaacatgcctgcatattctacgatgagaataccaaacattatgagctgttaaactacagtgagcatgggacaacggtggacaatgtgctgtattcatgtgacttctcggagaagaccccgccaacccccccaagcagtattgttgccaaagtgcagagtgtcatcaggcgccgccggcaccagaaacaggacgaagagccaagtgaggaggcagccatgatgagttcccaggcccaggggccgcagcggagaccctgcaattgcaaagccagcagctcgagcttgattgggggcagtggggccggctgggagggcacagccttactgcaccatggcagctacatcaagctgggctgcctgcagtttgtcttcagcatcactgagtttgcgaccaaacagcccaaaggcgatgccagcctgctgcaggatggggtcttggccgagaagctctctctcaagccccaccagggccctgtgctgcgctccaactctgttccttaggactggcggctaccccgccactggcctgtacacccacccaagactcctgcaatgcaaaaatgtacacaaaccaagcccgggtgttttctatactctaccagaaacccttcaactacaatctttgcatgaaatgaagaaaaccttttgactgttttttaaaaatcctttttcttttctcaagttctagggggcatttgcacatatatttgtactcaacatttcatgggaaagcggcagacctgagctgaggaacagcgtgggcagggagggaaagacccagggtctggacacttcctccaacacaaaacccttccccacccacctcctgctccctccccctcgcccaccattgtaaaataatcagaaacttgttctattttgtggcagtgacaatagttttatattaaaagaaaaaatacagttttcatacagcaaaatctatacaatatcattgttttatttaatataaagatcgctacccaccttccttccatggttcccaccctccacgttattttccctttctgcagcggttgcactacaggtagctactgtgtattatggacaaatgagaaatgaattctttttctggctgtccatctattttatttcaaataaggaaaagtgtatttggattttgtgtaaatacatctagtgatgacattttttcaatgtttttaaaaaccgtgtacagtactacatgtggtagagcgttttctcaaattgtctattgtagcaaaaatgtttttgtcgtaaacctgttttgtctcctttttttgttctcttgccacttctctcctcttcctcctgcccctggttccctcctctcctcccacccccacaaccagtaccaatgtacatagtaattgtaatgttttagactttacagaaactttcctgtattctgtatataaaaaacaaaaatacttcaaa

SEQ ID NO: 164710 - DNA, 2963 bp, Homo sapiens
  Payload ID: 12447
  Gene Symbol: PHF12
  Gene Name: PHD finger protein 12
  ENST ID: ENST00000378879
  CDS Start-End: 398-2515
acaacctcacgtaacctctcaccccccctccgatacccccagccccgggatggcagcgcccgccagccttcccggccggaccggctgtcgccagtgccggctttagcctgtgggactaggccccgccgaggcctgacccccggagccgggacccactgtgcagccagcagccgggccgggactgaggggccgctcccccctcgcggcccgtcgggaggacgctgtcgtcccggggactgggggccggggggtgggggggagccagggcgaggaagtcgggacccgtattgggaaaaaagcggggccggggtcaggagcgccccctcccctcacctcccccctccccccggggttgggggggccggagcagagagcacccagcccgggaggtggatgaatgtgggagaaaatggagaccaagacgatcgtgtacgacttggacacatcaggggggctgatggagcaaatccaagctctgctggctccccccaagacggacgaggcagaaaagcgcagtcggaagcctgagaaggagccccggagaagcggcagggccaccaaccacgacagctgcgatagctgcaaggaaggtggagatctcctgtgctgcgaccactgcccggctgccttccacctccagtgctgtaaccctccactgagtgaagaaatgttgcctcctggagagtggatgtgtcaccggtgcactgttcgccgaaagaaacgagagcagaaaaaggagctgggtcatgtcaatggactggtggacaaatctggcaaacggactacatcccccagcagtgacactgacttgttggacagatcggccagcaaaactgaactaaaggccattgcccatgcccggatcctggaaaggagagccagcaggcctggcacacccacatccagcgccagcacagagactcccacctctgagcagaatgatgtcgacgaagacatcattgacgtggatgaggaaccagtagcagcggagccagactatgtgcagccccagctgaggcggccctttgagctgctgattgctgccgccatggagcggaaccccacccaatttcagttgcccaatgaactgacttgtaccactgcactaccaggttctagcaagaggagaagaaaggaggaaaccacagggaaaaatgttaagaagacacagcatgaattagatcacaatggtctcgttcccttacccgtcaaagtctgcttcacgtgtaacaggagttgccgtgtggctcctctcatccagtgtgactattgccctctcctgtttcacatggattgcctcgagccgccgctcactgccatgcccctgggcagatggatgtgtccgaatcacatcgaacatgtggtgctgaaccagaagaatatgacactgagcaatcggtgccaggtgtttgatcgtttccaggacaccgtttcgcagcatgtcgtcaaagtggacttcctgaaccgaatccacaagaagcacccccctaaccggcgtgtgctccagtcggtcaaaagaagaagcttgaaggttcctgatgctataaaatctcagtaccagtttccaccccctctcattgcacccgcggccattcgggacggggagctgatctgcaatgggatccctgaggaatcacagatgcaccttttgaactctgagcacttagccacccaagcagagcagcaagagtggctctgtagtgttgttgcgctccagtgcagcatattgaaacatttatctgctaagcagatgccttcgcattgggactctgaacagacagagaaggctgatattaagcctgttattgtgactgacagctcagtcaccacctccctgcaaacagctgacaagacacctacaccttcccactaccccttgtcctgcccctcagggattagcacccagaattccctgagctgctctccaccccaccagtccccagccctagaggacatcggctgcagttcttgtgcggaaaaatccaagaaaaccccttgtgggactgccaatgggccagtgaacacagaggtgaaagctaatggcccacacctctacagcagccctactgattccacggacccccggcgacttccaggcgctaacaccccactaccaggcctctcacaccggcaaggctggccccggcccctcacgccaccagcggctgggggccttcagaaccacaccgtcggcatcattgtgaagacagagaatgccactggccccagctcttgcccccagaggagtttggttcctgtcccaagcctgcccccttccattcccagctcttgtgccagcatcgagaacaccagcactttgcaaagaaagactgtccaatcacagataggacctccgttgacagattcaaggccactgggctcacccccaaacgccacccgggtgctcactcccccgcaagcagcaggagatggtatcttggccacaacagccaaccaacgattcagctcaccagcgccatcgtcagctctaggagttccagagcctatgggttgagaatcaagaagggaacatcaccttggatggcaaggtcagccccggcacgttatccataggaagcgctttaaccgtaccctctttcccagccaactctactgccatggtggacctcaccaactcacttcgagcatttatggatgtcaatggagaaatcgagataaatatgctggacgagaagctgatcaagtttctggccttgcagagaatacatcagcttttcccctcccgggtccaaccttcaccgggcagtgtcgggacacatcagctggcttctggagggcaccacatagaaggtgcgcatgtacacacctgtcaccacatcatcagatctcccctctacgtgtgcgaatggtcaccttgcctccatggagaatctgagcttccagtatctcaaacctccttgtgtgcttttcatgggcttaataaagcaccatggtttttttct

SEQ ID NO: 164711 - DNA, 1875 bp, Homo sapiens
  Payload ID: 12447
  Gene Symbol: PHF12
  Gene Name: PHD finger protein 12
  ENST ID: ENST00000583524
  CDS Start-End: 812-1201
cttagtttgcacacaaacaccaatggatgaacagtccctagcttcctgcggctgcgccttgacccctacaagctttctcaagcgcctgcgcgagacctcaggtcccgcccttttgtctcagtgcgctggcgcagggcagaaaggtggggcttcggtcctccagacgaatgccagcgcggctgcgcgctggggggtactccctcaccgcggctgcgcgggagccaggccgccggctgtcactgcggttgcgcgcggcgagcgccgatcccggggcgcctgcgcgggtggctttgcgggcgctcgcggtaagtttgcgccaagtgcgcggcagccgggacgcagacggcggcggcggcgagaggcggagcccggggaccaccccccatcaccctccccccagtcacctcacgtaccacaacctcacgtaacctctcaccccccctccgatacccccagccccgggatggcagcgcccgccagccttcccggccggaccggctgtcgccagtgccggctttagcctgtgggactaggccccgccgaggcctgacccccggagccgggacccactgtgcagccagcagccgggccgggactgaggggccgctcccccctcgcggcccgtcgggaggacgctgtcgtcccggggactgggggccggggggtgggggggagccagggcgaggaagtcgggacccgtattgggaaaaaagcggggccggggtcaggagcgccccctcccctcacctcccccctccccccggggttgggggggccggagcagagagcacccagcccgggaggtggatgaatgtgggagaaaatggagaccaagacgatcgtgtacgacttggacacatcaggggggctgatggagcaaatccaagctctgctggctccccccaagacggacgaggcagaaaagcgcagtcggaagcctgagaaggagccccggagaagcggcagggccaccaaccacgacagctgcgatagctgcaaggaaggtggagatctcctgtgctgcgaccactgcccggctgccttccacctccagtgctgtaaccctccactgagtgaagaaatgttgcctcctggagagtggatgtgtcaccggtgcactgttcgccgaaaggttctagcaagaggagaagaaaggaggaaaccacagggaaaaatgttaagaagacacagcatgaattagatcacaatggtctcgttcccttacccgtcaaagtctgcttcacgtgtaacaggagttgccgtgtggctcctctcatccagtgtgactattgccctctcctgtttcacatggattgcctcgagccgccgctcactgccatgcccctgggcagatggatgtgtccgaatcacatcgaacatgtggtgctgaaccagaagaatatgacactgagcaatcggtgccaggtgtttgatcgtttccaggacaccgtttcgcagcatgtcgtcaaagtggacttcctgaaccgaatccacaagaagcacccccctaaccggcgtgtgctccagtcggtcaaaagaagaagcttgaaggttcctgatgctataaaatctcagtaccagtttccaccccctctcattgcacccgcggccattcgggacggggagctgatctgcaatgggatccctgaggaatcacagatgcaccttttgaactctgagcacttagccacccaagcagagcagcaagagtggctctgtagtgttgttgcgctccagtgcagcatattgaaacatttatctgctaagcagatgccttcgcattgggactctgaacagacagagaaggctgatattaagcctgttattgtgactgacagctcagtcaccacctccctgcaaacagctgacaagaca

SEQ ID NO: 164712 - DNA, 649 bp, Homo sapiens
  Payload ID: 12447
  Gene Symbol: PHF12
  Gene Name: PHD finger protein 12
  ENST ID: ENST00000584685
  CDS Start-End: 3-649
gaatgccagcgcggctgcgcgctggggggtactccctcaccgcggctgcgcgggagccaggccgccggctgtcactgcggttgcgcgcggcgagcgccgatcccggggcgcctgcgcgggtggctttgcgggcgctcgcgcaaatccaagctctgctggctccccccaagacggacgaggcagaaaagcgcagtcggaagcctgagaaggagccccggagaagcggcagggccaccaaccacgacagctgcgatagctgcaaggaaggtggagatctcctgtgctgcgaccactgcccggctgccttccacctccagtgctgtaaccctccactgagtgaagaaatgttgcctcctggagagtggatgtgtcaccggtgcactgttcgccgaaagaaacgagagcagaaaaaggagctgggtcatgtcaatggactggtggacaaatctggcaaacggactacatcccccagcagtgacactgacttgttggacagatcggccagcaaaactgaactaaaggccattgcccatgcccggatcctggaaaggagagccagcaggcctggcacacccacatccagcgccagcacagagactcccacctctgagcagaatgatgtcgacgaagacatcattgacgtggatga

SEQ ID NO: 164713 - DNA, 7679 bp, Homo sapiens
  Payload ID: 12447
  Gene Symbol: PHF12
  Gene Name: PHD finger protein 12
  Uniprot ID: Q96QT6
  ENST ID: ENST00000577226
  CDS Start-End: 348-2897
tggcagcgcccgccagccttcccggccggaccggctgtcgccagtgccggctttagcctgtgggactaggccccgccgaggcctgacccccggagccgggacccactgtgcagccagcagccgggccgggactgaggggccgctcccccctcgcggcccgtcgggaggacgctgtcgtcccggggactgggggccggggggtgggggggagccagggcgaggaagtcgggacccgtattgggaaaaaagcggggccggggtcaggagcgccccctcccctcacctcccccctccccccggggttgggggggccggagcagagagcacccagcccgggaggtggatgaatgtgggagaaaatggagaccaagacgatcgtgtacgacttggacacatcaggggggctgatggagcaaatccaagctctgctggctccccccaagacggacgaggcagaaaagcgcagtcggaagcctgagaaggagccccggagaagcggcagggccaccaaccacgacagctgcgatagctgcaaggaaggtggagatctcctgtgctgcgaccactgcccggctgccttccacctccagtgctgtaaccctccactgagtgaagaaatgttgcctcctggagagtggatgtgtcaccggtgcactgttcgccgaaagaaacgagagcagaaaaaggagctgggtcatgtcaatggactggtggacaaatctggcaaacggactacatcccccagcagtgacactgacttgttggacagatcggccagcaaaactgaactaaaggccattgcccatgcccggatcctggaaaggagagccagcaggcctggcacacccacatccagcgccagcacagagactcccacctctgagcagaatgatgtcgacgaagacatcattgacgtggatgaggaaccagtagcagcggagccagactatgtgcagccccagctgaggcggccctttgagctgctgattgctgccgccatggagcggaaccccacccaatttcagttgcccaatgaactgacttgtaccactgcactaccaggttctagcaagaggagaagaaaggaggaaaccacagggaaaaatgttaagaagacacagcatgaattagatcacaatggtctcgttcccttacccgtcaaagtctgcttcacgtgtaacaggagttgccgtgtggctcctctcatccagtgtgactattgccctctcctgtttcacatggattgcctcgagccgccgctcactgccatgcccctgggcagatggatgtgtccgaatcacatcgaacatgtggtgctgaaccagaagaatatgacactgagcaatcggtgccaggtgtttgatcgtttccaggacaccgtttcgcagcatgtcgtcaaagtggacttcctgaaccgaatccacaagaagcacccccctaaccggcgtgtgctccagtcggtcaaaagaagaagcttgaaggttcctgatgctataaaatctcagtaccagtttccaccccctctcattgcacccgcggccattcgggacggggagctgatctgcaatgggatccctgaggaatcacagatgcaccttttgaactctgagcacttagccacccaagcagagcagcaagagtggctctgtagtgttgttgcgctccagtgcagcatattgaaacatttatctgctaagcagatgccttcgcattgggactctgaacagacagagaaggctgatattaagcctgttattgtgactgacagctcagtcaccacctccctgcaaacagctgacaagacacctacaccttcccactaccccttgtcctgcccctcagggattagcacccagaattccctgagctgctctccaccccaccagtccccagccctagaggacatcggctgcagttcttgtgcggaaaaatccaagaaaaccccttgtgggactgccaatgggccagtgaacacagaggtgaaagctaatggcccacacctctacagcagccctactgattccacggacccccggcgacttccaggcgctaacaccccactaccaggcctctcacaccggcaaggctggccccggcccctcacgccaccagcggctgggggccttcagaaccacaccgtcggcatcattgtgaagacagagaatgccactggccccagctcttgcccccagaggagtttggttcctgtcccaagcctgcccccttccattcccagctcttgtgccagcatcgagaacaccagcactttgcaaagaaagactgtccaatcacagataggacctccgttgacagattcaaggccactgggctcacccccaaacgccacccgggtgctcactcccccgcaagcagcaggagatggtatcttggccacaacagccaaccaacgattcagctcaccagcgccatcgtcagatggcaaggtcagccccggcacgttatccataggaagcgctttaaccgtaccctctttcccagccaactctactgccatggtggacctcaccaactcacttcgagcatttatggatgtcaatggagaaatcgagataaatatgctggacgagaagctgatcaagtttctggccttgcagagaatacatcagcttttcccctcccgggtccaaccttcaccgggcagtgtcgggacacatcagctggcttctggagggcaccacatagaaggtgcgcatgtacacacctgtcaccacatcatcagatctcccctctacgtgtgcgaatggtcaccttgcctccatggagaatctgagcttccagtatctcaaacctccttgtgtgcttttcatgggcttaataaagcaccatggtttttttctgaagagagcaggaacaagatggcaaccacagctttctgatcagacttggggaagtctgctgtaactttctttcatatataagtccacttcgagacacagcaaagcagctaccagtacctttgggtatatgtagtgtactttctgcttacttgctttcaaatatttgaattagaagggcttcccgactgagtgcagtggctcacacctgtaatcccagcactttgggaggctgaggcgggaggatcacttgagcccaggagttggagaccagcctgggcaacacagtgagaccctatctctacaaataattttaaacttacccaggcatggtggcatacacctgtaatcccagctgcttggaaggctaagatgggaggatcgcttgagtctgggaggtcaaggctgcagtgagctatgattgtgccactgcactccagcctgggtgacagagtgagaccctgtctccaaataaataagtaaataaataaataaaattttaaaaagaatggcttcccaagagggaacttttcaagttcaagttgagaaatagaataacactaggccaaccttctggaaattttccccaagtggttaactctgtttcagatatgtctgagcattggccattaagagccttgctgcttcaaagtgtggttcgcagaccagcagcatcagcagcccctgagagcttgttagaaatgcagagctcaatgcattggttttttgcctatttttaaagaaaacagcaaaagaaatgcagagctaaggcccctcctcagacctattgaatcagaatctgcatttcaacaagatctgtaggcgattcttatgcacattaaagtttgagaaacactggtccatgccgtctgtttttccatattctccctatagtaccagctggaatatcccggattagccagccaggagcccaggaacttacacagtactgtcatctctgacttctctgaccatcttcaaagatggtcctctgtaccctgtgttggaaatgctgtgggtggggagagaaagccttaccctgccgcagctcagtgttggatgtgagtttggaaagatgagtcatccagcgggattttctccaggccatgagccaaaggtccagattttgttggtttatgtttggatcacaggatctgagtttctgaatgatcctattcctatgtttgtcttgtagtgcaaagaaaggaggtacaggcccgagctgtgttctaccccctcttagggttgggaggagctgtgaacatgtgctatcgaaccctctacatcgggacaggtgagccagccaggaagctgggagagacactgaatctgttcagccctaaagactgacacccttacccacagaagttagaaaggggtgagggaagccctttccagagttgactgctttaaatcagtggatagctagacaagagaaactaagaatagagacaatcagccagtcacggtggctcacgcctataatcccaacactttgggaggacaaggcaggaggaacacttgagcccaggacttcgagaccagcctgggcaacatggtgaaaccctatctctaccaaaaacaaatataaaaaattagctgggctaacatgcctatagtcccagctacttgggaggctgaggtgggaagatcacctgaggctgggaggtccaggcagtgatcctttttgtgcctctgcactccagcccaggcaacagagtgagaccctgtctcaaaaataaaagagacaatcagttccttgtcttcccttgttcaggcccttttgctttgtctttgcccagtgttgcaacagcagagatgaaagtcagctctgactactgcccagggaggcactttaaacactgcagggaagaacctaaggagaaggcagatgctttgtccctggtggtctttgaaagagtgatagactcacacatacccaatcttcagttagccctgtatctgttttttgttttgttttgttttccctaaaagtcctagagaccgatagctctgtatctggtacagaaggacagacagattagcccttaccctagaaacttccctttctttaaggtgataagattttctaggctctgcaccccgatgttgtattttcatagaaatatcccatcctcttcagtagctcactcttcccttctgggtagcagccacatgttctaaagcagatcagctggcagggacagctgttctttatcaggagcttggaaaagacaacagtttttgttcaaaaataaaaggggagggccctgagctactcacccttgaagtctctgctagtgccaacccagaagctaactctctccctgtcttacctccccgacacatgcaccttacaatctgttctctgccttccttttcctctactcctgccaccttgcaggagctgacatggatgtgtgccttacaaactatggtcactgtaactacgtgtccgggaaacatgcctgcatattctacgatgaggtgagggccggagatgcggtgggagggagctttcccaacctgaggcctctcccaggcagtaggtttttgttcagtgccctgaggggagggaagagggattgggggtcctctctttttcttccctccctgtcattcctggaggaggagagtcttgatgtgaaatagcatcctacctgggaagctacctgcttcccaggagcagggctaccatttttcctgaggttagtcacaggcacaacagagggagcctaccctaaagcaagggaggggaccagcatagaaggaagccaagccttgtgggtgtgtccctgtgaatttcattatcatcacgggccagtgagtatcataccaagaggagcggtgctgagagggcagagtgaaggagtgggagagtagggagtgtgggacaccagaaggaaagcttccctgaggaggtgtctccagcccccttctgaaaggacaggggccatgactggggaggcaagtaaggactctctaggtagagtagcacggccttctccatatgtcctctctccccttagccccaggccccacacagcagaccacacatcttatctcccctcctcctcctcagaataccaaacattatgagctgttaaactacagtgagcatgggacaacggtggacaatgtgctgtattcatgtgacttctcggagaagaccccgccaacccccccaagcagtattgttgccaaagtgcagagtgtcatcagtaagttggagcagagatctgtggccacaaagctgaggccccagtcagggtggttctgacttgctgcccatggtctgtctcttgccttcccagtcctattggccaagctctacttcctcgtgggcccagggcaggccacagagaagcaagtgctgagtacccccatgtgtgtacacacctgtggggacttcagactccaccaaccctttctgagcatccttcctccctagtcatgcagcagttggaatggggagatgcaggagcccaaccttggcaaacagcccacatgggttggctgctcactgttcctcttctgtgaccatccccctttttcccagggcgccgccggcaccagaaacaggacgaagagccaagtgaggaggcagccatgatgagttcccaggcccaggggccgcagcggagaccctgcaattgcaaagccagcagctcgagcttgattgggggcagtggggccggctgggagggcacagccttactgcaccatggcagctacatcaagctgggctgcctgcagtttgtcttcagcatcactgagtttgcgaccaaacagcccaaaggcgatgccagcctgctgcaggatggggtcttggccgagaagctctctctcaagccccaccagggccctgtgctgcgctccaactctgttccttaggactggcggctaccccgccactggcctgtacacccacccaagactcctgcaatgcaaaaatgtacacaaaccaagcccgggtgttttctatactctaccagaaacccttcaactacaatctttgcatgaaatgaagaaaaccttttgactgttttttaaaaatcctttttcttttctcaagttctagggggcatttgcacatatatttgtactcaacatttcatgggaaagcggcagacctgagctgaggaacagcgtgggcagggagggaaagacccagggtctggacacttcctccaacacaaaacccttccccacccacctcctgctccctccccctcgcccaccattgtaaaataatcagaaacttgttctattttgtggcagtgacaatagttttatattaaaagaaaaaatacagttttcatacagcaaaatctatacaatatcattgttttatttaatataaagatcgctacccaccttccttccatggttcccaccctccacgttattttccctttctgcagcggttgcactacaggtagctactgtgtattatggacaaatgagaaatgaattctttttctggctgtccatctattttatttcaaataaggaaaagtgtatttggattttgtgtaaatacatctagtgatgacattttttcaatgtttttaaaaaccgtgtacagtactacatgtggtagagcgttttctcaaattgtctattgtagcaaaaatgtttttgtcgtaaacctgttttgtctcctttttttgttctcttgccacttctctcctcttcctcctgcccctggttccctcctctcctcccacccccacaaccagtaccaatgtacatagtaattgtaatgttttagactttacagaaactttcctgtattctgtatataaaaaacaaaaatacttc

SEQ ID NO: 164714 - DNA, 869 bp, Homo sapiens
  Payload ID: 12447
  Gene Symbol: PHF12
  Gene Name: PHD finger protein 12
  ENST ID: ENST00000589176
  CDS Start-End: 1-241
gtttgatcgtttccaggacaccgtttcgcagcatgtcgtcaaagtggacttcctgaaccgaatccacaagaagcacccccctaaccggcgttgtcgggacacatcagctggcttctggagggcaccacatagaagtgcaaagaaaggaggtacaggcccgagctgtgttctaccccctcttagggttgggaggagctgtgaacatgtgctatcgaaccctctacatcgggacaggagctgacatggatgtgtgccttacaaactatggtcactgtaactacgtgtccgggaaacatgcctgcatattctacgatgagaataccaaacattatgagctgttaaactacagtgagcatgggacaacggtggacaatgtgctgtattcatgtgacttctcggagaagaccccgccaacccccccaagcagtattgttgccaaagtgcagagtgtcatcaggcgccgccggcaccagaaacaggacgaagagccaagtgaggaggcagccatgatgagttcccaggcccaggggccgcagcggagaccctgcaattgcaaagccagcagctcgagcttgattgggggcagtggggccggctgggagggcacagccttactgcaccatggcagctacatcaagctgggctgcctgcagtttgtcttcagcatcactgagtttgcgaccaaacagcccaaaggcgatgccagcctgctgcaggatggggtcttggccgagaagctctctctcaagccccaccagggccctgtgctgcgctccaactctgttccttaggactggcggctaccccgccactggcctgtacacccacccaagactcctgcaatgcaaaaatgtacacaaaccaagccc

SEQ ID NO: 164715 - DNA, 560 bp, Homo sapiens
  Payload ID: 12447
  Gene Symbol: PHF12
  Gene Name: PHD finger protein 12
  ENST ID: ENST00000584822
  CDS Start-End: 1-164
agttgcccaatgaactgacttgtaccactgcactaccaggttctagcaagaggagaagaaaggaggaaaccacagggaaaaatgttaagaagacacagcatgaattagatcacaatggtctcgttcccttacccgtcaaagtctgcttcacgtgtaacagctgaaccagaagaatatgacactgagcaatcggtgccaggtgtttgatcgtttccaggacaccgtttcgcagcatgtcgtcaaagtggacttcctgaaccgaatccacaagaagcacccccctaaccggcgtgtgctccagtcggtcaaaagaagaagcttgaaggttcctgatgctataaaatctcagtaccagtttccaccccctctcattgcacccgcggccattcgggacggggagctgatctgcaatgggatccctgaggaatcacagatgcaccttttgaactctgagcacttagccacccaagcagagcagcaagagtggctctgtagtgttgttgcgctccagtgcagcatattgaaacatttatctgctaagcagatgccttcgcattggg

SEQ ID NO: 164716 - DNA, 555 bp, Homo sapiens
  Payload ID: 12447
  Gene Symbol: PHF12
  Gene Name: PHD finger protein 12
  ENST ID: ENST00000584236
  CDS Start-End: 466-555
attcgctctcccgaggcgccagcccactccatctcgttgcaccggcaggcctccccacccccttcttgttggcccctttgtgcttcccccagcacgtccgggtaccgggctttgggcctctcccgagcgggtctttggagtcccccactgtccatacaaggaagtggcaagaagggaaccgcgcaccctcttcccatccccctacccttgatcctccccatttggaagaagctgttctcgttgttgtgctgcaggaacgcgcaaatccaagctctgctggctccccccaagacggacgaggcagaaaagcgcagtcggaagcctgagaaggagccccggagaagcggcagggccaccaaccacgacagctgcgatagctgcaaggaaggtggagatctcctgtgctgcgaccactgcccggctgccttccacctccagtgctgtaaccctccactgagtgaagaaatgttgcctcctggagagtggatgtgtcaccggtgcactgttcgccgaaagaaacgagagcagaaaaaggagctgggtcatgtcaatgga

SEQ ID NO: 164717 - DNA, 555 bp, Homo sapiens
  Payload ID: 12447
  Gene Symbol: PHF12
  Gene Name: PHD finger protein 12
  ENST ID: ENST00000582853
  CDS Start-End: 280-555
gaggtgggggttgggacgagtgaagagaaccccatatgggattggaagtcgctggggagccgggacagagccggccggggacagccggcagtggcgggggaggaaggggaggagctccgggcccagtgccgcttgcctgcccgcgcgcccgctgccctcggggctcctgcccggccgggatctcctcggggttcaagtgattctcctgccttacgtgtcatgttgtcttactggtccacctaaatatggaagatacgtaaccctccactgagtgaagaaatgttgcctcctggagagtggatgtgtcaccggtgcactgttcgccgaaagaaacgagagcagaaaaaggagctgggtcatgtcaatggactggtggacaaatctggcaaacggactacatcccccagcagtgacactgacttgttggacagatcggccagcaaaactgaactaaaggccattgcccatgcccggatcctggaaaggagagccagcaggcctggcacacccacatccagcgccagcacagagactcccacctctgagcagaatgat

SEQ ID NO: 164718 - DNA, 820 bp, Homo sapiens
  Payload ID: 12447
  Gene Symbol: PHF12
  Gene Name: PHD finger protein 12
  ENST ID: ENST00000579036
  CDS Start-End: 1-820
cccttgtcctgcccctcagggattagcacccagaattccctgagctgctctccaccccaccagtccccagccctagaggacatcggctgcagttcttgtgcggaaaaatccaagaaaaccccttgtgggactgccaatgggccagtgaacacagaggtgaaagctaatggcccacacctctacagcagccctactgattccacggacccccggcgacttccaggcgctaacaccccactaccaggcctctcacaccggcaaggctggccccggcccctcacgccaccagcggctgggggccttcagaaccacaccgtcggcatcattgtgaagacagagaatgccactggccccagctcttgcccccagaggagtttggttcctgtcccaagcctgcccccttccattcccagctcttgtgccagcatcgagaacaccagcactttgcaaagaaagactgtccaatcacagataggacctccgttgacagattcaaggccactgggctcacccccaaacgccacccgggtgctcactcccccgcaagcagcaggagatggtatcttggccacaacagccaaccaacgattcagctcaccagcgccatcgtcagccaactctactgccatggtggacctcaccaactcacttcgagcatttatggatgtcaatggagaaatcgagataaatatgctggacgagaagctgatcaagtttctggccttgcagagaatacatcagcttttcccctcccgggtccaaccttcaccgggcagtgtcgggacacatcagctggcttctggagggcaccacatagaag

SEQ ID NO: 164719 - DNA, 648 bp, Homo sapiens
  Payload ID: 12447
  Gene Symbol: PHF12
  Gene Name: PHD finger protein 12
  ENST ID: ENST00000583747
  CDS Start-End: 297-648
agcccactccatctcgttgcaccggcaggcctccccacccccttcttgttggcccctttgtgcttcccccagcacgtccgggtaccgggctttgggcctctcccgagcgggtctttggagtcccccactgtccatacaaggaagtggcaagaagggaaccgcgcaccctcttcccatccccctacccttgatcctccccatttggaagaagctgttctcgttgttgtgctgcaggaacgcggttagggtgggctccccctggttccgggggctgagagattctgggagcagcctggatgggaggaagaaggacaaaaggggggagaggggtgggtgacggagaaaccgcgccgggggggcgacggaccgcccgggagctccgagtgtgcacacacgccgtttgtatgtgtgtgcagcaaatccaagctctgctggctccccccaagacggacgaggcagaaaagcgcagtcggaagcctgagaaggagccccggagaagcggcagggccaccaaccacgacagctgcgatagctgcaaggaaggtggagatctcctgtgctgcgaccactgcccggctgccttccacctccagtgctgtaaccctccactgagtgaagaaatgttgcctcctggagagtggatgtgtc

SEQ ID NO: 164720 - DNA, 574 bp, Homo sapiens
  Payload ID: 12447
  Gene Symbol: PHF12
  Gene Name: PHD finger protein 12
  ENST ID: ENST00000578900
  CDS Start-End: 116-574
agttctgagggttgcctgggctctgctgggtggtttttctgtttcacatgatgttggctgggactgcagtcatttggaggcttcactgaactgtaaccctccactgagtgaagaaatgttgcctcctggagagtggatgtgtcaccggtgcactgttcgccgaaagaaacgagagcagaaaaaggagctgggtcatgtcaatggactggtggacaaatctggcaaacggactacatcccccagcagtgacactgacttgttggacagatcggccagcaaaactgaactaaaggccattgcccatgcccggatcctggaaaggagagccagcaggcctggcacacccacatccagcgccagcacagagactcccacctctgagcagaatgatgtcgacgaagacatcattgacgtggatgaggaaccagtagcagcggagccagactatgtgcagccccagctgaggcggccctttgagctgctgattgctgccgccatggagcggaaccccacccaatttcagttgcccaatgaactgacttgtaccactgcactaccaggttctagcaagagg

SEQ ID NO: 164721 - DNA, 3681 bp, Homo sapiens
  Payload ID: 12448
  Gene Symbol: PHF13
  Gene Name: PHD finger protein 13
  Uniprot ID: Q86YI8
  ENST ID: ENST00000377648
  CDS Start-End: 383-1285
agtcgccacccagactacatttcccgacaggcctcccggctctcccgccctccctcccgagacacgagccgaactgggcgtcaggtcggggagccggtcgggttcccgctcaccgccgccgccgccgccccctgcagccactctcccgcctctaccgccgcgggagctgcatcgtccactccggtcggcggtggaaccgccagtccggggtcacagagcttgagaagcgacgcgctgagccccccatcacctccagcccgggcgacccctcccgggtccgccctcgccctgcgcagccgcccgagcccccagccccgggcggccccgctccagcatcccagctcctgcactctcgcagccgccgccgccccccgcccggaacatggactctgactcttgcgccgccgccttccacccggaggaatactcccccagttgcaagaggcgcaggaccgtggaagacttcaacaaattctgcacctttgtcttggcctatgctggctacatcccttatccgaaggaggaactccctttaaggagcagccccagccctgctaacagcactgctggtaccattgacagcgacggctgggacgcgggtttctcagacatcgcgtcctcagtgcccttgccagtctctgaccgctgctttagccacctgcagcctactctcttgcagcgagccaagcccagtaacttcctgctggacagaaagaaaacggacaagctgaagaagaagaagaagaggaagcgcagggacagtgatgcgcctgggaaagaggggtacagggggggcttgctgaagctggaagccgctgacccctacgtggagacccccacgagtcccaccttgcaggatatcccccaggctcccagcgacccctgctcgggctgggactccgatactccctcgagtggatcttgtgccactgtgtcacctgatcaggtcaaagaaataaaaactgaaggcaaacggactatcgtccggcagggaaagcaggtggtgttccgagatgaggacagcactggcaatgatgaggacatcatggtggactcagatgacgattcctgggacctcgtgacctgcttctgcatgaagccatttgccggccgccccatgatcgagtgtaatgagtgccacacctggattcacctgtcctgtgcgaaaatccggaaatccaatgttccagaagtgtttgtctgccaaaagtgccgggactccaagtttgacatccgccgttccaaccgctcgcggacgggctcccggaagctgttcctggactgactgctggctggcgaggaggctgcgagcgtggaatcggaagcgaccgcgggcttttttgcccttctcttagttgagcacagaaccctcagctctggtgcgggcagatccctgccatttaggtgcctaagcaaaaggacaggctgtccaaggtagaaactgtacatagccggtgaccgaatgcgacctttgccagccagagctgctgccagagctgcgttccctgcagtggaggtggactggacacccacgtgcagcgggtttggctcatttgaaaatgagggtccgtggtagctgtgcgttttgctatcattgctaagagattcccgctgattgggctcagtgccagctgttattctgcttccactgtgttggggagaggtgttcggtttccccagcctgttaatgaacagccatacgtgtaagctttttcttgagtgttaagtcttttaccaaaagtgtctgtacagcagccatccaagttgcccctacttagtggcttgccctctgcctgcctcagctgctgcctgaccggctgggggaggcactggcgggaggcctcgggctcccctggaagggcgctgggctggcgggtcagctggtggttcttaggtttccttctgtttgttaaaagggacaatgtggccacttctctgtggaaagggagttggttggggggttgagatggcccgtgttcataactcagtttcctgttttgcacgatgtaaaaaccctgtctttttgcacgatacagccaaaagtattggctgatttcttgctgagtgccctcttagttggtgtgtgaggtcttggtgggctcaggccagctgtttgcgagtgtgggaactcataggttctgtctttgtctcttcctttcacctcattctggtagcagcataaaggttaggcaatcactgggacccgcatggtgttcctccaaagaatagggtaaaggagagctgggagggagccctctccgttgggtgactcttgtgtgccctttagacaggctggcctgccggttccacagggtacagttaggacttgagtctttctttttctgttttgagttggtgagtgagtgatagggtaacatgggccttcaggatgaccccttggaactgtgccgagttccttaaatctcagctgggatcctggacctgggaggcccctgtgagggccagctctggaaaaacctgggagttgatgccggaggctgtggaagaactctgctcgagggcagggtgccctggaacactggtagttctggggctgggagggagaggggctccggctttctctgaaatgaacactgctcttcagcagttcaagtacttgttctcaaaacattttctaattgattggtaggttttcataagcattgtttctttaaggcatggaaagggaagaatgctcaagcaagtcatgtttgttttcagtgggatgggcccgcgttctcactgctgggggcttccccttcatgtggcacctttgtgccaggccaccaggcagactcttcccaccttctcccactgaagcaccaaggggcttgaaccgtaatttggctaatcagaggcattttttttgtcctagtatctttcacacttgtccaaccgtcttatttttttaaaagttctgttgcttgtattaacacgaaactagagagaaatagtttctgaagccagtttattgtgaagatccccaagggggaggttcggtagagaaaaatagtaagctggtttagaaactgacgagggcaaacagccaggacgcattggagaggaatttgccaaagatctaccctgagataacgcctgtccagtgtcttcaccacgtgaataaccagcgctccaaagtgtttttctgctttgaaaaaaaaaaattccacaagcttttaaaggtgcatttaagaatccatgtgactttagaatggaactgccggccctggcaactgtcacgtgtgctagaaggttcgatgcctctggaatgcatgtgatactcatctccattttgtttccttgattgcatttttgttcttttagcagatctgtccctgtgggtggtgtctaagaagtcggacaccttggtttttgtgttagattgagctgggcagctgcaatcagcttctttatatgcaaattaggcacgacccatctgtggttcctggttggtggctaatgaagtgaggggagggagggatgtcaccccaaaagtaggccctcccattggctttggccaggccagacacttcacatcgtttacatggttctgtgtaattttaaagtttatgtgtataaagcgaagctgtttctgtgaaactgtatattttgtaaataaatatattgctactttgaggttcatgattcaaggttcaggcgattgcgttctgtgctgaagga

SEQ ID NO: 164722 - DNA, 4276 bp, Homo sapiens
  Payload ID: 12449
  Gene Symbol: PHF14
  Gene Name: PHD finger protein 14
  Uniprot ID: O94880
  ENST ID: ENST00000403050
  CDS Start-End: 453-3119
acttccttttcagagctgtatccgggtcgctgctttccctattgtctgaggcagccgccctcgcgctgtgcaatttctggtctttcgttgcttctggtccaggctaataaagtttttctttctttaattttttttcttctagttttaacgggagaaattaactccccggggccgccgggttgactgcgctgcctgggccggaggtcttctccggccagggagcgctgtgggaaggggctcgagcggccagggccaggcgaggccgggggggcggggggttaggggaccgcggggctactcttgggagcgcccctgtccggctggctgcgcgccggttttaaatagcatctttcggacttgtcttcgcggccccagtccccgacctcggcgctgcctgggctcctgcagcctctccctaagtcttctccaaacgaccacctcacggattccttatggatcgcagctccaagaggaggcaggtgaagcctttggcagcttctctgctggaagctcttgattatgatagttcagatgacagtgattttaaagttggagatgcctcagattctgaagggagtggtaatggaagtgaagatgcttcaaaggacagtggagaaggttcctgtagtgattctgaagaaaatattttagaagaagaactgaatgaagatattaaagtaaaagaagaacaacttaaaaattctgcagaggaagaagtactatcatcagaaaaacaattaattaaaatggaaaagaaggaagaagaagaaaatggagaaagacctagaaagaaaaaggagaaagagaaggaaaaagaaaaggaaaaggagaaagagaaggaaagagagaaggaaaaagaaaaagcaacagtatctgagaatgtggctgcttctgctgctgccaccacaccagccacaagtcctcctgctgttaacacatccccttctgttcccactacgacaaccgctacagaggaacaagtcagcgagccaaaaaaatggaaccttcgacgaaaccgaccacttctggattttgtgtccatggaagagctgaatgacatggatgactatgacagtgaggatgacaatgattggcgacctactgtagtaaagagaaaagggagatctgcgtctcagaaagagggaagtgatggagacaatgaggatgatgaagatgagggaagcgggagtgatgaagacgagaatgatgaaggcaatgatgaagatcatagtagccctgccagtgaagggggttgcaagaagaagaagagtaaagttcttagcagaaacagtgctgatgatgaggaactgaccaatgatagcctgaccctatctcaaagcaagagtaatgaggactcgctgattcttgagaagagtcaaaactggagctctcaaaaaatggaccatattctgatttgctgtgtttgtctgggagataatagtgaggacgctgatgaaataattcagtgtgacaattgtggcattacagtccatgaaggttgttatggagttgatggagagagtgactctattatgagttcagcttctgaaaactccactgaaccttggttttgtgatgcctgtaaatgtggtgtttctcctagctgtgaactgtgtcctaatcaggatggaattttcaaggagacagatgctggaagatgggttcatattgtttgtgccctgtatgttcctggagtagcctttggagatattgacaaattacgaccagtaacactaacggaaatgaactattccaaatatggtgccaaggagtgtagcttttgtgaagaccctcgctttgctagaactggggtttgcattagctgtgatgcagggatgtgcagagcctatttccatgtgacctgtgctcaaaaggaaggtctgctttcagaggcagcggcggaagaggatatagcagatccattctttgcttattgtaagcaacatgcagataggttagacagaaagtggaagagaaaaaactacttggctctacagtcctattgtaaaatgtctttgcaagagagagagaagcaactatcaccagaagcacaggcaaggatcaatgcccggcttcagcagtatcgtgccaaagcagaactagctcgatctaccagaccccaggcctgggttccaagggaaaaattgcccagaccactcaccagcagtgcttcagctattcgtaaacttatgcggaaagcagaactcatggggatcagtacagatatctttccagtggacaattcagatactagttctagtgtggatggaaggagaaaacataagcaaccagctctcactgcagattttgtgaattattattttgagagaaatatgcgcatgattcaaattcaggaaaatatggctgaacaaaagaatataaaagataaattagagaatgaacaagaaaagcttcatgtagaatataataagctatgtgaatctttagaagaactacaaaacctgaatggaaaacttcgaagtgaaggacaaggaatatgggctttactaggcagaatcacagggcagaagttgaatataccggcaattttgcgagcacccaaggagagaaaaccaagtaaaaaagaaggaggcacacaaaagacatctactcttcctgcagtactttatagttgtgggatttgtaagaagaaccatgatcagcatcttcttttattgtgtgatacctgtaaactacattaccatcttggatgtctggatcctcctcttacaaggatgccaagaaagaccaaaaacagttattggcagtgctcggaatgtgaccaggcagggagcagtgacatggaagcagatatggccatggaaaccctaccagatggaaccaaacgatcaaggaggcagattaaggaaccagtgaaatttgttccacaggatgtgccaccagaacccaagaagattccgataagaaacacgagaaccagaggacgaaaacgaagcttcgttcctgaggaagaaaaacatgaggaaagagttcctagagagagaagacaaagacagtctgtgttgcaaaagaagcccaaggctgaagatttaagaactgaatgtgcaacttgcaagggaactggagacaatgaaaatcttgtcagatacccttcatgagacccaactctgccacagctcatcctcggaggcaatcccggaaacctcttttataagtgtgattttaaaaatgtggattaaactctcgatagagtacataaagtaaaggagaacagctatattgtcctttctataagcttgtcactgcaaaaagttgccttttgcttgtcaggtttggatagaatataattgattggtttgttacttggactaacaaggcagtagatttgcctgtgtggaattttttttcctatttttcttctttttgctttttttgcacttatcagaaatatttgatgtgtgcattgttgaaaaatactggatacatgtcttgtcagaattgtcgtattaagtaatgtctttccctcttgcttctttggcaaatgttgatacacagtgtttggacttactgaagagttactgaagcctgtgggacttaataaatacaatatgctactccctgttgtgattgaacaatacaaataacaaacaagaaagacaatgcattccattagtctgctattctgtttccttcaacttcatacatagattcatatatgaagtactgcattgtaaaacaactatagactcatattaaatgttatttctatttataatattcagcaaaagtgaaagacttgtgaagcatatgacattctatttttgacttattagtcctagtgtgaaagcattaatattattagcatgaaatttttacttcagattttaagctcatgaataaagatatatctgtgttgatctctagatatttttagtaatacccaaatatattcagtccttattgttttaatataagctttctgtgttcagtataattttatttttctcaaccttaaatatgaacttaggaaataaggagggaagtacaaagattattgactatacaacctaccagctgaaagaaagatcttcatcaacatctgtatctttccagaggtatacagaattaaaatttgatcttcaagctttaatgatccagttttaagtcaacggcagaagtatgttgaatatttcatcactcaatcttgaactgatttagaagagactctttgctgaaattgaattgcacttatacatgtaaattgtcaacatgtaatttggaattttctgattaataaatgtggttttggacatct

SEQ ID NO: 164723 - DNA, 2627 bp, Homo sapiens
  Payload ID: 12449
  Gene Symbol: PHF14
  Gene Name: PHD finger protein 14
  ENST ID: ENST00000423760
  CDS Start-End: 436-564
gtatccgggtcgctgctttccctattgtctgaggcagccgccctcgcgctgtgcaatttctggtctttcgttgcttctggtccaggctaataaagtttttctttctttaattttttttcttctagttttaacgggagaaattaactccccggggccgccgggttgactgcgctgcctgggccggaggtcttctccggccagggagcgctgtgggaaggggctcgagcggccagggccaggcgaggccgggggggcggggggttaggggaccgcggggctactcttgggagcgcccctgtccggctggctgcgcgccggttttaaatagcatctttcggacttgtcttcgcggccccagtccccgacctcggcgctgcctgggctcctgcagcctctccctaagtcttctccaaacgaccacctcacggattccttatggatcgcagctccaagaggaggcaggtgaagcctttggcagcttctctgctggaagctcttgattatgatagttcagatgacagtgattttaaagttggagatgcctcaggactcgctgattcttgagaagagtcaaaactggagctctcaaaaaatggaccatattctgatttgctgtgtttgtctgggagataatagtgaggacgctgatgaaataattcagtgtgacaattgtggcattacagtccatgaaggttgttatggagttgatggagagagtgactctattatgagttcagcttctgaaaactccactgaaccttggttttgtgatgcctgtaaatgtggtgtttctcctagctgtgaactgtgtcctaatcaggatggaattttcaaggagacagatgctggaagatgggttcatattgtttgtgccctgtatgttcctggagtagcctttggagatattgacaaattacgaccagtaacactaacggaaatgaactattccaaatatggtgccaaggagtgtagcttttgtgaagaccctcgctttgctagaactggggtttgcattagctgtgatgcagggatgtgcagagcctatttccatgtgacctgtgctcaaaaggaaggtctgctttcagaggcagcggcggaagaggatatagcagatccattctttgcttattgtaagcaacatgcagataggttagacagaaagtggaagagaaaaaactacttggctctacagtcctattgtaaaatgtctttgcaagagagagagaagcaactatcaccagaagcacaggcaaggatcaatgcccggcttcagcagtatcgtgccaaagcagaactagctcgatctaccagaccccaggcctgggttccaagggaaaaattgcccagaccactcaccagcagtgcttcagctattcgtaaacttatgcggaaagcagaactcatggggatcagtacagatatctttccagtggacaattcagatactagttctagtgtggatggaaggagaaaacataagcaaccagctctcactgcagattttgtgaattattattttgagagaaatatgcgcatgattcaaattcaggaaaatatggctgaacaaaagaatataaaagataaattagagaatgaacaagaaaagcttcatgtagaatataataagctatgtgaatctttagaagaactacaaaacctgaatggaaaacttcgaagtgaaggacaaggaatatgggctttactaggcagaatcacagggcagaagttgaatataccggcaattttgcgagcacccaaggagagaaaaccaagtaaaaaagaaggaggcacacaaaagacatctactcttcctgcagtactttatagttgtgggatttgtaagaagaaccatgatcagcatcttcttttattgtgtgatacctgtaaactacattaccatcttggatgtctggatcctcctcttacaaggatgccaagaaagaccaaaaacagttattggcagtgctcggaatgtgaccaggcagggagcagtgacatggaagcagatatggccatggaaaccctaccagatggaaccaaacgatcaaggaggcagattaaggaaccagtgaaatttgttccacaggatgtgccaccagaacccaagaagattccgataagaaacacgagaaccagaggacgaaaacgaagcttcgttcctgaggaagaaaaacatgaggaaagagttcctagagagagaagacaaagacagtctgtgttgcaaaagaagcccaaggctgaagatttaagaactgaatgtgcaacttgcaagggaactggagacaatgaaaatcttgtcaggtgtgatgaatgcagactctgctaccattttggctgtttggatcctcctttgaaaaagtctcctaaacagacaggctacggatggatatgtcaggaatgtgattcttcatcttccaaggaagatgaaaatgaagctgaaagaaaaaatatatctcaggagctcaacatggaacagaaaaatccaaagaaataaaagattttctgtagtgtttttgaaaagtttgcagcttatgtaatagcagataaaatttctaattgtaaaatgttaaattgtaaaatctaatttgcaaaatgttctcaataaagtcattcaaaatgaaatagga

SEQ ID NO: 164724 - DNA, 2479 bp, Homo sapiens
  Payload ID: 12449
  Gene Symbol: PHF14
  Gene Name: PHD finger protein 14
  ENST ID: ENST00000521747
  CDS Start-End: 453-581
acttccttttcagagctgtatccgggtcgctgctttccctattgtctgaggcagccgccctcgcgctgtgcaatttctggtctttcgttgcttctggtccaggctaataaagtttttctttctttaattttttttcttctagttttaacgggagaaattaactccccggggccgccgggttgactgcgctgcctgggccggaggtcttctccggccagggagcgctgtgggaaggggctcgagcggccagggccaggcgaggccgggggggcggggggttaggggaccgcggggctactcttgggagcgcccctgtccggctggctgcgcgccggttttaaatagcatctttcggacttgtcttcgcggccccagtccccgacctcggcgctgcctgggctcctgcagcctctccctaagtcttctccaaacgaccacctcacggattccttatggatcgcagctccaagaggaggcaggtgaagcctttggcagcttctctgctggaagctcttgattatgatagttcagatgacagtgattttaaagttggagatgcctcaggactcgctgattcttgagaagagtcaaaactggagctctcaaaaaatggaccatattctgatttgctgtgtttgtctgggagataatagtgaggacgctgatgaaataattcagtgtgacaattgtggcattacagtccatgaaggttgttatggagttgatggagagagtgactctattatgagttcagcttctgaaaactccactgaaccttggttttgtgatgcctgtaaatgtggtgtttctcctagctgtgaactgtgtcctaatcaggatggaattttcaaggagacagatgctggaagatgggttcatattgtttgtgccctgtatgttcctggagtagcctttggagatattgacaaattacgaccagtaacactaacggaaatgaactattccaaatatggtgccaaggagtgtagcttttgtgaagaccctcgctttgctagaactggggtttgcattagctgtgatgcagggatgtgcagagcctatttccatgtgacctgtgctcaaaaggaaggtctgctttcagaggcagcggcggaagaggatatagcagatccattctttgcttattgtaagcaacatgcagataggttagacagaaagtggaagagaaaaaactacttggctctacagtcctattgtaaaatgtctttgcaagagagagagaagcaactatcaccagaagcacaggcaaggatcaatgcccggcttcagcagtatcgtgccaaagcagaactagctcgatctaccagaccccaggcctgggttccaagggaaaaattgcccagaccactcaccagcagtgcttcagctattcgtaaacttatgcggaaagcagaactcatggggatcagtacagatatctttccagtggacaattcagatactagttctagtgtggatggaaggagaaaacataagcaaccagctctcactgcagattttgtgaattattattttgagagaaatatgcgcatgattcaaattcaggaaaatatggctgaacaaaagaatataaaagataaattagagaatgaacaagaaaagcttcatgtagaatataataagctatgtgaatctttagaagaactacaaaacctgaatggaaaacttcgaagtgaaggacaaggaatatgggctttactaggcagaatcacagggcagaagttgaatataccggcaattttgcgagcacccaaggagagaaaaccaagtaaaaaagaaggaggcacacaaaagacatctactcttcctgcagtactttatagttgtgggatttgtaagaagaaccatgatcagcatcttcttttattgtgtgatacctgtaaactacattaccatcttggatgtctggatcctcctcttacaaggatgccaagaaagaccaaaaacagttattggcagtgctcggaatgtgaccaggcagggagcagtgacatggaagcagatatggccatggaaaccctaccagatggaaccaaacgatcaaggaggcagattaaggaaccagtgaaatttgttccacaggatgtgccaccagaacccaagaagattccgataagaaacacgagaaccagaggacgaaaacgaagcttcgttcctgaggaagaaaaacatgaggaaagagttcctagagagagaagacaaagacagtctgtgttgcaaaagaagcccaaggctgaagatttaagaactgaatgtgcaacttgcaagggaactggagacaatgaaaatcttgtcagatacccttcatgagacccaactctgccacagctcatcctcggaggcaatcccggaaacctcttttataagtgtgattttaaaaatgtggattaaactctcgatagagtacataaagtaaaggagaacagctatattgtcctttctataagcttgtcactgc

SEQ ID NO: 164725 - DNA, 3407 bp, Homo sapiens
  Payload ID: 12449
  Gene Symbol: PHF14
  Gene Name: PHD finger protein 14
  ENST ID: ENST00000634607
  CDS Start-End: 421-3267
ctttccctattgtctgaggcagccgccctcgcgctgtgcaatttctggtctttcgttgcttctggtccaggctaataaagtttttctttctttaattttttttcttctagttttaacgggagaaattaactccccggggccgccgggttgactgcgctgcctgggccggaggtcttctccggccagggagcgctgtgggaaggggctcgagcggccagggccaggcgaggccgggggggcggggggttaggggaccgcggggctactcttgggagcgcccctgtccggctggctgcgcgccggttttaaatagcatctttcggacttgtcttcgcggccccagtccccgacctcggcgctgcctgggctcctgcagcctctccctaagtcttctccaaacgaccacctcacggattccttatggatcgcagctccaagaggaggcaggtgaagcctttggcagcttctctgctggaagctcttgattatgatagttcagatgacagtgattttaaagttggagatgcctcagattctgaagggagtggtaatggaagtgaagatgcttcaaaggacagtggagaaggttcctgtagtgattctgaagaaaatattttagaagaagaactgaatgaagatattaaagtaaaagaagaacaacttaaaaattctgcagaggaagaagtactatcatcagaaaaacaattaattaaaatggaaaagaaggaagaagaagaaaatggagaaagacctagaaagaaaaaggagaaagagaaggaaaaagaaaaggaaaaggagaaagagaaggaaagagagaaggaaaaagaaaaagcaacagtatctgagaatgtggctgcttctgctgctgccaccacaccagccacaagtcctcctgctgttaacacatccccttctgttcccactacgacaaccgctacagaggaacaagtcagcgagccaaaaaaatggaaccttcgacgaaaccgaccacttctggattttgtgtccatggaagagctgaatgacatggatgactatgacagtgaggatgacaatgattggcgacctactgtagtaaagagaaaagggagatctgcgtctcagaaagagggaagtgatggagacaatgaggatgatgaagatgagggaagcgggagtgatgaagacgagaatgatgaaggcaatgatgaagatcatagtagccctgccagtgaagggggttgcaagaagaagaagagtaaagttcttagcagaaacagtgctgatgatgaggaactgaccaatgatagcctgaccctatctcaaagcaagagtaatgaggactcgctgattcttgagaagagtcaaaactggagctctcaaaaaatggaccatattctgatttgctgtgtttgtctgggagataatagtgaggacgctgatgaaataattcagtgtgacaattgtggcattacagtccatgaaggttgttatggagttgatggagagagtgactctattatgagttcagcttctgaaaactccactgaaccttggttttgtgatgcctgtaaatgtggtgtttctcctagctgtgaactgtgtcctaatcaggatggaattttcaaggagacagatgctggaagatgggttcatattgtttgtgccctgtatgttcctggagtagcctttggagatattgacaaattacgaccagtaacactaacggaaatgaactattccaaatatggtgccaaggagtgtagcttttgtgaagaccctcgctttgctagaactggggtttgcattagctgtgatgcagggatgtgcagagcctatttccatgtgacctgtgctcaaaaggaaggtctgctttcagaggcagcggcggaagaggatatagcagatccattctttgcttattgtaagcaacatgcagataggttagacagaaagtggaagagaaaaaactacttggctctacagtcctattgtaaaatgtctttgcaagagagagagaagcaactatcaccagaagcacaggcaaggatcaatgcccggcttcagcagtatcgtgccaaagcagaactagctcgatctaccagaccccaggcctgggttccaagggaaaaattgcccagaccactcaccagcagtgcttcagctattcgtaaacttatgcggaaagcagaactcatggggatcagtacagatatctttccagtggacaattcagatactagttctagtgtggatggaaggagaaaacataagcaaccagctctcactgcagattttgtgaattattattttgagagaaatatgcgcatgattcaaattcaggaaaatatggctgaacaaaagaatataaaagataaattagagaatgaacaagaaaagcttcatgtagaatataataagctatgtgaatctttagaagaactacaaaacctgaatggaaaacttcgaagtgaaggacaaggaatatgggctttactaggcagaatcacagggcagaagttgaatataccggcaattttgcgagcacccaaggagagaaaaccaagtaaaaaagaaggaggcacacaaaagacatctactcttcctgcagtactttatagttgtgggatttgtaagaagaaccatgatcagcatcttcttttattgtgtgatacctgtaaactacattaccatcttggatgtctggatcctcctcttacaaggatgccaagaaagaccaaaaacagttattggcagtgctcggaatgtgaccaggcagggagcagtgacatggaagcagatatggccatggaaaccctaccagatggaaccaaacgatcaaggaggcagattaaggaaccagtgaaatttgttccacaggatgtgccaccagaacccaagaagattccgataagaaacacgagaaccagaggacgaaaacgaagcttcgttcctgaggaagaaaaacatgaggaaagagttcctagagagagaagacaaagacagtctgtgttgcaaaagaagcccaaggctgaagatttaagaactgaatgtgcaacttgcaagggaactggagacaatgaaaatcttgtcaggtgtgatgaatgcagactctgctaccattttggctgtttggatcctcctttgaaaaagtctcctaaacagacaggctacggatggatatgtcaggaatgtgattcttcatcttccaaggaagatgaaaatgaagctgaaagaaaaaatatatctcaggagctcaacatggaacagaaaaatccaaagaaataaaagattttctgtagtgtttttgaaaagtttgcagcttatgtaatagcagataaaatttctaattgtaaaatgttaaattgtaaaatctaatttgcaaaatgttctcaataaagtcattcaaaatgaaataggagcttgta

SEQ ID NO: 164726 - DNA, 836 bp, Homo sapiens
  Payload ID: 12450
  Gene Symbol: PHF19
  Gene Name: PHD finger protein 19
  Uniprot ID: Q5T6S3
  ENST ID: ENST00000312189
  CDS Start-End: 114-737
actcggccgggcagccgcgggccgagcgcagccgcctccgccaccgatgcgcctggtggccagactccaagtgggaccggcggacacgcagcctcgcgtgtcaggggaagctgatggagaatcgagctctggatccagggactcgggactcctatggtgccaccagccacctccccaacaagggggccctggcgaaggtcaagaacaacttcaaagacttgatgtccaaactgacggagggccagtatgtgctgtgccggtggacagatggcctgtactacctcgggaagatcaagagggtcagcagctctaagcaaagctgcctcgtgactttcgaagataattccaaatactgggtcctatggaaggacatacagcatgccggtgttccaggagaggagcccaagtgcaacatctgcctagggaagacatcagggccgctgaatgagatcctcatctgcgggaagtgtggcctgggttaccaccagcagtgccacatccccatagcgggcagtgctgaccagcccctgctcacaccttggttctgccgacgctgcatcttcgcactggctgtgcgggtgagccttccatcctccccagtccctgcctctcctgcctcctccagtggggcagaccagagactcccatcacagagtctgagctccaagcagaagggccacacctgggctttggagacagatagcgcctctgccactgtccttggccaggatttgtagactccctgagcctcagtttcctcaactgtaaagtggagatgggtttggtgtcgggaataacgggaccaataaatgatgctttactattaaaaaagaaaa

SEQ ID NO: 164727 - DNA, 4241 bp, Homo sapiens
  Payload ID: 12450
  Gene Symbol: PHF19
  Gene Name: PHD finger protein 19
  Uniprot ID: Q5T6S3
  ENST ID: ENST00000373896
  CDS Start-End: 254-1996
gaaaaagatggcgccccgcgcccggggggccccttcctgagcgccccggcccctccctccgccgcctccccctcctccccgcggcgcccccgccccgccccgcccccgccgagaccccgaccccggccccacgggcggacactcggccgggcagccgcgggccgagcgcagccgcctccgccaccgatgcgcctggtggccagactccaagtgggaccggcggacacgcagcctcgcgtgtcaggggaagctgatggagaatcgagctctggatccagggactcgggactcctatggtgccaccagccacctccccaacaagggggccctggcgaaggtcaagaacaacttcaaagacttgatgtccaaactgacggagggccagtatgtgctgtgccggtggacagatggcctgtactacctcgggaagatcaagagggtcagcagctctaagcaaagctgcctcgtgactttcgaagataattccaaatactgggtcctatggaaggacatacagcatgccggtgttccaggagaggagcccaagtgcaacatctgcctagggaagacatcagggccgctgaatgagatcctcatctgcgggaagtgtggcctgggttaccaccagcagtgccacatccccatagcgggcagtgctgaccagcccctgctcacaccttggttctgccgacgctgcatcttcgcactggctgtgcggaaaggcggcgcgctgaagaagggcgccatcgccaggacgctgcaggccgtgaagatggtgctgtcctaccagcccgaggagctcgagtgggactcgccccatcgcaccaaccagcagcaatgctactgctactgcggcgggcccggagaatggtacctgcggatgctgcaatgttaccggtgcaggcagtggttccacgaggcctgcacccagtgcctcaatgagcccatgatgtttggagaccggttttacctgttcttctgctccgtgtgtaaccagggcccagagtacatcgagaggctgcccctgcgatgggtggatgtggttcacctggccctctataatctgggggtacagagcaagaagaagtactttgactttgaggagattctggcctttgtcaaccaccactgggagctcctgcagcttggcaagctcaccagcaccccagtgacagatcgaggaccacatctcctcaacgctctgaacagttataaaagccggttcctctgcggcaaggagatcaagaagaagaagtgcatcttccgcctgcgcatccgcgtcccacccaacccgccagggaagctgctgcctgacaaaggactgctgccaaatgagaacagcgcctcctctgagctgcgtaagagaggaaagagcaagcctggtttgttgcctcacgaattccagcagcagaaaaggcgagtttatagaagaaaaagatcaaagtttttgctggaagatgctattcccagtagtgacttcacctcagcctggagcaccaaccaccacctggctagcatatttgacttcacgctggatgaaattcaaagtttaaaaagtgccagctcaggccagaccttcttctcagatgtcgactccaccgacgctgccagcacctctggctctgcctccaccagcctctcctatgactccagatggacagtgggcagccgaaagaggaagctggcagccaaggcatacatgcccctgcgggcaaagcggtgggcagctgagctggatggacgctgcccctcggacagcagtgcagagggggcttcagtccccgagcggccagacgaaggcattgacagccacacatttgagagcatcagtgaagatgactcatccctgtcccacctcaagtcatctatcaccaactactttggtgcagctgggcggttggcctgtggggagaagtaccaggtgttggctcggagggtcacacctgagggcaaggttcagtacctggtggagtgggaagggaccaccccttactgactagcccccgggggtgccaggggtcctgaaaaccaaaggaggagcagcagaagccataggctccccagctttctccaggctggggtgggagaaggaagcaggacagagctgcaagtgcctggcagaatgccctgcctgcctgcctgccaggccaaggcctgcgtctctctgctgtaccagctctgttccagggcctcctcaggctcgttacccctgtgcctgtgtctctacacactccacaccccctcaaactctgtttatctgttctctgaccttgtgtcccctgcgctgggacccttcctcctgaggcccaggtctttgtccccagttgtgtgccttgacctctctcgcccctttctgggtgtgttcgcacatcctgtgtgtgcacagctgtccctccactggatccccttcacacgtgacccgtggggcagccagtcctcccagggactacataacaggcacctttgagagagcatgggagaaggtggataagaggatgctgctcagtgcttttctcttccactttcctgccactccccactaccctcggagagaggtggtgggatgggagagagcccctgtgaaagcctgtgaggatctgaagagtaaagggctgggtctgcctcagaaggcaccagcaccagggcccaggtattaaggctgagagtgaaggctgccaatgtcagctttggaggtcccagaagtcttctgttctctggcctcaccccctcagtcgccatagagctgggcctggccttgctggaatggaggcatccttccaaacctgggggacgggggtggggggtggtagtggtgggagggaaaccatgtcttgctaaacctgtttctggtgcctcccatccccagacccaccagacaccacacagcagacaatacacacccactcgcacaagcttccatccacatgtgttgtactttcagctctaggcatgcagacaaccccacacggccacaccaccacatgcccaagtgtacacacacagagccacaccgtccctctgggcctgctggctcctcccttggctttcccttggcccacttccagggcccaggtgctgcaactaaatgtgaaagctcagtggccgctccttctttcagcccatcaaccagcattggtcccatagggaagcacaggggactcaccctctttcatatcccttgccctgccctgaaatggacaatcactttttgggataggttgaaatttttaaagagcctgcatcatttggttccctcaaagggaagcccttgccagtgggggtttgaaagagaatttttggaaccaacattcaaattctgcctcatctggagggaaaccaaaattgggagggggaagaggacccctgatgttttgctgcttccagagatattagaaactgactcacttgattggaaaatggacaaaagtgccttgacgtggagggtgggcaccagatggggaccagccttgccaactgctgctgtggcctccagcttggctggttttgcaggccgccagcaggaaggcgaaggtggtagtacagcaagaggcactggcggggcagcaggcctgcaggagctgtttttccattgctaggcctgacccctctctacctgtgagcgttcagggggtccctgagatagtttagatgcccccccatcttagacctcagctcccacagtgccttttaagggggacctcacctcctgtgcacagcccacccactttcctctgcttccctggcacagcccaggcatagacgagctggcgttggacccagttcttcccccttttcagccccacagctgctgccacaggggccaactagggccaggtggaaggggagctgagaagccaacccctagcccaggggtgctgtgggaactgggatccaatttgtagcttcctgcctggcttcagagagcccagcaaccttctaggcctgctttccagacttctgagatagcctgggatgagcaatcctgttatagtacatctggaccttccctacctgggctctggggaggctgtgggcctggagagggaaaaggagggagggggtgtctgcaccacctgggaagatagcacaaggcctaatgaggtcaccctgactccccaccccagcatttcattcataccagataatagctgcattactgccaactgaccttataaccctctgcaccttcaaaaagattcatggtttttaattgctgcttttaataacatttgttaaagtta

SEQ ID NO: 164728 - DNA, 565 bp, Homo sapiens
  Payload ID: 12450
  Gene Symbol: PHF19
  Gene Name: PHD finger protein 19
  ENST ID: ENST00000453868
  CDS Start-End: 45-565
gttgcgaccgcccaagcagggccccagggagatggtacctgcggatgctgcaatgttaccggtgcaggcagtggttccacgaggcctgcacccagtgcctcaatgagcccatgatgtttggagaccggttttacctgttcttctgctccgtgtgtaaccagggcccagagtacatcgagaggctgcccctgcgatgggtggatgtggttcacctggccctctataatctgggggtacagagcaagaagaagtactttgactttgaggagattctggcctttgtcaaccaccactgggagctcctgcagcttggcaagctcaccagcaccccagtgacagatcgaggaccacatctcctcaacgctctgaacagttataaaagccggttcctctgcggcaaggagatcaagaagaagaagtgcatcttccgcctgcgcatccgcgtcccacccaacccgccagggaagctgctgcctgacaaaggactgctgccaaatgagaacagcgcctcctctgagctgcgtaagagaggaaagagcaagcctggtttgttgcctcacgaatt

SEQ ID NO: 164729 - DNA, 888 bp, Homo sapiens
  Payload ID: 12450
  Gene Symbol: PHF19
  Gene Name: PHD finger protein 19
  ENST ID: ENST00000456291
  CDS Start-End: 569-888
cgcccggccagggtggaggcgggtgcggcgacccggccggctcctagaggcgcagcgggagaggaagtgtcagtttgtgaacctgcagcggccccggcctggcccctggccgggcgggcggggacctcgcagcgccgggcgagccaggtggcagggagaggacagggattcagaccgcatcccctgcccgggagcctgtgcgctctgcgctggagaaaaaggagatgggagtgggggtggagaaggtcgtggccacgccaccatctggggagccgagacccctgcagtgcctggctcgccccagggccccgcacatacttagcttcacacactccctggcacaatgccgtagacatcatcctgcccagtctcacaggagtacacacacgcaccacacagaaacaggcactggactctctccctgtgaacagatagtcacaacaccaggtgcccagcgccatggccacaaggaggagacccgagtaggcccgcggggaaagagagaggctgtgtgtggctgtagtggagagcatgtggagggacttggagccagtgtcaggggaagctgatggagaatcgagctctggatccagggactcgggactcctatggtgccaccagccacctccccaacaagggggccctggcgaaggtcaagaacaacttcaaagacttgatgtccaaactgacggagggccagtatgtgctgtgccggtggacagatggcctgtactacctcgggaagatcaagagggtcagcagctctaagcaaagctgcctcgtgactttcgaagataattccaaatactgggtcctatggaaggacatacagcatgccggtgttccaggagaggagcccaagtgcaacatctgcctagggaagacatc

SEQ ID NO: 164730 - DNA, 556 bp, Homo sapiens
  Payload ID: 12450
  Gene Symbol: PHF19
  Gene Name: PHD finger protein 19
  ENST ID: ENST00000439674
  CDS Start-End: 377-556
agcactgtggagcagggctggagggcagaggtgttaccttggagctttgtaggaaacgaggaagtattgaagagtggttaagagcctgggccggacacagtgcgaatcctcccaggacgtccacgtcctagctctgctccttaccagctgtgcaaccccttagcctcagctctctgaatagtttccccatcatgtggtgattatgagcagagcatgaattacgtaattcacatagaggttctcatagtgcctggcatttggtaaacaaaaaaaatgtgagctgttactggtggtagtggtggtactaatgcatgaaagtcaagataaccttttcacagtcagagtcagtggaaccggctgctgatggtacctgcggatgctgcaatgttaccggtgcaggcagtggttccacgaggcctgcacccagtgcctcaatgagcccatgatgtttggagaccggttttacctgttcttctgctccgtgtgtaaccagggcccagagtacatcgagaggctgcccctgcgatgggtggatgtggttcacctggccctctat

SEQ ID NO: 164731 - DNA, 3525 bp, Homo sapiens
  Payload ID: 12450
  Gene Symbol: PHF19
  Gene Name: PHD finger protein 19
  ENST ID: ENST00000419155
  CDS Start-End: 118-1233
gagggcggggcctcggggggcgggcccggaaggttagaccttggggcgaggcctcgggaggcgggcctggcgggttgcgaccgcccaagcagggccccagggagatggtacctgcggatgctgcaatgttaccggtgcaggcagtggttccacgaggcctgcacccagtgcctcaatgagcccatgatgtttggagaccggttttacctgttcttctgctccgtgtgtaaccagggcccagagtacatcgagaggctgcccctgcgatgggtggatgtggttcacctggccctctataatctgggggtacagagcaagaagaagtactttgactttgaggagattctggcctttgtcaaccaccactgggagctcctgcagcttggcaagctcaccagcaccccagtgacagatcgaggaccacatctcctcaacgctctgaacagttataaaagccggttcctctgcggcaaggagatcaagaagaagaagtgcatcttccgcctgcgcatccgcgtcccacccaacccgccagggaagctgctgcctgacaaaggactgctgccaaatgagaacagcgcctcctctgagctgcgtaagagaggaaagagcaagcctggtttgttgcctcacgaattccagcagcagaaaaggcgagtttatagaagaaaaagatcaaagtttttgctggaagatgctattcccagtagtgacttcacctcagcctggagcaccaaccaccacctggctagcatatttgacttcacgctggatgaaattcaaagtttaaaaagtgccagctcaggccagaccttcttctcagatgtcgactccaccgacgctgccagcacctctggctctgcctccaccagcctctcctatgactccagatggacagtgggcagccgaaagaggaagctggcagccaaggcatacatgcccctgcgggcaaagcggtgggcagctgagctggatggacgctgcccctcggacagcagtgcagagggggcttcagtccccgagcggccagacgaaggcattgacagccacacatttgagagcatcagtgaagatgactcatccctgtcccacctcaagtcatctatcaccaactactttggtgcagctgggcggttggcctgtggggagaagtaccaggtgttggctcggagggtcacacctgagggcaaggttcagtacctggtggagtgggaagggaccaccccttactgactagcccccgggggtgccaggggtcctgaaaaccaaaggaggagcagcagaagccataggctccccagctttctccaggctggggtgggagaaggaagcaggacagagctgcaagtgcctggcagaatgccctgcctgcctgcctgccaggccaaggcctgcgtctctctgctgtaccagctctgttccagggcctcctcaggctcgttacccctgtgcctgtgtctctacacactccacaccccctcaaactctgtttatctgttctctgaccttgtgtcccctgcgctgggacccttcctcctgaggcccaggtctttgtccccagttgtgtgccttgacctctctcgcccctttctgggtgtgttcgcacatcctgtgtgtgcacagctgtccctccactggatccccttcacacgtgacccgtggggcagccagtcctcccagggactacataacaggcacctttgagagagcatgggagaaggtggataagaggatgctgctcagtgcttttctcttccactttcctgccactccccactaccctcggagagaggtggtgggatgggagagagcccctgtgaaagcctgtgaggatctgaagagtaaagggctgggtctgcctcagaaggcaccagcaccagggcccaggtattaaggctgagagtgaaggctgccaatgtcagctttggaggtcccagaagtcttctgttctctggcctcaccccctcagtcgccatagagctgggcctggccttgctggaatggaggcatccttccaaacctgggggacgggggtggggggtggtagtggtgggagggaaaccatgtcttgctaaacctgtttctggtgcctcccatccccagacccaccagacaccacacagcagacaatacacacccactcgcacaagcttccatccacatgtgttgtactttcagctctaggcatgcagacaaccccacacggccacaccaccacatgcccaagtgtacacacacagagccacaccgtccctctgggcctgctggctcctcccttggctttcccttggcccacttccagggcccaggtgctgcaactaaatgtgaaagctcagtggccgctccttctttcagcccatcaaccagcattggtcccatagggaagcacaggggactcaccctctttcatatcccttgccctgccctgaaatggacaatcactttttgggataggttgaaatttttaaagagcctgcatcatttggttccctcaaagggaagcccttgccagtgggggtttgaaagagaatttttggaaccaacattcaaattctgcctcatctggagggaaaccaaaattgggagggggaagaggacccctgatgttttgctgcttccagagatattagaaactgactcacttgattggaaaatggacaaaagtgccttgacgtggagggtgggcaccagatggggaccagccttgccaactgctgctgtggcctccagcttggctggttttgcaggccgccagcaggaaggcgaaggtggtagtacagcaagaggcactggcggggcagcaggcctgcaggagctgtttttccattgctaggcctgacccctctctacctgtgagcgttcagggggtccctgagatagtttagatgcccccccatcttagacctcagctcccacagtgccttttaagggggacctcacctcctgtgcacagcccacccactttcctctgcttccctggcacagcccaggcatagacgagctggcgttggacccagttcttcccccttttcagccccacagctgctgccacaggggccaactagggccaggtggaaggggagctgagaagccaacccctagcccaggggtgctgtgggaactgggatccaatttgtagcttcctgcctggcttcagagagcccagcaaccttctaggcctgctttccagacttctgagatagcctgggatgagcaatcctgttatagtacatctggaccttccctacctgggctctggggaggctgtgggcctggagagggaaaaggagggagggggtgtctgcaccacctgggaagatagcacaaggcctaatgaggtcaccctgactccccaccccagcatttcattcataccagataatagctgcattactgccaactgaccttataaccctctgcaccttcaaaaagattcatggtttttaattgctgcttttaataacatttgttaaagttataattaatgtgtctgatttatgatttaaaacctccctttgaacaatc

SEQ ID NO: 164732 - DNA, 558 bp, Homo sapiens
  Payload ID: 12450
  Gene Symbol: PHF19
  Gene Name: PHD finger protein 19
  ENST ID: ENST00000436309
  CDS Start-End: 62-558
ttttcgaaatctccctgaactttggcggcccgaacgcctccgggggtgtcaggggaagctgatggagaatcgagctctggatccagggactcgggactcctatggtgccaccagccacctccccaacaagggggccctggcgaaggtcaagaacaacttcaaagacttgatgtccaaactgacggagggccagtatgtgctgtgccggtggacagatggcctgtactacctcgggaagatcaagagggtcagcagctctaagcaaagctgcctcgtgactttcgaagataattccaaatactgggtcctatggaaggacatacagcatgccggtgttccaggagaggagcccaagtgcaacatctgcctagggaagacatcagggccgctgaatgagatcctcatctgcgggaagtgtggcctgggttaccaccagcagtgccacatccccatagcgggcagtgctgaccagcccctgctcacaccttggttctgccgacgctgcatcttcgcactggctgtgcggaaaggcggcgcgctgaagaagggcgccatcgc

SEQ ID NO: 164733 - DNA, 4159 bp, Homo sapiens
  Payload ID: 12450
  Gene Symbol: PHF19
  Gene Name: PHD finger protein 19
  ENST ID: ENST00000616568
  CDS Start-End: 68-1867
accagtaagtcgtgtatttagcattcattcatcaaagcctccggatgcctcctacgtgccctgcactatgctggtcttggtaatccgtggtccctatcccagcgcccagtgtcaggggaagctgatggagaatcgagctctggatccagggactcgggactcctatggtgccaccagccacctccccaacaagggggccctggcgaaggtcaagaacaacttcaaagacttgatgtccaaactgacggagggccagtatgtgctgtgccggtggacagatggcctgtactacctcgggaagatcaagagggtcagcagctctaagcaaagctgcctcgtgactttcgaagataattccaaatactgggtcctatggaaggacatacagcatgccggtgttccaggagaggagcccaagtgcaacatctgcctagggaagacatcagggccgctgaatgagatcctcatctgcgggaagtgtggcctgggttaccaccagcagtgccacatccccatagcgggcagtgctgaccagcccctgctcacaccttggttctgccgacgctgcatcttcgcactggctgtgcggaaaggcggcgcgctgaagaagggcgccatcgccaggacgctgcaggccgtgaagatggtgctgtcctaccagcccgaggagctcgagtgggactcgccccatcgcaccaaccagcagcaatgctactgctactgcggcgggcccggagaatggtacctgcggatgctgcaatgttaccggtgcaggcagtggttccacgaggcctgcacccagtgcctcaatgagcccatgatgtttggagaccggttttacctgttcttctgctccgtgtgtaaccagggcccagagtacatcgagaggctgcccctgcgatgggtggatgtggttcacctggccctctataatctgggggtacagagcaagaagaagtactttgactttgaggagattctggcctttgtcaaccaccactgggagctcctgcagcttggcaagctcaccagcaccccagtgacagatcgaggaccacatctcctcaacgctctgaacagttataaaagccggttcctctgcggcaaggagatcaagaagaagaagtgcatcttccgcctgcgcatccgcgtcccacccaacccgccagggaagctgctgcctgacaaaggactgctgccaaatgagaacagcgcctcctctgagctgcgtaagagaggaaagagcaagcctggtttgttgcctcacgaattccagcagcagaaaaggcgagtttatagaagaaaaagatcaaagtttttgctggaagatgctattcccagtagtgacttcacctcagcctggagcaccaaccaccacctggctagcatatttgacttcacgctggatgaaattcaaagtttaaaaagtgccagctcaggccagaccttcttctcagatgtcgactccaccgacgctgccagcacctctggctctgcctccaccagcctctcctatgactccagatggacagtgggcagccgaaagaggaagctggcagccaaggcatacatgcccctgcgggcaaagcggtgggcagctgagctggatggacgctgcccctcggacagcagtgcagagggggcttcagtccccgagcggccagacgaaggcattgacagccacacatttgagagcatcagtgaagatgactcatccctgtcccacctcaagtcatctatcaccaactactttggtgcagctgggcggttggcctgtggggagaagtaccaggtgttggctcggagggtcacacctgagggcaaggttcagtacctggtggagtgggaagggaccaccccttactgactagcccccgggggtgccaggggtcctgaaaaccaaaggaggagcagcagaagccataggctccccagctttctccaggctggggtgggagaaggaagcaggacagagctgcaagtgcctggcagaatgccctgcctgcctgcctgccaggccaaggcctgcgtctctctgctgtaccagctctgttccagggcctcctcaggctcgttacccctgtgcctgtgtctctacacactccacaccccctcaaactctgtttatctgttctctgaccttgtgtcccctgcgctgggacccttcctcctgaggcccaggtctttgtccccagttgtgtgccttgacctctctcgcccctttctgggtgtgttcgcacatcctgtgtgtgcacagctgtccctccactggatccccttcacacgtgacccgtggggcagccagtcctcccagggactacataacaggcacctttgagagagcatgggagaaggtggataagaggatgctgctcagtgcttttctcttccactttcctgccactccccactaccctcggagagaggtggtgggatgggagagagcccctgtgaaagcctgtgaggatctgaagagtaaagggctgggtctgcctcagaaggcaccagcaccagggcccaggtattaaggctgagagtgaaggctgccaatgtcagctttggaggtcccagaagtcttctgttctctggcctcaccccctcagtcgccatagagctgggcctggccttgctggaatggaggcatccttccaaacctgggggacgggggtggggggtggtagtggtgggagggaaaccatgtcttgctaaacctgtttctggtgcctcccatccccagacccaccagacaccacacagcagacaatacacacccactcgcacaagcttccatccacatgtgttgtactttcagctctaggcatgcagacaaccccacacggccacaccaccacatgcccaagtgtacacacacagagccacaccgtccctctgggcctgctggctcctcccttggctttcccttggcccacttccagggcccaggtgctgcaactaaatgtgaaagctcagtggccgctccttctttcagcccatcaaccagcattggtcccatagggaagcacaggggactcaccctctttcatatcccttgccctgccctgaaatggacaatcactttttgggataggttgaaatttttaaagagcctgcatcatttggttccctcaaagggaagcccttgccagtgggggtttgaaagagaatttttggaaccaacattcaaattctgcctcatctggagggaaaccaaaattgggagggggaagaggacccctgatgttttgctgcttccagagatattagaaactgactcacttgattggaaaatggacaaaagtgccttgacgtggagggtgggcaccagatggggaccagccttgccaactgctgctgtggcctccagcttggctggttttgcaggccgccagcaggaaggcgaaggtggtagtacagcaagaggcactggcggggcagcaggcctgcaggagctgtttttccattgctaggcctgacccctctctacctgtgagcgttcagggggtccctgagatagtttagatgcccccccatcttagacctcagctcccacagtgccttttaagggggacctcacctcctgtgcacagcccacccactttcctctgcttccctggcacagcccaggcatagacgagctggcgttggacccagttcttcccccttttcagccccacagctgctgccacaggggccaactagggccaggtggaaggggagctgagaagccaacccctagcccaggggtgctgtgggaactgggatccaatttgtagcttcctgcctggcttcagagagcccagcaaccttctaggcctgctttccagacttctgagatagcctgggatgagcaatcctgttatagtacatctggaccttccctacctgggctctggggaggctgtgggcctggagagggaaaaggagggagggggtgtctgcaccacctgggaagatagcacaaggcctaatgaggtcaccctgactccccaccccagcatttcattcataccagataatagctgcattactgccaactgaccttataaccctctgcaccttcaaaaagattcatggtttttaattgctgcttttaataacatttgttaaagttataattaatgtgtctgatttatgatttaaaacctccctttgaacaatc

SEQ ID NO: 164734 - DNA, 5569 bp, Homo sapiens
  Payload ID: 12451
  Gene Symbol: PHF2
  Gene Name: PHD finger protein 2
  Uniprot ID: O75151
  ENST ID: ENST00000359246
  CDS Start-End: 368-3658
ggccgctcggcggccgggggtcccttcggtggggccgcggctccccgcccgccgcccccgcgcgtccattcccttttgtgtcccgcgcgcggcccgtcccccgcgcacactagcgccctgagccccgcgggccggcgggcggctcccggcgcggcccctccagccagcgcgcccggcattgtgtggacgcgcctggccgggagcgcgcgcgggggctgtcgtgcgcccccgtccccgtcccctcccggccgcggcgccgcctgcgccccgccgcccccgccgcccccgcgcggcccggcccccggcccggcccggaccgacccgggcagcgcagcggcggggccgagcggcggcgcggcgcggcaacatggcgacggtgcccgtgtactgcgtctgccggctcccctacgacgttacccgcttcatgatcgagtgcgacgcctgcaaggactggttccacggcagctgtgttggggtggaagaggaggaggcgcccgacatcgacatataccactgcccaaactgtgagaaaacccatgggaagtccaccttaaagaagaagcggacctggcacaaacacggcccggggcaagcgcctgacgtcaagcccgtgcagaatggcagccagctcttcatcaaggagctgcggagccggacctttcccagtgctgaagacgtggtggcccgtgtgccaggaagtcagctcacgctgggctacatggaggagcacggcttcaccgagcccatcctcgtccctaagaaagacgggctgggtctggctgtcccggcccccacgttctatgtcagtgacgtcgagaactacgtggggccggaacggagtgtggatgtgacagatgtcaccaagcagaaggactgcaagatgaagctgaaggagtttgtggactattactacagcaccaaccgcaagcgggtcctcaacgtcaccaacctcgagttctctgacacccgaatgtccagcttcgtggagccacctgacattgtaaagaaactgtcatgggtagaaaactactggccagatgatgcattgctggccaagcccaaagtgaccaagtactgcctaatctgcgtgaaggacagttacaccgacttccacatcgactctgggggcgcctctgcctggtaccacgtgctcaagggggagaagaccttctatctcatcaggccggcctcggccaacatctccctgtatgagcgctggcggtctgcctctaaccacagcgagatgttctttgctgaccaggtcgacaaatgctacaagtgcatcgtcaagcagggccagaccctcttcatcccctcaggctggatctacgccacactcacccctgtggactgcctggccttcgcgggacatttcctccacagcctgagtgtggagatgcagatgagagcatatgaagtggaaaggaggttgaaactgggcagcctgactcagtttcccaactttgaaactgcgtgctggtacatggggaagcacctgctggaggcattcaaaggctctcacaaatctgggaagcagctgccccctcatctagtccaaggagctaaaattctcaatggtgctttccgatcgtggacgaagaagcaggctttggcagagcatgaggacgagctcccggagcacttcaaaccttcacagctaatcaaagacctggccaaagagatccggctcagtgagaatgcctccaaagccgtccgaccggaagtgaatactgtcgcctcgtcagatgaggtgtgtgacggggaccgggagaaggaggagcccccgtctcccattgaggccaccccgcctcaatccctcctggagaaagtgtccaaaaaaaagactcccaaaactgtgaagatgcccaagccatccaaaatccccaagcccccgaagccccctaagcccccaaggccccccaaaacgctgaagctcaaagatggaggcaagaagaaagggaagaagtcccgggagtcagcctcacccaccatccccaacctggacctgctcgaagcccacaccaaggaggcactgaccaagatggagccgcccaagaagggcaaggccacaaagagtgtcctgagtgtgcccaacaaagatgtggttcacatgcagaatgatgtggagaggctggaaattcgagagcaaaccaagagcaagtcagaggccaagtggaagtacaagaacagcaaacctgactccttactgaagatggaagaggagcagaagctagagaagtcgcctctagctggaaacaaagacaataagttctctttttctttctccaacaagaaactcctcggctccaaggctctcaggcccccgacgagccctggtgtgttcggggccttgcagaacttcaaggaggacaagcccaagcccgtgcgggatgagtatgagtacgtgtcggatgacggtgagctcaagatcgacgagtttcccatcaggaggaagaaaaacgccccgaaaagggacttgtccttcttgttggataagaaggctgtgctgcccacgcctgtcacgaagccaaagctggactcggcagcgtacaagagtgatgactcctcggacgagggttcgctgcacatcgacacagacaccaagcccggccgcaatgccagagtcaagaaggagagtgggagctcggcagctggcatcttggacctgctgcaggccagtgaggaggttggcgcgctggagtacaaccccagcagccagcccccggcctcccccagcacacaggaagccattcagggaatgctgtccatggccaacctgcaggcctccgactcctgcctgcagaccacgtggggagctggccaggccaaggggagctcgctggctgcccatggtgcccggaagaatgggggtggcagtggcaagagtgcaggcaaacgactgctgaagagggctgccaagaacagtgtcgacctggacgactacgaggaagagcaggaccacctggatgcctgcttcaaggactcagactacgtttacccctcactggagtcagatgaagacaaccccatctttaagtcccggtcgaagaaaaggaaaggctcagacgacgctccctacagcccaacagcaagggtcggcccatcggtgccaagacaggacaggcctgtgcgtgagggtacacgggtggcttccatcgagaccgggctggcggctgctgcagctaagttgtcccagcaggaggagcagaaaagcaagaaaaaaaagagtgccaagaggaagctgactcctaacaccacctccccttccacctccacctccatctctgccggcaccacctccacctccaccacgccagcctctaccaccccggcctccaccaccccggcctccaccagcacggccagcagccaggcctcgcaggagggcagctcgccagagcccccgcctgagtcgcatagcagcagcctggcggaccatgagtacacagccgctggcaccttcaccggggcccaggctggccgcacctcccagcccatggcccctggggtctttctcacacagaggcggccctccgcatcgtctccaaacaacaacaccgctgccaaaggaaaacgtacgaaaaagggcatggcgaccgccaagcagaggcttgggaaaattttgaaaattcatcggaacgggaaactactcctttaagatttggaaagccaggatccttctgctccgctcaggacccccggagccccgcgaaaacatctgcctcccaggagggtgccgagctgcctcaccagggagggccttgcctcttcccggctgccatctccccaacaagcgtctgtcccttcagccggcagagcgagcccagcgtggcccctcaatttgaaaatggacgtcttttctcaagttgctaagagtgatctgtcccagaaaagcggccctgcaagtttgaggaccgcttattccactttaaggacagccttcaggccccctgagcgtgggtgtgattgcagggcctctgcagctctgctgagagcatgagtccttcaaggaagacagagtgagccaatgctcaccagccccagagtcagagctggccacaggctggcagcctccaggggcttaaaaaaaaaggcaaagaacacagaaagaggaggagcaagtgggatgtttatgtccccccttctcttcctgagtgattctcagccaagtccagacagtgctcggcgggtgaggaagggtctgccccgagctttctggttggcaggtggcagcaggatggtgggtgttcagcctgaatgcccaggagcatttctggggggcagctaagactggcagctgggttggtgtgttagcgggcaggggagccattgtggggtccccaggaaagggcaagggctcagccacatcttggggtctgggaggcccaggctaagccatgtggcagggaccgtcttgccctgctggccacactctggagaagcacttctcagccaaggcacccctgccctgggactggcagggcaggggcaggggcagggacagtggccaggcggcccgaggacttacggtcggcacttctctgttctcccgtgtcagcgtgtggtgtcgcctgcatgggtcgtacctggatggtgtgtccaccatcgacacggaggggctggatttgtttctcaggcaatcctgtattttaattttagatgtatttcctgaagcatatttttcatagaatgtagcgtgtaaatagctttttaaataacttcttttttataagagtaaaagtatctttaggaatttctttctatagagttcttcattaacatttatacgagttttttgctgagtcagatggacagttgggttctgatgctttttccttctcctttccttttattattattatttttttcttttaagaactaaggtattgcctgaaaaacaagtgatgtctgtgcagccttacactctgtctttacagaagcaaatagtacacaaaagatctatttcagacacattttgaagatgaatcttcaactttaataccagctctttgttttccttgtatgatgaggggattgggggatacagttattttactagcaccttgtgaagtgtttccgtgttttgtgatgctgtaatttattaatgtttgtagctttttatatttgtacatttcttatgagctttgtttatatacccattacctggatgtttttgtccactgggagaggcagcttggtggaggccttatccactcccacttgtcctgtttggagggacgcagtccctagggcccgagactgggtgggagagggggagtctcacggggccccaggcttattcagaactggtgtttttaaagtttcctttaccctgcccttgttgaacatttatataatctaacctggacatcaagctgttctctctctctcttttttttaattttattattattattttggcaacatgtacatttctaacaaagtttatcgtggctattaaagtgttttatttcccaattcatattactcttgtatcgagtccatgaggtctaaggcaacttagatcaaagttttaaaaaagtaaaaatatttcaggttttgtacagaa

SEQ ID NO: 164735 - DNA, 3045 bp, Homo sapiens
  Payload ID: 12451
  Gene Symbol: PHF2
  Gene Name: PHD finger protein 2
  ENST ID: ENST00000375376
  CDS Start-End: 205-1134
gtgcgcccccgtccccgtcccctcccggccgcggcgccgcctgcgccccgccgcccccgccgcccccgcgcggcccggcccccggcccggcccggaccgacccgggcagcgcagcggcggggccgagcggcggcgcggcgcggcaacatggcgacggtgcccgtgtactgcgtctgccggctcccctacgacgttacccgcttcatgatcgagtgcgacgcctgcaaggactggttccacggcagctgtgttggggtggaagaggaggaggcgcccgacatcgacatataccactgcccaaactgtgagaaaacccatgggaagtccaccttaaagaagaagcggacctggcacaaacacggcccggggcaagcgcctgacgtcaagccccccaaaaacagtgtcgacctggacgactacgaggaagagcaggaccacctggatgcctgcttcaaggactcagactacgtttacccctcactggagtcagatgaagacaaccccatctttaagtcccggtcgaagaaaaggaaaggctcagacgacgctccctacagcccaacagcaagggtcggcccatcggtgccaagacaggacaggcctgtgcgtgagggtacacgggtggcttccatcgagaccgggctggcggctgctgcagctaagttgtcccagcaggaggagcagaaaagcaagaaaaaaaagagtgccaagaggaagctgactcctaacaccacctccccttccacctccacctccatctctgccggcaccacctccacctccaccacgccagcctctaccaccccggcctccaccaccccggcctccaccagcacggccagcagccaggcctcgcaggagggcagctcgccagagcccccgcctgagtcgcatagcagcagcctggcggaccatgagtacacagccgctggcaccttcaccggggcccaggctggccgcacctcccagcccatggcccctggggtctttctcacacagaggcggccctccgcatcgtctccaaacaacaacaccgctgccaaaggaaaacgtacgaaaaagggcatggcgaccgccaagcagaggcttgggaaaattttgaaaattcatcggaacgggaaactactcctttaagatttggaaagccaggatccttctgctccgctcaggacccccggagccccgcgaaaacatctgcctcccaggagggtgccgagctgcctcaccagggagggccttgcctcttcccggctgccatctccccaacaagcgtctgtcccttcagccggcagagcgagcccagcgtggcccctcaatttgaaaatggacgtcttttctcaagttgctaagagtgatctgtcccagaaaagcggccctgcaagtttgaggaccgcttattccactttaaggacagccttcaggccccctgagcgtgggtgtgattgcagggcctctgcagctctgctgagagcatgagtccttcaaggaagacagagtgagccaatgctcaccagccccagagtcagagctggccacaggctggcagcctccaggggcttaaaaaaaaaggcaaagaacacagaaagaggaggagcaagtgggatgtttatgtccccccttctcttcctgagtgattctcagccaagtccagacagtgctcggcgggtgaggaagggtctgccccgagctttctggttggcaggtggcagcaggatggtgggtgttcagcctgaatgcccaggagcatttctggggggcagctaagactggcagctgggttggtgtgttagcgggcaggggagccattgtggggtccccaggaaagggcaagggctcagccacatcttggggtctgggaggcccaggctaagccatgtggcagggaccgtcttgccctgctggccacactctggagaagcacttctcagccaaggcacccctgccctgggactggcagggcaggggcaggggcagggacagtggccaggcggcccgaggacttacggtcggcacttctctgttctcccgtgtcagcgtgtggtgtcgcctgcatgggtcgtacctggatggtgtgtccaccatcgacacggaggggctggatttgtttctcaggcaatcctgtattttaattttagatgtatttcctgaagcatatttttcatagaatgtagcgtgtaaatagctttttaaataacttcttttttataagagtaaaagtatctttaggaatttctttctatagagttcttcattaacatttatacgagttttttgctgagtcagatggacagttgggttctgatgctttttccttctcctttccttttattattattatttttttcttttaagaactaaggtattgcctgaaaaacaagtgatgtctgtgcagccttacactctgtctttacagaagcaaatagtacacaaaagatctatttcagacacattttgaagatgaatcttcaactttaataccagctctttgttttccttgtatgatgaggggattgggggatacagttattttactagcaccttgtgaagtgtttccgtgttttgtgatgctgtaatttattaatgtttgtagctttttatatttgtacatttcttatgagctttgtttatatacccattacctggatgtttttgtccactgggagaggcagcttggtggaggccttatccactcccacttgtcctgtttggagggacgcagtccctagggcccgagactgggtgggagagggggagtctcacggggccccaggcttattcagaactggtgtttttaaagtttcctttaccctgcccttgttgaacatttatataatctaacctggacatcaagctgttctctctctctcttttttttaattttattattattattttggcaacatgtacatttctaacaaagtttatcgtggctattaaagtgttttatttcccaattcatattactcttgtatcgagtccatgaggtctaaggcaacttagatcaaagttttaaaaaagtaaaaatatttcaggttttgtacagaa

SEQ ID NO: 164736 - DNA, 2921 bp, Homo sapiens
  Payload ID: 12451
  Gene Symbol: PHF2
  Gene Name: PHD finger protein 2
  ENST ID: ENST00000610682
  CDS Start-End: 28-1014
ggccgagcggcggcgcggcgcggcaacatggcgacggtgcccgtgtactgcgtctgccggctcccctacgacgttacccgcttcatgatcgagtgcgacgcctgcaaggactggttccacggcagctgtgttggggtggaagaggaggaggcgcccgacatcgacatataccactgcccaaactgtgagaaaacccatgggaagtccaccttaaagaagaagcggacctggcacaaacacggcccggggcaagcgcctgacgtcaaggctgccaagaacagtgtcgacctggacgactacgaggaagagcaggaccacctggatgcctgcttcaaggactcagactacgtttacccctcactggagtcagatgaagacaaccccatctttaagtcccggtcgaagaaaaggaaaggctcagacgacgctccctacagcccaacagcaagggtcggcccatcggtgccaagacaggacaggcctgtgcgtgagggtacacgggtggcttccatcgagaccgggctggcggctgctgcagctaagttgtcccagcaggaggagcagaaaagcaagaaaaaaaagagtgccaagaggaagctgactcctaacaccacctccccttccacctccacctccatctctgccggcaccacctccacctccaccacgccagcctctaccaccccggcctccaccaccccggcctccaccagcacggccagcagccaggcctcgcaggagggcagctcgccagagcccccgcctgagtcgcatagcagcagcctggcggaccatgagtacacagccgctggcaccttcaccggggcccaggctggccgcacctcccagcccatggcccctggggtctttctcacacagaggcggccctccgcatcgtctccaaacaacaacaccgctgccaaaggaaaacgtacgaaaaagggcatggcgaccgccaagcagaggcttgggaaaattttgaaaattcatcggaacgggaaactactcctttaagatttggaaagccaggatccttctgctccgctcaggacccccggagccccgcgaaaacatctgcctcccaggagggtgccgagctgcctcaccagggagggccttgcctcttcccggctgccatctccccaacaagcgtctgtcccttcagccggcagagcgagcccagcgtggcccctcaatttgaaaatggacgtcttttctcaagttgctaagagtgatctgtcccagaaaagcggccctgcaagtttgaggaccgcttattccactttaaggacagccttcaggccccctgagcgtgggtgtgattgcagggcctctgcagctctgctgagagcatgagtccttcaaggaagacagagtgagccaatgctcaccagccccagagtcagagctggccacaggctggcagcctccaggggcttaaaaaaaaaggcaaagaacacagaaagaggaggagcaagtgggatgtttatgtccccccttctcttcctgagtgattctcagccaagtccagacagtgctcggcgggtgaggaagggtctgccccgagctttctggttggcaggtggcagcaggatggtgggtgttcagcctgaatgcccaggagcatttctggggggcagctaagactggcagctgggttggtgtgttagcgggcaggggagccattgtggggtccccaggaaagggcaagggctcagccacatcttggggtctgggaggcccaggctaagccatgtggcagggaccgtcttgccctgctggccacactctggagaagcacttctcagccaaggcacccctgccctgggactggcagggcaggggcaggggcagggacagtggccaggcggcccgaggacttacggtcggcacttctctgttctcccgtgtcagcgtgtggtgtcgcctgcatgggtcgtacctggatggtgtgtccaccatcgacacggaggggctggatttgtttctcaggcaatcctgtattttaattttagatgtatttcctgaagcatatttttcatagaatgtagcgtgtaaatagctttttaaataacttcttttttataagagtaaaagtatctttaggaatttctttctatagagttcttcattaacatttatacgagttttttgctgagtcagatggacagttgggttctgatgctttttccttctcctttccttttattattattatttttttcttttaagaactaaggtattgcctgaaaaacaagtgatgtctgtgcagccttacactctgtctttacagaagcaaatagtacacaaaagatctatttcagacacattttgaagatgaatcttcaactttaataccagctctttgttttccttgtatgatgaggggattgggggatacagttattttactagcaccttgtgaagtgtttccgtgttttgtgatgctgtaatttattaatgtttgtagctttttatatttgtacatttcttatgagctttgtttatatacccattacctggatgtttttgtccactgggagaggcagcttggtggaggccttatccactcccacttgtcctgtttggagggacgcagtccctagggcccgagactgggtgggagagggggagtctcacggggccccaggcttattcagaactggtgtttttaaagtttcctttaccctgcccttgttgaacatttatataatctaacctggacatcaagctgttctctctctctcttttttttaattttattattattattttggcaacatgtacatttctaacaaagtttatcgtggctattaaagtgttttatttcccaattcatattactcttgtatcgagtccatgaggtctaaggcaacttagatcaaagttttaaaaaagtaaaaatatttcaggttttgtac

SEQ ID NO: 164737 - DNA, 1997 bp, Homo sapiens
  Payload ID: 12452
  Gene Symbol: PHF20
  Gene Name: PHD finger protein 20
  ENST ID: ENST00000339089
  CDS Start-End: 369-1997
agagtccttctgtcggttggtcctggagcggcgcagccggagtggggccgtgaggctggaatgcagtgacatcatctcagagctgactgcaacctctgcctcctggattcaagcaattctcctgcctcagcctcccgagtagctaggattacaggcggatgccaccatgcccggctaatttttgtatttttggaagagatgggttttcaccatattcgccaagctagtcttgaactcctgacctcaagtgatccactctcctcggcctcccaaagtgctaggattacaggccactgtgcctggccaagaggtcacttttcatgtccaggctgcatggagaataaaggcagccccgttgatgactgaaaatgacaaagcatccacctaacagacgaggaatcagctttgaagtgggagcccagttggaagcccgggaccgtttaaaaaactggtatccagctcacatagaagacattgactacgaggaaggaaaagtactcatccatttcaagcgttggaaccatcgttatgatgagtggttctgctgggacagtccttatttacgccctttagagaaaatacagctgaggaaagagggcttgcatgaagaggatggatcttctgaatttcaaataaatgagcaggtccttgcttgctggtctgattgtcgtttttacccggccaaagtcactgctgttaacaaggatggtacttacactgtgaaattttatgatggagtagttcagactgtcaaacatattcatgtcaaagctttttccaaagatcagaatattgtgggtaatgctaggcctaaagaaacagatcacaaaagtctttcatcatctcctgataaacgagagaagtttaaagaacagagaaaagcaacagtgaatgtgaagaaagacaaagaagataaacccttaaagacagaaaagcgacccaagcagcctgataaagaaggaaagttaatctgttctgaaaaggggaaagtgtcagagaaaagtcttcccaagaacgagaaggaagacaaggaaaacatttccgaaaatgacagagagtattctggagatgcccaagtggataagaaacctgaaaatgacattgtgaagagtccacaagaaaacttgagggaacccaaaagaaaacgaggcagacccccttccatagctcctactgctgtggattcaaactctcaaactttgcaaccaataacattggaactgagaagaaggaaaatatcaaaaggatgtgaagtcccattaaaacgtcctcggcttgacaaaaattcatcccaggaaaagtcaaaaaactactcggaaaacactgacaaagacttatcgaggagacgttcctccaggctgtccactaatgggacccatgagatcctagatcctgacttggttgtatcagatttggttgatacggatcctttgcaagacacgttgtctagtaccaaggaatctgaagaaggtcagttgaagtctgctttggaagctggccaggtctcatctgcactgacttgccactcctttggggatggatccggggctgcaggcttggagttgaactgcccatcaatgggagaaaacacgatgaaaacagaaccgacttctccccttgtggaattacaagagatttcgactgtggaagtaacaaatacttttaagaaaacagatgattttgggtcatctaatgcaccagctgtcgacctagaccataagtttagatgcaaagttgtggactgtttaaaatttttccgcaaagccaaactgttgcactatcacatgaagtatttccatggaatggagaagtcactggagccagaagagagcccgggaaagaggcatgtccaaaccaggggcccttcagcttcagacaagcccagccaggagaccctgaccaggaagcgggtctctgccagttccccaactacaaaagacaaggaaaagaataaagagaagaaattcaaggagtttgtgagagtgaagccaaagaag

SEQ ID NO: 164738 - DNA, 1814 bp, Homo sapiens
  Payload ID: 12452
  Gene Symbol: PHF20
  Gene Name: PHD finger protein 20
  ENST ID: ENST00000374000
  CDS Start-End: 167-1814
agagtccttctgtcggttggtcctggagcggcgcagccggagtggggccgtgagcacgagtacacgagacaggattgagaaaggagagattcaaattgtgacttcagattcaaaggcaattaaaggaattaaacgagaataaaggcagccccgttgatgactgaaaatgacaaagcatccacctaacagacgaggaatcagctttgaagtgggagcccagttggaagcccgggaccgtttaaaaaactggtatccagctcacatagaagacattgactacgaggaaggaaaagtactcatccatttcaagcgttggaaccatcgttatgatgagtggttctgctgggacagtccttatttacgccctttagagaaaatacagctgaggaaagagggcttgcatgaagaggatggatcttctgaatttcaaataaatgagcaggtccttgcttgctggtctgattgtcgtttttacccggccaaagtcactgctgttaacaaggatggtacttacactgtgaaattttatgatggagtagttcagactgtcaaacatattcatgtcaaagctttttccaaagatcagaatattgtgggtaatgctaggcctaaagaaacagatcacaaaagtctttcatcatctcctgataaacgagagaagtttaaagaacagagaaaagcaacagtgaatgtgaagaaagacaaagaagataaacccttaaagacagaaaagcgacccaagcagcctgataaagaaggaaagttaatctgttctgaaaaggggaaagtgtcagagaaaagtcttcccaagaacgagaaggaagacaaggaaaacatttccgaaaatgacagagagtattctggagatgcccaagtggataagaaacctgaaaatgacattgtgaagagtccacaagaaaacttgagggaacccaaaagaaaacgaggcagacccccttccatagctcctactgctgtggattcaaactctcaaactttgcaaccaataacattggaactgagaagaaggaaaatatcaaaaggatgtgaagtcccattaaaacgtcctcggcttgacaaaaattcatcccaggaaaagtcaaaaaactactcggaaaacactgacaaagacttatcgaggagacgttcctccaggctgtccactaatgggacccatgagatcctagatcctgacttggttgtatcagatttggttgatacggatcctttgcaagacacgttgtctagtaccaaggaatctgaagaaggtcagttgaagtctgctttggaagctggccaggtctcatctgcactgacttgccactcctttggggatggatccggggctgcaggcttggagttgaactgcccatcaatgggagaaaacacgatgaaaacagaaccgacttctccccttgtggaattacaagagatttcgactgtggaagtaacaaatacttttaagaaaacagatgattttgggtcatctaatgcaccagctgtcgacctagaccataagtttagatgcaaagttgtggactgtttaaaatttttccgcaaagccaaactgttgcactatcacatgaagtatttccatggaatggagaagtcactggagccagaagagagcccgggaaagaggcatgtccaaaccaggggcccttcagcttcagacaagcccagccaggagaccctgaccaggaagcgggtctctgccagttccccaactacaaaagacaaggaaaagaataaagagaagaaattcaaggagtttgtgagagtgaagccaaagaagaaaaagaaaaagaaaaaga

SEQ ID NO: 164739 - DNA, 5922 bp, Homo sapiens
  Payload ID: 12452
  Gene Symbol: PHF20
  Gene Name: PHD finger protein 20
  Uniprot ID: Q9BVI0
  ENST ID: ENST00000374012
  CDS Start-End: 130-3168
atacgctgggcgcgtcccgggggtcacgtggtgcagagcacgcagagtccttctgtcggttggtcctggagcggcgcagccggagtggggccgtgaggagaataaaggcagccccgttgatgactgaaaatgacaaagcatccacctaacagacgaggaatcagctttgaagtgggagcccagttggaagcccgggaccgtttaaaaaactggtatccagctcacatagaagacattgactacgaggaaggaaaagtactcatccatttcaagcgttggaaccatcgttatgatgagtggttctgctgggacagtccttatttacgccctttagagaaaatacagctgaggaaagagggcttgcatgaagaggatggatcttctgaatttcaaataaatgagcaggtccttgcttgctggtctgattgtcgtttttacccggccaaagtcactgctgttaacaaggatggtacttacactgtgaaattttatgatggagtagttcagactgtcaaacatattcatgtcaaagctttttccaaagatcagaatattgtgggtaatgctaggcctaaagaaacagatcacaaaagtctttcatcatctcctgataaacgagagaagtttaaagaacagagaaaagcaacagtgaatgtgaagaaagacaaagaagataaacccttaaagacagaaaagcgacccaagcagcctgataaagaaggaaagttaatctgttctgaaaaggggaaagtgtcagagaaaagtcttcccaagaacgagaaggaagacaaggaaaacatttccgaaaatgacagagagtattctggagatgcccaagtggataagaaacctgaaaatgacattgtgaagagtccacaagaaaacttgagggaacccaaaagaaaacgaggcagacccccttccatagctcctactgctgtggattcaaactctcaaactttgcaaccaataacattggaactgagaagaaggaaaatatcaaaaggatgtgaagtcccattaaaacgtcctcggcttgacaaaaattcatcccaggaaaagtcaaaaaactactcggaaaacactgacaaagacttatcgaggagacgttcctccaggctgtccactaatgggacccatgagatcctagatcctgacttggttgtatcagatttggttgatacggatcctttgcaagacacgttgtctagtaccaaggaatctgaagaaggtcagttgaagtctgctttggaagctggccaggtctcatctgcactgacttgccactcctttggggatggatccggggctgcaggcttggagttgaactgcccatcaatgggagaaaacacgatgaaaacagaaccgacttctccccttgtggaattacaagagatttcgactgtggaagtaacaaatacttttaagaaaacagatgattttgggtcatctaatgcaccagctgtcgacctagaccataagtttagatgcaaagttgtggactgtttaaaatttttccgcaaagccaaactgttgcactatcacatgaagtatttccatggaatggagaagtcactggagccagaagagagcccgggaaagaggcatgtccaaaccaggggcccttcagcttcagacaagcccagccaggagaccctgaccaggaagcgggtctctgccagttccccaactacaaaagacaaggaaaagaataaagagaagaaattcaaggagtttgtgagagtgaagccaaagaagaaaaagaaaaagaaaaagaaaaccaaacctgaatgcccctgcagtgaggagatcagtgacacctcccaggaaccttctccacccaaggcatttgctgttaccaggtgtgggtcctcacacaagccaggggtccatatgagcccgcagcttcatggcccagaatctggacaccacaaagggaaagtgaaagcattggaggaggataatttgagtgagtcctcttctgagagctttctctggagtgatgatgagtatggccaagatgtggatgtgaccaccaacccagatgaggaacttgatggggatgaccgctatgacttcgaggtggtccgctgcatctgtgaggtccaggaggaaaatgacttcatgattcagtgtgaagagtgccagtgctggcagcatggggtctgcatgggattactggaagaaaatgtgcccgagaaatacacctgttatgtttgccaagaccctccaggtcagaggcctggcttcaagtactggtatgacaaggagtggctgagcaggggacatatgcatggcctggcatttctagaagagaactactcccatcagaatgccaagaagatcgtggccacccaccagcttcttggtgatgtgcagagagtgattgaggttctgcatggcctgcagctcaagatgagcatcttgcaaagccgggagcatcctgatctgccgctgtggtgccagccttggaaacagcactcaggggaggggagatctcatttcagaaacatccctgtcactgacaccaggagcaaggaggaagctccaagctatagaactttgaacggggcagtggagaagcccaggcccctggccctgcccctgccgcgttctgtggaggaatcctatatcaccagtgagcattgctaccagaagccccgcgcctattaccctgccgtggagcagaagctggtggtggagacgaggggctctgccctcgacgatgcggtcaaccccctccatgagaacggcgatgattccctttccccgcgcctgggctggcctctagaccaagacaggagcaagggggacagtgaccccaaacccggctccccaaaggtgaaggaatatgtctccaaaaaggccctaccagaagaagcccctgctcggaagctgctggacagaggtggagaggggctgctgagctcccagcaccagtggcagtttaacctgctgacccatgtggaatctcttcaggatgaagttacgcacaggatggactccattgagaaggagttggatgtgttggagagctggctggactacactggggaactggagccccctgagccgctggccaggcttccgcagctcaagcattgtatcaagcagctgctgatggacctgggcaaggtgcagcagatcgccctctgctgctcaacatgaaactgggcacccaaaactcatgggggcacaatcctggggcacctgcaggaggagcttcgcatatttaaataaataaacctagcatgctgaatgcacgtgacaccgactgacttcagggatctgggccaggagtgtggtggacattggacaaagaggccattttggctgcgggaggacactctgatctcgaagcctgccataaaggtagcaaatagactcttgggattcccctcttctgtgcacatcgttgaatgaagagagtctttttgcacaaacttcacttgaaattgtgccactgatgataaacggaatgagagccaaaaaagtttagttggagacagttgtaaattcaatttggagtttatttaattgacttttctatcacgttggggcacatgccaactccctggtttcttcctggcatggtgtttgggcagcaggcatcattttccttttctagcttcataggaatattgtgagctcaccatgctgtggaggttgggaaagagcagagtcttggctgccctgctttctccttaggactcttcacttttctcaccacatctcttgcatgacttcatggtactggggacaagtttgtatgccttcaccccagagctggctgggttatggcttttgtagcagagcccatacagcctatggaagaactagaatctcactcacagtaataagaatctaggaggaattccaaaccgaagcaggcagggtctggaacccaaaggacagcattttctacccacttcttaatattgacagcttccccgttctatttaatgtccaaaaatgtttcccaaaatttcaaactctttcactgtaaagatttgttacaaagaatgtggtttggggaattaccttattttatattgttgtaaacaaacttcaaattctacatgtgcgacttttctccttcctgaagggtgtttagtagtcagcgttttcagaattgttttgttactatactttaacattttacatttcctgtttgtattattttgtgagagcaaggtgatcatgctgcttaaggtccaggtacaacctatttgtaccttttgagacaatatttgtgttacttttgcaggttacggttccacatgtaattgctatattttgttttgtttttccttactaggcaaagttaaaatgttccatgctttgaggagtgacccatttcactactttgttttcttatcactaaaggcaaaaatcaaagcacagttgtccattaacacttataagttaattatgggtttatgagtctgtaatgttatatgctgcaaacatttactatgtaaacgtgaagtagccaataatatctcaatagtagtaacagtatctttagcgacctttggaatagttaagcacaggtcattgtggacatgaattcaggcctctgtactaaaatctatttcagggaatgttctgtctagtgatttgctcaccatttgatatataatgaattataggacaagtataagctgatctgctatagctgtccatcagagagaatacacgtggctataacatctataacaaaacgacgattcctctacaagaggctgtttctcactgctaacgttggtgtttctggcgtgggaagaaatgcacaggcgtgcatggcatgcacgttcagacagctgcattgtaagagttctgtcatgcagtctgaaaagggaagaaacaggatggctttctgtagccacacctgtgaggcgtgatgattgttgtattattagattactgatttttcttttctgaaaatacatttgagttttaatcacatctgtggaagctgtaacttttaaggtagtcaatttcatgtcttgttcaacgatgtaagcagaaactgaattgccctaattttgccaactggccattattgggattattgtttaaatttttggtaaaggaagtaatctcctttcattcattgtgacttttgttcttagggaagcagagaagactccccaagttcttataacctcattgtgcttccctaatttaaagccatgttgaggggctccattcccaattcctgggtcaaggtgaattaaccctatgttggagcactggaaaccgttatttgcaaacattgctgttaccatttagaaatatgtgcactatcagctgggtgcagtggctcacgtctgtaatcccagcactttgggaggccgaggcaggtggatcacctgaggtcaggagttcgagaccagcctggccaacagggtgaaaccccgtctctactaaaagtacaaaaattagctgggcgtggtggcggacgcctgtaatctcagctacttgggaggctgaagcaggagaggtgctggaacctgggaggcggaggttgaagtgagccgagattgcgctattgcactccagctcgggcgacaactgcaagactccatctcaaaaaaataaaaataaaagaaaagaaagaaatatgtgcactacctaagttttgtctttagaaaaactatccacctataaaaaattaccttgacaaaaatagttccggtttgactaatcattttgtttctttaagtggtaagtgtatgcaaggtggatccttgatgagccaacattgcactgtggatacatatctatgtttacgcgctattagaacagaaggcgctgtatatagaaatgttgctttgaagcaatatttgcaaaacacgcagacttctgtatctgtatttggaaaaaataaaacaggttcttgttgctatgtttcagtta

SEQ ID NO: 164740 - DNA, 539 bp, Homo sapiens
  Payload ID: 12452
  Gene Symbol: PHF20
  Gene Name: PHD finger protein 20
  ENST ID: ENST00000449988
  CDS Start-End: 77-539
aaaacaaaagaagacctgcttcaaagtagaatgaagtaggtgctgaaatagagctaccaggaggaggcagggcaggatggtgcaggttaatcatggtacttacactgtgaaattttatgatggagtagttcagactgtcaaacatattcatgtcaaagctttttccaaagatcagaatattgtgggtaatgctaggcctaaagaaacagatcacaaaagtctttcatcatctcctgataaacgagagaagtttaaagaacagagaaaagcaacagtgaatgtgaagaaagacaaagaagataaacccttaaagacagaaaagcgacccaagcagcctgataaagaaggaaagttaatctgttctgaaaaggggaaagtgtcagagaaaagtcttcccaagaacgagaaggaagacaaggaaaacatttccgaaaatgacagagagtattctggagatgcccaagtggataagaaacctgaaaatgacattgtgaagagtccacaagaaaacttgagggaacccaaaagaaaacgaggca

SEQ ID NO: 164741 - DNA, 832 bp, Homo sapiens
  Payload ID: 12452
  Gene Symbol: PHF20
  Gene Name: PHD finger protein 20
  ENST ID: ENST00000452270
  CDS Start-End: 373-684
acgcagagtccttctgtcggttggtcctggagcggcgcagccggagtggggccgtgaggctggaatgcagtgacatcatctcagagctgactgcaacctctgcctcctggattcaagcaattctcctgcctcagcctcccgagtagctaggattacaggcggatgccaccatgcccggctaatttttgtatttttggaagagatgggttttcaccatattcgccaagctagtcttgaactcctgacctcaagtgatccactctcctcggcctcccaaagtgctaggattacaggccactgtgcctggccaagaggtcacttttcatgtccaggctgcatggagaataaaggcagccccgttgatgactgaaaatgacaaagcatccacctaacagacgaggaatcagctttgaagtgggagcccagttggaagcccgggaccgtttaaaaaactggtatccagctcacatagaagacattgactacgaggaaggaaaagtactcatccatttcaagcgttggaaccatcgttatgatgagtggttctgctgggacagtccttatttacgccctttagagaaaatacagctgaggaaagagggcttgcatgaagaggatggatcttctagacgttttcttgctctgtcgcccagtctgaagtgcagtggtgcagtcttggcttaatgtagccttgacctcttgggctcaagcaatcctccttcctcagcctcctgagtacctgggactataggaatttcaaataaatgagcaggtccttgcttgctggtctgattgtcgtttttacccggccaaagtcactgctgttaacaag

SEQ ID NO: 164742 - DNA, 2032 bp, Homo sapiens
  Payload ID: 12452
  Gene Symbol: PHF20
  Gene Name: PHD finger protein 20
  ENST ID: ENST00000439301
  CDS Start-End: 34-1950
ggagaataaaggcagccccgttgatgactgaaaatgacaaagcatccacctaacagacgaggaatcagctttgaagtgggagcccagttggaagcccgggaccgtttaaaaaactggtatccagctcacatagaagacattgactacgaggaaggaaaagtactcatccatttcaagcgttggaaccatcgttatgatgagtggttctgctgggacagtccttatttacgccctttagagaaaatacagctgaggaaagagggcttgcatgaagaggatggatcttctgaatttcaaataaatgagcaggtccttgcttgctggtctgattgtcgtttttacccggccaaagtcactgctgttaacaaggatggtacttacactgtgaaattttatgatggagtagttcagactgtcaaacatattcatgtcaaagctttttccaaagatcagaatattgtgggtaatgctaggcctaaagaaacagatcacaaaagtctttcatcatctcctgataaacgagagaagtttaaagaacagagaaaagcaacagtgaatgtgaagaaagacaaagaagataaacccttaaagacagaaaagcgacccaagcagcctgataaagaaggaaagttaatctgttctgaaaaggggaaagtgtcagagaaaagtcttcccaagaacgagaaggaagacaaggaaaacatttccgaaaatgacagagagtattctggagatgcccaagtggataagaaacctgaaaatgacattgtgaagagtccacaagaaaacttgagggaacccaaaagaaaacgaggcagacccccttccatagctcctactgctgtggattcaaactctcaaactttgcaaccaataacattggaactgagaagaaggaaaatatcaaaaggatgtgaagtcccattaaaacgtcctcggcttgacaaaaattcatcccaggaaaagtcaaaaaactactcggaaaacactgacaaagacttatcgaggagacgttcctccaggctgtccactaatgggacccatgagatcctagatcctgacttggttgtatcagatttggttgatacggatcctttgcaagacacgttgtctagtaccaaggaatctgaagaaggtcagttgaagtctgctttggaagctggccaggtctcatctgcactgacttgccactcctttggggatggatccggggctgcaggcttggagttgaactgcccatcaatgggagaaaacacgatgaaaacagaaccgacttctccccttgtggaattacaagagatttcgactgtggaagtaacaaatacttttaagaaaacagatgattttgggtcatctaatgcaccagctgtcgacctagaccataagtttagatgcaaagttgtggactgtttaaaatttttccgcaaagccaaactgttgcactatcacatgaagtatttccatggaatggagaagtcactggagccagaagagagcccgggaaagaggcatgtccaaaccaggggcccttcagcttcagacaagcccagccaggagaccctgaccaggaagcgggtctctgccagttccccaactacaaaagacaaggaaaagaataaagagaagaaattcaaggagtttgtgagagtgaagccaaagaagaaaaagaaaaagaaaaagaaaaccaaacctgaatgcccctgcagtgaggagatcagtgacacctcccaggaaccttctccacccaaggcatttgctgttaccaggtgtgggtcctcacacaagccaggggtccatatgagcccgcagcttcatggcccagaatctggacaccacaaagggaaagtgaaagcattggaggaggataatttgagtgagtcctcttctgagagctttctctggagtgatgatgagtatggccaagatgtggatgtgcaccaacccagatgaggaacttgatggggatgaccgctatgacttcgaggtggtccgctgcatctgtgaggtccaggaggaaaatgacttcatgatt

SEQ ID NO: 164743 - DNA, 384 bp, Homo sapiens
  Payload ID: 12452
  Gene Symbol: PHF20
  Gene Name: PHD finger protein 20
  ENST ID: ENST00000420233
  CDS Start-End: 193-384
ggttcatggggagttgtagctcctctgccactgagttctatgatcttgagtagccactgccgttgggcttcattctctcagtgaaatgaggaagtggagttgagttcactgccaggcagcatgcttcgtttgggctgttactaaatgacagatccaaggacagattggcatcctcgtttccttgccctatgaatgttcttgtttggagaggaggataatttgagtgagtcctcttctgagagctttctctggagtgatgatgagtatggccaagatgtggatgtgaccaccaacccagatgaggaacttgatggggatgaccgctatgacttcgaggtggtccgctgcatctgtgaggtccaggaggaaaatgacttcatgatt

SEQ ID NO: 164744 - DNA, 3297 bp, Homo sapiens
  Payload ID: 12453
  Gene Symbol: PHF20L1
  Gene Name: PHD finger protein 20-like 1
  ENST ID: ENST00000220847
  CDS Start-End: 322-3297
gctgacgtcgccggggcccggcgtcgcgtcagggctggccggcggcggaggcggcggcggcggcggcgatggcagcggaccctgagcgagcttgagggctcggacccagctccctcccgcgaaaccttgggcggatccggcgctgcggccccagctcgctccgctcctgctccctccccggccgctgcctgggcggaggcagaggcagaggcccgggctggccgccctgctcgtgccccagctcggccccggacggcccggctgctgtgcagagaggaggccgagtcgtgaaaagagaatactgaagaataggatctcaagatgagtaaaaagcccccaaatcgccctggaatcacttttgagattggtgctcgtttggaggcactggactacttacaaaaatggtatccatcacgaattgaaaaaattgactatgaggagggcaagatgttggtccattttgagcgctggagtcatcgttatgatgagtggatttactgggatagcaatagattgcgaccccttgagagaccagcactaagaaaagaagggctaaaagatgaggaagatttctttgattttaaagctggagaagaagttctggctcgttggacagactgtcgctattaccctgccaagattgaagcaattaacaaagaaggaacatttacagttcagttttatgatggagtaattcgttgtttaaaaagaatgcacattaaagccatgcccgaggatgctaaggggcaggattggatagctttagtcaaagcagctgctgcagctgcagccaagaacaaaacagggagtaaacctcgaaccagcgctaacagcaataaagataaggataaagatgagagaaagtggtttaaagtaccttcaaagaaggaggaaacttcaacttgtatagccacaccagacgtagagaagaaggaagatctgcctacatctagtgaaacatttggacttcatgtagagaacgttccaaagatggtctttccacagccagagagcacattatcaaacaagaggaaaaataatcaaggcaactcgtttcaggcaaagagagctcgacttaacaagattactggtttgttggcatccaaagctgttggggttgatggtgctgaaaaaaaggaagactacaatgaaacagctccaatgctggagcaggcgatttcacctaaacctcaaagtcagaaaaaaaatgaagctgacattagcagttctgccaacactcagaaacctgcactgttatcctcaactttgtcttcagggaaggctcgcagcaagaaatgcaaacatgaatctggagattcttctgggtgtataaaaccccctaaatcaccactttccccagaattaatacaagtcgaggatttgacgcttgtatctcagctttcttcttcagtgataaataaaactagtcctccacagcctgtgaatccccctagacctttcaagcatagtgagcggagaagaagatctcagcgtttagccaccttacccatgcctgatgattctgtagaaaaggtttcttctccctctccagccactgatgggaaagtattctccatcagttctcaaaatcagcaagaatcttcagtaccagaggtgcctgatgttgcacatttgccacttgagaagctgggaccctgtctccctcttgacttaagtcgtggttcagaagttacagcaccggtagcctcagattcctcttaccgtaatgaatgtcccagggcagaaaaagaggatacacagatgcttccaaatccttcttccaaagcaatagctgatggaagaggagctccagcagcagcaggaatatcgaaaacagaaaaaaaagtgaaattggaagacaaaagctcaacagcatttggtaagagaaaagaaaaagataaggaaagaagagagaagagagacaaagatcactacagaccaaaacagaagaagaagaaaaaaaagaaaaagaaatctaagcaacatgactattcagactatgaagacagttccctcgaatttttggaaaggtgctcttctccactaactcgatcttctgggagttctctggcttcacgaagcatgtttacggagaaaactacaacctatcagtacccaagggcaattctatccgttgatcttagtggtgaaaacttatcagatgtagacttcctagatgattcttcaacggagagtttgcttctgagtggggatgaatacaatcaggactttgattcaaccaattttgaggaatctcaggatgaggatgatgctcttaatgaaattgtgcgatgtatttgtgagatggatgaggagaatggcttcatgatccagtgtgaagagtgcttgtgttggcaacacagcgtgtgcatggggctgctggaggagagcattccagagcagtacatctgctatatctgccgggacccaccaggtcagaggtggagtgcaaaatatcgttatgataaggagtggttgaataatgggagaatgtgcgggttatcatttttcaaagaaaattattctcatctcaatgccaaaaagatagtttctacacatcacctgcttgctgatgtctatggtgttacagaagtgctacacgggctacagctgaagattggaatactaaagaataaacatcatcctgaccttcatctctgggcttgttccgggaagcgaaaagaccaagatcaaataatagctggggtggagaaaaaaatagctcaagacacagttaatcgagaagaaaagaaatatgtacagaaccataaagaaccacctcgtttgcccctaaaaatggaaggaacttatataacaagtgagcatagctatcaaaagccacaaagttttggtcaggactgtaaatctctcgcagaccctgggagctcagatgatgatgatgttagtagtttggaagaagaacaagaattccacatgagaagtaaaaacagtttacagtactcagcaaaagaacatggaatgcctgaaaagaatccagctgaagggaatacagtatttgtttataatgataaaaagggcaccgaagacccaggagactcacatcttcagtggcagctcaatctccttacacacatagaaaatgtgcagaacgaagttaccagcaggatggacctaatagaaaaagaagtcgatgttctggaaagctggcttgatttcacaggggagttggagccaccagatcctcttgcaagattgccccaacttaaacgccacataaaacagctcctaattgacatgggcaaagtacagcagatagcaactctttgctctgtatga

SEQ ID NO: 164745 - DNA, 2311 bp, Homo sapiens
  Payload ID: 12453
  Gene Symbol: PHF20L1
  Gene Name: PHD finger protein 20-like 1
  Uniprot ID: A8MW92
  ENST ID: ENST00000337920
  CDS Start-End: 272-1129
gcggcggcggcggcggcgatggcagcggaccctgagcgagcttgagggctcggacccagctccctcccgcgaaaccttgggcggatccggcgctgcggccccagctcgctccgctcctgctccctccccggccgctgcctgggcggaggcagaggcagaggcccgggctggccgccctgctcgtgccccagctcggccccggacggcccggctgctgtgcagagaggaggccgagtcgtgaaaagagaatactgaagaataggatctcaagatgagtaaaaagcccccaaatcgccctggaatcacttttgagattggtgctcgtttggaggcactggactacttacaaaaatggtatccatcacgaattgaaaaaattgactatgaggagggcaagatgttggtccattttgagcgctggagtcatcgttatgatgagtggatttactgggatagcaatagattgcgaccccttgagagaccagcactaagaaaagaagggctaaaagatgaggaagatttctttgattttaaagctggagaagaagttctggctcgttggacagactgtcgctattaccctgccaagattgaagcaattaacaaagaaggaacatttacagttcagttttatgatggagtaattcgttgtttaaaaagaatgcacattaaagccatgcccgaggatgctaaggggcaggattggatagctttagtcaaagcagctgctgcagctgcagccaagaacaaaacagggagtaaacctcgaaccagcgctaacagcaataaagataaggataaagatgagagaaagtggtttaaagtaccttcaaagaaggaggaaacttcaacttgtatagccacaccagacgtagagaagaaggaagatctgcctacatctagtgaaacatttggacttcatgtagagaacgttccaaagatggtctttccacagccagagagcacattatcaaacaagaggaaaaataatcaaggcaactcgtttcaggcaaagagagctcgacttaacaagattactggtttgttggcatccaaagctgttggggttgatggtgctgaaaaaaaggaagactacaatgaaacagctccaatgctggagcaggtatgaaatggtagcatttgatttttttcaaggttcccactggaatgatcacggagctctagtatctacgtaattgaaattccccttttgatcagatatgggaataggaagctaattaattgatgatatatttttaactctgccttctccaaggtatacagataactacagacttcattagtgtttgatttcatagactggcattaaagcctttgtctccaaaatttgaaggcctggagacaggcatcccagggtataagcttccagctggatcacctttaactagcttacaaaaagacccttacacaaatactttccatttgtgagttaaaacagggttttttgacatcgaataaagcttcttttgtaagaagtttcttttatattgtaacaattggtgttgttagactgactatgtgttttatgaattgatcaatgagccatacatttttgctaggatgtatattttaataactacaaaaaaagagagtttaaaaaactattaagggtctgtctttaaaccacctaatagaggaatttaaaagtgaaggttgcagttgctagattttgccttggctaccttcagattcccacaatacttgtacataatgaactgtgcatgcttttacattctctaagggcttaacttcttaggcactgtaagactataagaacgcagtaatagccataactggatttccttggttctcctgttttaaaatctgagccttaatgtagttttaatatatcctttttgtattacttttctttattagtagcctaataaagaagactttgagtatcttttgctctcctctagatgcgttttaaaaactattccaaatttaattgatattgtattgagtttttcagggttattttaggcctgatttgataacaatgcgttgttttggtgcctccattaatgttgtattaaatcaatgggtcttttaaattgattaatatgtcattgaatcataccttctgattttctgtgatcatccaacggttaagtctttgccgttattgtcaatatatcaaccaaattttaaataactttttttactgtgtattactatattcaacgtcccagatataacaatattttgtattttcaccactgtttatggtattctcagaatgcgataaatcagggacttgggtaataaaatgtttctggaaaattca

SEQ ID NO: 164746 - DNA, 2236 bp, Homo sapiens
  Payload ID: 12453
  Gene Symbol: PHF20L1
  Gene Name: PHD finger protein 20-like 1
  ENST ID: ENST00000395376
  CDS Start-End: 104-1054
cgccctgctcgtgccccagctcggccccggacggcccggctgctgtgcagagaggaggccgagtcggtagtgaaaagagaatactgaagaataggatctcaagatgagtaaaaagcccccaaatcgccctggaatcacttttgagattggtgctcgtttggaggcactggactacttacaaaaatggtatccatcacgaattgaaaaaattgactatgaggagggcaagatgttggtccattttgagcgctggagtcatcgttatgatgagtggatttactgggatagcaatagattgcgaccccttgagagaccagcactaagaaaagaagggctaaaagatgaggaagatttctttgattttaaagctggagaagaagttctggctcgttggacagactgtcgctattaccctgccaagattgaagcaattaacaaagaaggaacatttacagttcagttttatgatggagtaattcgttgtttaaaaagaatgcacattaaagccatgcccgaggatgctaaggggcagtttctgttccaggtgaaatcccagcatccactaagctggtgttgtcctatcgacccagctggatcgtgtaaccagtctatgggaagtgaggattggatagctttagtcaaagcagctgctgcagctgcagccaagaacaaaacagggagtaaacctcgaaccagcgctaacagcaataaagataaggataaagatgagagaaagtggtttaaagtaccttcaaagaaggaggaaacttcaacttgtatagccacaccagacgtagagaagaaggaagatctgcctacatctagtgaaacatttgtaggacttcatgtagagaacgttccaaagatggtctttccacagccagagagcacattatcaaacaagaggaaaaataatcaaggcaactcgtttcaggcaaagagagctcgacttaacaagattactggtttgttggcatccaaagctgttggggttgatggtgctgaaaaaaaggaagactacaatgaaacagctccaatgctggagcaggtatgaaatggtagcatttgatttttttcaaggttcccactggaatgatcacggagctctagtatctacgtaattgaaattccccttttgatcagatatgggaataggaagctaattaattgatgatatatttttaactctgccttctccaaggtatacagataactacagacttcattagtgtttgatttcatagactggcattaaagcctttgtctccaaaatttgaaggcctggagacaggcatcccagggtataagcttccagctggatcacctttaactagcttacaaaaagacccttacacaaatactttccatttgtgagttaaaacagggttttttgacatcgaataaagcttcttttgtaagaagtttcttttatattgtaacaattggtgttgttagactgactatgtgttttatgaattgatcaatgagccatacatttttgctaggatgtatattttaataactacaaaaaaagagagtttaaaaaactattaagggtctgtctttaaaccacctaatagaggaatttaaaagtgaaggttgcagttgctagattttgccttggctaccttcagattcccacaatacttgtacataatgaactgtgcatgcttttacattctctaagggcttaacttcttaggcactgtaagactataagaacgcagtaatagccataactggatttccttggttctcctgttttaaaatctgagccttaatgtagttttaatatatcctttttgtattacttttctttattagtagcctaataaagaagactttgagtatcttttgctctcctctagatgcgttttaaaaactattccaaatttaattgatattgtattgagtttttcagggttattttaggcctgatttgataacaatgcgttgttttggtgcctccattaatgttgtattaaatcaatgggtcttttaaattgattaatatgtcattgaatcataccttctgattttctgtgatcatccaacggttaagtctttgccgttattgtcaatatatcaaccaaattttaaataactttttttactgtgtattactatattcaacgtcccagatataacaatattttgtattttcaccactgtttatggtattctcagaatgcgataaatcagggacttgggtaataaaatgtttctggaaaattca

SEQ ID NO: 164747 - DNA, 1998 bp, Homo sapiens
  Payload ID: 12453
  Gene Symbol: PHF20L1
  Gene Name: PHD finger protein 20-like 1
  ENST ID: ENST00000395379
  CDS Start-End: 309-1244
ccggcgtcgcgtcagggctggccggcggcggaggcggcggcggcggcggcgatggcagcggaccctgagcgagcttgagggctcggacccagctccctcccgcgaaaccttgggcggatccggcgctgcggccccagctcgctccgctcctgctccctccccggccgctgcctgggcggaggcagaggcagaggcccgggctggccgccctgctcgtgccccagctcggccccggacggcccggctgctgtgcagagaggaggccgagtcggtagtgaaaagagaatactgaagaataggatctcaagatgagtaaaaagcccccaaatcgccctggaatcacttttgagattggtgctcgtttggaggcactggactacttacaaaaatggtatccatcacgaattgaaaaaattgactatgaggagggcaagatgttggtccattttgagcgctggagtcatcgttatgatgagtggatttactgggatagcaatagattgcgaccccttgagagaccagcactaagaaaagaagggctaaaagatgaggaagatttctttgattttaaagctggagaagaagttctggctcgttggacagactgtcgctattaccctgccaagattgaagcaattaacaaagaaggaacatttacagttcagttttatgatggagtaattcgttgtttaaaaagaatgcacattaaagccatgcccgaggatgctaaggggcaggtgaaatcccagcatccactaagctggtgttgtcctatcgacccagctggatcgtgtaaccagtctatgggaagtgaggattggatagctttagtcaaagcagctgctgcagctgcagccaagaacaaaacagggagtaaacctcgaaccagcgctaacagcaataaagataaggataaagatgagagaaagtggtttaaagtaccttcaaagaaggaggaaacttcaacttgtatagccacaccagacgtagagaagaaggaagatctgcctacatctagtgaaacatttggacttcatgtagagaacgttccaaagatggtctttccacagccagagagcacattatcaaacaagaggaaaaataatcaaggcaactcgtttcaggcaaagagagctcgacttaacaagattactggtttgttggcatccaaagctgttggggttgatggtgctgaaaaaaaggaagactacaatgaaacagctccaatgctggagcaggtatgaaatggtagcatttgatttttttcaaggttcccactggaatgatcacggagctctagtatctacgtaattgaaattccccttttgatcagatatgggaataggaagctaattaattgatgatatatttttaactctgccttctccaaggtatacagataactacagacttcattagtgtttgatttcatagactggcattaaagcctttgtctccaaaatttgaaggcctggagacaggcatcccagggtataagcttccagctggatcacctttaactagcttacaaaaagacccttacacaaatactttccatttgtgagttaaaacagggttttttgacatcgaataaagcttcttttgtaagaagtttcttttatattgtaacaattggtgttgttagactgactatgtgttttatgaattgatcaatgagccatacatttttgctaggatgtatattttaataactacaaaaaaagagagtttaaaaaactattaagggtctgtctttaaaccacctaatagaggaatttaaaagtgaaggttgcagttgctagattttgccttggctaccttcagattcccacaatacttgtacataatgaactgtgcatgcttttacattctctaagggcttaacttcttaggcactgtaagactataagaacgcagtaatagccataactggatttccttggttctcctgttttaaaatctgagccttaatgtagttttaatatatcctttttgtat

SEQ ID NO: 164748 - DNA, 6237 bp, Homo sapiens
  Payload ID: 12453
  Gene Symbol: PHF20L1
  Gene Name: PHD finger protein 20-like 1
  Uniprot ID: A8MW92
  ENST ID: ENST00000395386
  CDS Start-End: 300-3353
cgtcagggctggccggcggcggaggcggcggcggcggcggcgatggcagcggaccctgagcgagcttgagggctcggacccagctccctcccgcgaaaccttgggcggatccggcgctgcggccccagctcgctccgctcctgctccctccccggccgctgcctgggcggaggcagaggcagaggcccgggctggccgccctgctcgtgccccagctcggccccggacggcccggctgctgtgcagagaggaggccgagtcggtagtgaaaagagaatactgaagaataggatctcaagatgagtaaaaagcccccaaatcgccctggaatcacttttgagattggtgctcgtttggaggcactggactacttacaaaaatggtatccatcacgaattgaaaaaattgactatgaggagggcaagatgttggtccattttgagcgctggagtcatcgttatgatgagtggatttactgggatagcaatagattgcgaccccttgagagaccagcactaagaaaagaagggctaaaagatgaggaagatttctttgattttaaagctggagaagaagttctggctcgttggacagactgtcgctattaccctgccaagattgaagcaattaacaaagaaggaacatttacagttcagttttatgatggagtaattcgttgtttaaaaagaatgcacattaaagccatgcccgaggatgctaaggggcaggtgaaatcccagcatccactaagctggtgttgtcctatcgacccagctggatcgtgtaaccagtctatgggaagtgaggattggatagctttagtcaaagcagctgctgcagctgcagccaagaacaaaacagggagtaaacctcgaaccagcgctaacagcaataaagataaggataaagatgagagaaagtggtttaaagtaccttcaaagaaggaggaaacttcaacttgtatagccacaccagacgtagagaagaaggaagatctgcctacatctagtgaaacatttggacttcatgtagagaacgttccaaagatggtctttccacagccagagagcacattatcaaacaagaggaaaaataatcaaggcaactcgtttcaggcaaagagagctcgacttaacaagattactggtttgttggcatccaaagctgttggggttgatggtgctgaaaaaaaggaagactacaatgaaacagctccaatgctggagcaggcgatttcacctaaacctcaaagtcagaaaaaaaatgaagctgacattagcagttctgccaacactcagaaacctgcactgttatcctcaactttgtcttcagggaaggctcgcagcaagaaatgcaaacatgaatctggagattcttctgggtgtataaaaccccctaaatcaccactttccccagaattaatacaagtcgaggatttgacgcttgtatctcagctttcttcttcagtgataaataaaactagtcctccacagcctgtgaatccccctagacctttcaagcatagtgagcggagaagaagatctcagcgtttagccaccttacccatgcctgatgattctgtagaaaaggtttcttctccctctccagccactgatgggaaagtattctccatcagttctcaaaatcagcaagaatcttcagtaccagaggtgcctgatgttgcacatttgccacttgagaagctgggaccctgtctccctcttgacttaagtcgtggttcagaagttacagcaccggtagcctcagattcctcttaccgtaatgaatgtcccagggcagaaaaagaggatacacagatgcttccaaatccttcttccaaagcaatagctgatggaagaggagctccagcagcagcaggaatatcgaaaacagaaaaaaaagtgaaattggaagacaaaagctcaacagcatttggtaagagaaaagaaaaagataaggaaagaagagagaagagagacaaagatcactacagaccaaaacagaagaagaagaaaaaaaagaaaaagaaatctaagcaacatgactattcagactatgaagacagttccctcgaatttttggaaaggtgctcttctccactaactcgatcttctgggagttctctggcttcacgaagcatgtttacggagaaaactacaacctatcagtacccaagggcaattctatccgttgatcttagtggtgaaaacttatcagatgtagacttcctagatgattcttcaacggagagtttgcttctgagtggggatgaatacaatcaggactttgattcaaccaattttgaggaatctcaggatgaggatgatgctcttaatgaaattgtgcgatgtatttgtgagatggatgaggagaatggcttcatgatccagtgtgaagagtgcttgtgttggcaacacagcgtgtgcatggggctgctggaggagagcattccagagcagtacatctgctatatctgccgggacccaccaggtcagaggtggagtgcaaaatatcgttatgataaggagtggttgaataatgggagaatgtgcgggttatcatttttcaaagaaaattattctcatctcaatgccaaaaagatagtttctacacatcacctgcttgctgatgtctatggtgttacagaagtgctacacgggctacagctgaagattggaatactaaagaataaacatcatcctgaccttcatctctgggcttgttccgggaagcgaaaagaccaagatcaaataatagctggggtggagaaaaaaatagctcaagacacagttaatcgagaagaaaagaaatatgtacagaaccataaagaaccacctcgtttgcccctaaaaatggaaggaacttatataacaagtgagcatagctatcaaaagccacaaagttttggtcaggactgtaaatctctcgcagaccctgggagctcagatgatgatgatgttagtagtttggaagaagaacaagaattccacatgagaagtaaaaacagtttacagtactcagcaaaagaacatggaatgcctgaaaagaatccagctgaagggaatacagtatttgtttataatgataaaaagggcaccgaagacccaggagactcacatcttcagtggcagctcaatctccttacacacatagaaaatgtgcagaacgaagttaccagcaggatggacctaatagaaaaagaagtcgatgttctggaaagctggcttgatttcacaggggagttggagccaccagatcctcttgcaagattgccccaacttaaacgccacataaaacagctcctaattgacatgggcaaagtacagcagatagcaactctttgctctgtatgacaacagtgaacacttaatgaaagaatgtggctttcttcagtcaaagcatttttattatccacgtgatggctaagtggataatttaaaagcttagtaatgtctggtcattcactgatttgtgatgtcaataggatggcaccttggaaagaaaaatgaagaacaactttatcaaggaagctagtatttaaaaacaaattcatgagcaagctgcaaatgagaatgtgttatatgccaaggaacaatgaagtagaatataatgtatactaagggatttcaagttctcagaatttttgagtagttgcttacgtgaagctcaagatacctgtagaaagaaatatggtatatttgtatagtttttaatagaaagatctatgtttataaaccagcacttggccaaaaacaaaattgtaaaggaaatttaaattctggagaattctacagggttgctctaagaactgtcttctcagcagttgatccagctgtacggaaatttagggtatttaaacttttaaaggatcatgagctgtttcttgggcgatgaatgttctcaatcagaaaactgacagtagaaatctcacttctggggaaaacagttgtggaattcttacttcattatgaatgtatttaaaaaacaaacaccaaataattggaatatattgcaggcattaagctcattaaaaacaaactggcttgcagaagggtccgatgtgccaagtgatcatgattctgctggaaagaggattttaaatattgtgggagttctcccaccctaagtcttacataatgccaccagtccatccaaaacctatatatcacctatactatatatatcatatatatagttgaatggcagtattcaggctcaacgtacagtttgatcctgagtatgcttggtgtttgccttcagaaaaaaaaaaatacattgtaaataacctcagctgggatgaggagtgacagaatatcaaaataatttgtggctgtggatttttttaactgctagtagtggaatactggaaaagcttcatttctgaagatgaattttatttttaaaaaatacatgcacactcaaaacttttagctttgatcacaagtggacaaatttctgaaaccaaaggcaactaagttgctgtgttagctcttgctggattttgagcctaggtcctactgtctgccagtactcatgtgagttgtatgtgcccccagtgctacatacgcaggtatgcgtaagtgtgtatgcttgttttaaacaaacactcaacgtacatatgtacataatctacacatatttatatcacatatctagttttattactatagactatacgaattggtggttaacatgaaatgttaccttttaacagactgtttttaaaaattaaaaatgtatgtataggttttgaaatttttttaaaaggggagaaagactgttaagaggaggctatttgatgacataacacttgaatattttatgcctcattctgtttatcagttctcgcaatctgtataaatgcattttagaactgatagacagtaaacttgaatttatctttgataagaatacatgccactgtacattcagatattatttaaatttgcaaacacattgttctatatgtaagggtactgtatgtaaaactctgtattaaaactattccacatatcctaaaatttcagcttgcctttttgcggccttatattttgatgtaaagattaaaagaatgtgcaaaacagtcagaaatttttattgccttttgagattctccaacttgacaaatgtgccaaagatcaacagacagaaaatatcatcctgtgtatttacttgtcatactttaactttgtgaaagatcttactgataaatgaaaagctttagcagaggtggtattgtggggtaattgcttaaatttacatatcaaagtaaaaaagtagtgcctgtattccatgtgtggagtaaatttgctaatgtctatattttatgattgatactattatttttcctttgcattttaaaatagtggctctaatattttccctgtcatggctacattctagacattgaatttatatcttctttttttcagatacggagcaaatagcatccttaacctatgaataatggtgttgcctagattcttgtcacacacacagaagaccctttgtacctagtaacattcatcctcttgattcctggtgaacacggttaaattcatgcacatttgttcttgtagtttctaaaaattagatcaatttatttgttagccagcaaattgaaaattccattattagattaatgaaatttttgctctgcttatatgtatacgaactggaaatctgaatttttaaatttagatctttaaatcaaattatttttatgcatattttcatttaatatagagtataccaatcgattgaagcctttcacaagtagtgcgctgagcttttcttattgaagagagtgaattagtttctgagaagtcagtctattgtgaaaagtttcagatgagattattttcttttagtctttttaaatatcactatatgtatttaaatagaagcaataaactagagagagtgtttcttgaaaagacaatgttttatttgccaccaggcagaacagaatgagcattggtagagaaggctccctcttggtatgttactgataaacttgtacttcctcatacttgtttgtggttctactgacttatttccaaacttaagagtaatgtacttcgaaaacaacttggttattctttaaatttcaggtaaaaccccttttcctaacactcatcttatttccactgtcttatttcctctcagatgttcatatttcacatgttcaaaatgaagcgtactatttcccctccaataaacgaagtctcctgccaa

SEQ ID NO: 164749 - DNA, 5900 bp, Homo sapiens
  Payload ID: 12453
  Gene Symbol: PHF20L1
  Gene Name: PHD finger protein 20-like 1
  ENST ID: ENST00000395390
  CDS Start-End: 38-3016
gtagtgaaaagagaatactgaagaataggatctcaagatgagtaaaaagcccccaaatcgccctggaatcacttttgagattggtgctcgtttggaggcactggactacttacaaaaatggtatccatcacgaattgaaaaaattgactatgaggagggcaagatgttggtccattttgagcgctggagtcatcgttatgatgagtggatttactgggatagcaatagattgcgaccccttgagagaccagcactaagaaaagaagggctaaaagatgaggaagatttctttgattttaaagctggagaagaagttctggctcgttggacagactgtcgctattaccctgccaagattgaagcaattaacaaagaaggaacatttacagttcagttttatgatggagtaattcgttgtttaaaaagaatgcacattaaagccatgcccgaggatgctaaggggcaggattggatagctttagtcaaagcagctgctgcagctgcagccaagaacaaaacagggagtaaacctcgaaccagcgctaacagcaataaagataaggataaagatgagagaaagtggtttaaagtaccttcaaagaaggaggaaacttcaacttgtatagccacaccagacgtagagaagaaggaagatctgcctacatctagtgaaacatttgtaggacttcatgtagagaacgttccaaagatggtctttccacagccagagagcacattatcaaacaagaggaaaaataatcaaggcaactcgtttcaggcaaagagagctcgacttaacaagattactggtttgttggcatccaaagctgttggggttgatggtgctgaaaaaaaggaagactacaatgaaacagctccaatgctggagcaggcgatttcacctaaacctcaaagtcagaaaaaaaatgaagctgacattagcagttctgccaacactcagaaacctgcactgttatcctcaactttgtcttcagggaaggctcgcagcaagaaatgcaaacatgaatctggagattcttctgggtgtataaaaccccctaaatcaccactttccccagaattaatacaagtcgaggatttgacgcttgtatctcagctttcttcttcagtgataaataaaactagtcctccacagcctgtgaatccccctagacctttcaagcatagtgagcggagaagaagatctcagcgtttagccaccttacccatgcctgatgattctgtagaaaaggtttcttctccctctccagccactgatgggaaagtattctccatcagttctcaaaatcagcaagaatcttcagtaccagaggtgcctgatgttgcacatttgccacttgagaagctgggaccctgtctccctcttgacttaagtcgtggttcagaagttacagcaccggtagcctcagattcctcttaccgtaatgaatgtcccagggcagaaaaagaggatacacagatgcttccaaatccttcttccaaagcaatagctgatggaagaggagctccagcagcagcaggaatatcgaaaacagaaaaaaaagtgaaattggaagacaaaagctcaacagcatttggtaagagaaaagaaaaagataaggaaagaagagagaagagagacaaagatcactacagaccaaaacagaagaagaagaaaaaaaagaaaaagaaatctaagcaacatgactattcagactatgaagacagttccctcgaatttttggaaaggtgctcttctccactaactcgatcttctgggagttctctggcttcacgaagcatgtttacggagaaaactacaacctatcagtacccaagggcaattctatccgttgatcttagtggtgaaaacttatcagatgtagacttcctagatgattcttcaacggagagtttgcttctgagtggggatgaatacaatcaggactttgattcaaccaattttgaggaatctcaggatgaggatgatgctcttaatgaaattgtgcgatgtatttgtgagatggatgaggagaatggcttcatgatccagtgtgaagagtgcttgtgttggcaacacagcgtgtgcatggggctgctggaggagagcattccagagcagtacatctgctatatctgccgggacccaccaggtcagaggtggagtgcaaaatatcgttatgataaggagtggttgaataatgggagaatgtgcgggttatcatttttcaaagaaaattattctcatctcaatgccaaaaagatagtttctacacatcacctgcttgctgatgtctatggtgttacagaagtgctacacgggctacagctgaagattggaatactaaagaataaacatcatcctgaccttcatctctgggcttgttccgggaagcgaaaagaccaagatcaaataatagctggggtggagaaaaaaatagctcaagacacagttaatcgagaagaaaagaaatatgtacagaaccataaagaaccacctcgtttgcccctaaaaatggaaggaacttatataacaagtgagcatagctatcaaaagccacaaagttttggtcaggactgtaaatctctcgcagaccctgggagctcagatgatgatgatgttagtagtttggaagaagaacaagaattccacatgagaagtaaaaacagtttacagtactcagcaaaagaacatggaatgcctgaaaagaatccagctgaagggaatacagtatttgtttataatgataaaaagggcaccgaagacccaggagactcacatcttcagtggcagctcaatctccttacacacatagaaaatgtgcagaacgaagttaccagcaggatggacctaatagaaaaagaagtcgatgttctggaaagctggcttgatttcacaggggagttggagccaccagatcctcttgcaagattgccccaacttaaacgccacataaaacagctcctaattgacatgggcaaagtacagcagatagcaactctttgctctgtatgacaacagtgaacacttaatgaaagaatgtggctttcttcagtcaaagcatttttattatccacgtgatggctaagtggataatttaaaagcttagtaatgtctggtcattcactgatttgtgatgtcaataggatggcaccttggaaagaaaaatgaagaacaactttatcaaggaagctagtatttaaaaacaaattcatgagcaagctgcaaatgagaatgtgttatatgccaaggaacaatgaagtagaatataatgtatactaagggatttcaagttctcagaatttttgagtagttgcttacgtgaagctcaagatacctgtagaaagaaatatggtatatttgtatagtttttaatagaaagatctatgtttataaaccagcacttggccaaaaacaaaattgtaaaggaaatttaaattctggagaattctacagggttgctctaagaactgtcttctcagcagttgatccagctgtacggaaatttagggtatttaaacttttaaaggatcatgagctgtttcttgggcgatgaatgttctcaatcagaaaactgacagtagaaatctcacttctggggaaaacagttgtggaattcttacttcattatgaatgtatttaaaaaacaaacaccaaataattggaatatattgcaggcattaagctcattaaaaacaaactggcttgcagaagggtccgatgtgccaagtgatcatgattctgctggaaagaggattttaaatattgtgggagttctcccaccctaagtcttacataatgccaccagtccatccaaaacctatatatcacctatactatatatatcatatatatagttgaatggcagtattcaggctcaacgtacagtttgatcctgagtatgcttggtgtttgccttcagaaaaaaaaaaatacattgtaaataacctcagctgggatgaggagtgacagaatatcaaaataatttgtggctgtggatttttttaactgctagtagtggaatactggaaaagcttcatttctgaagatgaattttatttttaaaaaatacatgcacactcaaaacttttagctttgatcacaagtggacaaatttctgaaaccaaaggcaactaagttgctgtgttagctcttgctggattttgagcctaggtcctactgtctgccagtactcatgtgagttgtatgtgcccccagtgctacatacgcaggtatgcgtaagtgtgtatgcttgttttaaacaaacactcaacgtacatatgtacataatctacacatatttatatcacatatctagttttattactatagactatacgaattggtggttaacatgaaatgttaccttttaacagactgtttttaaaaattaaaaatgtatgtataggttttgaaatttttttaaaaggggagaaagactgttaagaggaggctatttgatgacataacacttgaatattttatgcctcattctgtttatcagttctcgcaatctgtataaatgcattttagaactgatagacagtaaacttgaatttatctttgataagaatacatgccactgtacattcagatattatttaaatttgcaaacacattgttctatatgtaagggtactgtatgtaaaactctgtattaaaactattccacatatcctaaaatttcagcttgcctttttgcggccttatattttgatgtaaagattaaaagaatgtgcaaaacagtcagaaatttttattgccttttgagattctccaacttgacaaatgtgccaaagatcaacagacagaaaatatcatcctgtgtatttacttgtcatactttaactttgtgaaagatcttactgataaatgaaaagctttagcagaggtggtattgtggggtaattgcttaaatttacatatcaaagtaaaaaagtagtgcctgtattccatgtgtggagtaaatttgctaatgtctatattttatgattgatactattatttttcctttgcattttaaaatagtggctctaatattttccctgtcatggctacattctagacattgaatttatatcttctttttttcagatacggagcaaatagcatccttaacctatgaataatggtgttgcctagattcttgtcacacacacagaagaccctttgtacctagtaacattcatcctcttgattcctggtgaacacggttaaattcatgcacatttgttcttgtagtttctaaaaattagatcaatttatttgttagccagcaaattgaaaattccattattagattaatgaaatttttgctctgcttatatgtatacgaactggaaatctgaatttttaaatttagatctttaaatcaaattatttttatgcatattttcatttaatatagagtataccaatcgattgaagcctttcacaagtagtgcgctgagcttttcttattgaagagagtgaattagtttctgagaagtcagtctattgtgaaaagtttcagatgagattattttcttttagtctttttaaatatcactatatgtatttaaatagaagcaataaactagagagagtgtttcttgaaaagacaatgttttatttgccaccaggcagaacagaatgagcattggtagagaaggctccctcttggtatgttactgataaacttgtacttcctcatacttgtttgtggttctactgacttatttccaaacttaagagtaatgtacttcgaaaacaacttggttattctttaaatttcaggtaaaaccccttttcctaacactcatcttatttccactgtcttatttcctctcagatgttcatatttcacatgttcaaaatgaagcgtactatttcccctccaataaacgaagtctcctgccaa

SEQ ID NO: 164750 - DNA, 621 bp, Homo sapiens
  Payload ID: 12453
  Gene Symbol: PHF20L1
  Gene Name: PHD finger protein 20-like 1
  ENST ID: ENST00000522580
  CDS Start-End: 363-621
gaggtagtgaaaagagaatactgaagaataggatctcaagatgagtaaaaagcccccaaatcgccctggaatcacttttgagattggtgctcgtttggaggcactggactacttacaaaaatggataatgaagcgctgacagtttgagttaataaatcatcttgtctttcaaaagtttttggttttgtgaatgtggaccactttgaaaatctgattaaacttgggaattctcacctcaaaagaatacccatatacatctacaccaagcacatagcattttgcatgcagcctcagggaattcagtctcctgatctagtgggtatccatcacgaattgaaaaaattgactatgaggagggcaagatgttggtccattttgagcgctggagtcatcgttatgatgagtggatttactgggatagcaatagattgcgaccccttgagagaccagcactaagaaaagaagggctaaaagatgaggaagatttctttgattttaaagctggagaagaagttctggctcgttggacagactgtcgctattaccctgccaagattgaagcaattaacaaagaaggaacatttacagttcagttttatgatggagtaattcgttgtttaa

SEQ ID NO: 164751 - DNA, 427 bp, Homo sapiens
  Payload ID: 12453
  Gene Symbol: PHF20L1
  Gene Name: PHD finger protein 20-like 1
  ENST ID: ENST00000521038
  CDS Start-End: 1-338
ctatgggaagtgaggattggatagctttagtcaaagcagctgctgcagctgcagccaagaacaaaacagggagtaaacctcgaaccagcgctaacagcaataaagataaggataaagatgagagaaagtggtttaaagtaccttcaaagaaggaggaaacttcaacttgtatagccacaccagacgtagagaagaaggaagatctgcctacatctagtgaaacatttgataaactctcatatatgtgttctgttgaaagtaggacttcatgtagagaacgttccaaagatggtctttccacagccagagagcacattatcaaacaagaggaaaaataatcaaggcaactcgtttcaggcaaagagagctcgacttaacaagattactggtttgttggcatccaaagctgttggggttgatggtgctg

SEQ ID NO: 164752 - DNA, 1633 bp, Homo sapiens
  Payload ID: 12453
  Gene Symbol: PHF20L1
  Gene Name: PHD finger protein 20-like 1
  ENST ID: ENST00000486199
  CDS Start-End: 7-801
ctcaagatgagtaaaaagcccccaaatcgccctggaatcacttttgagattggtgctcgtttggaggcactggactacttacaaaaatggtatccatcacgaattgaaaaaattgactatgaggagggcaagatgttggtccattttgagcgctggagtcatcgttatgatgagtggatttactgggatagcaatagattgcgaccccttgagagaccagcactaagaaaagaagggctaaaagatgaggaagatttctttgattttaaagctggagaagaagttctggctcgttggacagactgtcgctattaccctgccaagattgaagcaattaacaaagaaggaacatttacagttcagttttatgatggagtaattcgttgtttaaaaagaatgcacattaaagccatgcccgaggatgctaaggggcaggattggatagctttagtcaaagcagctgctgcagctgcagccaagaacaaaacagggagtaaacctcgaaccagcgctaacagcaataaagataaggataaagatgagagaaagtggtttaaagtaccttcaaagaaggaggaaacttcaacttgtatagccacaccagacgtagagaagaaggaagatctgcctacatctagtgaaacatttggacttcatgtagagaacgttccaaagatggtctttccacagccagagagcacattatcaaacaagaggaaaaataatcaaggcaactcgtttcaggcaaagagagctcgacttaacaagattactggaagagaccagctgtgtattttatagctaatatagaatactggaaggttgtaactttattggtttgttggcatccaaagctgttggggttgatggtgctgaaaaaaaggaagactacaatgaaacagctccaatgctggagcaggcgatttcacctaaacctcaaagtcagaaaaaaaatgaagctgacattagcagttctgccaacactcagaaacctgcactgttatcctcaactttgtcttcagggaaggctcgcagcaagaaatgcaaacatgaatctggagattcttctgggtgtataaaaccccctaaatcaccactttccccagaattaatacaagtcgaggatttgacgcttgtatctcagctttcttcttcagtgataaataaaactatgcctgatgttgcacatttgccacttgagaagctgggaccctgtctccctcttgacttaagtcgtggttcagaagttacagcaccggtagcctcagattcctcttaccgtaatgaatgtcccagggcagaaaaagaggatacacagatgcttccaaatccttcttccaaagcaatagctgatggaagaggagctccagcagcagcaggaatatcgaaaacagaaaaaaaagtgaaattggaagacaaaagctcaacagcatttggtatcaggagttgggatttctcagcactgctaatgaagatcccctcttatagtccaataagcttatcaggacttccagagtcatgacatgaacagtttaattgaacccatccactctgggcaggtaagagaaaagaaaaagataaggaaagaagagagaagagagacaaagatcactacagaccaaaacagaagaag

SEQ ID NO: 164753 - DNA, 3393 bp, Homo sapiens
  Payload ID: 12453
  Gene Symbol: PHF20L1
  Gene Name: PHD finger protein 20-like 1
  ENST ID: ENST00000460236
  CDS Start-End: 1-281
cagaagttacagcaccggtagcctcagattcctcttaccgtaatgaatgtcccagggcagaaaaagaggatacacagatgcttccaaatccttcttccaaagcaatagctgatggaagaggagctccagcagcagcaggaatatcgaaaacagaaaaaaaagtgaaattggaagacaaaagctcaacagcatttggtatcaggagttgggatttctcagcactgctaatgaagatcccctcttatagtccaataagcttatcaggacttccagagtcatgacatgaacagtttaattgaacccatccactctgggcaggtaagagaaaagaaaaagataaggaaagaagagagaagagagacaaagatcactacagaccaaaacagaagaagaagaaaaaaaagaaaaagaaatctaagcaacatgactattcagactatgaagacagttccctcgaatttttggaaaggtgctcttctccactaactcgatcttctgggagttctctggcttcacgaagcatgtttacggagaaaactacaacctatcagtacccaagggcaattctatccgttgatcttagtggtgaaaacttatcagatgtagacttcctagatgattcttcaacggagagtttgcttctgagtggggatgaatacaatcaggactttgattcaaccaattttgaggaatctcaggatgaggatgatgctcttaatgaaattgtgcgatgtatttgtgagatggatgaggagaatggcttcatgatccagtgtgaagagtgcttgtgttggcaacacagcgtgtgcatggggctgctggaggagagcattccagagcagtacatctgctatatctgccgggacccaccaggtcagaggtggagtgcaaaatatcgttatgataaggagtggttgaataatgggagaatgtgcgggttatcatttttcaaagaaaattattctcatctcaatgccaaaaagatagtttctacacatcacctgcttgctgatgtctatggtgttacagaagtgctacacgggctacagctgaagattggaatactaaagaataaacatcatcctgaccttcatctctgggcttgttccgggaagcgaaaagaccaagatcaaataatagctggggtggagaaaaaaatagctcaagacacagttaatcgagaagaaaagaaatatgtacagaaccataaagaaccacctcgtttgcccctaaaaatggaaggaacttatataacaagtgagcatagctatcaaaagccacaaagttttggtcaggactgtaaatctctcgcagaccctgggagctcagatgatgatgatgttagtagtttggaagaagaacaagaattccacatgagaagtaaaaacagtttacagtactcagcaaaagaacatggaatgcctgaaaagaatccagctgaagggaatacagtatttgtttataatgataaaaagggcaccgaagacccaggagactcacatcttcagtggcagctcaatctccttacacacatagaaaatgtgcagaacgaagttaccagcaggatggacctaatagaaaaagaagtcgatgttctggaaagctggcttgatttcacaggggagttggagccaccagatcctcttgcaagattgccccaacttaaacgccacataaaacagctcctaattgacatgggcaaagtacagcagatagcaactctttgctctgtatgacaacagtgaacacttaatgaaagaatgtggctttcttcagtcaaagcatttttattatccacgtgatggctaagtggataatttaaaagcttagtaatgtctggtcattcactgatttgtgatgtcaataggatggcaccttggaaagaaaaatgaagaacaactttatcaaggaagctagtatttaaaaacaaattcatgagcaagctgcaaatgagaatgtgttatatgccaaggaacaatgaagtagaatataatgtatactaagggatttcaagttctcagaatttttgagtagttgcttacgtgaagctcaagatacctgtagaaagaaatatggtatatttgtatagtttttaatagaaagatctatgtttataaaccagcacttggccaaaaacaaaattgtaaaggaaatttaaattctggagaattctacagggttgctctaagaactgtcttctcagcagttgatccagctgtacggaaatttagggtatttaaacttttaaaggatcatgagctgtttcttgggcgatgaatgttctcaatcagaaaactgacagtagaaatctcacttctggggaaaacagttgtggaattcttacttcattatgaatgtatttaaaaaacaaacaccaaataattggaatatattgcaggcattaagctcattaaaaacaaactggcttgcagaagggtccgatgtgccaagtgatcatgattctgctggaaagaggattttaaatattgtgggagttctcccaccctaagtcttacataatgccaccagtccatccaaaacctatatatcacctatactatatatatcatatatatagttgaatggcagtattcaggctcaacgtacagtttgatcctgagtatgcttggtgtttgccttcagaaaaaaaaaaatacattgtaaataacctcagctgggatgaggagtgacagaatatcaaaataatttgtggctgtggatttttttaactgctagtagtggaatactggaaaagcttcatttctgaagatgaattttatttttaaaaaatacatgcacactcaaaacttttagctttgatcacaagtggacaaatttctgaaaccaaaggcaactaagttgctgtgttagctcttgctggattttgagcctaggtcctactgtctgccagtactcatgtgagttgtatgtgcccccagtgctacatacgcaggtatgcgtaagtgtgtatgcttgttttaaacaaacactcaacgtacatatgtacataatctacacatatttatatcacatatctagttttattactatagactatacgaattggtggttaacatgaaatgttaccttttaacagactgtttttaaaaattaaaaatgtatgtataggttttgaaatttttttaaaaggggagaaagactgttaagaggaggctatttgatgacataacacttgaatattttatgcctcattctgtttatcagttctcgcaatctgtataaatgcattttagaactgatagacagtaaacttgaatttatctttgataagaatacatgccactgtacattcagatattatttaaatttgcaaacacattgttctatatgtaagggtactgtatgtaaaactctgtattaaaactattccac

SEQ ID NO: 164754 - DNA, 3375 bp, Homo sapiens
  Payload ID: 12453
  Gene Symbol: PHF20L1
  Gene Name: PHD finger protein 20-like 1
  Uniprot ID: A8MW92
  ENST ID: ENST00000622263
  CDS Start-End: 322-3375
gctgacgtcgccggggcccggcgtcgcgtcagggctggccggcggcggaggcggcggcggcggcggcgatggcagcggaccctgagcgagcttgagggctcggacccagctccctcccgcgaaaccttgggcggatccggcgctgcggccccagctcgctccgctcctgctccctccccggccgctgcctgggcggaggcagaggcagaggcccgggctggccgccctgctcgtgccccagctcggccccggacggcccggctgctgtgcagagaggaggccgagtcgtgaaaagagaatactgaagaataggatctcaagatgagtaaaaagcccccaaatcgccctggaatcacttttgagattggtgctcgtttggaggcactggactacttacaaaaatggtatccatcacgaattgaaaaaattgactatgaggagggcaagatgttggtccattttgagcgctggagtcatcgttatgatgagtggatttactgggatagcaatagattgcgaccccttgagagaccagcactaagaaaagaagggctaaaagatgaggaagatttctttgattttaaagctggagaagaagttctggctcgttggacagactgtcgctattaccctgccaagattgaagcaattaacaaagaaggaacatttacagttcagttttatgatggagtaattcgttgtttaaaaagaatgcacattaaagccatgcccgaggatgctaaggggcaggtgaaatcccagcatccactaagctggtgttgtcctatcgacccagctggatcgtgtaaccagtctatgggaagtgaggattggatagctttagtcaaagcagctgctgcagctgcagccaagaacaaaacagggagtaaacctcgaaccagcgctaacagcaataaagataaggataaagatgagagaaagtggtttaaagtaccttcaaagaaggaggaaacttcaacttgtatagccacaccagacgtagagaagaaggaagatctgcctacatctagtgaaacatttggacttcatgtagagaacgttccaaagatggtctttccacagccagagagcacattatcaaacaagaggaaaaataatcaaggcaactcgtttcaggcaaagagagctcgacttaacaagattactggtttgttggcatccaaagctgttggggttgatggtgctgaaaaaaaggaagactacaatgaaacagctccaatgctggagcaggcgatttcacctaaacctcaaagtcagaaaaaaaatgaagctgacattagcagttctgccaacactcagaaacctgcactgttatcctcaactttgtcttcagggaaggctcgcagcaagaaatgcaaacatgaatctggagattcttctgggtgtataaaaccccctaaatcaccactttccccagaattaatacaagtcgaggatttgacgcttgtatctcagctttcttcttcagtgataaataaaactagtcctccacagcctgtgaatccccctagacctttcaagcatagtgagcggagaagaagatctcagcgtttagccaccttacccatgcctgatgattctgtagaaaaggtttcttctccctctccagccactgatgggaaagtattctccatcagttctcaaaatcagcaagaatcttcagtaccagaggtgcctgatgttgcacatttgccacttgagaagctgggaccctgtctccctcttgacttaagtcgtggttcagaagttacagcaccggtagcctcagattcctcttaccgtaatgaatgtcccagggcagaaaaagaggatacacagatgcttccaaatccttcttccaaagcaatagctgatggaagaggagctccagcagcagcaggaatatcgaaaacagaaaaaaaagtgaaattggaagacaaaagctcaacagcatttggtaagagaaaagaaaaagataaggaaagaagagagaagagagacaaagatcactacagaccaaaacagaagaagaagaaaaaaaagaaaaagaaatctaagcaacatgactattcagactatgaagacagttccctcgaatttttggaaaggtgctcttctccactaactcgatcttctgggagttctctggcttcacgaagcatgtttacggagaaaactacaacctatcagtacccaagggcaattctatccgttgatcttagtggtgaaaacttatcagatgtagacttcctagatgattcttcaacggagagtttgcttctgagtggggatgaatacaatcaggactttgattcaaccaattttgaggaatctcaggatgaggatgatgctcttaatgaaattgtgcgatgtatttgtgagatggatgaggagaatggcttcatgatccagtgtgaagagtgcttgtgttggcaacacagcgtgtgcatggggctgctggaggagagcattccagagcagtacatctgctatatctgccgggacccaccaggtcagaggtggagtgcaaaatatcgttatgataaggagtggttgaataatgggagaatgtgcgggttatcatttttcaaagaaaattattctcatctcaatgccaaaaagatagtttctacacatcacctgcttgctgatgtctatggtgttacagaagtgctacacgggctacagctgaagattggaatactaaagaataaacatcatcctgaccttcatctctgggcttgttccgggaagcgaaaagaccaagatcaaataatagctggggtggagaaaaaaatagctcaagacacagttaatcgagaagaaaagaaatatgtacagaaccataaagaaccacctcgtttgcccctaaaaatggaaggaacttatataacaagtgagcatagctatcaaaagccacaaagttttggtcaggactgtaaatctctcgcagaccctgggagctcagatgatgatgatgttagtagtttggaagaagaacaagaattccacatgagaagtaaaaacagtttacagtactcagcaaaagaacatggaatgcctgaaaagaatccagctgaagggaatacagtatttgtttataatgataaaaagggcaccgaagacccaggagactcacatcttcagtggcagctcaatctccttacacacatagaaaatgtgcagaacgaagttaccagcaggatggacctaatagaaaaagaagtcgatgttctggaaagctggcttgatttcacaggggagttggagccaccagatcctcttgcaagattgccccaacttaaacgccacataaaacagctcctaattgacatgggcaaagtacagcagatagcaactctttgctctgtatga

SEQ ID NO: 164755 - DNA, 1810 bp, Homo sapiens
  Payload ID: 12453
  Gene Symbol: PHF20L1
  Gene Name: PHD finger protein 20-like 1
  ENST ID: ENST00000485595
  CDS Start-End: 282-764
ggcggcggaggcggcggcggcggcggcgatggcagcggaccctgagcgagcttgagggctcggacccagctccctcccgcgaaaccttgggcggatccggcgctgcggccccagctcgctccgctcctgctccctccccggccgctgcctgggcggaggcagaggcagaggcccgggctggccgccctgctcgtgccccagctcggccccggacggcccggctgctgtgcagagaggaggccgagtcgtgaaaagagaatactgaagaataggatctcaagatgagtaaaaagcccccaaatcgccctggaatcacttttgagattggtgctcgtttggaggcactggactacttacaaaaatggtatccatcacgaattgaaaaaattgactatgaggagggcaagatgttggtccattttgagcgctggagtcatcgttatgatgagtggatttactgggatagcaatagattgcgaccccttgagagaccagcactaagaaaagaagggctaaaagatgaggaagatttctttgattttaaagctggagaagaagttctggctcgttggacagactgtcgctattaccctgccaagattgaagcaattaacaaagaaggaacatttacagttcagttttatgatggagtaattcgttgtttaaaaagaatgcacattaaagccatgcccgaggatgctaaggggcaggtaagagtgttcagtattcctagctacccaaagggttatcttcttgaacggtgactgatcaaaatatatttatatgtatattttttaaaaatgaactaattgtagggttatgtgctgatagccccaaatagcagcaagaaaaggaagcttagactgtaaaataaattatacatttgatttttgcttctttggtttagacctgctaaagttataggtcactagtttctgttccaggtgaaatcccagcatccactaagctggtgttgtcctatcgacccagctggatcgtgtaaccagtctatgggaagtgaggtaagagccttttttttaaaaattttgttttgtttttcctggtatataatgtcatttagaaagttaaaaatttttaatataaaaatttacattgagttcttatcttcttctttccttctacaaatcatagtcattcatcttcctttaaaaggcgcttacctgacactctgtaggctgtttcagatagggctctctgagtcatgtgatggaagcagtgtattgtatgctttgtcactgctcaaagcaagaatggatggtaagcattggaaggagaatcttgggtggaggtaaaaaccacaattccatttgttggctatgttttctgaaatactggaaagaaaggtgccattagaaatttaaaatattttcttttctattctgctgttatttgggattttcagcacctggacctacaattaattttaagaaattgaaagtagtgtgtaaaaatgtctaatatggaaatatgctacgtatttgttccataccatgcggtgaaaactgtcattctgaaatgtattgaaattacctggtcagcttcagtcaagtgtaaacatttagtgctctagaaatgtatatctaccacattaaaaaaattattcatgaagaaataagtgtgattgttttaaattgcctggttttcaaaaatttagttatgaaatgattagcaagcagatttcttctaattaatatgtaaatgcaatttaaaatgaaaatgcttttgatcaggaagtggctttgtgtcttcccacatgtatgtataaataaagtgttcttttaagcattca

SEQ ID NO: 164756 - DNA, 3675 bp, Homo sapiens
  Payload ID: 12454
  Gene Symbol: PHF21A
  Gene Name: PHD finger protein 21A
  Uniprot ID: Q96BD5
  ENST ID: ENST00000323180
  CDS Start-End: 369-2273
gtgagagagagaggagaggagaggaggaggaggaggagggagaagggaacaacctaccatcttaacacactaatatctaaaaagtgcgagaggcccagagcagcagcagaagcagcagcagcagctccagcttcttccctccctccccatgaagaagagttccctcctcctcctcctcctgcttctcctgctcagagttcctgcctccagctgccaggggggacagccagccagcagcaggaggggggctagagagctgaaggagagccagtttccccaaaattgctgcagtgagaagaggagtttgttactttaaacagaggctgaagaaactatagaattagcagagaaagtggagaaggtagaggatggagttgcagactctacaggaggctcttaaagtggaaattcaggttcaccagaaactggttgctcaaatgaagcaggatccacagaatgctgacttaaagaaacagcttcatgaactccaagccaaaatcacagctttgagtgagaaacagaaaagagtagttgaacagctacggaagaacctgatagtaaagcaagaacaaccggacaagttccaaatacagccattgccacaatctgaaaacaaactacaaacagcacagcagcaaccactacagcaactacaacaacagcagcagtaccaccaccaccacgcccagcagtcagctgcagcctctcccaacctgactgcttcacagaagactgtaactacagcttctatgattaccacaaagacactacctctcgtcttgaaagcagcaactgcgaccatgcctgcctctgtggtgggccagagacctaccattgctatggtgaccgccatcaacagtcagaaggctgtgctcagcactgatgtgcagaacacaccagtcaacctccagacgtctagtaaggtcactgggcctggggcagaggctgtccaaattgtggcaaaaaacacagtcactctgcaggttcaggcaacacctcctcagcccatcaaagtaccacagtttatcccccctcctagactcactccacgtccaaactttcttccacaggttcgacccaagcctgtggcccagaataacattcctattgccccagcaccacctcccatgctcgcagctcctcagcttatccagaggcccgtcatgctgaccaagttcacccccacaacccttcccacatcccagaattccatccaccccgtccgtgtcgtcaatgggcagactgcaaccatagccaaaacgttccccatggcccagctcaccagcattgtgatagctactccagggaccagactcgctggacctcaaactgtacagcttagcaagccaagtcttgaaaaacagacagttaaatctcacacagaaacagatgagaaacaaacagagagccgcaccatcaccccacctgctgcacccaaaccaaaacgggaggagaaccctcagaaacttgccttcatggtgtctctagggttggtaacacatgaccatctagaagaaatccaaagcaagaggcaagagcgaaaaagaagaacaacagcaaatccggtctacagtggagcagtctttgagccagagcgtaagaagagtgcagtgacatacctaaacagcacaatgcaccctgggacccggaagagagccaatgaggaacactggccaaagggtgatattcatgaggatttttgcagcgtttgcagaaaaagtggccagttactgatgtgcgacacatgttcccgtgtatatcatttggactgcttagacccccctctgaaaacaattcccaagggcatgtggatctgtcccagatgtcaggaccagatgctgaagaaggaagaagcaattccatggcctggaactttagcaattgttcattcctatattgcctacaaagcagcaaaagaagaagagaaacagaagttacttaaatggagttcagatttaaaacaagaacgagaacaactagagcaaaaggtgaaacagctcagcaattccataagtaaatgcatggaaatgaagaacaccatcctggcccggcagaaggagatgcacagctccctggagaaggtaaaacagctgattcgcctcatccacggcatcgacctctccaaacctgtagactctgaggccactgtgggggccatctccaatggcccggactgcaccccccctgccaatgccgccacctccacgccggccccttccccctcctcccagagctgcacagcgaactgtaaccagggggaagagactaaataacagagcccctctaggagaagccacgggatcccggcggcaaggagaacagaacactgaagactctagaaaagcaaagccggatttctggaaagtgcagaattcttttggttctttggttccagagagagagaagatgcttgtgccaggtggcaccagagtttgccaattgatccttcttattctgtgtgtacatgcaaagattggaccatgttacatgaaatagtgccagctggaggttctttgccagcaccatgccaagtgaaataatatatttactctctctattatacaccagtgtgtgcctgcagcagcctccacagccacgatgggtttgtttctgttttcttgggtggggagcagggacgggcggagggaggagagcaggtttcagatccttacttgccgagccgtttgtttaggtagagaagacaagtccaaagagtgtgtgggctttcctgtttctaaactttcgctactataaaaccaaaaaaaggaattgagatttcaccaaccccagtgcccagaagagggaaggggagtggctggagggagcagggggtgggacagtgtatcaaataagcagtatttaatcacctctggcgggggcctcgtgcaaggggagactgacaccaagaacagccagtaggttcttctcccctgcactctgctccctgcgcggtaaccccaccactcctgaagcctgcccagtctccttccttccctgcttggtgagtcgcgcatctccgtggttatcccgctgtctcctctccaagaacaagcagagcccgggccactggcccttgcccaaggcagggaagaaggatgtgtgtgtccaggaaggaaaaaaaggtggatcagtgattttacttgaaaacaagctccatcccttttctatatttataagaagagaagatcttgagtgaagcagcacgcgacccaggtgtgtgtgaattgaatggagacgtttcttttctctttctttaatttttgtttttgttctttttttctttaaggaaagttttattttactgttcattttactttcttggtaacaaaaactaaaataaggaatagaaaagctgtttttcaggctgacagtccaattaagggtagccaagaccttgcatggtagagtaggaatcatagtgtcagtgaggtcccgtgagtctttgtgagtccttgtgtcatcgttcgggcactgtttttttatgcaagggcaaaaatctttgtatctggggaaaaaaaacttttttttaaattaaaaaggaaaataaaagatattgaggtcttcctagtgttacttaaattaagatcaaggtaagaaacattgtaaaaaaaaattacaaaagtgctatttgtttcctaaaaacagtgatttctattaaaaaggtgtcagaactgg

SEQ ID NO: 164757 - DNA, 2730 bp, Homo sapiens
  Payload ID: 12454
  Gene Symbol: PHF21A
  Gene Name: PHD finger protein 21A
  Uniprot ID: Q96BD5
  ENST ID: ENST00000418153
  CDS Start-End: 201-2243
cctcctcctcctgcttctcctgctcagagttcctgcctccagctgccaggggggacagccagccagcagcaggaggggggctagagagctgaaggagagccagtttccccaaaattgctgcagtgagaagaggagtttgttactttaaacagaggctgaagaaactatagaattagcagagaaagtggagaaggtagaggatggagttgcagactctacaggaggctcttaaagtggaaattcaggttcaccagaaactggttgctcaaatgaagcaggatccacagaatgctgacttaaagaaacagcttcatgaactccaagccaaaatcacagctttgagtgagaaacagaaaagagtagttgaacagctacggaagaacctgatagtaaagcaagaacaaccggacaagttccaaatacagccattgccacaatctgaaaacaaactacaaacagcacagcagcaaccactacagcaactacaacaacagcagcagtaccaccaccaccacgcccagcagtcagctgcagcctctcccaacctgactgcttcacagaagactgtaactacagcttctatgattaccacaaagacactacctctcgtcttgaaagcagcaactgcgaccatgcctgcctctgtggtgggccagagacctaccattgctatggtgaccgccatcaacagtcagaaggctgtgctcagcactgatgtgcagaacacaccagtcaacctccagacgtctagtaaggtcactgggcctggggcagaggctgtccaaattgtggcaaaaaacacagtcactctggttcaggcaacacctcctcagcccatcaaagtaccacagtttatcccccctcctagactcactccacgtccaaactttcttccacaggttcgacccaagcctgtggcccagaataacattcctattgccccagcaccacctcccatgctcgcagctcctcagcttatccagaggcccgtcatgctgaccaagttcacccccacaacccttcccacatcccagaattccatccaccccgtccgtgtcgtcaatgggcagactgcaaccatagccaaaacgttccccatggcccagctcaccagcattgtgatagctactccagggaccagactcgctggacctcaaactgtacagcttagcaagccaagtcttgaaaaacagacagttaaatctcacacagaaacagatgagaaacaaacagagagccgcaccatcaccccacctgctgcacccaaaccaaaacgggaggagaaccctcagaaacttgccttcatggtgtctctagggttggtaacacatgaccatctagaagaaatccaaagcaagaggcaagagcgaaaaagaagaacaacagcaaatccggtctacagtggagcagtctttgagccagagcgtaagaagagtgcagtgacatacctaaacagcacaatgcaccctgggacccggaagagaggtcgtcctccaaaatacaatgcagtgctggggtttggagcccttaccccaacatccccccaatccagtcatcctgactcccctgaaaatgaaaagacagagaccacattcactttccctgcacctgttcagcctgtgtccctgcccagccccacctccacagacggtgatattcatgaggatttttgcagcgtttgcagaaaaagtggccagttactgatgtgcgacacatgttcccgtgtatatcatttggactgcttagacccccctctgaaaacaattcccaagggcatgtggatctgtcccagatgtcaggaccagatgctgaagaaggaagaagcaattccatggcctggaactttagcaattgttcattcctatattgcctacaaagcagcaaaagaagaagagaaacagaagttacttaaatggagttcagatttaaaacaagaacgagaacaactagagcaaaaggtgaaacagctcagcaattccataagtaaatgcatggaaatgaagaacaccatcctggcccggcagaaggagatgcacagctccctggagaaggtaaaacagctgattcgcctcatccacggcatcgacctctccaaacctgtagactctgaggccactgtgggggccatctccaatggcccggactgcaccccccctgccaatgccgccacctccacgccggccccttccccctcctcccagagctgcacagcgaactgtaaccagggggaagagactaaataacagagcccctctaggagaagccacgggatcccggcggcaaggagaacagaacactgaagactctagaaaagcaaagccggatttctggaaagtgcagaattcttttggttctttggttccagagagagagaagatgcttgtgccaggtggcaccagagtttgccaattgatccttcttattctgtgtgtacatgcaaagattggaccatgttacatgaaatagtgccagctggaggttctttgccagcaccatgccaagtgaaataatatatttactctctctattatacaccagtgtgtgcctgcagcagcctccacagccacgatgggtttgtttctgttttcttgggtggggagcagggacgggcggagggaggagagcaggtttcagatccttacttgccgagccgtttgtttaggtagagaagacaagtccaaagagtgtgtgggctttcctgtttctaaactttcgctactataaaaccaa

SEQ ID NO: 164758 - DNA, 555 bp, Homo sapiens
  Payload ID: 12454
  Gene Symbol: PHF21A
  Gene Name: PHD finger protein 21A
  ENST ID: ENST00000524497
  CDS Start-End: 154-555
aggggggacagccagccagcagcaggaggggggctagagagctgaaggagagccagtttccccaaaattgctgcagtgagaagaggagtttgttactttaaacagaggctgaagaaactatagaattagcagagaaagtggagaaggtagaggatggagttgcagactctacaggaggctcttaaagtggaaattcaggttcaccagaaactggttgctcaaatgaagcaggatccacagatattttttctttccaatcagaatgctgacttaaagaaacagcttcatgaactccaagccaaaatcacagctttgagtgagaaacagaaaagagtagttgaacagctacggaagaacctgatagtaaagcaagaacaaccggacaagttccaaatacagccattgccacaatctgaaaacaaactacaaacagcacagcagcaaccactacagcaactacaacaacagcagcagtaccaccaccaccacgcccagcagtcagctgcagcctctcccaacctgactgcttcacagaagactgtaactacagcttct

SEQ ID NO: 164759 - DNA, 451 bp, Homo sapiens
  Payload ID: 12454
  Gene Symbol: PHF21A
  Gene Name: PHD finger protein 21A
  ENST ID: ENST00000532028
  CDS Start-End: 1-451
gtgtccctgcccagccccacctccacagacatgctgaagaaggaagaagcaattccatggcctggaactttagcaattgttcattcctatattgcctacaaagcagcaaaagaagaagagaaacagaagttacttaaatggagttcagatttaaaacaagaacgagaacaactagagcaaaaggtgaaacagctcagcaattccataagtaaatgcatggaaatgaagaacaccatcctggcccggcagaaggagatgcacagctccctggagaaggtaaaacagctgattcgcctcatccacggcatcgacctctccaaacctgtagactctgaggccactgtgggggccatctccaatggcccggactgcaccccccctgccaatgccgccacctccacgccggccccttccccctcctcccagagctgcacagcgaactgtaaccagg

SEQ ID NO: 164760 - DNA, 550 bp, Homo sapiens
  Payload ID: 12454
  Gene Symbol: PHF21A
  Gene Name: PHD finger protein 21A
  ENST ID: ENST00000525676
  CDS Start-End: 1-280
tgcctacaaagcagcaaaagaagaagagaaacagaagttacttaaatggagttcagatttaaaacaagaacgagaacaactagagcaaaaggtgaaacagctcagcaattccataagttgtgaggaagcgggctttctagagacaagtattggaaaaatgcatggaaatgaagaacaccatcctggcccggcagaaggagatgcacagctccctggagaaggtaaaacagctgattcgcctcatccacggcatcgacctctccaaacctgtagactctgaggccactgtgggggccatctccaatggcccggactgcaccccccctgccaatgccgccacctccacgccggccccttccccctcctcccagagctgcacagcgaactgtaaccagggggaagagactaaataacagagcccctctaggagaagccacgggatcccggcggcaaggagaacagaacactgaagactctagaaaagcaaagccggatttctggaaagtgcagaattcttttggttctttggttccagagagagagaagatgc

SEQ ID NO: 164761 - DNA, 1051 bp, Homo sapiens
  Payload ID: 12454
  Gene Symbol: PHF21A
  Gene Name: PHD finger protein 21A
  ENST ID: ENST00000532883
  CDS Start-End: 365-613
ttcttccctccctccccatgaagaagagttccctcctcctcctcctcctgcttctcctgctcagagttcctgcctccagctgccaggggggacagccagccagcagcaggaggggggctagagagctgaaggagagccagtttccccaaaattggtttctttactgcaggacttctcagaacctttaatatgctaatgtgcattgtgaatctccaagagggggatatgatatgcagcattcttgaatacttctaatgacagggagcccactacctcataagctgcagtgagaagaggagtttgttactttaaacagaggctgaagaaactatagaattagcagagaaagtggagaaggtagaggatggagttgcagactctacaggaggctcttaaagtggaaattcaggttcaccagaaactggttgctcaaatgaagcaggatccacagaatgctgacttaaagaaacagcttcatgaactccaagccaaaatcacagctttgagtgagaaacagaagccatctgtttccctctaccagttctatttggcttgcagatgccactgtacaggaatacactgtgttgaagctagcctatgcttgacctactgaacaaaagagtagttgaacagctacggaagaacctgatagtaaagcaagaacaaccggacaagttccaaatacagccattgccacaatctgaaaacaaactacaaacagcacagcagcaaccactacagcaactacaacaacagcagcagtaccaccaccaccacgcccagcagtcagctgcagcctctcccaacctgactgcttcacagaagactgtaactacagcttctatgattaccacaaagacactacctctcgtcttgaaagcagcaactgcgaccatgcctgcctctgtggtgggccagagacctaccattgctatggtgaccgccatcaacagtcagaaggctgtgctcagcactgatgtgcagaacacaccagtcaacctccagacgtctagtaaggtcactgggcctggggcagaggctgtccaaattg

SEQ ID NO: 164762 - DNA, 466 bp, Homo sapiens
  Payload ID: 12454
  Gene Symbol: PHF21A
  Gene Name: PHD finger protein 21A
  ENST ID: ENST00000533757
  CDS Start-End: 314-466
gtttggtccagccccgtcgtgcacgcagttcccaacacttctcgtcatcctctctttggtctctttattctgctgagcggtgctgttaggatttcttttttttttttttcccctgaccacgttcgcgatgcattgttggaaactgttactacatttttactggaaatactattattcattttaattttgggggctagagagctgaaggagagccagtttccccaaaattgctgcagtgagaagaggagtttgttactttaaacagaggctgaagaaactatagaattagcagagaaagtggagaaggtagaggatggagttgcagactctacaggaggctcttaaagtggaaattcaggttcaccagaaactggttgctcaaatgaagcaggatccacagaatgctgacttaaagaaacagcttcatgaactccaagccaaaatcacagctttgagtgagaaacag

SEQ ID NO: 164763 - DNA, 507 bp, Homo sapiens
  Payload ID: 12454
  Gene Symbol: PHF21A
  Gene Name: PHD finger protein 21A
  ENST ID: ENST00000531959
  CDS Start-End: 107-507
gagagccagtttccccaaaattgctgcagtgagaagaggagtttgttactttaaacagaggctgaagaaactatagaattagcagagaaagtggagaaggtagaggatggagttgcagactctacaggaggctcttaaagtggaaattcaggttcaccagaaactggttgctcaaatgaagcaggatccacagatattttttctttccaatcagaatgctgacttaaagaaacagcttcatgaactccaagccaaaatcacagctttgagtgagaaacagaaaagagtagttgaacagctacggaagaacctgatagtaaagcaagaacaaccggacaagttccaaatacagccattgccacaatctgaaaacaaactacaaacagcacagcagcaaccactacagcaactacaacaacagcagcagtaccaccaccaccacgcccagcagtcagctgcagcctctcccaacctgactgcttcacagaagactgtaactacagcttc

SEQ ID NO: 164764 - DNA, 490 bp, Homo sapiens
  Payload ID: 12454
  Gene Symbol: PHF21A
  Gene Name: PHD finger protein 21A
  ENST ID: ENST00000527782
  CDS Start-End: 457-490
actctttccgtttggtccagccccgtcgtgcacgcagttcccaacacttctcgtcatcctctctttggtctctttattctgctgagcggtgctgttaggatttcttttttttttttttcccctgaccacgttcgcgatgtcttctggaaggagctgcctctgaaatactcttcttctgcttacatgaagatctctaaatgctatccagcaggaggtgctacagcaagataaaggaaatttttgaattttgagggtcttgctacttattacagctctgcttagcttcagctaagcaacaggattaacaccttaaagttccagaaagattttgaggggctagagagctgaaggagagccagtttccccaaaattgctgcagtgagaagaggagtttgttactttaaacagaggctgaagaaactatagaattagcagagaaagtggagaaggtagaggatggagttgcagactctacaggaggctcttaaag

SEQ ID NO: 164765 - DNA, 561 bp, Homo sapiens
  Payload ID: 12454
  Gene Symbol: PHF21A
  Gene Name: PHD finger protein 21A
  ENST ID: ENST00000529782
  CDS Start-End: 374-561
attctgctgagcggtgctgttaggatttcttttttttttttttcccctgaccacgttcgcgatgcattgttggaaactgttactacatttttactggaaatactattattcattttaattttgggggctagagagctgaaggagagccagtttccccaaaattgctgcagtgagaagaggagtttgttactttaaacagaggctgaagaaactatagaattagcagagaaagtggagaaggtagaggatggagttgcagactctacaggaggctcttaaagtggaaattcaggttcaccagactttagctggacatcaggcggaagacacacatacacatgcatgtatctaatccttgaaactggttgctcaaatgaagcaggatccacagaatgctgacttaaagaaacagcttcatgaactccaagccaaaatcacagctttgagtgagaaacagaaaagagtagttgaacagctacggaagaacctgatagtaaagcaagaacaaccggacaagttccaaatacagccattgccacaatctgaaaacaaactacaaac

SEQ ID NO: 164766 - DNA, 546 bp, Homo sapiens
  Payload ID: 12454
  Gene Symbol: PHF21A
  Gene Name: PHD finger protein 21A
  ENST ID: ENST00000532010
  CDS Start-End: 520-546
gtgcacgcagttcccaacacttctcgtcatcctctctttggtctctttattctgctgagcggtgctgttaggatttcttttttttttttttcccctgaccacgttcgcgatgcattgttggaaactgttactacatttttactggaaatactattattcattttaattttgctttgaagggtccatcctttttcctattcagtcttctggaaggagctgcctctgaaatactcttcttctgcttacatgaagatctctaaatgctatccagcaggaggtgctacagcaagataaaggaaatttttgaattttgagggtcttgctacttattacagctctgcttagcttcagctaagcaacaggattaacaccttaaagttccagaaagattttgaggggctagagagctgaaggagagccagtttccccaaaattgctgcagtgagaagaggagtttgttactttaaacagaggctgaagaaactatagaattagcagagaaagtggagaaggtagaggatggagttgcagactctacaggaggct

SEQ ID NO: 164767 - DNA, 1293 bp, Homo sapiens
  Payload ID: 12454
  Gene Symbol: PHF21A
  Gene Name: PHD finger protein 21A
  ENST ID: ENST00000530587
  CDS Start-End: 1-351
ttactgatgtgcgacacatgttcccgtgtatatcatttggactgcttagacccccctctgaaaacaattcccaagggcatgtggatctgtcccagatgtcaggaccagatgctgaagaaggaagaagcaattccatggcctggaactttagcaattgttcattcctatattgcctacaaagcagcaaaagaagaagagaaacagaagttacttaaatggagttcagatttaaaacaagaacgagaacaactagagcaaaaggtgaaacagctcagcaattccataagttcacctgagcgagtgggcccatccgtacggccctccctcgctctttcttccacaccatgctgattgcatttcccggttttcctgaccagtgtgaggaagcgggctttctagagacaagtattggaaaaatgcatggaaatgaagaacaccatcctggcccggcagaaggagatgcacagctccctggagaaggtaaaacagctgattcgcctcatccacggcatcgacctctccaaacctgtagactctgaggccactgtgggggccatctccaatggcccggactgcaccccccctgccaatgccgccacctccacgccggccccttccccctcctcccagagctgcacagcgaactgtaaccagggggaagagactaaataacagagcccctctaggagaagccacgggatcccggcggcaaggagaacagaacactgaagactctagaaaagcaaagccggatttctggaaagtgcagaattcttttggttctttggttccagagagagagaagatgcttgtgccaggtggcaccagagtttgccaattgatccttcttattctgtgtgtacatgcaaagattggaccatgttacatgaaatagtgccagctggaggttctttgccagcaccatgccaagtgaaataatatatttactctctctattatacaccagtgtgtgcctgcagcagcctccacagccacgatgggtttgtttctgttttcttgggtggggagcagggacgggcggagggaggagagcaggtttcagatccttacttgccgagccgtttgtttaggtagagaagacaagtccaaagagtgtgtgggctttcctgtttctaaactttcgctactataaaaccaaaaaaaggaattgagatttcaccaaccccagtgcccagaagagggaaggggagtggctggagggagcagggggtgggacagtgtatcaaataagcagtatttaatcacctctggcgggggcctcgtgcaagggga

SEQ ID NO: 164768 - DNA, 557 bp, Homo sapiens
  Payload ID: 12454
  Gene Symbol: PHF21A
  Gene Name: PHD finger protein 21A
  ENST ID: ENST00000529734
  CDS Start-End: 254-557
atctaaaaagtgcgagaggcccagagcagcagcagaagcagcagcagcagctccagcttcttccctccctccccatgaagaagagttccctcctcctcctcctcctgcttctcctgctcagagttcctgcctccagctgccaggggggacagccagccagcagcaggaggctgcagtgagaagaggagtttgttactttaaacagaggctgaagaaactatagaattagcagagaaagtggagaaggtagaggatggagttgcagactctacaggaggctcttaaagtggaaattcaggttcaccagaaactggttgctcaaatgaagcaggatccacagaatgctgacttaaagaaacagcttcatgaactccaagccaaaatcacagctttgagtgagaaacagaaaagagtagttgaacagctacggaagaacctgatagtaaagcaagaacaaccggacaagttccaaatacagccattgccacaatctgaaaacaaactacaaacagcacagcagcaaccactacagcaactacaacaacagcagcagtacc

SEQ ID NO: 164769 - DNA, 577 bp, Homo sapiens
  Payload ID: 12454
  Gene Symbol: PHF21A
  Gene Name: PHD finger protein 21A
  ENST ID: ENST00000525438
  CDS Start-End: 498-577
agccccgtcgtgcacgcagttcccaacacttctcgtcatcctctctttggtctctttattctgctgagcggtgctgttaggatttcttttttttttttttcccctgaccacgttcgcgatgcattgttggaaactgttactacatttttactggaaatactattattcattttaattttgtcttctggaaggagctgcctctgaaatactcttcttctgcttacatgaagatctctaaatgctatccagcaggaggtgctacagcaagataaaggaaatttttgaattttgagggtcttgctacttattacagctctgcttagcttcagctaagcaacaggattaacaccttaaagttccagaaagattttgaggggctagagagctgaaggagagccagtttccccaaaattgctgcagtgagaagaggagtttgttactttaaacagaggctgaagaaactatagaattagcagagaaagtggagaaggtagaggatggagttgcagactctacaggaggctcttaaagtggaaattcaggttcaccagaaactggttgctcaaatgaagcagga

SEQ ID NO: 164770 - DNA, 3671 bp, Homo sapiens
  Payload ID: 12455
  Gene Symbol: PHF21B
  Gene Name: PHD finger protein 21B
  Uniprot ID: Q96EK2
  ENST ID: ENST00000313237
  CDS Start-End: 152-1747
tccctttcggccgtgggggagggggctcgtgtcccccccaacccagcccggaggccgcgtccgcccgcgcccgctctggcccccgcggagccgcgcaacttcccgggagcccgggccaaagtgagcgcaaagtgctgcccaagttgccgggatggagctgcagagccggcccgaggcgctcgccgtggaactcgcgcgccaccagaacggcgacctcaagaagcagctccacgaaaggcagccgcggatcgccgcgctcagcgacaaacaagctttgggaacgatcactgcagtgcctgtcacgggtcctcaggtcagctccttgcagaggttggccgggcaaggagcggcagtgctacctcaggttaggccaaagactctgattccagacagcctccccgttgccccgggccgggaccggccacccaagcagcccccaacattccagaaggccaccgtggtcagcgtcaagaaccccagcccagccctccccaccgccaacaacactgtcagccatgtgccagcgcccggcagccagccccaggccctcgccgagcccgccgccctcgcctctccgctgagcagtgcgggggtggcctacgccatcatctccacctcccccagcaatgccgccgccatggcccccagcaccgccgtgtctgtggtcagtgacagcatcaaagtccagcccctcctcatcagtgctgacaacaagcctcctccacgcctcctctcttcccctcaccccgcaacccatcactgtcccctccacccctcctctcttcccctcacccctccctccccatcactgtccccttcacccctccatggcatcttccaggtcatcatcattcagcctcaagtgcagacgcagcccgagagcacggcagagtcgcggccgcccacagaggagccatctcagggagctcaggccaccaaaaagaagaaggaagaccggcccccgacccaggagaaccccgagaaaatcgccttcatggtagcgctaggcctggttaccacggaacatttggaagaaatccagagcaagcgacaggagcggaagagaagaagcacagccaaccctgcctacagcggcctcctggagaccgagaggaaacggctggcctccaactatctcaacaaccccctgttcctcacagcgagagccaatgaggacccctgctggaagaacgagatcacccacgatgagcactgtgccgcctgcaagcgaggggccaacctgcagccctgcggcacctgcccgggggcctaccacctcagctgcctggagccgcccctcaagacggcgcccaagggcgtgtgggtgtgccccaggtgccagcagaaggccttaaagaaagacgagggtgtgccctggactgggatgctggccatcgtgcactcttatgtcacccacaagacagtcaaagaagaggagaagcagaagctgctgcaacgaggcagtgagctgcagaacgagcaccagcagctggaggagcgggaccggcggctggcgtcagcagtgcagaaatgcctggagttgaagacaagcctgctggcccgccagaggggcacccagtcatccctggaccgcctgcgggccctcctgagactgatacagggcgagcagctgctccaggtcaccatgacgaccactagccctgccccactgctggccgggccctggaccaagccctcagtggcagccacacaccccaccgtccagcacccccagggccacaactgaccccgagggaccagtcttcatacccacggaaagttattgggaccctgcttacacagcctgggggttctgtcggccttaattcataaacactatgaatttcagacaaaaattaaccagacagaggagaggagggaggaagagctgggcgagaggcctagagccaggaccaggtgggggtgcggccctgtgccctccaaattcacagggggtacctaggagccaggtggggtacgacaggctggggcacacagtctccccccggccacctcggggctgcctgggcctctggcttccaggccctgctctccacggcctccctctggcccgttggaggggcaggctgaggctgtggaggggacaagcacgccccccagaacgcagtctccactgagggcaccgcctattggtgtcctgtgggagggcgagctgagaacacatggactagctgagtggtagcggtagttgggacgagaagcggggtagtggatctaggtagttcctcaatgccccacgctcctaggaggtccccctggggtgggcgggcgggcctggggcactccgtcgcctttgcagaaccacctgggcccctttctgtcagtattattagggttacgaattgcagctgtttaacttgaaagacactgtcggaggtgagcatctgggcgccgggacgctgcagtgatccccgccagagcctgtgcccttcctgctccgtctttggggtcctcaaggctgcctccttccttttgccaatctcttggactcagtttgccgttgatgcgtttttctcatggagtttctgggcagagtggagctgcaaccctgttgtggggggcagcatttggcaggttttctccttggggttgaatcattcaacttaacgactgaagccctttcttgtctcctttggaagagccgataagtattccactcctcccttcttgccagtgcagacactatgccaaaaaataacttcacacttttgtatggcgtttttattgtgagatatttaatgtgaatggttggggggactctggctgacttcctttctgcttctagtagtctctgcttcaaggtacaaatgggaacacctcccctcgggaagcctggccaagctggaagatccggcaggttttttacgagccgggtggagggttggggaggaaagaaagggcggtggctcgggaggttccggccttcggggaccagacttgctgccaagggcttctgcatccagggtgggcagtggcagcttgtcacccttgcccgattcccacatcccagtcctgagggactcagcacaacaggataagcgtccaggagccacgggctcccaccccgagcatatcacatggtgccgaattgcactgaacacgcgtgtgtgcatcgcacgcggccacgaccacagacacgcatgcacacacgcagaggtgcagagcgaggaggccggcaaatcccgcagctgccacggtccctcctgtcattctcacgactccgggagaaactgtgctgtatgatacagatctattttaatacacttaccactgggtgaacaagatttttatattcttttattgatgaacaaagtgaaccgtgtgaggcacacgtcttctatattggctactctgtgccaagtatgcattaccgcgtggcttgcgatgtccatgtcttcagcttccttttctgttggtttggttttcttcgcggatggattgagttacatgttttaacagtgtaatgggaggatctgaaaggttggacccgggaggggtagctgccgatgtgtcttgagattgttaggttttttttggaccaaggaggaccgtccagtgggtagtgaggatagagaaaaagtgtttgtcttaaatacgccaatgtagttttccttctttacaatgtattaaactcgatcgatgatttcaaa

SEQ ID NO: 164771 - DNA, 3540 bp, Homo sapiens
  Payload ID: 12455
  Gene Symbol: PHF21B
  Gene Name: PHD finger protein 21B
  Uniprot ID: Q96EK2
  ENST ID: ENST00000396103
  CDS Start-End: 183-1616
atttatgagctttgctcgacacggactcgccgtgtttacttggctctttgttcctcccccctcccccggcacacactcacactcacactcactcgcacacgcaccccggcctgcaaacttgcacggctcggggcgcgccgccgggtggcctcggcccccgccccgccccgcgagctgccccgatgaggcggcagccacagaacggcgacctcaagaagcagctccacgaaaggcagccgcggatcgccgcgctcagcgacaaacaagctttgggaacgatcactgcagtgcctgtcacgggtcctcaggtcagctccttgcagaggttggccgggcaaggagcggcagtgctacctcaggttaggccaaagactctgattccagacagcctccccgttgccccgggccgggaccggccacccaagcagcccccaacattccagaaggccaccgtggtcagcgtcaagaaccccagcccagccctccccaccgccaacaacactgtcagccatgtgccagcgcccggcagccagccccaggccctcgccgagcccgccgccctcgcctctccgctgagcagtgcgggggtggcctacgccatcatctccacctcccccagcaatgccgccgccatggcccccagcaccgccgtgtctgtggtcagtgacagcatcaaagtccagcccctcctcatcagtgctgacaacaaggtcatcatcattcagcctcaagtgcagacgcagcccgagagcacggcagagtcgcggccgcccacagaggagccatctcagggagctcaggccaccaaaaagaagaaggaagaccggcccccgacccaggagaaccccgagaaaatcgccttcatggtagcgctaggcctggttaccacggaacatttggaagaaatccagagcaagcgacaggagcggaagagaagaagcacagccaaccctgcctacagcggcctcctggagaccgagaggaaacggctggcctccaactatctcaacaaccccctgttcctcacagcgagagccaatgaggacccctgctggaagaacgagatcacccacgatgagcactgtgccgcctgcaagcgaggggccaacctgcagccctgcggcacctgcccgggggcctaccacctcagctgcctggagccgcccctcaagacggcgcccaagggcgtgtgggtgtgccccaggtgccagcagaaggccttaaagaaagacgagggtgtgccctggactgggatgctggccatcgtgcactcttatgtcacccacaagacagtcaaagaagaggagaagcagaagctgctgcaacgaggcagtgagctgcagaacgagcaccagcagctggaggagcgggaccggcggctggcgtcagcagtgcagaaatgcctggagttgaagacaagcctgctggcccgccagaggggcacccagtcatccctggaccgcctgcgggccctcctgagactgatacagggcgagcagctgctccaggtcaccatgacgaccactagccctgccccactgctggccgggccctggaccaagccctcagtggcagccacacaccccaccgtccagcacccccagggccacaactgaccccgagggaccagtcttcatacccacggaaagttattgggaccctgcttacacagcctgggggttctgtcggccttaattcataaacactatgaatttcagacaaaaattaaccagacagaggagaggagggaggaagagctgggcgagaggcctagagccaggaccaggtgggggtgcggccctgtgccctccaaattcacagggggtacctaggagccaggtggggtacgacaggctggggcacacagtctccccccggccacctcggggctgcctgggcctctggcttccaggccctgctctccacggcctccctctggcccgttggaggggcaggctgaggctgtggaggggacaagcacgccccccagaacgcagtctccactgagggcaccgcctattggtgtcctgtgggagggcgagctgagaacacatggactagctgagtggtagcggtagttgggacgagaagcggggtagtggatctaggtagttcctcaatgccccacgctcctaggaggtccccctggggtgggcgggcgggcctggggcactccgtcgcctttgcagaaccacctgggcccctttctgtcagtattattagggttacgaattgcagctgtttaacttgaaagacactgtcggaggtgagcatctgggcgccgggacgctgcagtgatccccgccagagcctgtgcccttcctgctccgtctttggggtcctcaaggctgcctccttccttttgccaatctcttggactcagtttgccgttgatgcgtttttctcatggagtttctgggcagagtggagctgcaaccctgttgtggggggcagcatttggcaggttttctccttggggttgaatcattcaacttaacgactgaagccctttcttgtctcctttggaagagccgataagtattccactcctcccttcttgccagtgcagacactatgccaaaaaataacttcacacttttgtatggcgtttttattgtgagatatttaatgtgaatggttggggggactctggctgacttcctttctgcttctagtagtctctgcttcaaggtacaaatgggaacacctcccctcgggaagcctggccaagctggaagatccggcaggttttttacgagccgggtggagggttggggaggaaagaaagggcggtggctcgggaggttccggccttcggggaccagacttgctgccaagggcttctgcatccagggtgggcagtggcagcttgtcacccttgcccgattcccacatcccagtcctgagggactcagcacaacaggataagcgtccaggagccacgggctcccaccccgagcatatcacatggtgccgaattgcactgaacacgcgtgtgtgcatcgcacgcggccacgaccacagacacgcatgcacacacgcagaggtgcagagcgaggaggccggcaaatcccgcagctgccacggtccctcctgtcattctcacgactccgggagaaactgtgctgtatgatacagatctattttaatacacttaccactgggtgaacaagatttttatattcttttattgatgaacaaagtgaaccgtgtgaggcacacgtcttctatattggctactctgtgccaagtatgcattaccgcgtggcttgcgatgtccatgtcttcagcttccttttctgttggtttggttttcttcgcggatggattgagttacatgttttaacagtgtaatgggaggatctgaaaggttggacccgggaggggtagctgccgatgtgtcttgagattgttaggttttttttggaccaaggaggaccgtccagtgggtagtgaggatagagaaaaagtgtttgtcttaaatacgccaatgtagttttccttctttacaatgtattaaactcgatcgatgatttcaaa

SEQ ID NO: 164772 - DNA, 3586 bp, Homo sapiens
  Payload ID: 12455
  Gene Symbol: PHF21B
  Gene Name: PHD finger protein 21B
  ENST ID: ENST00000403565
  CDS Start-End: 679-1662
atttatgagctttgctcgacacggactcgccgtgtttacttggctctttgttcctcccccctcccccggcacacactcacactcacactcactcgcacacgcaccccggcctgcaaacttgcacggctcggggcgcgccgccgggtggcctcggcccccgccccgccccgcgagctgccccgatgaggcggcagccacagaacggcgacctcaagaagcagctccacgaaaggcagccgcggatcgccgcgctcagcgacaaacaaatcgcgggcagaacctctcatctgtgcacaagggacccagcacggggctttgggaacgatcactgcagtgcctgtcacgggtcctcaggtcagctccttgcagaggttggccgggcaaggagcggcagtgctacctcaggttaggccaaagactctgattccagacagcctccccgttgccccgggccgggaccggccacccaagcagcccccaacattccagaaggccaccgtggtcagcgtcaagaaccccagcccagccctccccaccgccaacaacactgtcagccatgtgccagcgcccggcagccagccccaggccctcgccgagcccgccgccctcgcctctccgctgagcagtgcgggggtggcctacgccatcatctccacctcccccagcaatgccgccgccatggcccccagcaccgccgtgtctgtggtcagtgacagcatcaaagtccagcccctcctcatcagtgctgacaacaaggtcatcatcattcagcctcaagtgcagacgcagcccgagagcacggcagagtcgcggccgcccacagaggagccatctcagggagctcaggccaccaaaaagaagaaggaagaccggcccccgacccaggagaaccccgagaaaatcgccttcatggtagcgctaggcctggttaccacggaacatttggaagaaatccagagcaagcgacaggagcggaagagaagaagcacagccaaccctgcctacagcggcctcctggagaccgagaggaaacggctggcctccaactatctcaacaaccccctgttcctcacagcgagagccaatgaggacccctgctggaagaacgagatcacccacgatgagcactgtgccgcctgcaagcgaggggccaacctgcagccctgcggcacctgcccgggggcctaccacctcagctgcctggagccgcccctcaagacggcgcccaagggcgtgtgggtgtgccccaggtgccagcagaaggccttaaagaaagacgagggtgtgccctggactgggatgctggccatcgtgcactcttatgtcacccacaagacagtcaaagaagaggagaagcagaagctgctgcaacgaggcagtgagctgcagaacgagcaccagcagctggaggagcgggaccggcggctggcgtcagcagtgcagaaatgcctggagttgaagacaagcctgctggcccgccagaggggcacccagtcatccctggaccgcctgcgggccctcctgagactgatacagggcgagcagctgctccaggtcaccatgacgaccactagccctgccccactgctggccgggccctggaccaagccctcagtggcagccacacaccccaccgtccagcacccccagggccacaactgaccccgagggaccagtcttcatacccacggaaagttattgggaccctgcttacacagcctgggggttctgtcggccttaattcataaacactatgaatttcagacaaaaattaaccagacagaggagaggagggaggaagagctgggcgagaggcctagagccaggaccaggtgggggtgcggccctgtgccctccaaattcacagggggtacctaggagccaggtggggtacgacaggctggggcacacagtctccccccggccacctcggggctgcctgggcctctggcttccaggccctgctctccacggcctccctctggcccgttggaggggcaggctgaggctgtggaggggacaagcacgccccccagaacgcagtctccactgagggcaccgcctattggtgtcctgtgggagggcgagctgagaacacatggactagctgagtggtagcggtagttgggacgagaagcggggtagtggatctaggtagttcctcaatgccccacgctcctaggaggtccccctggggtgggcgggcgggcctggggcactccgtcgcctttgcagaaccacctgggcccctttctgtcagtattattagggttacgaattgcagctgtttaacttgaaagacactgtcggaggtgagcatctgggcgccgggacgctgcagtgatccccgccagagcctgtgcccttcctgctccgtctttggggtcctcaaggctgcctccttccttttgccaatctcttggactcagtttgccgttgatgcgtttttctcatggagtttctgggcagagtggagctgcaaccctgttgtggggggcagcatttggcaggttttctccttggggttgaatcattcaacttaacgactgaagccctttcttgtctcctttggaagagccgataagtattccactcctcccttcttgccagtgcagacactatgccaaaaaataacttcacacttttgtatggcgtttttattgtgagatatttaatgtgaatggttggggggactctggctgacttcctttctgcttctagtagtctctgcttcaaggtacaaatgggaacacctcccctcgggaagcctggccaagctggaagatccggcaggttttttacgagccgggtggagggttggggaggaaagaaagggcggtggctcgggaggttccggccttcggggaccagacttgctgccaagggcttctgcatccagggtgggcagtggcagcttgtcacccttgcccgattcccacatcccagtcctgagggactcagcacaacaggataagcgtccaggagccacgggctcccaccccgagcatatcacatggtgccgaattgcactgaacacgcgtgtgtgcatcgcacgcggccacgaccacagacacgcatgcacacacgcagaggtgcagagcgaggaggccggcaaatcccgcagctgccacggtccctcctgtcattctcacgactccgggagaaactgtgctgtatgatacagatctattttaatacacttaccactgggtgaacaagatttttatattcttttattgatgaacaaagtgaaccgtgtgaggcacacgtcttctatattggctactctgtgccaagtatgcattaccgcgtggcttgcgatgtccatgtcttcagcttccttttctgttggtttggttttcttcgcggatggattgagttacatgttttaacagtgtaatgggaggatctgaaaggttggacccgggaggggtagctgccgatgtgtcttgagattgttaggttttttttggaccaaggaggaccgtccagtgggtagtgaggatagagaaaaagtgtttgtcttaaatacgccaatgtagttttccttctttacaatgtattaaactcgatcgatgatttcaaa

SEQ ID NO: 164773 - DNA, 557 bp, Homo sapiens
  Payload ID: 12455
  Gene Symbol: PHF21B
  Gene Name: PHD finger protein 21B
  ENST ID: ENST00000414269
  CDS Start-End: 145-557
gaattagcatcgtgccgaggcacaactttgccgaggcccaacgagatccaggccctcgccgagcccgccgccctcgcctctccgctgagcagtgcgggggtggcctacgccatcatctccacctcccccagcaatgccgccgccatggcccccagcaccgccgtgtctgtggtcagtgacagcatcaaagtccagcccctcctcatcagtgctgacaacaaggtcatcatcattcagcctcaagtgcagacgcagcccgagagcacggcagagtcgcggccgcccacagaggagccatctcagggagctcaggccaccaaaaagaagaaggaagaccggcccccgacccaggagaaccccgagaaaatcgccttcatggtagcgctaggcctggttaccacggaacatttggaagaaatccagagcaagcgacaggagcggaagagaagaagcacagccaaccctgcctacagcggcctcctggagaccgagaggaaacggctggcctccaactatctcaacaaccccctgttcctcacagcgagagccaatgagga

SEQ ID NO: 164774 - DNA, 750 bp, Homo sapiens
  Payload ID: 12455
  Gene Symbol: PHF21B
  Gene Name: PHD finger protein 21B
  ENST ID: ENST00000420689
  CDS Start-End: 176-750
agctttgctcgacacggactcgccgtgtttacttggctctttgttcctcccccctcccccggcacacactcacactcacactcactcgcacacgcaccccggcctgcaaacttgcacggctcggggcgcgccgccgggtggcctcggcccccgccccgccccgcgagctgccccgatgaggcggcagccacagaacggcgacctcaagaagcagctccacgaaaggcagccgcggatcgccgcgctcagcgacaaacaagctttgggaacgatcactgcagtgcctgtcacgggtcctcaggtcagctccttgcagaggttggccgggcaaggagcggcagtgctacctcaggttaggccaaagactctgattccagacagcctccccgttgccccgggccgggaccggccacccaagcagcccccaacattccagaaggccaccgtggtcagcgtcaagaaccccagcccagccctccccaccgccaacaacactgtcagccatgtgccagcgcccggcagccagccccaggccctcgccgagcccgccgccctcgcctctccgctgagcagtgcgggggtggcctacgccatcatctccacctcccccagcaatgccgccgccatggcccccagcaccgccgtgtctgtggtcagtgacagcatcaaagtccagcccctcctcatcagtgctgacaacaaggtcatcatcattcagcctcaagtgcagacgcagcccgagagcacggc

SEQ ID NO: 164775 - DNA, 3491 bp, Homo sapiens
  Payload ID: 12455
  Gene Symbol: PHF21B
  Gene Name: PHD finger protein 21B
  Uniprot ID: Q96EK2
  ENST ID: ENST00000629843
  CDS Start-End: 101-1570
aggccgcgtccgcccgcgcccgctctggcccccgcggagccgcgcaacttcccgggagcccgggccaaagtgagcgcaaagtgctgcccaagttgccgggatggagctgcagagccggcccgaggcgctcgccgtggaactcgcgcgccaccagaacggcgacctcaagaagcagctccacgaaaggcagccgcggatcgccgcgctcagcgacaaacaagctttgggaacgatcactgcagtgcctgtcacgggtcctcaggtcagctccttgcagaggttggccgggcaaggagcggcagtgctacctcaggttaggccaaagactctgattccagacagcctccccgttgccccgggccgggaccggccacccaagcagcccccaacattccagaaggccaccgtggtcagcgtcaagaaccccagcccagccctccccaccgccaacaacactgtcagccatgtgccagcgcccggcagccagccccaggccctcgccgagcccgccgccctcgcctctccgctgagcagtgcgggggtggcctacgccatcatctccacctcccccagcaatgccgccgccatggcccccagcaccgccgtgtctgtggtcagtgacagcatcaaagtccagcccctcctcatcagtgctgacaacaaggtcatcatcattcagcctcaagtgcagacgcagcccgagagcacggcagagtcgcggccgcccacagaggagccatctcagggagctcaggccaccaaaaagaagaaggaagaccggcccccgacccaggagaaccccgagaaaatcgccttcatggtagcgctaggcctggttaccacggaacatttggaagaaatccagagcaagcgacaggagcggaagagaagaagcacagccaaccctgcctacagcggcctcctggagaccgagaggaaacggctggcctccaactatctcaacaaccccctgttcctcacagcgagagccaatgaggacccctgctggaagaacgagatcacccacgatgagcactgtgccgcctgcaagcgaggggccaacctgcagccctgcggcacctgcccgggggcctaccacctcagctgcctggagccgcccctcaagacggcgcccaagggcgtgtgggtgtgccccaggtgccagcagaaggccttaaagaaagacgagggtgtgccctggactgggatgctggccatcgtgcactcttatgtcacccacaagacagtcaaagaagaggagaagcagaagctgctgcaacgaggcagtgagctgcagaacgagcaccagcagctggaggagcgggaccggcggctggcgtcagcagtgcagaaatgcctggagttgaagacaagcctgctggcccgccagaggggcacccagtcatccctggaccgcctgcgggccctcctgagactgatacagggcgagcagctgctccaggtcaccatgacgaccactagccctgccccactgctggccgggccctggaccaagccctcagtggcagccacacaccccaccgtccagcacccccagggccacaactgaccccgagggaccagtcttcatacccacggaaagttattgggaccctgcttacacagcctgggggttctgtcggccttaattcataaacactatgaatttcagacaaaaattaaccagacagaggagaggagggaggaagagctgggcgagaggcctagagccaggaccaggtgggggtgcggccctgtgccctccaaattcacagggggtacctaggagccaggtggggtacgacaggctggggcacacagtctccccccggccacctcggggctgcctgggcctctggcttccaggccctgctctccacggcctccctctggcccgttggaggggcaggctgaggctgtggaggggacaagcacgccccccagaacgcagtctccactgagggcaccgcctattggtgtcctgtgggagggcgagctgagaacacatggactagctgagtggtagcggtagttgggacgagaagcggggtagtggatctaggtagttcctcaatgccccacgctcctaggaggtccccctggggtgggcgggcgggcctggggcactccgtcgcctttgcagaaccacctgggcccctttctgtcagtattattagggttacgaattgcagctgtttaacttgaaagacactgtcggaggtgagcatctgggcgccgggacgctgcagtgatccccgccagagcctgtgcccttcctgctccgtctttggggtcctcaaggctgcctccttccttttgccaatctcttggactcagtttgccgttgatgcgtttttctcatggagtttctgggcagagtggagctgcaaccctgttgtggggggcagcatttggcaggttttctccttggggttgaatcattcaacttaacgactgaagccctttcttgtctcctttggaagagccgataagtattccactcctcccttcttgccagtgcagacactatgccaaaaaataacttcacacttttgtatggcgtttttattgtgagatatttaatgtgaatggttggggggactctggctgacttcctttctgcttctagtagtctctgcttcaaggtacaaatgggaacacctcccctcgggaagcctggccaagctggaagatccggcaggttttttacgagccgggtggagggttggggaggaaagaaagggcggtggctcgggaggttccggccttcggggaccagacttgctgccaagggcttctgcatccagggtgggcagtggcagcttgtcacccttgcccgattcccacatcccagtcctgagggactcagcacaacaggataagcgtccaggagccacgggctcccaccccgagcatatcacatggtgccgaattgcactgaacacgcgtgtgtgcatcgcacgcggccacgaccacagacacgcatgcacacacgcagaggtgcagagcgaggaggccggcaaatcccgcagctgccacggtccctcctgtcattctcacgactccgggagaaactgtgctgtatgatacagatctattttaatacacttaccactgggtgaacaagatttttatattcttttattgatgaacaaagtgaaccgtgtgaggcacacgtcttctatattggctactctgtgccaagtatgcattaccgcgtggcttgcgatgtccatgtcttcagcttccttttctgttggtttggttttcttcgcggatggattgagttacatgttttaacagtgtaatgggaggatctgaaaggttggacccgggaggggtagctgccgatgtgtcttgagattgttaggttttttttggaccaaggaggaccgtccagtgggtagtgaggatagagaaaaagtgtttgtcttaaatacgccaatgtagttttccttctttacaatgtattaaactcgatcgatgatttc

SEQ ID NO: 164776 - DNA, 2037 bp, Homo sapiens
  Payload ID: 12456
  Gene Symbol: PHF23
  Gene Name: PHD finger protein 23
  Uniprot ID: Q9BUL5
  ENST ID: ENST00000320316
  CDS Start-End: 228-1439
aggagggagcaggcggccggcggcgcggggggagggggcccggtccgggagtgcgggaggcagtggtagagggaggtggcggcagcggctagcggactcgagtctcaaccgggctgaggcggacacttctgtggagcgaagcagtgggagcatcgagcactagaggcggcaccgggatccccggctccggggaggggggcgccggaccgggaggaggggagggggcgatgctggaagccatggcggagcccagtcccgaagatccacctccgacccttaagccagagactcagccaccagagaaacggcggagaacaattgaggatttcaacaaattctgcagttttgttttggcatatgctggttacattccccctagcaaagaggaaagtgactggccagcctctggctccagctctccattgcgaggagagagtgcggccgacagtgatggctgggactcggccccctcagatcttcgaaccatccagacttttgttaagaaagcaaagtcatccaagagaagggcagctcaagcaggtcccacccagccaggacccccaaggtccactttctctcgtctgcaggcccccgacagtgctaccttgcttgagaagatgaagctcaaggactctctctttgatctggatgggcccaaagtggcatctcctttgtcccccacatccctgacacatacctcccggccccctgctgctcttacccccgtgcccctttcccagggggacctctcccatcctcctcgaaagaaggaccgaaagaaccgaaagttggggccaggagctggggctggctttggggtgcttcggaggcctcggccaactcctggggatggggaaaagagatctcgaatcaagaagagcaagaagcggaagttaaaaaaggcagaacggggggatagactcccacctcctgggcctccccaggcaccccccagtgatacagactctgaagaggaggaggaagaggaggaagaggaagaagaagaagagatggcaacagtggtagggggtgaagccccagtccctgtgctgccaacaccccctgaggctcctaggccccctgccacagtgcaccctgaaggagtccctcctgctgacagtgaaagcaaggaggtgggcagcactgaaacaagccaagatggagatgccagctccagtgaaggcgagatgcgggtcatggacgaggacatcatggtagaatcaggtgatgactcatgggatctgatcacatgttactgtcgaaagccctttgcagggcggcccatgattgagtgcagcctgtgtgggacgtggatccacctctcctgtgctaagattaagaagaccaacgtccccgacttcttttattgccagaaatgcaaggaactgaggccagaggcccggcggttaggggggcctcccaaatctggagagccctgatggcaccaactttagcctggaacttccaaatgacaacatgatttgggaactgagcctcagggtcctcagcctatcccctggagcttggatactgtctgcacttcaaggcaggaattctcaagggagacttgtttgaaaatgagtgtctcactttcccaccctatccttcctccccactctgtggacttgaaattgaatccattacggttggggatgggaggctgtctgtgtcccgacacataatctctgtctcttggacctgccaccatcactttctgggtcaggattggaattgggatggaatgggacagttgtctataaaactctagtgtaaatattagcactcccctccctcatcttttcttctatttcactccccatttattttcttctacaccggttgtatttttaattttggacttcccctattgggcatggcagctcaaaggtggagtactagagcctggccaagtgaggaaggaaagcagaaaggtgacgattctcactcacctcttttgtttttaataatatcggccgctgtttgtacagacagcctgcgtgttgtaaataaagcagagtgggctcttttgtgtttata

SEQ ID NO: 164777 - DNA, 1662 bp, Homo sapiens
  Payload ID: 12456
  Gene Symbol: PHF23
  Gene Name: PHD finger protein 23
  Uniprot ID: Q9BUL5
  ENST ID: ENST00000454255
  CDS Start-End: 124-1323
agtggccggagagttgctcaggagggaggacgtagaagaggctgagtgaggggcccggtagttcgccgaggtggggtagtttgtggcggtggtaccggagctccgagtagttgccgccggagaatgcccggtgattgtcggagagatccacctccgacccttaagccagagactcagccaccagagaaacggcggagaacaattgaggatttcaacaaattctgcagttttgttttggcatatgctggttacattccccctagcaaagaggaaagtgactggccagcctctggctccagctctccattgcgaggagagagtgcggccgacagtgatggctgggactcggccccctcagatcttcgaaccatccagacttttgttaagaaagcaaagtcatccaagagaagggcagctcaagcaggtcccacccagccaggacccccaaggtccactttctctcgtctgcaggcccccgacagtgctaccttgcttgagaagatgaagctcaaggactctctctttgatctggatgggcccaaagtggcatctcctttgtcccccacatccctgacacatacctcccggccccctgctgctcttacccccgtgcccctttcccagggggacctctcccatcctcctcgaaagaaggaccgaaagaaccgaaagttggggccaggagctggggctggctttggggtgcttcggaggcctcggccaactcctggggatggggaaaagagatctcgaatcaagaagagcaagaagcggaagttaaaaaaggcagaacggggggatagactcccacctcctgggcctccccaggcaccccccagtgatacagactctgaagaggaggaggaagaggaggaagaggaagaagaagaagagatggcaacagtggtagggggtgaagccccagtccctgtgctgccaacaccccctgaggctcctaggccccctgccacagtgcaccctgaaggagtccctcctgctgacagtgaaagcaaggaggtgggcagcactgaaacaagccaagatggagatgccagctccagtgaaggcgagatgcgggtcatggacgaggacatcatggtagaatcaggtgatgactcatgggatctgatcacatgttactgtcgaaagccctttgcagggcggcccatgattgagtgcagcctgtgtgggacgtggatccacctctcctgtgctaagattaagaagaccaacgtccccgacttcttttattgccagaaatgcaaggaactgaggccagaggcccggcggttaggggggcctcccaaatctggagagccctgatggcaccaactttagcctggaacttccaaatgacaacatgatttgggaactgagcctcagggtcctcagcctatcccctggagcttggatactgtctgcacttcaaggcaggaattctcaagggagacttgtttgaaaatgagtgtctcactttcccaccctatccttcctccccactctgtggacttgaaattgaatccattacggttggggatgggaggctgtctgtgtcccgacacataatctctgtctcttggacctgccaccatcactttctgggtcaggattggaattgggatggaatgggacagttgtctataaaactctagtgtaaatatt

SEQ ID NO: 164778 - DNA, 583 bp, Homo sapiens
  Payload ID: 12456
  Gene Symbol: PHF23
  Gene Name: PHD finger protein 23
  ENST ID: ENST00000574236
  CDS Start-End: 476-583
gtgctcgagtagaaggggccggagggcggggagcggttcggcgtggtcatcctggaccctgggggctggcgggcggcgtgtgcggtctcggagggcccgaggcggtggagcgcggccggatccacctccgacccttaagccagagactcagccaccagagaaacggcggagaacaattgaggatttcaacaaattctgcagttttgttttggcatatgctggttacattccccctagcaaagaggaaagtgactggccagcctctggctccagctctccattgcgaggagagagtgcggccgacagtgatggctgggactcggccccctcagatcttcgaaccatccagacttttgttaagaaagcaaagtcatccaagagaagggcagctcaagcaggtcccacccagccaggacccccaaggtccactttctctcgtctgcaggcccccgacagtgctaccttgcttgagaagatgaagctcaaggactctctctttgatctggatgggcccaaagtggcatctcctttgtcccccacatccctgacacatacctcccggccccctgctgctcttaccccc

SEQ ID NO: 164779 - DNA, 649 bp, Homo sapiens
  Payload ID: 12456
  Gene Symbol: PHF23
  Gene Name: PHD finger protein 23
  ENST ID: ENST00000570899
  CDS Start-End: 92-649
ctggtctccccgccgctccccgggggaggggagcggcttggtgcgcctgcgccagcctgtggctttctgggaatcaaagttccggaggttcatgcggtcccttttccgctgttcccggacggactacaaaacccttgatccacctccgacccttaagccagagactcagccaccagagaaacggcggagaacaattgaggatttcaacaaattctgcagttttgttttggcatatgctggttacattccccctagcaaagaggaaagtgactggccagcctctggctccagctctccattgcgaggagagagtgcggccgacagtgatggctgggactcggccccctcagatcttcgaaccatccagacttttgttaagaaagcaaagtcatccaagagaagggcagctcaagcaggtcccacccagccaggacccccaaggtccactttctctcgtctgcaggcccccgacagtgctaccttgcttgagaagatgaagctcaaggactctctctttgatctggatgggcccaaagtggcatctcctttgtcccccacatccctgacacatacctcccggccccctgctgctcttacccccgtgcccctttcccagggggacctctcccatcctcctcgaaagaaggac

SEQ ID NO: 164780 - DNA, 1944 bp, Homo sapiens
  Payload ID: 12456
  Gene Symbol: PHF23
  Gene Name: PHD finger protein 23
  ENST ID: ENST00000576955
  CDS Start-End: 535-1356
tgcgggaggcagtggtagagggaggtggcggcagcggctagcggactcgagtctcaaccgggctgaggcggacacttctgtggagcgaagcagtgggagcatcgagcactagaggcggcaccgggatccccggctccggggaggggggcgccggaccgggaggaggggagggggcgatgctggaagccatggcggagcccagtcccgaagccaccagagaaacggcggagaacaattgaggatttcaacaaattctgcagttttgttttggcatatgctggttacattccccctagcaaagaggaaagtgactggccagcctctggctccagctctccattgcgaggagagagtgcggccgacagtgatggctgggactcggccccctcagatcttcgaaccatccagacttttgttaagaaagcaaagtcatccaagagaagggcagctcaagcaggtcccacccagccaggacccccaaggtccactttctctcgtctgcaggcccccgacagtgctaccttgcttgagaagatgaagctcaaggactctctctttgatctggatgggcccaaagtggcatctcctttgtcccccacatccctgacacatacctcccggccccctgctgctcttacccccgtgcccctttcccagggggacctctcccatcctcctcgaaagaaggaccgaaagaaccgaaagttggggccaggagctggggctggctttggggtgcttcggaggcctcggccaactcctggggatggggaaaagagatctcgaatcaagaagagcaagaagcggaagttaaaaaaggcagaacggggggatagactcccacctcctgggcctccccaggcaccccccagtgatacagactctgaagaggaggaggaagaggaggaagaggaagaagaagaagagatggcaacagtggtagggggtgaagccccagtccctgtgctgccaacaccccctgaggctcctaggccccctgccacagtgcaccctgaaggagtccctcctgctgacagtgaaagcaaggaggtgggcagcactgaaacaagccaagatggagatgccagctccagtgaaggcgagatgcgggtcatggacgaggacatcatggtagaatcaggtgatgactcatgggatctgatcacatgttactgtcgaaagccctttgcagggcggcccatgattgagtgcagcctgtgtgggacgtggatccacctctcctgtgctaagattaagaagaccaacgtccccgacttcttttattgccagaaatgcaaggaactgaggccagaggcccggcggttaggggggcctcccaaatctggagagccctgatggcaccaactttagcctggaacttccaaatgacaacatgatttgggaactgagcctcagggtcctcagcctatcccctggagcttggatactgtctgcacttcaaggcaggaattctcaagggagacttgtttgaaaatgagtgtctcactttcccaccctatccttcctccccactctgtggacttgaaattgaatccattacggttggggatgggaggctgtctgtgtcccgacacataatctctgtctcttggacctgccaccatcactttctgggtcaggattggaattgggatggaatgggacagttgtctataaaactctagtgtaaatattagcactcccctccctcatcttttcttctatttcactccccatttattttcttctacaccggttgtatttttaattttggacttcccctattgggcatggcagctcaaaggtggagtactagagcctggccaagtgaggaaggaaagcagaaaggtgacgattctcactcacctcttttgtttttaataatatcggccgctgtttgtacagacagcctgcgtgttgtaaataaagcagagtgggctcttt

SEQ ID NO: 164781 - DNA, 497 bp, Homo sapiens
  Payload ID: 12456
  Gene Symbol: PHF23
  Gene Name: PHD finger protein 23
  ENST ID: ENST00000574407
  CDS Start-End: 480-497
gagttgctgagggtgaggggggcatcggcggcagcagcggtggctgctgtggagagagagagagagtggctggttggggggaaggggccagagttgaggggtccatagcctagtaactgggtgatccacctccgacccttaagccagagactcagccaccagagaaacggcggagaacaattgaggatttcaacaaattctgcagttttgttttggcatatgctggttacattccccctagcaaagaggaaagtgactggccagcctctggctccagctctccattgcgaggagagagtgcggccgacagtgatggctgggactcggccccctcagatcttcgaaccatccagacttttgttaagaaagcaaagtcatccaagagaagggcagctcaagcaggtcccacccagccaggacccccaaggtccactttctctcgtctgcaggcccccgacagtgctaccttgcttgagaagatgaagctcaaggactct

SEQ ID NO: 164782 - DNA, 575 bp, Homo sapiens
  Payload ID: 12456
  Gene Symbol: PHF23
  Gene Name: PHD finger protein 23
  ENST ID: ENST00000574323
  CDS Start-End: 398-575
gtagttgtggagagagcgagccaggaagcgaggcgagctggatccacctccgacccttaagccagagactcagccaccagagaaacggcggagaacaattgaggatttcaacaaattctgcagttttgttttggcatatgctggttacattccccctagcaaagaggaaagtgactggccagcctctggctccagctctccattgcgaggagagagtgcggccgacagtgatggctgggactcggccccctcagatcttcgaaccatccagacttttgttaagaaagcaaagtcatccaagagaagggcagctcaagcaggtcccacccagccaggacccccaaggtccactttctctcgtctgcaggcccccgacagtgctaccttgcttgagaagatgaagctcaaggactctctctttgatctggatgggcccaaagtggcatctcctttgtcccccacatccctgacacatacctcccggccccctgctgctcttacccccgtgcccctttcccagggggacctctcccatcctcctcgaaagaaggaccgaaagaaccgaaagttggggc

SEQ ID NO: 164783 - DNA, 1768 bp, Homo sapiens
  Payload ID: 12456
  Gene Symbol: PHF23
  Gene Name: PHD finger protein 23
  Uniprot ID: Q9BUL5
  ENST ID: ENST00000571362
  CDS Start-End: 161-1171
agagggaggtggcggcagcggctagcggactcgagtctcaaccgggctgaggcggacacttctgtggagcgaagcagtgggagcatcgagcactagaggcggcaccgggatccccggctccggggaggggggcgccggaccgggaggaggggagggggcgatgctggaagccatggcggagcccagtcccgaagatccacctccgacccttaagccagagactcagccaccagagaaacggcggagaacaattgaggatttcaacaaattctgcagttttgttttggcatatgctggttacattccccctagcaaagaggcccccgacagtgctaccttgcttgagaagatgaagctcaaggactctctctttgatctggatgggcccaaagtggcatctcctttgtcccccacatccctgacacatacctcccggccccctgctgctcttacccccgtgcccctttcccagggggacctctcccatcctcctcgaaagaaggaccgaaagaaccgaaagttggggccaggagctggggctggctttggggtgcttcggaggcctcggccaactcctggggatggggaaaagagatctcgaatcaagaagagcaagaagcggaagttaaaaaaggcagaacggggggatagactcccacctcctgggcctccccaggcaccccccagtgatacagactctgaagaggaggaggaagaggaggaagaggaagaagaagaagagatggcaacagtggtagggggtgaagccccagtccctgtgctgccaacaccccctgaggctcctaggccccctgccacagtgcaccctgaaggagtccctcctgctgacagtgaaagcaaggaggtgggcagcactgaaacaagccaagatggagatgccagctccagtgaaggcgagatgcgggtcatggacgaggacatcatggtagaatcaggtgatgactcatgggatctgatcacatgttactgtcgaaagccctttgcagggcggcccatgattgagtgcagcctgtgtgggacgtggatccacctctcctgtgctaagattaagaagaccaacgtccccgacttcttttattgccagaaatgcaaggaactgaggccagaggcccggcggttaggggggcctcccaaatctggagagccctgatggcaccaactttagcctggaacttccaaatgacaacatgatttgggaactgagcctcagggtcctcagcctatcccctggagcttggatactgtctgcacttcaaggcaggaattctcaagggagacttgtttgaaaatgagtgtctcactttcccaccctatccttcctccccactctgtggacttgaaattgaatccattacggttggggatgggaggctgtctgtgtcccgacacataatctctgtctcttggacctgccaccatcactttctgggtcaggattggaattgggatggaatgggacagttgtctataaaactctagtgtaaatattagcactcccctccctcatcttttcttctatttcactccccatttattttcttctacaccggttgtatttttaattttggacttcccctattgggcatggcagctcaaaggtggagtactagagcctggccaagtgaggaaggaaagcagaaaggtgacgattctcactcacctcttttgtttttaataatatcggccgctgtttgtacagacagcctgcgtgttgtaaataaagcagagtgggctcttttgtgtttat

SEQ ID NO: 164784 - DNA, 1006 bp, Homo sapiens
  Payload ID: 12456
  Gene Symbol: PHF23
  Gene Name: PHD finger protein 23
  ENST ID: ENST00000572789
  CDS Start-End: 404-1006
ctcccgggtctgtcccggccgtgaagtagcgttggatgcgtgtgcctatccacctccgacccttaagccagagactcagccaccagagaaacggcggagaacaattgaggatttcaacaaattctgcagttttgttttggcatatgctggttacattccccctagcaaagaggaaagtgactggccagcctctggctccagctctccattgcgaggagagagtgcggccgacagtgatggctgggactcggccccctcagatcttcgaaccatccagacttttgttaagaaagcaaagtcatccaagagaagggcagctcaagcaggtcccacccagccaggacccccaaggtccactttctctcgtctgcaggcccccgacagtgctaccttgcttgagaagatgaagctcaaggactctctctttgatctggatgggcccaaagtggcatctcctttgtcccccacatccctgacacatacctcccggccccctgctgctcttacccccgtgcccctttcccagggggacctctcccatcctcctcgaaagaaggaccgaaagaaccgaaagttggggccaggagctggggctggctttggggtgcttcggaggcctcggccaactcctggggatggggaaaagagatctcgaatcaagaagagcaagaagcggaagttaaaaaaggcagaacggggggatagactcccacctcctgggcctccccaggcaccccccagtgatacagactctgaagaggaggaggaagaggaggaagaggaagaagaagaagagatggcaacagtggtagggggtgaagccccagtccctgtgctgccaacaccccctgaggctcctaggccccctgccacagtgcaccctgaaggagtccctcctgctgacagtgaaagcaaggaggtgggcagcactgaaacaagccaagatggagatgccagctccagtgaaggcgagatgcgggtcatggacgaggacatcatggtagaa

SEQ ID NO: 164785 - DNA, 685 bp, Homo sapiens
  Payload ID: 12456
  Gene Symbol: PHF23
  Gene Name: PHD finger protein 23
  ENST ID: ENST00000573826
  CDS Start-End: 76-685
aggggcccggtagttcgccgaggtggggtagtttgtggcggtggtaccggagctccgagtagttgccgccggagaatgcccgatccacctccgacccttaagccagagactcagccaccagagaaacggcggagaacaattgaggatttcaacaaattctgcagttttgttttggcatatgctggttacattccccctagcaaagaggaaagtgactggccagcctctggctccagctctccattgcgaggagagagtgcggccgacagtgatggctgggactcggccccctcagatcttcgaaccatccagacttttgttaagaaagcaaagtcatccaagagaagggcagctcaagcaggtcccacccagccaggacccccaaggtccactttctctcgtctgcaggcccccgacagtgctaccttgcttgagaagatgaagctcaaggactctctctttgatctggatgggcccaaagtggcatctcctttgtcccccacatccctgacacatacctcccggccccctgctgctcttacccccgtgcccctttcccagggggacctctcccatcctcctcgaaagaaggaccgaaagaaccgaaagttggggccaggagctggggctggctttggggtgcttcggaggcctcggccaactcctggggatggggaaaagagat

SEQ ID NO: 164786 - DNA, 850 bp, Homo sapiens
  Payload ID: 12456
  Gene Symbol: PHF23
  Gene Name: PHD finger protein 23
  ENST ID: ENST00000613632
  CDS Start-End: 1-477
atgctggaagccatggcggagcccagtcccgaagatccacctccgacccttaagccagagactcagccaccagagaaacggcggagaacaattgaggatttcaacaaattctgcagttttgttttggcatatgctggttacattccccctagcaaagaggaaagtgactggccagcctctggctccagctctccattgcgaggagagagtgcggccgacagtgatggctgggactcggccccctcagatcttcgaaccatccagacttttgttaagaaagcaaagtcatccaagagaagggcagctcaagcaggtcccacccagccaggacccccaaggtccactttctctcgtctgcaggcccccgacagtgctaccttgcttgagaagatgaagctcaaggactctctctttgatctggatgggcccaaagtggcatctcctttccccagtccctgtgctgccaacaccccctgaggctcctaggccccctgccacagtgcaccctgaaggagtccctcctgctgacagtgaaagcaaggaggtgggcagcactgaaacaagccaagatggagatgccagctccagtgaaggcgagatgcgggtcatggacgaggacatcatggtagaatcaggtgatgactcatgggatctgatcacatgttactgtcgaaagccctttgcagggcggcccatgattgagtgcagcctgtgtgggacgtggatccacctctcctgtgctaagattaagaagaccaacgtccccgacttcttttattgccagaaatgcaaggaactgaggccagaggcccggcggttaggggggcctcccaaatctggagagccctga

SEQ ID NO: 164787 - DNA, 5718 bp, Homo sapiens
  Payload ID: 12457
  Gene Symbol: PHF24
  Gene Name: PHD finger protein 24
  Uniprot ID: Q9UPV7
  ENST ID: ENST00000242315
  CDS Start-End: 83-1285
gctgccgtgggctgcgcggggcccgcggtgtgtagagtccgccgccccggagccgcgtcccgcacccggacggtcccgagccatgggggtgttgatgtccaagcggcagacagtggagcaggtgcagaaggtgagtctggctgtgtctgctttcaaggatgggctgcgggacaggccttccatccgacgcacaggtgagctgccagggtcccgccgtggcactgtagagggctccgtccaggaggtacaggaggagaaggaagcagaagcaggaacctcggtggtccaggaagagagtagtgccggccgcgcagcctgggagcggctccgagatgggcgcggcgtggagcctgaggagtttgacaggacaagtcgattcacaccccctgcgttcatccgccccacccggaagctggatgatgacaaacctccagaaatctgcctggagcccagagagcctgttgtcaacgatgagatgtgtgatgtttgtgaggtctggacagctgagagcctcttcccgtgcagggtctgcaccagggttttccatgatggctgcctgcgccgcatgggctacatccaaggagacagtgcagcggaggtgacggagatggcccacacagaaacaggctggagctgccactactgtgacaacatcaacttgctgcttactgaggaggaaatgtatagcctcacggagacctttcagcggtgtaaagtcatccctgattgctccctgacactggaggactttctgcgttaccgccaccaagcagccaagcggggggaccgtgacagggccctgagtgaggagcaagaagagcaggcggcccgccagtttgctgccctggaccctgaacatcgaggccacatagagtggcctgacttcttgtcccatgagtccctcctgcttctgcagcagttgcgtccccagaactctctgttgaggcttctgacagtgaaggagcgggagcgagcccgagccgccttcctggctcggggcagtgggagcaccgtcagtgaggcagagtgccgccgggcccagcactcttggttttgcaaacggttcccagaggctccttcctgcagtgtcagcatcagccatgtgggtcccatcgcagatagcagcccagccagcagcagcagcaagagtcaggacaagaccctgctgcccacagagcaggagtccagatttgtggactggcctaccttcctgcaagagaatgtcctctacatcctggctgctcgccccaacagcgcagccattcacctgaagcccccaggatagcatggagcagagaagctcggtttgaggacagtgacatcctctccctcctttcctttctcccttcccccaccaacctctggcacagagactcatggggttgggacactgccagcgtcttaacttgtcactaagctttaaggcactgaaatcaccattcccctcacaatagaggcagtgaatgcattgccacaaggagaagccctgggagctgtggcagcatcctctcctggaccgcccctgccccacatcatagacgggacctgccaccacacttatatacatgtgcacatgctgcccagctgtccatgccttcagaagcctggttctttttggttgagaaaggaccaaagtccctttgtgaagcccctggtatagaggagggggtctctactcaccccttctataggcaggccagttctaatttccaatagataagtctctggccaagtgattcttaggaagggggcatgtcagactcgcatgcctgcctagagctcctggagatcctaatgggccccgctttctccaccaaaaatcccttctgcagtcagctgctgttactagtaggtgtgcattatgtacctcggctgtactgagttgggaaaagagttaaacatcaccactgaaattcagccctttatttatttaaattccaattcctggtgacagaaaaggcaactagcctggagaatcctgactggaagagggggaggcagcccttcccagggactcgggattctaggaacctctcagtcaggtcacctgagtccaaaagtctttagcagggtagtcaaaaatcaaggtgagccttcttggccccatttttcagatggtagctcatggcctagggccaagggggcctgaatggagcaaacacactggcaggagccacagccctctgtgttagatgcttcacccaagtcaccgaccacagagactgacgagagcacactctggaggaagaggagagaacggggctctgcttcctcatcattccagctcaactcaactgtagacaccttccacagcccaagaaagatctgcagagccctgagcagggactctttcagccatcctgacaaacaggataagaggctggggcttaagaagaggctctgcagagaaggtcctgggaaagccttacagaagaagttttccgcttctccctatcactgagactcggcttgagtggctgcttctcctcactgctcatcacatgtccttccccagcaggctagggcttgggcctggcatggaaggccttttggggcaatcagaggctgccacaagagcaccaagcctggcctccaagccccagccctccttcctaagtactcatcaaattcaaattcttcagtccgtgtgttatggctcatcttggccggccgtggggtccatgttctaggcttctgtttccaacttaatgacttaggcatagcgagatctgactaccaagagttattcaaaagggagtggagtgcagtcatgcagaagcaaacacgtcttcattgctcgaggcccttgtgctaaatcgggtgcgtacagaagaacacacaccgctcggtgctgaatgtttcgaggaaagcaaggagctgcggccaggggcttcttgagagccctgtgtagtctcctcctgtaggaaccaccttagctggaagcagggtggtgagctgctggggttggattatttgggactgaaatgaagcagacaggagacaaatctgggctcaggtgtatggcccacagcttttagaaatgctcttcagccgtcccccaggattgatccataggaggggccattattcagtctagtcaaaacaagaaagcgcaggactcctgggcctaagaactgcatctgaagcagccaggcctggggttttgcactgagatgaaagcacattaagcacaggggctcttacctactctcctggcaaatcatctcctgtgccactggccttgggctgctcgatctcacagacggggcattttgagtagagacaagctctgggctttgagagctgaatagcatttttctcctgcctcatcagtcacagggactggaagtccatcttgttccctgatccttcacagatcaaggtgatgcctacctctttggagctgctgcctctagctctccacgggtgagtgaggagagttggtgggccaggtcaggcctgccgtattccagggcctggcaaagcagccccagagttcttccacaacaggaacaggcccatttggatcacgcttctccctattccagaacagcaaacttcctgggtgagggcctgctacagagatcccaggggacacttccctcagcaaagagtagagttcccatcccacaagagtcctaggaagcaggaaagcacgaaggagcagccagcctcttctccacaggcagtcatctagctttttaccaaaggggaagtgccgttgctccccaagtccagagttgcagacgccctgccccaacccccgtccagaatctccctttgcagtgttctaatccccagagcccctctgcggtatgtatagagttgttaaaaacgttcagaaacccagtgaagcccatttcgttttcaagccctcccatcactgtgactctgaaattctgccaagtacaaatattagcgtttggctctaataagggtatgagaaaatgtttcagtcttttctttgtggctacccaaaattgagatcagtgtttctaaccaaggaaggcctgggttatagacaggctcctctgaagcccacttgccctaagcatttttcacctagcattcctcttcctcatgttcagatgtgaatgaaggggcagctggaggatgtggtggagctgcagggaccgagggtcagctgagcagtggccctggccacaaaaccactccaagtctgctccttggcttcctctcctgagcccagccttccccaacagaacacttgagcaagggcccctagagtatcccagggatggagcagtcccctcactctaggtactgatctaaccttcaagtgctcctcttcatttgaggacacctacagtagaaaccatgaggacattgcctctttctgccctcagcccaagtacctggggctagcagggcagataccagcctttctggtcctgctgctccctatgggatgtcaccctgaccttgcttaagtggccaagtcttagggtccccttattcctgtcaccattatgaaaaacacagcattaaactgcctgggaagaggacacctccttgggggagtgagccccaaggttatacccaggactcatagcccaaagcacaacctcggccattgcaggtttcacagcttcagtcagagtggtgccaggaagcccaaaagccaagagggaaggtcagcagaagctgcctggcaaggccccaggccagccaggcccaccccagagccaagagaaacttcaagcaggactgagaactggtagctggctctagtgatcctgaaagcatgttcccttcagaccagcagagtgaagacagacagatgtgtggccctaaaaggcagaacagttttgatgccagaacttcaggactgtcaccacagtccctttttacccctcctctatttacagtgaaataaaattcctattttcttttttttttttttttaattttccttatttcaagctcttatctgaaaaaatgctactttctcctaccacttagtttgaatttgcccaggatatctgtctgggcccctggctgcaacccagacaatggcgagatctcctggagtgggggatattcacgcatcgtgcctgttcctgacagctcagccctggtgtagggtgggactgggcattttctctgctgttacttttctgctaccactatttttggcaaccttggaaagaaaataaacaggttacagaatttcggctagcactaagggaaagctttttcctctgggccacatgccccagtgacccagagcatggaaagggggtcagctctggtctgggccagtgactaagaagcccaatcacattccagtttctatagcactgggtaggcacaacccacagttaagaacatcaagttataagtagccaggccttttcatagccatggtgacacaaaggccctcaagattagcctcctgccatcatgggttggcctgtgatctgtcccccagccaaacccaagtttgtgagagggactctgagaacacttgagcaacacttgggaatccaatgcgctctggtccctcatgcccttcccatgtgcttttctgcagaaggtaacttgacagcaagctgaggggaacgtccccaagccctgtctccctgtctctacagctgcatgctcctctgcgtggcccagccttcacagcgctccagaagaagctgatgccctgaggctgggcacagtggaaatcataataaagcgattgcgatgctc

SEQ ID NO: 164788 - DNA, 8233 bp, Homo sapiens
  Payload ID: 12458
  Gene Symbol: PHF3
  Gene Name: PHD finger protein 3
  Uniprot ID: Q92576
  ENST ID: ENST00000262043
  CDS Start-End: 341-6460
ccgcgccgccgccgcacgccgatggctgcggggtctcgcgccgtcgcaccgtccccacgcggcaagcgaccttcgggctcagggcggcggcggctgcaacgaggattaggagggcggcgcggaagccaagaatagtgtcgtcagcagcagccatttggtcccaggaggaaaagaggctgtggcagcgacgccgacgtcctgcgcgtaccccctctccgcggcacccaccgggccccctcctcctcctcttcggcggcggcagcgtccaccatcttcctcttgctgccagtggtagcgctcgtctggcggagctggggctgaaagacacacagaagtcttcatggatatagttgatacatttaatcatttaattcctactgaacacttagatgatgccctatttctaggatccaacctggagaatgaagtctgtgaggattttagtgcaagtcaaaatgtcttagaggactcgctgaagaacatgctcagcgataaggatcctatgctaggatctgcaagtaaccagttctgtttgcctgttttggatagcaatgatcccaatttccagatgccttgttcaacagttgttggtcttgacgatattatggatgaaggagttgttaaagaaagtggcaatgataccattgatgaagaagaactgattttacctaacaggaacttaagggacaaggtagaagaaaattcagtgagatctccaagaaaatcacctcgtttaatggcacaagaacaagtaagaagtttgcgacagagcactattgccaagcgttcaaatgcagcaccattaagtaacacaaaaaaagcatctgggaagactgtatctactgctaaagcaggagtgaaacaaccagaaaggagtcaggttaaagaagaagtatgtatgtcactgaaacctgagtaccataaggagaatagaaggtgcagccgaaatagcggacaaattgaagtggtacctgaagtatcagtgtcttcaagtcattcttcagtgtcatcttgtcttgaaatgaaggatgaagatggattagattctaagcataagtgtaataatccgggagaaatagatgtgccatctcatgaattaaattgttcacttctttcagagacttgtgttactattggagaaaagaaaaatgaagctttgatggaatgtaaagccaagcctgttggtagtccattgtttaagttttcagataaagaagaacatgaacaaaatgattccatttcaggtaaaacgggtgagactgttgttgaagaaatgatagcaacaagaaaagttgaacaagattcaaaggagacagtaaaattatcccatgaagatgaccatattcttgaggacgctggatcttctgatatttctagtgatgctgcttgtacaaatccaaataagacagaaaacagccttgtaggtttgcctagttgtgtagatgaagtgactgaatgtaatttggaattgaaggataccatgggtattgctgataaaactgagaacacccttgaaagaaataaaattgaaccgttgggttattgtgaagatgcggagtctaataggcagttggagagcactgagtttaataaatcaaacttagaggtggttgatactagtacttttggaccggaaagtaatatcttggaaaatgctatttgtgatgtgcctgaccaaaattcaaaacagttgaatgctatagaaagtactaaaatagagtcccatgaaacagcaaaccttcaggatgacagaaacagccagtcaagtagcgtttcttacttagagtcaaaaagtgtaaaatccaaacatacaaaacctgtaattcattctaagcaaaacatgaccacagatgctccgaagaaaattgttgcagcaaagtatgaagtaatacatagcaaaactaaagttaatgtcaaaagtgtgaaacgaaatactgatgtaccagaatctcagcaaaattttcataggccagtcaaagtcagaaaaaaacaaattgataaggagccaaagattcagagttgcaattctggggttaaatctgtgaaaaaccaagctcattctgtactgaaaaaaacattacaggatcaaactttagtacaaattttcaagcccttaactcattctttgagtgataagtcacacgctcatcctggttgcttgaaagaacctcatcatcctgcacaaactggacatgtatcacattctagccagaaacagtgtcataagcctcagcaacaggccccagcaatgaaaaccaatagtcacgtgaaggaagagcttgaacacccaggcgttgagcattttaaggaagaggataaactgaaactgaaaaaacctgagaagaacctacaaccccgccaaagaagaagcagcaaaagtttttctttagatgagccaccattgttcattccagataacatagctaccataagaagagaaggctctgatcatagctcctcatttgaaagcaaatatatgtggactcccagcaagcagtgtgggttttgcaaaaaaccacatggcaacaggtttatggttggctgtgggagatgtgatgactggtttcatggtgattgtgttgggttaagtctttctcaagcacagcagatgggcgaggaagacaaagaatatgtctgtgtaaaatgttgtgctgaagaagacaaaaagactgaaatactagatccagatactttggaaaaccaagctacagttgaattccatagtggagataaaacaatggagtgtgaaaagcttggattatcaaaacacacaacaaatgatagaaccaaatatatagatgatacagtgaagcacaaggtcaaaattttaaaacgggagtctggtgaaggcagaaattcatcagactgtagagataatgaaattaaaaaatggcagctagctcctcttcgtaagatgggacaaccagttttacctcggagatcctcagaagaaaaaagtgaaaaaataccgaaagagtctacaactgttacttgcacaggagaaaaagcttcaaaaccaggtactcatgagaagcaagagatgaaaaagaagaaagttgaaaaaggagtgcttaatgtacatcctgctgcttctgcttccaagccttctgcagatcagatcaggcaaagtgtcagacattctctcaaagacattcttatgaagagacttacagactcaaatttgaaggtaccagaggaaaaggcagcaaaagttgccacaaaaattgagaaagagcttttctctttttttcgggacacagatgctaaatataagaacaaatatagaagtttgatgtttaatttgaaagatcctaaaaacaatatattatttaaaaaagtactgaaaggagaagtaactcctgatcatcttatcagaatgagtccagaagaactagcttctaaagagttagctgcttggagacgaagagaaaacagacataccatagaaatgattgagaaagagcagagagaagtggaacgacggccaatcaccaaaataactcataaaggtgaaatagaaattgagagtgatgccccaatgaaagaacaggaagcagccatggagattcaggaaccagccgccaataagtcattggagaagccagaaggatctgaaaaacaaaaagaggaggttgactctatgtctaaagataccactagtcaacacagacagcatctttttgatctcaactgcaaaatctgcataggtcgaatggcaccacctgtagatgatctttctccaaaaaaagtaaaagttgttgtaggagtagctcgcaaacattcagacaatgaagcagaaagtatagcagatgcattatcttcaacctcaaatattttggcttctgaattctttgaggaggagaaacaggagtctccaaagtcaacgttctctcctgctccacgtccagagatgcctggaactgttgaagttgagtctacctttctggctcgattgaacttcatctggaaaggttttatcaacatgccttctgtggcaaaatttgttaccaaagcctatccagtatctggctccccagaatacctgacagaggacctaccagatagtattcaagtaggtggcaggatatcacctcagacagtttgggattatgtggaaaaaataaaagcatcaggaaccaaggaaatttgtgtggttcgcttcacaccagtaactgaagaagatcaaatttcttatactttgctctttgcatacttcagtagcagaaagcgctatggagtagctgctaacaacatgaagcaggttaaagatatgtaccttattcctttgggtgccacagataaaattccacaccctcttgtgccttttgatggacctgggcttgaactgcatagacctaatctattgttgggcttaattattcgtcagaaactgaagcgacagcacagtgcctgtgctagtactagtcatatagctgagactcctgaaagtgcaccaccaatagcattgccacctgataaaaaaagtaaaatagaagtttctacagaagaagcaccagaggaagaaaatgacttttttaattcttttacaactgtattacacaagcagagaaataaacctcagcagaatcttcaggaagaccttccaacagcagttgaacctttaatggaagtcaccaaacaggagccaccaaaacctttaagatttcttcctggcgtgttgattggctgggagaatcaacctactactctggaattagcaaataaacctcttcctgtggatgatatacttcaaagccttttgggcaccactggtcaagtatatgaccaggcccagtcagtgatggaacaaaacactgttaaagaaattccatttttaaatgagcagaccaactcaaaaatagagaaaacagataatgtggaagtaactgatggtgaaaacaaggagataaaagttaaagtagataatatttcagaatctacagataagtcagcagaaatagaaacatcagtagtagggtcctcttccatttctgcagggtctttgacgagtcttagtctcagaggtaagccaccagatgtttctacagaagcatttttaacaaatttatcaattcagtcaaaacaagaggaaactgtggagagtaaagagaaaacattaaaaagacagcttcaggaagatcaagagaataatttgcaagataaccagacttcaaatagttctccatgcagatctaatgtaggaaaaggaaacatagatggtaatgtgagctgtagtgaaaaccttgttgctaatacagcgaggtctccacagtttatcaacctgaaaagggatcctaggcaagcagcaggacgaagtcagcctgtaactacttcagaaagcaaagatggagatagttgccggaatggagaaaaacacatgctgcctggcctgtcacacaacaaggagcacttaacagaacaaatcaatgtagaggaaaagttgtgttctgcagagaaaaactcgtgtgttcagcagagtgacaatttaaaagttgcacaaaactcaccatcagtagaaaacatacagacttctcaagcagaacaagcaaaacccttacaggaggatattttaatgcaaaatattgaaactgtgcacccatttcgaagaggatcagcagtagcgacatctcattttgaagttggaaacacatgtccatcagaatttccttctaaaagcatcacctttacttccagaagcaccagccccagaacaagtacaaacttttcacccatgaggccacagcagcccaaccttcagcatctcaagtctagcccacctggatttccatttccagggcctcctaattttcccccacaaagcatgtttggatttccaccacatttgccacctccattacttccccctccaggctttggctttgctcaaaatcccatggttccctggccacctgttgttcatctcccaggtcagccacagcgtatgatgggtcctctctcacaagcatcaaggtatataggcccgcagaatttttaccaggttaaagacattcggaggccagaaaggcgccatagtgacccttggggtaggcaagaccaacagcaactggataggccatttaataggggtaaaggggaccgccagagattttatagtgattcacaccatttgaaaagagagcgacatgaaaaggaatgggagcaagaatctgaaaggcatagacgcagagacagaagccaagacaaggacagagacagaaaaagcagggaggaagggcacaaagataaagagagggcacggttatcacatggtgatcgaggaacagatggaaaagcaagcagagatagtaggaatgtagacaagaagccagataaacctaaaagtgaagactatgagaaggacaaagaacgagagaaaagtaaacacagagaaggagaaaaggacagggataggtaccacaaagatagggaccacactgacagaactaaaagcaaaaggtaaaatttgcaggctgcttcaggattacatttaaataactgttaaaatgttgtatcttgtaaacaaaagaaagattgcctgctaggattgtgccatctttaaaatttttactattggtcatttgcagaacagtaaattctgtgtgttggtacagagtgctctgtaccagtgctcatcatcccttcttcataccaacggtccctagttataggaatttaatatttttaaaagttttacattgctgtatattcaaagatttgttttattaatatgcaataaaggcttagaaattttagttttattccttaattggtaaatatggttaactatggaatatatttacttcctctagtgaatgtcctttatataatgactaatttgggagtaatgtgtgctctgtaagtttgttttaaattgcactgtttttaaagaaactgtagaggagcaacaaaaatccaagcaacttcataatcagattatgctaatcatttagttgagcagtttttgaccaagaatcagaagcccaaggggtacatttattgctttaatctgcactcattgaagtcatttattaccatatactacagctttgtggtaggccattattttcattttcatttttggctcttcagaaacttgaatacttaagcttgtacatgatcttgtgttttgctatcctttttactgtaaaatgtaaatattttaagggatattttgattctaaatatgataaaataatttctcacctattttgtgtgtgtgacttgaaattcagtagtaaaagaatttcttctttaaagctttaattaccttcagacattgattttttgttactcagccaagaacatatagaaatagctatctatgtcaggcattagatgaggggaaaaacaatttttttaaaatcttaaattgtaggctgagatgaattgtgtagttctaaagaggctagaatttagaactacctgtgaaacactgtgcagctatagcccactttataggtaagtttctgaaaacttttacaccatcgcaatttggtactctgactcactaatcattaaaattaaagaccgcagaacttgaagagaaatatgttttgaatccttttataaaatgtgcgatttagcctaattcgtaaagtaactgtacagtttcatatgccagttttacttgaaaaaaaaatatgaaaactattgttaattcaaatctaaatttatttaaaccctaaaacacatggttttgatggctgtaatttaaagtaagagctatcaaatgatgctgacaaaagaaaaaccttccaaaatacaaaagaaagagaactctattatttacttacctgtattaatgaagaaaaatataaataattccacaaaattgattgttttcctaaagagcttaaagattagagttaaaaattggttttgaaacagaattatccttgttatttttgctggagagaagggaggaaattcagaaccaaacattctatttaatttgcaatgacttgcagtacttttttccctatccttatcctgtgaaacttactatcataaggttctaaaacagagaacttgtgtttaaataaagcccgtttaactttggtccacttttcttttggaaattaacttgttagaaaacaaagttagttcccaaacaaaacaaaatctaagttataatttgcaccattacaaagaaattgctgtcagggttttacacattttaaaaacatttcaatttcaaatgtgtatatcgtcaataaatctacctttactgata

SEQ ID NO: 164789 - DNA, 6947 bp, Homo sapiens
  Payload ID: 12458
  Gene Symbol: PHF3
  Gene Name: PHD finger protein 3
  Uniprot ID: Q92576
  ENST ID: ENST00000393387
  CDS Start-End: 27-6146
gggctgaaagacacacagaagtcttcatggatatagttgatacatttaatcatttaattcctactgaacacttagatgatgccctatttctaggatccaacctggagaatgaagtctgtgaggattttagtgcaagtcaaaatgtcttagaggactcgctgaagaacatgctcagcgataaggatcctatgctaggatctgcaagtaaccagttctgtttgcctgttttggatagcaatgatcccaatttccagatgccttgttcaacagttgttggtcttgacgatattatggatgaaggagttgttaaagaaagtggcaatgataccattgatgaagaagaactgattttacctaacaggaacttaagggacaaggtagaagaaaattcagtgagatctccaagaaaatcacctcgtttaatggcacaagaacaagtaagaagtttgcgacagagcactattgccaagcgttcaaatgcagcaccattaagtaacacaaaaaaagcatctgggaagactgtatctactgctaaagcaggagtgaaacaaccagaaaggagtcaggttaaagaagaagtatgtatgtcactgaaacctgagtaccataaggagaatagaaggtgcagccgaaatagcggacaaattgaagtggtacctgaagtatcagtgtcttcaagtcattcttcagtgtcatcttgtcttgaaatgaaggatgaagatggattagattctaagcataagtgtaataatccgggagaaatagatgtgccatctcatgaattaaattgttcacttctttcagagacttgtgttactattggagaaaagaaaaatgaagctttgatggaatgtaaagccaagcctgttggtagtccattgtttaagttttcagataaagaagaacatgaacaaaatgattccatttcaggtaaaacgggtgagactgttgttgaagaaatgatagcaacaagaaaagttgaacaagattcaaaggagacagtaaaattatcccatgaagatgaccatattcttgaggacgctggatcttctgatatttctagtgatgctgcttgtacaaatccaaataagacagaaaacagccttgtaggtttgcctagttgtgtagatgaagtgactgaatgtaatttggaattgaaggataccatgggtattgctgataaaactgagaacacccttgaaagaaataaaattgaaccgttgggttattgtgaagatgcggagtctaataggcagttggagagcactgagtttaataaatcaaacttagaggtggttgatactagtacttttggaccggaaagtaatatcttggaaaatgctatttgtgatgtgcctgaccaaaattcaaaacagttgaatgctatagaaagtactaaaatagagtcccatgaaacagcaaaccttcaggatgacagaaacagccagtcaagtagcgtttcttacttagagtcaaaaagtgtaaaatccaaacatacaaaacctgtaattcattctaagcaaaacatgaccacagatgctccgaagaaaattgttgcagcaaagtatgaagtaatacatagcaaaactaaagttaatgtcaaaagtgtgaaacgaaatactgatgtaccagaatctcagcaaaattttcataggccagtcaaagtcagaaaaaaacaaattgataaggagccaaagattcagagttgcaattctggggttaaatctgtgaaaaaccaagctcattctgtactgaaaaaaacattacaggatcaaactttagtacaaattttcaagcccttaactcattctttgagtgataagtcacacgctcatcctggttgcttgaaagaacctcatcatcctgcacaaactggacatgtatcacattctagccagaaacagtgtcataagcctcagcaacaggccccagcaatgaaaaccaatagtcacgtgaaggaagagcttgaacacccaggcgttgagcattttaaggaagaggataaactgaaactgaaaaaacctgagaagaacctacaaccccgccaaagaagaagcagcaaaagtttttctttagatgagccaccattgttcattccagataacatagctaccataagaagagaaggctctgatcatagctcctcatttgaaagcaaatatatgtggactcccagcaagcagtgtgggttttgcaaaaaaccacatggcaacaggtttatggttggctgtgggagatgtgatgactggtttcatggtgattgtgttgggttaagtctttctcaagcacagcagatgggcgaggaagacaaagaatatgtctgtgtaaaatgttgtgctgaagaagacaaaaagactgaaatactagatccagatactttggaaaaccaagctacagttgaattccatagtggagataaaacaatggagtgtgaaaagcttggattatcaaaacacacaacaaatgatagaaccaaatatatagatgatacagtgaagcacaaggtcaaaattttaaaacgggagtctggtgaaggcagaaattcatcagactgtagagataatgaaattaaaaaatggcagctagctcctcttcgtaagatgggacaaccagttttacctcggagatcctcagaagaaaaaagtgaaaaaataccgaaagagtctacaactgttacttgcacaggagaaaaagcttcaaaaccaggtactcatgagaagcaagagatgaaaaagaagaaagttgaaaaaggagtgcttaatgtacatcctgctgcttctgcttccaagccttctgcagatcagatcaggcaaagtgtcagacattctctcaaagacattcttatgaagagacttacagactcaaatttgaaggtaccagaggaaaaggcagcaaaagttgccacaaaaattgagaaagagcttttctctttttttcgggacacagatgctaaatataagaacaaatatagaagtttgatgtttaatttgaaagatcctaaaaacaatatattatttaaaaaagtactgaaaggagaagtaactcctgatcatcttatcagaatgagtccagaagaactagcttctaaagagttagctgcttggagacgaagagaaaacagacataccatagaaatgattgagaaagagcagagagaagtggaacgacggccaatcaccaaaataactcataaaggtgaaatagaaattgagagtgatgccccaatgaaagaacaggaagcagccatggagattcaggaaccagccgccaataagtcattggagaagccagaaggatctgaaaaacaaaaagaggaggttgactctatgtctaaagataccactagtcaacacagacagcatctttttgatctcaactgcaaaatctgcataggtcgaatggcaccacctgtagatgatctttctccaaaaaaagtaaaagttgttgtaggagtagctcgcaaacattcagacaatgaagcagaaagtatagcagatgcattatcttcaacctcaaatattttggcttctgaattctttgaggaggagaaacaggagtctccaaagtcaacgttctctcctgctccacgtccagagatgcctggaactgttgaagttgagtctacctttctggctcgattgaacttcatctggaaaggttttatcaacatgccttctgtggcaaaatttgttaccaaagcctatccagtatctggctccccagaatacctgacagaggacctaccagatagtattcaagtaggtggcaggatatcacctcagacagtttgggattatgtggaaaaaataaaagcatcaggaaccaaggaaatttgtgtggttcgcttcacaccagtaactgaagaagatcaaatttcttatactttgctctttgcatacttcagtagcagaaagcgctatggagtagctgctaacaacatgaagcaggttaaagatatgtaccttattcctttgggtgccacagataaaattccacaccctcttgtgccttttgatggacctgggcttgaactgcatagacctaatctattgttgggcttaattattcgtcagaaactgaagcgacagcacagtgcctgtgctagtactagtcatatagctgagactcctgaaagtgcaccaccaatagcattgccacctgataaaaaaagtaaaatagaagtttctacagaagaagcaccagaggaagaaaatgacttttttaattcttttacaactgtattacacaagcagagaaataaacctcagcagaatcttcaggaagaccttccaacagcagttgaacctttaatggaagtcaccaaacaggagccaccaaaacctttaagatttcttcctggcgtgttgattggctgggagaatcaacctactactctggaattagcaaataaacctcttcctgtggatgatatacttcaaagccttttgggcaccactggtcaagtatatgaccaggcccagtcagtgatggaacaaaacactgttaaagaaattccatttttaaatgagcagaccaactcaaaaatagagaaaacagataatgtggaagtaactgatggtgaaaacaaggagataaaagttaaagtagataatatttcagaatctacagataagtcagcagaaatagaaacatcagtagtagggtcctcttccatttctgcagggtctttgacgagtcttagtctcagaggtaagccaccagatgtttctacagaagcatttttaacaaatttatcaattcagtcaaaacaagaggaaactgtggagagtaaagagaaaacattaaaaagacagcttcaggaagatcaagagaataatttgcaagataaccagacttcaaatagttctccatgcagatctaatgtaggaaaaggaaacatagatggtaatgtgagctgtagtgaaaaccttgttgctaatacagcgaggtctccacagtttatcaacctgaaaagggatcctaggcaagcagcaggacgaagtcagcctgtaactacttcagaaagcaaagatggagatagttgccggaatggagaaaaacacatgctgcctggcctgtcacacaacaaggagcacttaacagaacaaatcaatgtagaggaaaagttgtgttctgcagagaaaaactcgtgtgttcagcagagtgacaatttaaaagttgcacaaaactcaccatcagtagaaaacatacagacttctcaagcagaacaagcaaaacccttacaggaggatattttaatgcaaaatattgaaactgtgcacccatttcgaagaggatcagcagtagcgacatctcattttgaagttggaaacacatgtccatcagaatttccttctaaaagcatcacctttacttccagaagcaccagccccagaacaagtacaaacttttcacccatgaggccacagcagcccaaccttcagcatctcaagtctagcccacctggatttccatttccagggcctcctaattttcccccacaaagcatgtttggatttccaccacatttgccacctccattacttccccctccaggctttggctttgctcaaaatcccatggttccctggccacctgttgttcatctcccaggtcagccacagcgtatgatgggtcctctctcacaagcatcaaggtatataggcccgcagaatttttaccaggttaaagacattcggaggccagaaaggcgccatagtgacccttggggtaggcaagaccaacagcaactggataggccatttaataggggtaaaggggaccgccagagattttatagtgattcacaccatttgaaaagagagcgacatgaaaaggaatgggagcaagaatctgaaaggcatagacgcagagacagaagccaagacaaggacagagacagaaaaagcagggaggaagggcacaaagataaagagagggcacggttatcacatggtgatcgaggaacagatggaaaagcaagcagagatagtaggaatgtagacaagaagccagataaacctaaaagtgaagactatgagaaggacaaagaacgagagaaaagtaaacacagagaaggagaaaaggacagggataggtaccacaaagatagggaccacactgacagaactaaaagcaaaaggtaaaatttgcaggctgcttcaggattacatttaaataactgttaaaatgttgtatcttgtaaacaaaagaaagattgcctgctaggattgtgccatctttaaaatttttactattggtcatttgcagaacagtaaattctgtgtgttggtacagagtgctctgtaccagtgctcatcatcccttcttcataccaacggtccctagttataggaatttaatatttttaaaagttttacattgctgtatattcaaagatttgttttattaatatgcaataaaggcttagaaattttagttttattccttaattggtaaatatggttaactatggaatatatttacttcctctagtgaatgtcctttatataatgactaatttgggagtaatgtgtgctctgtaagtttgttttaaattgcactgtttttaaagaaactgtagaggagcaacaaaaatccaagcaacttcataatcagattatgctaatcatttagttgagcagtttttgaccaagaatcagaagcccaaggggtacatttattgctttaatctgcactcattgaagtcatttattaccatatactacagctttgtggtaggccattattttcattttcatttttggctcttcagaaacttgaatacttaagcttgtacatgatcttgtgttttgctatcctttttactgtaaaatgtaaatattttaagggatattttgattctaaatatgataaaataatttctcacctattttgtgtgtgtgacttgaaattcagtagtaaaagaatttcttctttaaagcttt

SEQ ID NO: 164790 - DNA, 612 bp, Homo sapiens
  Payload ID: 12458
  Gene Symbol: PHF3
  Gene Name: PHD finger protein 3
  ENST ID: ENST00000505138
  CDS Start-End: 1-509
ttatcaacatgccttctgtggcaaaatttgttaccaaagcctatccagtatctggctccccagaatacctgacagaggacctaccagatagtattcaagtaggtggcaggatatcacctcagacagtttgggattatgtggaaaaaataaaagcatcaggaaccaaggaaatttgtgtggttcgcttcacaccagtaactgaagaagatcaaatttcttatactttgctctttgcatacttcagtagcagaaagcgctatggagtagctgctaacaacatgaagcaggttaaagatatgtaccttattcctttgggtgccacagataaaattccacaccctcttgtgccttttgatggacctgggagaagcatgacactggccaacactgcgtccagcatttgggtggccctcaggatttcccagtcctctgaaatggccatccttctcagtgcgaacttgaagagtgaaaatacagccttgaagaaatgcaaaaacacttcgtgttaacaaacagaagaaatagaaaaaacaagaagaagagattttgcctttctatacatctttagaaagaacttctcggccgggaacggtggctcatgcctgtaatccc

SEQ ID NO: 164791 - DNA, 2969 bp, Homo sapiens
  Payload ID: 12458
  Gene Symbol: PHF3
  Gene Name: PHD finger protein 3
  ENST ID: ENST00000509330
  CDS Start-End: 368-2578
gctgaggcgcgggcgcgcaggcccgaggcacggcgggcgctgcctggaaggcccgtctcgcaggcccccggatccggccgttggggcctcttccttctcagggagccccagcatggagctttgggccttggtttcgggaaactgggactggccctggctgctaggctgctccctgctgctgctttttggagatgagagttgctcttccatttatcctccagttaccgcgcgcttttgtgcccgggactcaaactgtggactccttttgcttagtttgaaatgagaagcctagactcttgccttccgataatacatgtaatttaatgaaccacttgtcgatacggctgaaagacacacagaagtcttcatggatatagttgatacatttaatcatttaattcctactgaacacttagatgatgccctatttctaggatccaacctggagaatgaagtctgtgaggattttagtgcaagtcaaaatgtcttagaggactcgctgaagaacatgctcagcgataaggatcctatgctaggatctgcaagtaaccagttctgtttgcctgttttggatagcaatgatcccaatttccagatgccttgttcaacagttgttggtcttgacgatattatggatgaaggagttgttaaagaaagtggcaatgataccattgatgaagaagaactgattttacctaacaggaacttaagggacaaggtagaagaaaattcagtgagatctccaagaaaatcacctcgtttaatggcacaagaacaagtaagaagtttgcgacagagcactattgccaagcgttcaaatgcagcaccattaagtaacacaaaaaaagcatctgggaagactgtatctactgctaaagcaggagtgaaacaaccagaaaggagtcaggttaaagaagaagtatgtatgtcactgaaacctgagtaccataaggagaatagaaggtgcagccgaaatagcggacaaattgaagtggtacctgaagtatcagtgtcttcaagtcattcttcagtgtcatcttgtcttgaaatgaaggatgaagatggattagattctaagcataagtgtaataatccgggagaaatagatgtgccatctcatgaattaaattgttcacttctttcagagacttgtgttactattggagaaaagaaaaatgaagctttgatggaatgtaaagccaagcctgttggtagtccattgtttaagttttcagataaagaagaacatgaacaaaatgattccatttcaggtaaaacgggtgagactgttgttgaagaaatgatagcaacaagaaaagttgaacaagattcaaaggagacagtaaaattatcccatgaagatgaccatattcttgaggacgctggatcttctgatatttctagtgatgctgcttgtacaaatccaaataagacagaaaacagccttgtaggtttgcctagttgtgtagatgaagtgactgaatgtaatttggaattgaaggataccatgggtattgctgataaaactgagaacacccttgaaagaaataaaattgaaccgttgggttattgtgaagatgcggagtctaataggcagttggagagcactgagtttaataaatcaaacttagaggtggttgatactagtacttttggaccggaaagtaatatcttggaaaatgctatttgtgatgtgcctgaccaaaattcaaaacagttgaatgctatagaaagtactaaaatagagtcccatgaaacagcaaaccttcaggatgacagaaacagccagtcaagtagcgtttcttacttagagtcaaaaagtgtaaaatccaaacatacaaaacctgtaattcattctaagcaaaacatgaccacagatgctccgaagaaaattgttgcagcaaagtatgaagtaatacatagcaaaactaaagttaatgtcaaaagtgtgaaacgaaatactgatgtaccagaatctcagcaaaattttcataggccagtcaaagtcagaaaaaaacaaattgataaggagccaaagattcagagttgcaattctggggttaaatctgtgaaaaaccaagctcattctgtactgaaaaaaacattacaggatcaaactttagtacaaattttcaagcccttaactcattctttgagtgataagtcacacgctcatcctggttgcttgaaagaacctcatcatcctgcacaaactggacatgtatcacattctagccagaaacagtgtcataagcctcagcaacaggccccagcaatgaaaaccaatagtcacgtgaaggaagagcttgaacacccaggcgttgagcattttaaggaagaggataaactgaaactgaaaaaacctgagaagaacctacaaccccgccaaagaagaagcagcaaaagtttttctttagatgagccaccattgttcattccagataacatagctaccataagaagagaaggctctgatcatagctcctcatttgaaagcaaatatatgtggactcccagcaagcagtgtgggttttgcaaaaaaccacatggcaacaggtgtgtgtgtatgtgtgtatgagtgatgtgtacattgaaaataaattgcttttttgggggtgggattaatgtgagaattgttttaaagacattatttgatacacagagacctgtgcaaaaacaaaaagcttcatcagtcttggataaatgatagaaagatggatctactgaatttacaaatatatcatcctagaacatttaaaaaagcatagtctggccaacagctgacatacatggaaatattttgtcattgtcacaggttagacagtgtaatttagccactgcatctgcaaaaaagccaaacacttcctggtaattggaaaattgttatactgctttgggtctgtaagttatatattaattcatttggtgtgagaagaactagtaataaagtatgaaggtcataatggaaa

SEQ ID NO: 164792 - DNA, 2854 bp, Homo sapiens
  Payload ID: 12458
  Gene Symbol: PHF3
  Gene Name: PHD finger protein 3
  ENST ID: ENST00000494284
  CDS Start-End: 390-2854
ccgcgccgccgccgcacgccgatggctgcggggtctcgcgccgtcgcaccgtccccacgcggcaagcgaccttcgggctcagggcggcggcggctgcaacgaggattaggagggcggcgcggaagccaagaatagtgtcgtcagcagcagccatttggtcccaggaggaaaagaggctgtggcagcgacgccgacgtcctgcgcgtaccccctctccgcggcacccaccgggccccctcctcctcctcttcggcggcggcagcgtccaccatcttcctcttgctgccagtggtagcgctcgtctggcggagctgggatccaacctggagaatgaagtctgtgaggattttagtgcaagtcaaaatgtcttagaggactcgctgaagaacatgctcagcgataaggatcctatgctaggatctgcaagtaaccagttctgtttgcctgttttggatagcaatgatcccaatttccagatgccttgttcaacagttgttggtcttgacgatattatggatgaaggagttgttaaagaaagtggcaatgataccattgatgaagaagaactgattttacctaacaggaacttaagggacaaggtagaagaaaattcagtgagatctccaagaaaatcacctcgtttaatggcacaagaacaagtaagaagtttgcgacagagcactattgccaagcgttcaaatgcagcaccattaagtaacacaaaaaaagcatctgggaagactgtatctactgctaaagcaggagtgaaacaaccagaaaggagtcaggttaaagaagaagtatgtatgtcactgaaacctgagtaccataaggagaatagaaggtgcagccgaaatagcggacaaattgaagtggtacctgaagtatcagtgtcttcaagtcattcttcagtgtcatcttgtcttgaaatgaaggatgaagatggattagattctaagcataagtgtaataatccgggagaaatagatgtgccatctcatgaattaaattgttcacttctttcagagacttgtgttactattggagaaaagaaaaatgaagctttgatggaatgtaaagccaagcctgttggtagtccattgtttaagttttcagataaagaagaacatgaacaaaatgattccatttcaggtaaaacgggtgagactgttgttgaagaaatgatagcaacaagaaaagttgaacaagattcaaaggagacagtaaaattatcccatgaagatgaccatattcttgaggacgctggatcttctgatatttctagtgatgctgcttgtacaaatccaaataagacagaaaacagccttgtaggtttgcctagttgtgtagatgaagtgactgaatgtaatttggaattgaaggataccatgggtattgctgataaaactgagaacacccttgaaagaaataaaattgaaccgttgggttattgtgaagatgcggagtctaataggcagttggagagcactgagtttaataaatcaaacttagaggtggttgatactagtacttttggaccggaaagtaatatcttggaaaatgctatttgtgatgtgcctgaccaaaattcaaaacagttgaatgctatagaaagtactaaaatagagtcccatgaaacagcaaaccttcaggatgacagaaacagccagtcaagtagcgtttcttacttagagtcaaaaagtgtaaaatccaaacatacaaaacctgtaattcattctaagcaaaacatgaccacagatgctccgaagaaaattgttgcagcaaagtatgaagtaatacatagcaaaactaaagttaatgtcaaaagtgtgaaacgaaatactgatgtaccagaatctcagcaaaattttcataggccagtcaaagtcagaaaaaaacaaattgataaggagccaaagattcagagttgcaattctggggttaaatctgtgaaaaaccaagctcattctgtactgaaaaaaacattacaggatcaaactttagtacaaattttcaagcccttaactcattctttgagtgataagtcacacgctcatcctggttgcttgaaagaacctcatcatcctgcacaaactggacatgtatcacattctagccagaaacagtgtcataagcctcagcaacaggccccagcaatgaaaaccaatagtcacgtgaaggaagagcttgaacacccaggcgttgagcattttaaggaagaggataaactgaaactgaaaaaacctgagaagaacctacaaccccgccaaagaagaagcagcaaaagtttttctttagatgagccaccattgttcattccagataacatagctaccataagaagagaaggctctgatcatagctcctcatttgaaagcaaatatatgtggactcccagcaagcagtgtgggttttgcaaaaaaccacatggcaacaggtttatggttggctgtgggagatgtgatgactggtttcatggtgattgtgttgggttaagtctttctcaagcacagcagatgggcgaggaagacaaagaatatgtctgtgtaaaatgttgtgctgaagaagacaaaaagactgaaatactagatccagatactttggaaaaccaagctacagttgaattccatagtggagataaaacaatggagtgtgaaaagcttggattatcaaaacacacaacaaatgatagaaccaaatatatagatgatacagtgaagcacaaggtcaaaattttaaaacgggagtctggtgaaggcagaaattcatcagactgtagagataatgaaattaaaaaatggcagctagctcctcttcgtaagatgggacaaccagttttacctcggagatcctc

SEQ ID NO: 164793 - DNA, 486 bp, Homo sapiens
  Payload ID: 12458
  Gene Symbol: PHF3
  Gene Name: PHD finger protein 3
  ENST ID: ENST00000514822
  CDS Start-End: 174-486
gtatagtcacctatgtctttcacaaggggtcagcaagtaataaatggaagtgatatttgaggctaaatcaggaaagagtataatatagctaatactctctttgactaattactttacaaggtggaagtttataaaactgacttgatttgggagtttggtagtggcaatttcacatgttagaaaatttcacattccagattttcaagattgttggtcttgacgatattatggatgaaggagttgttaaagaaagtggcaatgataccattgatgaagaagaactgattttacctaacaggaacttaagggacaaggtagaagaaaattcagtgagatctccaagaaaatcacctcgtttaatggcacaagaacaagtaagaagtttgcgacagagcactattgccaagcgttcaaatgcagcaccattaagtaacacaaaaaaagcatctgggaagactgtatctactgctaaagcaggagtgaaac

SEQ ID NO: 164794 - DNA, 3700 bp, Homo sapiens
  Payload ID: 12458
  Gene Symbol: PHF3
  Gene Name: PHD finger protein 3
  ENST ID: ENST00000506783
  CDS Start-End: 484-3700
ggcccctctccagctcccgcgccgccgccgcacgccgatggctgcggggtctcgcgccgtcgcaccgtccccacgcggcaagcgaccttcgggctcagggcggcggcggctgcaacgaggattaggagggcggcgcggaagccaagaatagtgtcgtcagcagcagccatttggtcccaggaggaaaagaggctgtggcagcgacgccgacgtcctgcgcgtaccccctctccgcggcacccaccgggccccctcctcctcctcttcggcggcggcagcgtccaccatcttcctcttgctgccagtggtagcgctcgtctggcggagctggaacaagtaagaagtttgcgacagagcactattgccaagcgttcaaatgcagcaccattaagtaacacaaaaaaagcatctgggaagactgtatctactgctaaagcaggagtgaaacaaccagaaaggagtcaggttaaagaagaagtatgtatgtcactgaaacctgagtaccataaggagaatagaaggtgcagccgaaatagcggacaaattgaagtggtacctgaagtatcagtgtcttcaagtcattcttcagtgtcatcttgtcttgaaatgaaggatgaagatggattagattctaagcataagtgtaataatccgggagaaatagatgtgccatctcatgaattaaattgttcacttctttcagagacttgtgttactattggagaaaagaaaaatgaagctttgatggaatgtaaagccaagcctgttggtagtccattgtttaagttttcagataaagaagaacatgaacaaaatgattccatttcaggtaaaacgggtgagactgttgttgaagaaatgatagcaacaagaaaagttgaacaagattcaaaggagacagtaaaattatcccatgaagatgaccatattcttgaggacgctggatcttctgatatttctagtgatgctgcttgtacaaatccaaataagacagaaaacagccttgtaggtttgcctagttgtgtagatgaagtgactgaatgtaatttggaattgaaggataccatgggtattgctgataaaactgagaacacccttgaaagaaataaaattgaaccgttgggttattgtgaagatgcggagtctaataggcagttggagagcactgagtttaataaatcaaacttagaggtggttgatactagtacttttggaccggaaagtaatatcttggaaaatgctatttgtgatgtgcctgaccaaaattcaaaacagttgaatgctatagaaagtactaaaatagagtcccatgaaacagcaaaccttcaggatgacagaaacagccagtcaagtagcgtttcttacttagagtcaaaaagtgtaaaatccaaacatacaaaacctgtaattcattctaagcaaaacatgaccacagatgctccgaagaaaattgttgcagcaaagtatgaagtaatacatagcaaaactaaagttaatgtcaaaagtgtgaaacgaaatactgatgtaccagaatctcagcaaaattttcataggccagtcaaagtcagaaaaaaacaaattgataaggagccaaagattcagagttgcaattctggggttaaatctgtgaaaaaccaagctcattctgtactgaaaaaaacattacaggatcaaactttagtacaaattttcaagcccttaactcattctttgagtgataagtcacacgctcatcctggttgcttgaaagaacctcatcatcctgcacaaactggacatgtatcacattctagccagaaacagtgtcataagcctcagcaacaggccccagcaatgaaaaccaatagtcacgtgaaggaagagcttgaacacccaggcgttgagcattttaaggaagaggataaactgaaactgaaaaaacctgagaagaacctacaaccccgccaaagaagaagcagcaaaagtttttctttagatgagccaccattgttcattccagataacatagctaccataagaagagaaggctctgatcatagctcctcatttgaaagcaaatatatgtggactcccagcaagcagtgtgggttttgcaaaaaaccacatggcaacaggtttatggttggctgtgggagatgtgatgactggtttcatggtgattgtgttgggttaagtctttctcaagcacagcagatgggcgaggaagacaaagaatatgtctgtgtaaaatgttgtgctgaagaagacaaaaagactgaaatactagatccagatactttggaaaaccaagctacagttgaattccatagtggagataaaacaatggagtgtgaaaagcttggattatcaaaacacacaacaaatgatagaaccaaatatatagatgatacagtgaagcacaaggtcaaaattttaaaacgggagtctggtgaaggcagaaattcatcagactgtagagataatgaaattaaaaaatggcagctagctcctcttcgtaagatgggacaaccagttttacctcggagatcctcagaagaaaaaagtgaaaaaataccgaaagagtctacaactgttacttgcacaggagaaaaagcttcaaaaccaggtactcatgagaagcaagagatgaaaaagaagaaagttgaaaaaggagtgcttaatgtacatcctgctgcttctgcttccaagccttctgcagatcagatcaggcaaagtgtcagacattctctcaaagacattcttatgaagagacttacagactcaaatttgaaggtaccagaggaaaaggcagcaaaagttgccacaaaaattgagaaagagcttttctctttttttcgggacacagatgctaaatataagaacaaatatagaagtttgatgtttaatttgaaagatcctaaaaacaatatattatttaaaaaagtactgaaaggagaagtaactcctgatcatcttatcagaatgagtccagaagaactagcttctaaagagttagctgcttggagacgaagagaaaacagacataccatagaaatgattgagaaagagcagagagaagtggaacgacggccaatcaccaaaataactcataaaggtgaaatagaaattgagagtgatgccccaatgaaagaacaggaagcagccatggagattcaggaaccagccgccaataagtcattggagaagccagaaggatctgaaaaacaaaaagaggaggttgactctatgtctaaagataccactagtcaacacagacagcatctttttgatctcaactgcaaaatctgcataggtcgaatggcaccacctgtagatgatctttctccaaaaaaagtaaaagttgttgtaggagtagctcgcaaacattcagacaatgaagcagaaagtatagcagatgcattatcttcaacctcaaatattttggcttctgaattctttgaggaggagaaacaggagtctccaaagtcaacgttctctcctgctccacgtccagagatgcctggaactgttgaagttgagtctacctttctggctcgattgaacttcatctggaaaggttttatcaacatgccttctgtggcaaaatttgttaccaaagcctatccagtatctggctccccagaatacctgacagaggacctaccagatagtattcaagtaggtggcaggatatcacctcagacagtttgggattatgtgg

SEQ ID NO: 164795 - DNA, 7124 bp, Homo sapiens
  Payload ID: 12458
  Gene Symbol: PHF3
  Gene Name: PHD finger protein 3
  ENST ID: ENST00000509876
  CDS Start-End: 66-314
cctcttgctgccagtggtagcgctcgtctggcggagctggggctgaaagacacacagaagtcttcatggatatagttgatacatttaatcatttaattcctactgaacacttagatgatgccctatttctaggatccaacctggagaatgaagtctgtgaggattttagtgcaagtcaaaatgtcttagaggactcgctgaagaacatgctcagcgataaggatcctatgctaggatctgcaagtaaccagttctgtttgcctgttttggatagcaatgatcccaatttccagatgccttgttcaacaggatagaccactatcttgttgagctcttttaaatgaagttctacttggacacaaagatgaggactagataactccttgaggttccttctaacccctaggatgaagataataactaacatttgtatagtgctctaaagtttacagagtgagttctcatacatcatctcacttgatcctcacaacagccctgtgagttgttggtcttgacgatattatggatgaaggagttgttaaagaaagtggcaatgataccattgatgaagaagaactgattttacctaacaggaacttaagggacaaggtagaagaaaattcagtgagatctccaagaaaatcacctcgtttaatggcacaagaacaagtaagaagtttgcgacagagcactattgccaagcgttcaaatgcagcaccattaagtaacacaaaaaaagcatctgggaagactgtatctactgctaaagcaggagtgaaacaaccagaaaggagtcaggttaaagaagaagtatgtatgtcactgaaacctgagtaccataaggagaatagaaggtgcagccgaaatagcggacaaattgaagtggtacctgaagtatcagtgtcttcaagtcattcttcagtgtcatcttgtcttgaaatgaaggatgaagatggattagattctaagcataagtgtaataatccgggagaaatagatgtgccatctcatgaattaaattgttcacttctttcagagacttgtgttactattggagaaaagaaaaatgaagctttgatggaatgtaaagccaagcctgttggtagtccattgtttaagttttcagataaagaagaacatgaacaaaatgattccatttcaggtaaaacgggtgagactgttgttgaagaaatgatagcaacaagaaaagttgaacaagattcaaaggagacagtaaaattatcccatgaagatgaccatattcttgaggacgctggatcttctgatatttctagtgatgctgcttgtacaaatccaaataagacagaaaacagccttgtaggtttgcctagttgtgtagatgaagtgactgaatgtaatttggaattgaaggataccatgggtattgctgataaaactgagaacacccttgaaagaaataaaattgaaccgttgggttattgtgaagatgcggagtctaataggcagttggagagcactgagtttaataaatcaaacttagaggtggttgatactagtacttttggaccggaaagtaatatcttggaaaatgctatttgtgatgtgcctgaccaaaattcaaaacagttgaatgctatagaaagtactaaaatagagtcccatgaaacagcaaaccttcaggatgacagaaacagccagtcaagtagcgtttcttacttagagtcaaaaagtgtaaaatccaaacatacaaaacctgtaattcattctaagcaaaacatgaccacagatgctccgaagaaaattgttgcagcaaagtatgaagtaatacatagcaaaactaaagttaatgtcaaaagtgtgaaacgaaatactgatgtaccagaatctcagcaaaattttcataggccagtcaaagtcagaaaaaaacaaattgataaggagccaaagattcagagttgcaattctggggttaaatctgtgaaaaaccaagctcattctgtactgaaaaaaacattacaggatcaaactttagtacaaattttcaagcccttaactcattctttgagtgataagtcacacgctcatcctggttgcttgaaagaacctcatcatcctgcacaaactggacatgtatcacattctagccagaaacagtgtcataagcctcagcaacaggccccagcaatgaaaaccaatagtcacgtgaaggaagagcttgaacacccaggcgttgagcattttaaggaagaggataaactgaaactgaaaaaacctgagaagaacctacaaccccgccaaagaagaagcagcaaaagtttttctttagatgagccaccattgttcattccagataacatagctaccataagaagagaaggctctgatcatagctcctcatttgaaagcaaatatatgtggactcccagcaagcagtgtgggttttgcaaaaaaccacatggcaacaggtttatggttggctgtgggagatgtgatgactggtttcatggtgattgtgttgggttaagtctttctcaagcacagcagatgggcgaggaagacaaagaatatgtctgtgtaaaatgttgtgctgaagaagacaaaaagactgaaatactagatccagatactttggaaaaccaagctacagttgaattccatagtggagataaaacaatggagtgtgaaaagcttggattatcaaaacacacaacaaatgatagaaccaaatatatagatgatacagtgaagcacaaggtcaaaattttaaaacgggagtctggtgaaggcagaaattcatcagactgtagagataatgaaattaaaaaatggcagctagctcctcttcgtaagatgggacaaccagttttacctcggagatcctcagaagaaaaaagtgaaaaaataccgaaagagtctacaactgttacttgcacaggagaaaaagcttcaaaaccaggtactcatgagaagcaagagatgaaaaagaagaaagttgaaaaaggagtgcttaatgtacatcctgctgcttctgcttccaagccttctgcagatcagatcaggcaaagtgtcagacattctctcaaagacattcttatgaagagacttacagactcaaatttgaaggtaccagaggaaaaggcagcaaaagttgccacaaaaattgagaaagagcttttctctttttttcgggacacagatgctaaatataagaacaaatatagaagtttgatgtttaatttgaaagatcctaaaaacaatatattatttaaaaaagtactgaaaggagaagtaactcctgatcatcttatcagaatgagtccagaagaactagcttctaaagagttagctgcttggagacgaagagaaaacagacataccatagaaatgattgagaaagagcagagagaagtggaacgacggccaatcaccaaaataactcataaaggtgaaatagaaattgagagtgatgccccaatgaaagaacaggaagcagccatggagattcaggaaccagccgccaataagtcattggagaagccagaaggatctgaaaaacaaaaagaggaggttgactctatgtctaaagataccactagtcaacacagacagcatctttttgatctcaactgcaaaatctgcataggtcgaatggcaccacctgtagatgatctttctccaaaaaaagtaaaagttgttgtaggagtagctcgcaaacattcagacaatgaagcagaaagtatagcagatgcattatcttcaacctcaaatattttggcttctgaattctttgaggaggagaaacaggagtctccaaagtcaacgttctctcctgctccacgtccagagatgcctggaactgttgaagttgagtctacctttctggctcgattgaacttcatctggaaaggttttatcaacatgccttctgtggcaaaatttgttaccaaagcctatccagtatctggctccccagaatacctgacagaggacctaccagatagtattcaagtaggtggcaggatatcacctcagacagtttgggattatgtggaaaaaataaaagcatcaggaaccaaggaaatttgtgtggttcgcttcacaccagtaactgaagaagatcaaatttcttatactttgctctttgcatacttcagtagcagaaagcgctatggagtagctgctaacaacatgaagcaggttaaagatatgtaccttattcctttgggtgccacagataaaattccacaccctcttgtgccttttgatggacctgggcttgaactgcatagacctaatctattgttgggcttaattattcgtcagaaactgaagcgacagcacagtgcctgtgctagtactagtcatatagctgagactcctgaaagtgcaccaccaatagcattgccacctgataaaaaaagtaaaatagaagtttctacagaagaagcaccagaggaagaaaatgacttttttaattcttttacaactgtattacacaagcagagaaataaacctcagcagaatcttcaggaagaccttccaacagcagttgaacctttaatggaagtcaccaaacaggagccaccaaaacctttaagatttcttcctggcgtgttgattggctgggagaatcaacctactactctggaattagcaaataaacctcttcctgtggatgatatacttcaaagccttttgggcaccactggtcaagtatatgaccaggcccagtcagtgatggaacaaaacactgttaaagaaattccatttttaaatgagcagaccaactcaaaaatagagaaaacagataatgtggaagtaactgatggtgaaaacaaggagataaaagttaaagtagataatatttcagaatctacagataagtcagcagaaatagaaacatcagtagtagggtcctcttccatttctgcagggtctttgacgagtcttagtctcagaggtaagccaccagatgtttctacagaagcatttttaacaaatttatcaattcagtcaaaacaagaggaaactgtggagagtaaagagaaaacattaaaaagacagcttcaggaagatcaagagaataatttgcaagataaccagacttcaaatagttctccatgcagatctaatgtaggaaaaggaaacatagatggtaatgtgagctgtagtgaaaaccttgttgctaatacagcgaggtctccacagtttatcaacctgaaaagggatcctaggcaagcagcaggacgaagtcagcctgtaactacttcagaaagcaaagatggagatagttgccggaatggagaaaaacacatgctgcctggcctgtcacacaacaaggagcacttaacagaacaaatcaatgtagaggaaaagttgtgttctgcagagaaaaactcgtgtgttcagcagagtgacaatttaaaagttgcacaaaactcaccatcagtagaaaacatacagacttctcaagcagaacaagcaaaacccttacaggaggatattttaatgcaaaatattgaaactgtgcacccatttcgaagaggatcagcagtagcgacatctcattttgaagttggaaacacatgtccatcagaatttccttctaaaagcatcacctttacttccagaagcaccagccccagaacaagtacaaacttttcacccatgaggccacagcagcccaaccttcagcatctcaagtctagcccacctggatttccatttccagggcctcctaattttcccccacaaagcatgtttggatttccaccacatttgccacctccattacttccccctccaggctttggctttgctcaaaatcccatggttccctggccacctgttgttcatctcccaggtcagccacagcgtatgatgggtcctctctcacaagcatcaaggtatataggcccgcagaatttttaccaggttaaagacattcggaggccagaaaggcgccatagtgacccttggggtaggcaagaccaacagcaactggataggccatttaataggggtaaaggggaccgccagagattttatagtgattcacaccatttgaaaagagagcgacatgaaaaggaatgggagcaagaatctgaaaggcatagacgcagagacagaagccaagacaaggacagagacagaaaaagcagggaggaagggcacaaagataaagagagggcacggttatcacatggtgatcgaggaacagatggaaaagcaagcagagatagtaggaatgtagacaagaagccagataaacctaaaagtgaagactatgagaaggacaaagaacgagagaaaagtaaacacagagaaggagaaaaggacagggataggtaccacaaagatagggaccacactgacagaactaaaagcaaaaggtaaaatttgcaggctgcttcaggattacatttaaataactgttaaaatgttgtatcttgtaaacaaaagaaagattgcctgctaggattgtgccatctttaaaatttttactattggtcatttgcagaacagtaaattctgtgtgttggtacagagtgctctgtaccagtgctcatcatcccttcttcataccaacggtccctagttataggaatttaatatttttaaaagttttacattgctgtatattcaaagatttgttttattaatatgcaataaaggcttagaaattttagttttattccttaattggtaaatatggttaactatggaatatatttacttcctctagtgaatgtcctttatataatgactaatttgggagtaatgtgtgctctgtaagtttgttttaaattgcactgtttttaaagaaactgtagaggagcaacaaaaatccaagcaacttcataatcagattatgctaatcatttagttgagcagtttttgaccaagaatcagaagcccaaggggtacatttattgctttaatctgcactcattgaagtcatttattaccatatactacagctttgtggtaggccattattttcattttcatttttggctcttcagaaacttgaatacttaagcttgtacatgatcttgtgttttgctatcctttttactgtaaaatgtaaatattttaagggatattttgattctaaatatgataaaataatttctcaccta

SEQ ID NO: 164796 - DNA, 2787 bp, Homo sapiens
  Payload ID: 12458
  Gene Symbol: PHF3
  Gene Name: PHD finger protein 3
  ENST ID: ENST00000481385
  CDS Start-End: 349-2787
ccctctccagctcccgcgccgccgccgcacgccgatggctgcggggtctcgcgccgtcgcaccgtccccacgcggcaagcgaccttcgggctcagggcggcggcggctgcaacgaggattaggagggcggcgcggaagccaagaatagtgtcgtcagcagcagccatttggtcccaggaggaaaagaggctgtggcagcgacgccgacgtcctgcgcgtaccccctctccgcggcacccaccgggccccctcctcctcctcttcggcggcggcagcgtccaccatcttcctcttgctgccagtggtagcgctcgtctggcggagctggttgttggtcttgacgatattatggatgaaggagttgttaaagaaagtggcaatgataccattgatgaagaagaactgattttacctaacaggaacttaagggacaaggtagaagaaaattcagtgagatctccaagaaaatcacctcgtttaatggcacaagaacaagtaagaagtttgcgacagagcactattgccaagcgttcaaatgcagcaccattaagtaacacaaaaaaagcatctgggaagactgtatctactgctaaagcaggagtgaaacaaccagaaaggagtcaggttaaagaagaagtatgtatgtcactgaaacctgagtaccataaggagaatagaaggtgcagccgaaatagcggacaaattgaagtggtacctgaagtatcagtgtcttcaagtcattcttcagtgtcatcttgtcttgaaatgaaggatgaagatggattagattctaagcataagtgtaataatccgggagaaatagatgtgccatctcatgaattaaattgttcacttctttcagagacttgtgttactattggagaaaagaaaaatgaagctttgatggaatgtaaagccaagcctgttggtagtccattgtttaagttttcagataaagaagaacatgaacaaaatgattccatttcaggtaaaacgggtgagactgttgttgaagaaatgatagcaacaagaaaagttgaacaagattcaaaggagacagtaaaattatcccatgaagatgaccatattcttgaggacgctggatcttctgatatttctagtgatgctgcttgtacaaatccaaataagacagaaaacagccttgtaggtttgcctagttgtgtagatgaagtgactgaatgtaatttggaattgaaggataccatgggtattgctgataaaactgagaacacccttgaaagaaataaaattgaaccgttgggttattgtgaagatgcggagtctaataggcagttggagagcactgagtttaataaatcaaacttagaggtggttgatactagtacttttggaccggaaagtaatatcttggaaaatgctatttgtgatgtgcctgaccaaaattcaaaacagttgaatgctatagaaagtactaaaatagagtcccatgaaacagcaaaccttcaggatgacagaaacagccagtcaagtagcgtttcttacttagagtcaaaaagtgtaaaatccaaacatacaaaacctgtaattcattctaagcaaaacatgaccacagatgctccgaagaaaattgttgcagcaaagtatgaagtaatacatagcaaaactaaagttaatgtcaaaagtgtgaaacgaaatactgatgtaccagaatctcagcaaaattttcataggccagtcaaagtcagaaaaaaacaaattgataaggagccaaagattcagagttgcaattctggggttaaatctgtgaaaaaccaagctcattctgtactgaaaaaaacattacaggatcaaactttagtacaaattttcaagcccttaactcattctttgagtgataagtcacacgctcatcctggttgcttgaaagaacctcatcatcctgcacaaactggacatgtatcacattctagccagaaacagtgtcataagcctcagcaacaggccccagcaatgaaaaccaatagtcacgtgaaggaagagcttgaacacccaggcgttgagcattttaaggaagaggataaactgaaactgaaaaaacctgagaagaacctacaaccccgccaaagaagaagcagcaaaagtttttctttagatgagccaccattgttcattccagataacatagctaccataagaagagaaggctctgatcatagctcctcatttgaaagcaaatatatgtggactcccagcaagcagtgtgggttttgcaaaaaaccacatggcaacaggtttatggttggctgtgggagatgtgatgactggtttcatggtgattgtgttgggttaagtctttctcaagcacagcagatgggcgaggaagacaaagaatatgtctgtgtaaaatgttgtgctgaagaagacaaaaagactgaaatactagatccagatactttggaaaaccaagctacagttgaattccatagtggagataaaacaatggagtgtgaaaagcttggattatcaaaacacacaacaaatgatagaaccaaatatatagatgatacagtgaagcacaaggtcaaaattttaaaacgggagtctggtgaaggcagaaattcatcagactgtagagataatgaaattaaaaaatggcagctagctcctcttcgtaagatgggacaaccagttttacctcggagatcctcagaagaaaaaagtgaaaaaataccgaaagagtctacaactgttacttgcacaggagaaaaagcttcaaaaccaggtactcatgagaagcaagagatg

SEQ ID NO: 164797 - DNA, 3074 bp, Homo sapiens
  Payload ID: 12458
  Gene Symbol: PHF3
  Gene Name: PHD finger protein 3
  ENST ID: ENST00000515594
  CDS Start-End: 493-3074
ctctccagctcccgcgccgccgccgcacgccgatggctgcggggtctcgcgccgtcgcaccgtccccacgcggcaagcgaccttcgggctcagggcggcggcggctgcaacgaggattaggagggcggcgcggaagccaagaatagtgtcgtcagcagcagccatttggtcccaggaggaaaagaggctgtggcagcgacgccgacgtcctgcgcgtaccccctctccgcggcacccaccgggccccctcctcctcctcttcggcggcggcagcgtccaccatcttcctcttgctgccagtggtagcgctcgtctggcggagctggttgttggtcttgacgatattatggatgaaggagttgttaaagaaagtggcaatgataccattgatgaagaagaactgattttacctaacaggaacttaagggacaaggtagaagaaaattcagtgagatctccaagaaaatcacctcgtttaatggcacaaggtttatggttggctgtgggagatgtgatgactggtttcatggtgattgtgttgggttaagtctttctcaagcacagcagatgggcgaggaagacaaagaatatgtctgtgtaaaatgttgtgctgaagaagacaaaaagactgaaatactagatccagatactttggaaaaccaagctacagttgaattccatagtggagataaaacaatggagtgtgaaaagcttggattatcaaaacacacaacaaatgatagaaccaaatatatagatgatacagtgaagcacaaggtcaaaattttaaaacgggagtctggtgaaggcagaaattcatcagactgtagagataatgaaattaaaaaatggcagctagctcctcttcgtaagatgggacaaccagttttacctcggagatcctcagaagaaaaaagtgaaaaaataccgaaagagtctacaactgttacttgcacaggagaaaaagcttcaaaaccaggtactcatgagaagcaagagatgaaaaagaagaaagttgaaaaaggagtgcttaatgtacatcctgctgcttctgcttccaagccttctgcagatcagatcaggcaaagtgtcagacattctctcaaagacattcttatgaagagacttacagactcaaatttgaaggtaccagaggaaaaggcagcaaaagttgccacaaaaattgagaaagagcttttctctttttttcgggacacagatgctaaatataagaacaaatatagaagtttgatgtttaatttgaaagatcctaaaaacaatatattatttaaaaaagtactgaaaggagaagtaactcctgatcatcttatcagaatgagtccagaagaactagcttctaaagagttagctgcttggagacgaagagaaaacagacataccatagaaatgattgagaaagagcagagagaagtggaacgacggccaatcaccaaaataactcataaaggtgaaatagaaattgagagtgatgccccaatgaaagaacaggaagcagccatggagattcaggaaccagccgccaataagtcattggagaagccagaaggatctgaaaaacaaaaagaggaggttgactctatgtctaaagataccactagtcaacacagacagcatctttttgatctcaactgcaaaatctgcataggtcgaatggcaccacctgtagatgatctttctccaaaaaaagtaaaagttgttgtaggagtagctcgcaaacattcagacaatgaagcagaaagtatagcagatgcattatcttcaacctcaaatattttggcttctgaattctttgaggaggagaaacaggagtctccaaagtcaacgttctctcctgctccacgtccagagatgcctggaactgttgaagttgagtctacctttctggctcgattgaacttcatctggaaaggttttatcaacatgccttctgtggcaaaatttgttaccaaagcctatccagtatctggctccccagaatacctgacagaggacctaccagatagtattcaagtaggtggcaggatatcacctcagacagtttgggattatgtggaaaaaataaaagcatcaggaaccaaggaaatttgtgtggttcgcttcacaccagtaactgaagaagatcaaatttcttatactttgctctttgcatacttcagtagcagaaagcgctatggagtagctgctaacaacatgaagcaggttaaagatatgtaccttattcctttgggtgccacagataaaattccacaccctcttgtgccttttgatggacctgggcttgaactgcatagacctaatctattgttgggcttaattattcgtcagaaactgaagcgacagcacagtgcctgtgctagtactagtcatatagctgagactcctgaaagtgcaccaccaatagcattgccacctgataaaaaaagtaaaatagaagtttctacagaagaagcaccagaggaagaaaatgacttttttaattcttttacaactgtattacacaagcagagaaataaacctcagcagaatcttcaggaagaccttccaacagcagttgaacctttaatggaagtcaccaaacaggagccaccaaaacctttaagatttcttcctggcgtgttgattggctgggagaatcaacctactactctggaattagcaaataaacctcttcctgtggatgatatacttcaaagccttttgggcaccactggtcaagtatatgaccaggcccagtcagtgatggaacaaaacactgttaaagaaattccatttttaaatgagcagaccaactcaaaaatagagaaaacagataatgtggaagtaactgatggtgaaaacaaggagataaaagttaaagtagataatatttcagaatctacagataagtcagcagaaatagaaacatcagtagtagggtcctcttccatttctgcagggtctttgacgagtcttagtctcagaggtaagccaccagatgtttctacagaagcatttttaacaaatttatcaattcagtcaaaacaagaggaaactgtggagagtaaagagaaaac

SEQ ID NO: 164798 - DNA, 1086 bp, Homo sapiens
  Payload ID: 12459
  Gene Symbol: PHF5A
  Gene Name: PHD finger protein 5A
  Uniprot ID: Q7RTV0
  ENST ID: ENST00000216252
  CDS Start-End: 73-405
ggcaggaacaatgggggttaaaggtcggacggaagttcccgaagcttccggtggccggcttagttaggagctatggctaaacatcatcctgatttgatcttttgccgcaagcaggctggtgttgccatcggaagactgtgtgaaaaatgtgatggcaagtgtgtgatttgtgactcctatgtgcgtccctgcactctggtgcgcatatgtgatgagtgtaactatggatcttaccaggggcgctgtgtgatctgtggaggacctggggtctctgatgcctattattgtaaggagtgcaccatccaggagaaggacagagatggctgcccaaagattgtcaatctggggagctctaagacagacctcttctatgaacgcaaaaaatacggcttcaagaagaggtgattggtgggtggccccttcctccccccaacatcagtctgctgcagctgccagaaaacatgcctactactaccagcagaaagggagcagagcccagagcatcaccaggagtgcctgctagtgtactggcagcttgccaccccctcctctcccttcacccagacacgtggtagggatggaaaaggattcttcacagagcactctggcacaccatatcggagaaaacttgatagattagttaatggtttttcttgaattcgagaagcaaagatctgttctccatattggtatgttctccctcaaccaagatcttctaaaaagaaataatattttagtcttctgcttgaggaactgactgtgaagcgacgcccagtgaaaaacatgttcttgcagcagctctggtggcagctgtccttgaggaacctttggtgtgtggtgggaagctatcagaacaagaaatgtaggcatttcccgttttttttggggggggggtgggggggcagggctctgccctcttgaaaggcatttacttgtttaacacttgtccagctacagtggggtacagtagctggctattcacaggcatcatcatagcccactagtctcatattattttccttttgagaaattggaaactctttctgttgctattatattaataaagttggtgtttattttctggta

SEQ ID NO: 164799 - DNA, 4759 bp, Homo sapiens
  Payload ID: 12460
  Gene Symbol: PHF6
  Gene Name: PHD finger protein 6
  Uniprot ID: Q8IWS0
  ENST ID: ENST00000332070
  CDS Start-End: 203-1300
aagggcgctccgcgagcccgtctctcctcgaatgaaaggaaacaacctccggcgacagagccccgctctcaggcactgctggagaaccgagaccgacttctttctctttaccctcattggcgcttctctcctgcagtccgcctctgggccctgccgcatttcttgagacttaaagtggcattctaaaggcaatttaaaaatcatgtcaagctcagttgaacagaaaaaagggcctacaagacagcgcaaatgtggcttttgtaagtcaaatagagacaaggaatgtggacagttactaatatctgaaaaccagaaggtggcagcgcaccataagtgcatgctcttttcatctgctttggtatcatcacactctgataatgaaagtcttggtggattttctattgaagatgtccaaaaggaaattaaaagaggcacgaagctgatgtgttctttgtgccattgtcctggagcaacaattggttgtgatgtgaaaacatgtcacaggacataccactaccactgtgcattgcatgataaagctcaaatacgagagaaaccttcacaaggaatttacatggtctattgccgaaaacacaagaaaactgcacataactccgaagctgatttagaagaaagttttaatgaacatgaactggagccctcatcacctaaaagtaaaaagaaaagtcgcaaaggaaggccaagaaaaactaattttaaagggctgtcagaagataccaggtccacatcctcccatggaacagatgaaatggaaagtagttcctatagagataggtctccacacagaagcagccctagtgacaccaggcctaaatgtggattttgccatgtaggggaggaagaaaatgaagcacgaggaaaactgcatatatttaatgccaagaaggcagctgcccattataagtgcatgttgttttcttctggcacagtccagctcacaacaacatcaagagcagaatttggagactttgatattaaaactgtacttcaggagattaaacgaggaaaaagaatgaaatgtacactttgcagtcagcctggtgctactattggatgtgaaataaaagcctgtgttaagacttaccattaccactgtggagtacaagacaaagctaaatacattgaaaatatgtcacgaggaatttacaaactatactgtaaaaatcatagtggaaatgatgagagagatgaagaagatgaggaacgagagagtaaaagccgaggaaaagtagaaattgatcagcaacaactaactcagcagcaacttaatggaaactaggtatgaaagttaattatatgggatctgttgtcaggatacaatacacactgatatatacatgttgaagtaatggtatgcagtaagattttttttaatcctattatgtttagttaagagcatgttactaaaatgctgaggattttgtaggcttgcatagtagttgttttttaactagctgattttgtaaccataaaaacaagctatctgctttatcaataagtgtagttgtaatgtcaaatcaataagatattcacactcctcaataacattatattgattgtgttcccctcaagcatcatattttacatttttttatcatcttttaaacaggttcatgggacagagttagaaaactgggaatgaataagacatccataactactattcttttttcactgttttctaaaatcaaaaagggtttgtaactttttactgcccaactcttagatccttcattgaactgcctaaaaatgtcttgtttgttttatgagccctcactagaaggctgagtttgacatgttgatattacgtagctatagtttgcagtttctgggaagcaattgaaacactattaaccctgtgtatagtgtcaacagttaaagcagacgaaacgaagtaagctatatttctggactgaacaaagctctgctgtttagagcatttaagtttgtttagtggatccatactcaaaggaaagcataagcaaattttcctttacaatgcaaacatgccactggtggcagcacatggtaatttgtggatttttttttcatactcaagtaatggaggctagaaatgaagagaaccttctttttctcttgactttgacagcacatgctaaaaatctcttccaagaagtatgctaaagcttttcatttggttcctgttaaagttgttctcactgaccagcatggactcaggcaactggtaatgataagctatgagctccagtgcttttgccaaaattctcttgacagcacacctcctctctttccatgttatacaaaggacttctggcaaaatgattgagtccttcaagtttaaactaacatttggcaacagcaaattaaacgtttttaagatgtaaagaaagggttaccgcttgctaaggacttcagacaccatgtccgaaacctgttcctctcaagtgccctgttgtgtggaacacttcacatattggcgcacagtacgtaaggaggtctcatgtgctgtaggagtaaaaaagtctttgcataaaacagtatttatttttacttttgtgaccactattttagaaactttatttaatattttaatgttttcagtcattgctttggttatctataaaataggcttttgtgccctacttttcttcttgtagggcttggtggtgttttatcgattgtcagaattgtttttgaaagcctaagaacccagctttttagaaaggattttcacactggcatttctaggtagtgatattttcttccacttacctgctgaagcacatttatgcatttctttatggcaaaaccaaataactttagttgtggtctgcctgatactaccatagcacctcagtaccaaggggagggattttgactagttgaattattaagccaccacaataaagcagatttttaaataagaaataataatgttaacttgactgtacattgagatattctgcagctgatagagcagcattttaaaaatgtaacaggtggaaaattacactgtgcttaatgactgatttttttttaaactgcgagtcccttaagatcacgtttgtcaagtgtgtattcacacatttacttaaatcaagggactcaatgcttgcttttattttaaccatcttttactatttttagaaggaaactagctttagtagtgggttgccctgtatgttttctctttttgctcttaatatgccattgggtttttgtgtgtatgtgattttcaaaattcatgacttgaagtgcaaggacagatctagatgtttgtttaccaagctatgtgacttctcccaaaggatctgtactttctttccttacaacagcttgaaaatcattattttaaaatccttaaatcactgtgtctagatcattttttacattgtgtgccatagacttacccatgggacaacagagctccttcatttttggacaactactgtaatcattttttttttaggaaaaatggaaggtgccgggggtaatcatggccagtcaataattatataaaggagttcaaatactatagctgtcagttgatgaatttgttatgtagtaaaatgtatgactttgtatgggtttcttcagccctttttctgccactagcaaccagaatagcactttaccttttggttggctagataagtggctgactacctgtttttctcactgtggtgtgattggctaaacaatctcgcattaaaaattcaaatgtaaattgaattcacatgaaaaatcatgtttggttgtaaacctccaatgttttgattctctaatcatgttttcgtcacatgctgagtaaaagtgccttacaatgtaaaaattgtacagtacttatgttcccaagtagcatcatcatcttctgggtagtaattacattgtggtattaatatttagaaaaatggacctcagcagtgtatttactgtacatctcttaagtccttaactgtagttttaataagcatgacattatttgataagtatataacatttacatcatttcaaaaaatactgccgttactgtcttttatgcatattttagcctgaaattttgaagcgtcttttttctttcttttttctttttttgttttgttttttgttattgatattaaacagtgtaatctttgcaagcgtatattgaagattattctggagcatttattgccttaccagaaatgttagtaggaaatgttctttagagtagaaagatagacttgagtttctatacttttaagaagagctctttgttcctgggggaggggggcagggggtgaattttactttcatctcaagttattaaaaacccacaactgaagtaaattttatttcaagaatcagcagttttagaatttcagatagtacttgctcagaagtacatgctactcaagatattaagagataacaagatctgtagatctgctattgaatcagaatctgtgtacttgaacaaatgtgtgaatctcaaatatctcaaagcaaaagaaaaagtgttctagagtgttgttgcttttttaaaaaaagcgctgaagttagaccaaggtatacagttttgttctaacagacatttaggttaattgtaaagataaggaatgcattatgggtcaaaaatcaaacattcctctcatgttatgtatattttgttcctgttatattggctttattttcaaaattgtagtttgtagtattagtttccttttattggtattcttgcatatactattcattcaataaatgacttatgactttc

SEQ ID NO: 164800 - DNA, 4186 bp, Homo sapiens
  Payload ID: 12460
  Gene Symbol: PHF6
  Gene Name: PHD finger protein 6
  ENST ID: ENST00000370799
  CDS Start-End: 195-1169
tccgcgagcccgtctctcctcgaatgaaaggaaacaacctccggcgacagagccccgctctcaggcactgctggagaaccgagaccgacttctttctctttaccctcattggcgcttctctcctgcagtccgcctctgggccctgccgcatttcttgagacttaaagtggcattctaaaggcaatttaaaaatcatgtcaagctcagttgaacagaaaaaagggcctacaagacagcgcaaatgtggcttttgtaagtcaaatagagacaaggaatgtggacagttactaatatctgaaaaccagaaggtggcagcgcaccataagtgcatgctcttttcatctgctttggtatcatcacactctgataatgaaagtcttggtggattttctattgaagatgtccaaaaggaaattaaaagaggcacgaagctgatgtgttctttgtgccattgtcctggagcaacaattggttgtgatgtgaaaacatgtcacaggacataccactaccactgtgcattgcatgataaagctcaaatacgagagaaaccttcacaaggaatttacatggtctattgccgaaaacacaagaaaactgcacataactccgaagcagctgatttagaagaaagttttaatgaacatgaactggagccctcatcacctaaaagtaaaaagaaaagtcgcaaaggaaggccaagaaaaactaattttaaagggctgtcagaagataccaggtccacatcctcccatggaacagatgaaatggaaagtagttcctatagagataggtctccacacagaagcagccctagtgacaccaggcctaaatgtggattttgccatgtaggggaggaagaaaatgaagcacgaggaaaactgcatatatttaatgccaagaaggcagctgcccattataagtgcatgttgttttcttctggcacagtccagctcacaacaacatcaagagcagaatttggagactttgatattaaaactgtacttcaggagattaaacgaggaaaaagaatgaaatgtacactttgcagtcagcctggtgctactattggatgtgaaataaaagcctgtgttaagacttaccattaccactgtggagtacaagacaaagctaaatacattgaaaatatgtcacgaggaatttacaagtaagaaaacaacagttgtctatttccctaaacatgttagtaaccgtccttaaatagatgacattagtttactcagtctctgttcttaaatggtgtttagttaagtatagaatactgagcacattatgtaaggaatgagtactacaattggcattttcctctgactacatatccctggattagcattcatccatccaatattagttaggcttcctatgtgccagccattgtgcttgaagctgggcatatgccagtgatcaaaactacatacactgggccgggtgcggtggctcacatctgtaatcccagcactttgggaggccgaggcgggtgaatcacctgaggtcagaagttcgagaccagcctgaccaacatggtgaaaccccgtctctactaaaatacaaaaattacccaggtgtggtggcaggcacctgtaatcccagctactcgggaggctgaggcaggagaatcgcttgaacccaggaggcagaggttgcagtgagccaagattgcgccattgcactccagcctgagcaacaagagtgaaattccatctcaaacaaacaaaaaaaaaacactacatatactctcctcatgaagcttacagtctattgggagagacctattatttaagtggccaaatatgcaattacaacatagcagcgtaagtgttctaaagaagttacaaagtgttatgagagcgtataagaaggaagagctaacctagtctgtagtggggagtatttaaaatgttctgaaggaaatagtgctcagctttaagctgagatattaaggacaaaggtgagccttggttgggggaggtattctgggcagagagaagagcatatgcaagagccccgggtgagacagaagcagaggtggaaatggggagatgtgttaggaggctagtgctggtggtccaggtgagaattattggtagcttagaataggatatggtagacagaaggcaaaagattctcttgagaagatggtgaaaaagtaaagtatgaagatttgggattgggggtcaccctcttttttatgggtcttccacttacctgtgctgccttgtgctaggtggtgttaatgtatatctgtaatggttccatttgtttaatcgactggagtataagttggtagggactcttgaagttttgatttgccatccagagttgtaaagcacttccttactctcacatgcctagaatgcaataaaccaatgacttccgggtctagtattctgtgtaaaagacaatgtacacaagcagtcaccaagtcatttgggtgcctacataaggcgctatgctgtataataaaatttgccaaattctgtttaataataaaggcacaaatgttttcaagtgagttctataaagcctttaaggaacaaataatcccaatgttatttaagaggtccagcacatagcaagagatggaaaacttattgattcattctgtaaagcttacataactgtggtaccaaacctaacaaagatacgttaaaagaaaaacaaacaaactgtagaccaatctccccttttttttttttttttactttgagacaggatctgactctgttgtccaggctggagtgcagtagtgtgatcatgactcactgcagccttgaccttctgccctcacgtgatcctcccaactcagcctcccgagtagctgggactataggcgcatgccatcatgcccagctaattttttttgttttgttttttgaggaggaggaagggttttgttttgttgcccagactggtctcaaactcctgggctcaagcgttctccctgcctcagtcttctaaagtgctaggattacaggcatgagccatgcccagccacaatctcacttttataaatatacaaaaattctaaataaaatattagtaaatcaaatccagctctgtattctaagaattgaaagactgttcaggctgggcacagtggctcacacttataatctcaacactttgggaggcttaggtgggaggattgcttgaggccaggagttccagatcagtgtgggcaacaaagcgagactctcatctctatataattttaaaaatagaaagaaaaaagactgttcaaaattaggaaatatattaatataatttattagaattagtagagtaaataatcttatcaccttccttatagatggtgaaaagacatttgataacattcaacatcaatttctgaattttaaagtaacgagtgctcttggtaagctaggaatcttaataggtgtttatgagaaaaacaacagcaaataacttatttattattaaagtgaaggagcaatggttcttaaccaggagtgagcctcagaatcactgtggggtggataaggccctcttttaaaatgttcatgtctaagccctacctgtagagatttaaatttagtaggtctgggttggtgcccaaaccatgcacttttctgactccccaggtgattcttatgttcccctctaattgagaaccattagactatactttaattcagattaggaagaagacaaggatgccaactactagcatgacttttaacattcttctagagggttaagctgatgcaagacaaaaagaaagaggcccagtgcattgactcacgtctataatcccacacttgggaggccaaagcgagaggattgcttgaggccaggaattcgagaccaacctgggcaacatagtgagaccccatctctacacaacatttaaaaattagccaggcaaagtggcacacgcctgtagccccagctatacaggaggcccagactggaggattgcctgagccctggaggtagagaccagcctgggcaacatagtgagaccctgtctcaatttaaaaaataaaagaaggccgggcgcagtggctcacgcctgtaatctcaacactttgggaggccgaggctggcagatcacgaggtcaggagtttgagaccagcttcgagatcgccccactgcactccagcctgggcgacagagcgaaactctgtctcaaaaaaaaaaaaaaaa

SEQ ID NO: 164801 - DNA, 1150 bp, Homo sapiens
  Payload ID: 12460
  Gene Symbol: PHF6
  Gene Name: PHD finger protein 6
  Uniprot ID: Q8IWS0
  ENST ID: ENST00000370800
  CDS Start-End: 142-1080
cccgctctcaggcactgctggagaaccgagaccgacttctttctctttaccctcattggcgcttctctcctgcagtccgcctctgggccctgccgcatttcttgagacttaaagtggcattctaaaggcaatttaaaaatcatgtcaagctcagttgaacagaaaaaagggcctacaagacagcgcaaatgtggcttttgtaagtcaaatagagacaaggaatgtggacagttactaatatctgaaaaccagaaggtggcagcgcaccataagtgcatgctcttttcatctgctttggtatcatcacactctgataatgaaagtcttggtggattttctattgaagatgtccaaaaggaaattaaaagaggcacgaagctgatgtgttctttgtgccattgtcctggagcaacaattggttgtgatgtgaaaacatgtcacaggacataccactaccactgtgcattgcatgataaagctcaaatacgagagaaaccttcacaaggaatttacatggtctattgccgaaaacacaagaaaactgcacataactccgaagcagctgatttagaagaaagttttaatgaacatgaactggagccctcatcacctaaaagtaaaaagaaaagtcgcaaaggaaggccaagaaaaactaattttaaagggctgtcagaagataccaggtccacatcctcccatggaacagatgaaatggaaagtagttcctatagagataggtctccacacagaagcagccctagtgacaccaggcctaaatgtggattttgccatgtaggggaggaagaaaatgaagcacgaggaaaactgcatatatttaatgccaagaaggcagctgcccattataagtgcatgttgttttcttctggcacagtccagctcacaacaacatcaagagcagaatttggagactttgatattaaaactgtacttcaggagattaaacgaggaaaaagaatggtctgtagtttttatatttgttatgcaacattacacttgatttgctgctttaaatttagagtacatcccaaatttatccagtcatcagaaaatttaaagtagttcgtatgttaaagcaaagtatatatttgacttatttgtaatataataaaggatgctgatgttactgaaa

SEQ ID NO: 164802 - DNA, 4489 bp, Homo sapiens
  Payload ID: 12460
  Gene Symbol: PHF6
  Gene Name: PHD finger protein 6
  Uniprot ID: Q8IWS0
  ENST ID: ENST00000370803
  CDS Start-End: 262-1359
cggcgcgctcgggacgtatcaacgctctgtgggtcgtgtgcgtgcgaggggggcgacgtaagggcgctccgcgagcccgtctctcctcgaatgaaaggaaacaacctccggcgacagagccccgctctcaggcactgctggagaaccgagaccgacttctttctctttaccctcattggcgcttctctcctgcagtccgcctctgggccctgccgcatttcttgagacttaaagtggcattctaaaggcaatttaaaaatcatgtcaagctcagttgaacagaaaaaagggcctacaagacagcgcaaatgtggcttttgtaagtcaaatagagacaaggaatgtggacagttactaatatctgaaaaccagaaggtggcagcgcaccataagtgcatgctcttttcatctgctttggtatcatcacactctgataatgaaagtcttggtggattttctattgaagatgtccaaaaggaaattaaaagaggcacgaagctgatgtgttctttgtgccattgtcctggagcaacaattggttgtgatgtgaaaacatgtcacaggacataccactaccactgtgcattgcatgataaagctcaaatacgagagaaaccttcacaaggaatttacatggtctattgccgaaaacacaagaaaactgcacataactccgaagctgatttagaagaaagttttaatgaacatgaactggagccctcatcacctaaaagtaaaaagaaaagtcgcaaaggaaggccaagaaaaactaattttaaagggctgtcagaagataccaggtccacatcctcccatggaacagatgaaatggaaagtagttcctatagagataggtctccacacagaagcagccctagtgacaccaggcctaaatgtggattttgccatgtaggggaggaagaaaatgaagcacgaggaaaactgcatatatttaatgccaagaaggcagctgcccattataagtgcatgttgttttcttctggcacagtccagctcacaacaacatcaagagcagaatttggagactttgatattaaaactgtacttcaggagattaaacgaggaaaaagaatgaaatgtacactttgcagtcagcctggtgctactattggatgtgaaataaaagcctgtgttaagacttaccattaccactgtggagtacaagacaaagctaaatacattgaaaatatgtcacgaggaatttacaaactatactgtaaaaatcatagtggaaatgatgagagagatgaagaagatgaggaacgagagagtaaaagccgaggaaaagtagaaattgatcagcaacaactaactcagcagcaacttaatggaaactaggttcatgggacagagttagaaaactgggaatgaataagacatccataactactattcttttttcactgttttctaaaatcaaaaagggtttgtaactttttactgcccaactcttagatccttcattgaactgcctaaaaatgtcttgtttgttttatgagccctcactagaaggctgagtttgacatgttgatattacgtagctatagtttgcagtttctgggaagcaattgaaacactattaaccctgtgtatagtgtcaacagttaaagcagacgaaacgaagtaagctatatttctggactgaacaaagctctgctgtttagagcatttaagtttgtttagtggatccatactcaaaggaaagcataagcaaattttcctttacaatgcaaacatgccactggtggcagcacatggtaatttgtggatttttttttcatactcaagtaatggaggctagaaatgaagagaaccttctttttctcttgactttgacagcacatgctaaaaatctcttccaagaagtatgctaaagcttttcatttggttcctgttaaagttgttctcactgaccagcatggactcaggcaactggtaatgataagctatgagctccagtgcttttgccaaaattctcttgacagcacacctcctctctttccatgttatacaaaggacttctggcaaaatgattgagtccttcaagtttaaactaacatttggcaacagcaaattaaacgtttttaagatgtaaagaaagggttaccgcttgctaaggacttcagacaccatgtccgaaacctgttcctctcaagtgccctgttgtgtggaacacttcacatattggcgcacagtacgtaaggaggtctcatgtgctgtaggagtaaaaaagtctttgcataaaacagtatttatttttacttttgtgaccactattttagaaactttatttaatattttaatgttttcagtcattgctttggttatctataaaataggcttttgtgccctacttttcttcttgtagggcttggtggtgttttatcgattgtcagaattgtttttgaaagcctaagaacccagctttttagaaaggattttcacactggcatttctaggtagtgatattttcttccacttacctgctgaagcacatttatgcatttctttatggcaaaaccaaataactttagttgtggtctgcctgatactaccatagcacctcagtaccaaggggagggattttgactagttgaattattaagccaccacaataaagcagatttttaaataagaaataataatgttaacttgactgtacattgagatattctgcagctgatagagcagcattttaaaaatgtaacaggtggaaaattacactgtgcttaatgactgatttttttttaaactgcgagtcccttaagatcacgtttgtcaagtgtgtattcacacatttacttaaatcaagggactcaatgcttgcttttattttaaccatcttttactatttttagaaggaaactagctttagtagtgggttgccctgtatgttttctctttttgctcttaatatgccattgggtttttgtgtgtatgtgattttcaaaattcatgacttgaagtgcaaggacagatctagatgtttgtttaccaagctatgtgacttctcccaaaggatctgtactttctttccttacaacagcttgaaaatcattattttaaaatccttaaatcactgtgtctagatcattttttacattgtgtgccatagacttacccatgggacaacagagctccttcatttttggacaactactgtaatcattttttttttaggaaaaatggaaggtgccgggggtaatcatggccagtcaataattatataaaggagttcaaatactatagctgtcagttgatgaatttgttatgtagtaaaatgtatgactttgtatgggtttcttcagccctttttctgccactagcaaccagaatagcactttaccttttggttggctagataagtggctgactacctgtttttctcactgtggtgtgattggctaaacaatctcgcattaaaaattcaaatgtaaattgaattcacatgaaaaatcatgtttggttgtaaacctccaatgttttgattctctaatcatgttttcgtcacatgctgagtaaaagtgccttacaatgtaaaaattgtacagtacttatgttcccaagtagcatcatcatcttctgggtagtaattacattgtggtattaatatttagaaaaatggacctcagcagtgtatttactgtacatctcttaagtccttaactgtagttttaataagcatgacattatttgataagtatataacatttacatcatttcaaaaaatactgccgttactgtcttttatgcatattttagcctgaaattttgaagcgtcttttttctttcttttttctttttttgttttgttttttgttattgatattaaacagtgtaatctttgcaagcgtatattgaagattattctggagcatttattgccttaccagaaatgttagtaggaaatgttctttagagtagaaagatagacttgagtttctatacttttaagaagagctctttgttcctgggggaggggggcagggggtgaattttactttcatctcaagttattaaaaacccacaactgaagtaaattttatttcaagaatcagcagttttagaatttcagatagtacttgctcagaagtacatgctactcaagatattaagagataacaagatctgtagatctgctattgaatcagaatctgtgtacttgaacaaatgtgtgaatctcaaatatctcaaagcaaaagaaaaagtgttctagagtgttgttgcttttttaaaaaaagcgctgaagttagaccaaggtatacagttttgttctaacagacatttaggttaattgtaaagataaggaatgcattatgggtcaaaaatcaaacattcctctcatgttatgtatattttgttcctgttatattggctttattttcaaaattgtagtttgtagtattagtttccttttattggtattcttgcatatactattcattcaataaatgacttatgactttca

SEQ ID NO: 164803 - DNA, 4434 bp, Homo sapiens
  Payload ID: 12460
  Gene Symbol: PHF6
  Gene Name: PHD finger protein 6
  ENST ID: ENST00000625464
  CDS Start-End: 203-1303
aagggcgctccgcgagcccgtctctcctcgaatgaaaggaaacaacctccggcgacagagccccgctctcaggcactgctggagaaccgagaccgacttctttctctttaccctcattggcgcttctctcctgcagtccgcctctgggccctgccgcatttcttgagacttaaagtggcattctaaaggcaatttaaaaatcatgtcaagctcagttgaacagaaaaaagggcctacaagacagcgcaaatgtggcttttgtaagtcaaatagagacaaggaatgtggacagttactaatatctgaaaaccagaaggtggcagcgcaccataagtgcatgctcttttcatctgctttggtatcatcacactctgataatgaaagtcttggtggattttctattgaagatgtccaaaaggaaattaaaagaggcacgaagctgatgtgttctttgtgccattgtcctggagcaacaattggttgtgatgtgaaaacatgtcacaggacataccactaccactgtgcattgcatgataaagctcaaatacgagagaaaccttcacaaggaatttacatggtctattgccgaaaacacaagaaaactgcacataactccgaagcagctgatttagaagaaagttttaatgaacatgaactggagccctcatcacctaaaagtaaaaagaaaagtcgcaaaggaaggccaagaaaaactaattttaaagggctgtcagaagataccaggtccacatcctcccatggaacagatgaaatggaaagtagttcctatagagataggtctccacacagaagcagccctagtgacaccaggcctaaatgtggattttgccatgtaggggaggaagaaaatgaagcacgaggaaaactgcatatatttaatgccaagaaggcagctgcccattataagtgcatgttgttttcttctggcacagtccagctcacaacaacatcaagagcagaatttggagactttgatattaaaactgtacttcaggagattaaacgaggaaaaagaatgaaatgtacactttgcagtcagcctggtgctactattggatgtgaaataaaagcctgtgttaagacttaccattaccactgtggagtacaagacaaagctaaatacattgaaaatatgtcacgaggaatttacaaactatactgtaaaaatcatagtggaaatgatgagagagatgaagaagatgaggaacgagagagtaaaagccgaggaaaagtagaaattgatcagcaacaactaactcagcagcaacttaatggaaactaggttcatgggacagagttagaaaactgggaatgaataagacatccataactactattcttttttcactgttttctaaaatcaaaaagggtttgtaactttttactgcccaactcttagatccttcattgaactgcctaaaaatgtcttgtttgttttatgagccctcactagaaggctgagtttgacatgttgatattacgtagctatagtttgcagtttctgggaagcaattgaaacactattaaccctgtgtatagtgtcaacagttaaagcagacgaaacgaagtaagctatatttctggactgaacaaagctctgctgtttagagcatttaagtttgtttagtggatccatactcaaaggaaagcataagcaaattttcctttacaatgcaaacatgccactggtggcagcacatggtaatttgtggatttttttttcatactcaagtaatggaggctagaaatgaagagaaccttctttttctcttgactttgacagcacatgctaaaaatctcttccaagaagtatgctaaagcttttcatttggttcctgttaaagttgttctcactgaccagcatggactcaggcaactggtaatgataagctatgagctccagtgcttttgccaaaattctcttgacagcacacctcctctctttccatgttatacaaaggacttctggcaaaatgattgagtccttcaagtttaaactaacatttggcaacagcaaattaaacgtttttaagatgtaaagaaagggttaccgcttgctaaggacttcagacaccatgtccgaaacctgttcctctcaagtgccctgttgtgtggaacacttcacatattggcgcacagtacgtaaggaggtctcatgtgctgtaggagtaaaaaagtctttgcataaaacagtatttatttttacttttgtgaccactattttagaaactttatttaatattttaatgttttcagtcattgctttggttatctataaaataggcttttgtgccctacttttcttcttgtagggcttggtggtgttttatcgattgtcagaattgtttttgaaagcctaagaacccagctttttagaaaggattttcacactggcatttctaggtagtgatattttcttccacttacctgctgaagcacatttatgcatttctttatggcaaaaccaaataactttagttgtggtctgcctgatactaccatagcacctcagtaccaaggggagggattttgactagttgaattattaagccaccacaataaagcagatttttaaataagaaataataatgttaacttgactgtacattgagatattctgcagctgatagagcagcattttaaaaatgtaacaggtggaaaattacactgtgcttaatgactgatttttttttaaactgcgagtcccttaagatcacgtttgtcaagtgtgtattcacacatttacttaaatcaagggactcaatgcttgcttttattttaaccatcttttactatttttagaaggaaactagctttagtagtgggttgccctgtatgttttctctttttgctcttaatatgccattgggtttttgtgtgtatgtgattttcaaaattcatgacttgaagtgcaaggacagatctagatgtttgtttaccaagctatgtgacttctcccaaaggatctgtactttctttccttacaacagcttgaaaatcattattttaaaatccttaaatcactgtgtctagatcattttttacattgtgtgccatagacttacccatgggacaacagagctccttcatttttggacaactactgtaatcattttttttttaggaaaaatggaaggtgccgggggtaatcatggccagtcaataattatataaaggagttcaaatactatagctgtcagttgatgaatttgttatgtagtaaaatgtatgactttgtatgggtttcttcagccctttttctgccactagcaaccagaatagcactttaccttttggttggctagataagtggctgactacctgtttttctcactgtggtgtgattggctaaacaatctcgcattaaaaattcaaatgtaaattgaattcacatgaaaaatcatgtttggttgtaaacctccaatgttttgattctctaatcatgttttcgtcacatgctgagtaaaagtgccttacaatgtaaaaattgtacagtacttatgttcccaagtagcatcatcatcttctgggtagtaattacattgtggtattaatatttagaaaaatggacctcagcagtgtatttactgtacatctcttaagtccttaactgtagttttaataagcatgacattatttgataagtatataacatttacatcatttcaaaaaatactgccgttactgtcttttatgcatattttagcctgaaattttgaagcgtcttttttctttcttttttctttttttgttttgttttttgttattgatattaaacagtgtaatctttgcaagcgtatattgaagattattctggagcatttattgccttaccagaaatgttagtaggaaatgttctttagagtagaaagatagacttgagtttctatacttttaagaagagctctttgttcctgggggaggggggcagggggtgaattttactttcatctcaagttattaaaaacccacaactgaagtaaattttatttcaagaatcagcagttttagaatttcagatagtacttgctcagaagtacatgctactcaagatattaagagataacaagatctgtagatctgctattgaatcagaatctgtgtacttgaacaaatgtgtgaatctcaaatatctcaaagcaaaagaaaaagtgttctagagtgttgttgcttttttaaaaaaagcgctgaagttagaccaaggtatacagttttgttctaacagacatttaggttaattgtaaagataaggaatgcattatgggtcaaaaatcaaacattcctctcatgttatgtatattttgttcctgttatattggctttattttcaaaattgtagtttgtagtattagtttccttttattggtattcttgcatatactattcattcaataaatgacttatgactttcat

SEQ ID NO: 164804 - DNA, 1472 bp, Homo sapiens
  Payload ID: 12461
  Gene Symbol: PHF7
  Gene Name: PHD finger protein 7
  Uniprot ID: Q9BWX1
  ENST ID: ENST00000347025
  CDS Start-End: 121-1149
cctactcaaggaacgtcttggcccagcgatgcaaagaactgaagtttcaagctggaagagcctgtattgtcctcacaatagtatagaagaattcaagagaggagagagagacagcaccgaatgaagactgtaaaagaaaagaaggaatgccagagattgagaaaatctgccaagactaggagggtaacccagaggaaaccgtcttcagggcctgtttgctggctatgccttcgagaacctggggatcccgaaaaattaggggaatttcttcagaaagacaatatcagcgtgcattatttctgtcttatcttatctagtaagctgcctcagaggggccagtccaacagaggcttccatggatttctgcctgaagacatcaaaaaggaggcagcccgggcttctaggaagatctgctttgtgtgcaagaaaaagggagctgctatcaactgccagaaggatcagtgcctcagaaacttccatctgccttgtggccaagaaaggggttgcctttcacaattttttggagagtacaaatcattttgtgacaaacatcgcccaacacagaacatccaacatgggcatgtgggggaggaaagctgcatcttatgttgtgaagacttatcccaacagagtgttgagaacatccagagcccgtgttgtagtcaagccatctaccaccgcaagtgcatacagaaatatgcccacacatcagcaaagcatttcttcaaatgtccacagtgtaacaatcgaaaagagtttcctcaagaaatgctgagaatgggaattcatattccagacaggaggtggtgcctcattctgtgtgctacatgcggatcccacggaacccacagggactgctcctctcttagatctaacagtaagaaatgggagtgtgaggagtgttcacctgctgcagccacagactacatacctgaaaactcaggggacatcccttgctgcagcagcaccttccaccctgaggaacatttctgcagagacaacaccttggaagagaatccgggcctttcttggactgattggccagaaccttccttattagaaaagccagagtcctctcgtggcaggaggagctactcctggaggtccaagggtgtcagaatcactaacagctgcaaaaaatccaagtaacaccttctgagtagctgctgtcccacacaatagggtatgaagctgcgctcctccatcgggtttggggagggagcactctgggactgtgagacaaggaagcagggccagcagtgagactatgagccaagcaaagagaagtctcagtggagcatgaggagggagcagtccagatgccaacaaggaaatgcgtttatggctacaagagtgcctctgctttctcctcctctcctcccaccaaggattcttccaccttaatcttgttttcatatgcctcttcttacttcacccatgtttgttgttatgcaaataaaggttttctctcc

SEQ ID NO: 164805 - DNA, 2130 bp, Homo sapiens
  Payload ID: 12461
  Gene Symbol: PHF7
  Gene Name: PHD finger protein 7
  Uniprot ID: Q9BWX1
  ENST ID: ENST00000327906
  CDS Start-End: 661-1806
cgcagtcttcgccggcgcagtcaccgcgcagggcggccgcccggaggtagctaccacggcctgtgtcaacgactaaagctccagtacagcggcgccctcagacagctgggagggtggctctggccgggagcggcggccggtgagctaccgcgaggaggagcggcggaggcgacctcggcccggccctgcactggccgcccggcaggcgcgacatgagcctggtctggcatccgcgggatgctccttaagccccttctccggctgttaacctccggggaacggttgtgaccacaccgacacgtattttacagataaatcattcttgcggcggcgggtcgaacacgtttatttattttttattttctcaacaagcttttacccagcacctgtccagtgaaacaacttgataatcgtttcgaggggcgtccgccgggttaggaagccactgcctggcagcttgtggaagcctcatttgcaaagccacccctcagatgttttgaagatcgtgacgtcttgtaactagcagtgtgtgcacagaatcctactcaaggaacgtcttggcccagcgatgcaaagaactgaagtttcaagctggaagagcctgtattgtcctcacaatagtatagaagaattcaagagaggagagagagacagcaccgaatgaagactgtaaaagaaaagaaggaatgccagagattgagaaaatctgccaagactaggagggtaacccagaggaaaccgtcttcagggcctgtttgctggctatgccttcgagaacctggggatcccgaaaaattaggggaatttcttcagaaagacaatatcagcgtgcattatttctgtcttatcttatctagtaagctgcctcagaggggccagtccaacagaggcttccatggatttctgcctgaagacatcaaaaaggaggcagcccgggcttctaggaagatctgctttgtgtgcaagaaaaagggagctgctatcaactgccagaaggatcagtgcctcagaaacttccatctgccttgtggccaagaaaggggttgcctttcacaattttttggagagtacaaatcattttgtgacaaacatcgcccaacacagaacatccaacatgggcatgtgggggaggaaagctgcatcttatgttgtgaagacttatcccaacagagtgttgagaacatccagagcccgtgttgtagtcaagccatctaccaccgcaagtgcatacagaaatatgcccacacatcagcaaagcatttcttcaaatgtccacagtgtaacaatcgaaaagagtttcctcaagaaatgctgagaatgggaattcatattccagacagagatgctgcctgggaactcgagccaggggctttctcagacttatatcagcgctatcagcactgtgatgcccccatctgtctgtatgaacaaggcagagacagctttgaggatgaagggaggtggtgcctcattctgtgtgctacatgcggatcccacggaacccacagggactgctcctctcttagatctaacagtaagaaatgggagtgtgaggagtgttcacctgctgcagccacagactacatacctgaaaactcaggggacatcccttgctgcagcagcaccttccaccctgaggaacatttctgcagagacaacaccttggaagagaatccgggcctttcttggactgattggccagaaccttccttattagaaaagccagagtcctctcgtggcaggaggagctactcctggaggtccaagggtgtcagaatcactaacagctgcaaaaaatccaagtaacaccttctgagtagctgctgtcccacacaatagggtatgaagctgcgctcctccatcgggtttggggagggagcactctgggactgtgagacaaggaagcagggccagcagtgagactatgagccaagcaaagagaagtctcagtggagcatgaggagggagcagtccagatgccaacaaggaaatgcgtttatggctacaagagtgcctctgctttctcctcctctcctcccaccaaggattcttccaccttaatcttgttttcatatgcctcttcttacttcacccatgtttgttgttatgcaaataaaggttttctctcca

SEQ ID NO: 164806 - DNA, 1303 bp, Homo sapiens
  Payload ID: 12461
  Gene Symbol: PHF7
  Gene Name: PHD finger protein 7
  ENST ID: ENST00000461861
  CDS Start-End: 1-980
gggatcccgaaaaattaggggaatttcttcagaaagacaatatcagcgtgcattatttctgtcttatcttatctagtaagctgcctcagaggggccagtccaacagaggcttccatggatttctgcctgaagacatcaaaaaggaggcagcccgggcttctaggaagatctgctttgtgtgcaagaaaaagggagctgctatcaactgccagaaggatcagtgcctcagaaacttccatctgccttgtggccaagaaaggggttgcctttcacaattttttggagagtacaaatcattttgtgacaaacatcgcccaacacagaacatccaacatgggcatgtgggggaggaaagctgcatcttatgttgtgaagacttatcccaacagagtgttgagaacatccagagcccgtgttgtagtcaagccatctaccaccgcaagtgcatacagaaatatgcccacacatcagcaaagcatttcttcaaatgtccacagtgtaacaatcgaaaagagtttcctcaagaaatgctgagaatgggaattcatattccagacagagatgctgcctgggaactcgagccaggggctttctcagacttatatcagcgctatcagcactgtgatgcccccatctgtctgtatgaacaaggcagagacagctttgaggatgaagggaggtggtgcctcattctgtgtgctacatgcggatcccacggaacccacagggactgctcctctcttagatctaacaactacatacctgaaaactcaggggacatcccttgctgcagcagcaccttccaccctgaggaacatttctgcagagacaacaccttggaagagaatccgggcctttcttggactgattggccagaaccttccttattagaaaagccagagtcctctcgtggcaggaggagctactcctggaggtccaagggtgtcagaatcactaacagctgcaaaaaatccaagtaacaccttctgagtagctgctgtcccacacaatagggtatgaagctgcgctcctccatcgggtttggggagggagcactctgggactgtgagacaaggaagcagggccagcagtgagactatgagccaagcaaagagaagtctcagtggagcatgaggagggagcagtccagatgccaacaaggaaatgcgtttatggctacaagagtgcctctgctttctcctcctctcctcccaccaaggattcttccaccttaatcttgttttcatatgcctcttcttacttcacccatgtttgttgttatgcaaataaaggttttctctcc

SEQ ID NO: 164807 - DNA, 494 bp, Homo sapiens
  Payload ID: 12461
  Gene Symbol: PHF7
  Gene Name: PHD finger protein 7
  ENST ID: ENST00000465863
  CDS Start-End: 1-191
cccaacagagtgttgagaacatccagagcccgtgttgtagtcaagccatctaccaccgcaagtgcatacagaaatatgcccacacatcagcaaagcatttcttcaaatgtccacagtgtaacaatcgaaaagagtttcctcaagaaatgctgagaatgggaattcatattccagacagactacatacctgaaaactcaggggacatcccttgctgcagcagcaccttccaccctgaggaacatttctgcagagacaacaccttggaagagaatccgggcctttcttggactgattggccagaaccttccttattagaaaagccagagtcctctcgtggcaggaggagctactcctggaggtccaagggtgtcagaatcactaacagctgcaaaaaatccaagtaacaccttctgagtagctgctgtcccacacaatagggtatgaagctgcgctcctccatcgggtttggggagggagcactctgggactgtga

SEQ ID NO: 164808 - DNA, 2106 bp, Homo sapiens
  Payload ID: 12461
  Gene Symbol: PHF7
  Gene Name: PHD finger protein 7
  ENST ID: ENST00000620464
  CDS Start-End: 757-1503
agcgcgcggccgttagcggtcggtttctactaacggtaggcgtcgccgcgattcccgaaggtcatagtccgcgtgacccacccccgtttgcgcgctcgcagtcttcgccggcgcagtcaccgcgcagggcggccgcccggaggtagctaccacggcctgtgtcaacgactaaagctccagtacagcggcgccctcagacagctgggagggtggctctggccgggagcggcggccggtgagctaccgcgaggaggagcggcggaggcgacctcggcccggccctgcactggccgcccggcaggcgcgacatgagcctggtctggcatccgcgggatgctccttaagccccttctccggctgttaacctccggggaacggttgtgaccacaccgacacgtattttacagataaatcattcttgcggcggcgggtcgaacacgtttatttattttttattttctcaacaagcttttacccagcacctgtccagtgaaacaacttgataatcgtttcgaggggcgtccgccgggttaggaagccactgcctggcagcttgtggaagcctcatttgcaaagccacccctcagatgttttgaagatcgtgacgtcttgtaactagcagtgtgtgcacagaatcctactcaaggaacgtcttggcccagcgatgcaaagaactgaagtttcaagctggaagagcctgtattgtcctcacaatagtatagaagaattcaagagaggagagagagacagcaccgaatgaagactgtaaaagaaaagaaggaatgccagagattgagaaaatctgccaagactaggagggtaacccagaggaaaccgtcttcagggcctgtttgctggctatgccttcgagaacctggggatcccgaaaaattaggggaatttcttcagaaagacaatatcagcgtgcattatttctgtcttatcttatctagtaagctgcctcagaggggccagtccaacagaggctccatggatttctgcctgaagacatcaaaaaggaggcagcccgggcttctaggaagatctgctttgtgtgcaagaaaaagggagctgctatcaactgccagaaggatcagtgcctcagaaacttccatctgccttgtggccaagaaaggggttgcctttcacaattttttggagagtacaaatcattttgtgacaaacatcgcccaacacagaacatccaacatgggcatgtgggggaggaaagctgcatcttatgttgtgaagacttatcccaacagagtgttgagaacatccagagcccgtgttgtagtcaagccatctaccaccgcaagtgcatacagaaatatgcccacacatcagcaaagcatttcttcaaatgtccacagtgtaacaatcgaaagagtttcctcaagaaatgctgagaatgggaattcatattccagacaggaggtggtgcctcattctgtgtgctacatgcggatcccacggaacccacagggactgctcctctcttagatctaacagtaagaaatgggagtgtgaggagtgttcacctgctgcagccacagactacatacctgaaaactcaggggacatcccttgctgcagcagcaccttccaccctgaggaacatttctgcagagacaacaccttggaagagaatccgggcctttcttggactgattggccagaaccttccttattagaaaagccagagtcctctcgtggcaggaggagctactcctggaggtccaagggtgtcagaatcactaacagctgcaaaaaatccaagtaacaccttctgagtagctgctgtcccacacaatagggtatgaagctgcgctcctccatcgggtttggggagggagcactctgggactgtgagacaaggaagcagggccagcagtgagactatgagccaagcaaagagaagtctcagtggagcatgaggagggagcagtccagatgccaacaaggaaatgcgtttatggctacaagagtgcctctgctttctcctcctctcctcccaccaaggattcttccaccttaatcttgttttcatatgcctcttcttacttcacccatgtttgttgttatgcaaataaaggttttctctcc

SEQ ID NO: 164809 - DNA, 1421 bp, Homo sapiens
  Payload ID: 12461
  Gene Symbol: PHF7
  Gene Name: PHD finger protein 7
  Uniprot ID: Q9BWX1
  ENST ID: ENST00000614886
  CDS Start-End: 70-1098
ctggaagagcctgtattgtcctcacaatagtatagaagaattcaagagaggagagagagacagcaccgaatgaagactgtaaaagaaaagaaggaatgccagagattgagaaaatctgccaagactaggagggtaacccagaggaaaccgtcttcagggcctgtttgctggctatgccttcgagaacctggggatcccgaaaaattaggggaatttcttcagaaagacaatatcagcgtgcattatttctgtcttatcttatctagtaagctgcctcagaggggccagtccaacagaggcttccatggatttctgcctgaagacatcaaaaaggaggcagcccgggcttctaggaagatctgctttgtgtgcaagaaaaagggagctgctatcaactgccagaaggatcagtgcctcagaaacttccatctgccttgtggccaagaaaggggttgcctttcacaattttttggagagtacaaatcattttgtgacaaacatcgcccaacacagaacatccaacatgggcatgtgggggaggaaagctgcatcttatgttgtgaagacttatcccaacagagtgttgagaacatccagagcccgtgttgtagtcaagccatctaccaccgcaagtgcatacagaaatatgcccacacatcagcaaagcatttcttcaaatgtccacagtgtaacaatcgaaaagagtttcctcaagaaatgctgagaatgggaattcatattccagacaggaggtggtgcctcattctgtgtgctacatgcggatcccacggaacccacagggactgctcctctcttagatctaacagtaagaaatgggagtgtgaggagtgttcacctgctgcagccacagactacatacctgaaaactcaggggacatcccttgctgcagcagcaccttccaccctgaggaacatttctgcagagacaacaccttggaagagaatccgggcctttcttggactgattggccagaaccttccttattagaaaagccagagtcctctcgtggcaggaggagctactcctggaggtccaagggtgtcagaatcactaacagctgcaaaaaatccaagtaacaccttctgagtagctgctgtcccacacaatagggtatgaagctgcgctcctccatcgggtttggggagggagcactctgggactgtgagacaaggaagcagggccagcagtgagactatgagccaagcaaagagaagtctcagtggagcatgaggagggagcagtccagatgccaacaaggaaatgcgtttatggctacaagagtgcctctgctttctcctcctctcctcccaccaaggattcttccaccttaatcttgttttcatatgcctcttcttacttcacccatgtttgttgttatgcaaataaaggttttctctcc

SEQ ID NO: 164810 - DNA, 1328 bp, Homo sapiens
  Payload ID: 12461
  Gene Symbol: PHF7
  Gene Name: PHD finger protein 7
  ENST ID: ENST00000615126
  CDS Start-End: 84-725
aaggaatgccagagattgagaaaatctgccaagactaggagggtaacccagaggaaaccgtcttcagggcctgtttgctggctatgcttcgagaacctggggatcccgaaaaattaggggaatttcttcagaaagacaatatcagcgtgcattatttctgtcttatcttatctagtaagctgcctcagaggggccagtccaacagaggctccatggatttctgcctgaagacatcaaaaaggaggcagcccgggcttctaggaagatctgctttgtgtgcaagaaaaagggagctgctatcaactgccagaaggatcagtgcctcagaaacttccatctgccttgtggccaagaaaggggttgcctttcacaattttttggagagtacaaatcattttgtgacaaacatcgcccaacacagaacatccaacatgggcatgtgggggaggaaagctgcatcttatgttgtgaagacttatcccaacagagtgttgagaacatccagagcccgtgttgtagtcaagccatctaccaccgcaagtgcatacagaaatatgcccacacatcagcaaagcatttcttcaaatgtccacagtgtaacaatcgaaagagtttcctcaagaaatgctgagaatgggaattcatattccagacaggaggtggtgcctcattctgtgtgctacatgcggatcccacggaacccacagggactgctcctctcttagatctaacagtaagaaatgggagtgtgaggagtgttcacctgctgcagccacagactacatacctgaaaactcaggggacatcccttgctgcagcagcaccttccaccctgaggaacatttctgcagagacaacaccttggaagagaatccgggcctttcttggactgattggccagaaccttccttattagaaaagccagagtcctctcgtggcaggaggagctactcctggaggtccaagggtgtcagaatcactaacagctgcaaaaaatccaagtaacaccttctgagtagctgctgtcccacacaatagggtatgaagctgcgctcctccatcgggtttggggagggagcactctgggactgtgagacaaggaagcagggccagcagtgagactatgagccaagcaaagagaagtctcagtggagcatgaggagggagcagtccagatgccaacaaggaaatgcgtttatggctacaagagtgcctctgctttctcctcctctcctcccaccaaggattcttccaccttaatcttgttttcatatgcctcttcttacttcacccatgtttgttgttatgcaaataaaggttttctctcc

SEQ ID NO: 164811 - DNA, 2921 bp, Homo sapiens
  Payload ID: 12462
  Gene Symbol: PHF8
  Gene Name: PHD finger protein 8
  Uniprot ID: Q9UPP1
  ENST ID: ENST00000322659
  CDS Start-End: 177-2813
ataatagagggagccctgtgaaacaggggtcagctaggggagggttcagtgagagatgaaagaagcttcccgaaaaggcttcagctatcgtccagagaggacgcgtgctgccgcctcccgcccctcttgacacgacgaacctggccggccgcagaacgctccagggccgagcgaagatggcctcggtgccggtgtattgcctctgccggctgccttacgatgtgacccgcttcatgatcgagtgtgacatgtgccaggactggtttcatggcagttgtgttggtgttgaagaggagaaggctgctgacattgacctctaccactgccccaactgtgaagtcttgcatgggccctccattatgaaaaaacgccgtggatcttcaaaggggcatgatacacacaaggggaaaccagtgaagaccgggagccctacgttcgtcagagagctccggagtaggacttttgacagctcagatgaagtgattctgaagcccactggaaatcaactgaccgtggaattcctggaagaaaatagcttcagtgtgcccatcctggtcctgaagaaggatgggttgggcatgacgctgccctcgccatcattcactgtgagggatgttgaacactatgttggttctgacaaagagattgatgtgattgatgtgacccgccaggctgactgcaagatgaagcttggtgattttgtgaaatactattacagcgggaagagggagaaagtcctcaatgtcattagtttggaattctctgataccagactttctaaccttgtggagacaccgaagattgttcgaaagctgtcatgggtcgaaaacttgtggccagaggaatgtgtctttgagagacccaatgtacagaagtactgcctcatgagtgtgcgagatagctatacagactttcacattgactttggtggcacctctgtctggtaccatgtactcaagggtgaaaagatcttctacctgatccgcccaacaaatgccaatctgactctctttgagtgctggagcagttcctctaatcagaatgagatgttctttggggaccaggtggacaagtgctacaagtgttccgtgaagcaaggacagacacttttcattcccacagggtggatccatgctgtgctgacgcctgtggactgccttgcctttggagggaacttcttacacagccttaacatcgagatgcagctcaaagcctatgagattgagaagcggctgagcacagcagacctcttcagattccccaactttgagaccatctgttggtatgtgggaaagcacatcctggacatctttcgcggtttgcgagagaacaggagacaccctgcctcctacctggtccatggtggcaaagccttgaacttggcctttagagcctggacaaggaaagaagctctgccagaccatgaggatgagatcccggagacagtgcgaaccgtacagctcattaaagatctggccagggagatccgcctggtggaagacatcttccaacagaacgttgggaagacgagcaatatctttgggctgcagaggatcttcccagccggctccattcccctaaccaggccagcccattccacttcagtgtccatgtccaggctgtcactgccctccaaaaatggttcaaagaagaaaggcctgaagcccaaggaactcttcaagaaggcagagcgaaagggcaaggagagttcagccttggggcctgctggccagttgagctataatctcatggacacatacagtcatcaggcactgaagacaggctctttccagaaagcaaagttcaacatcactggtgcctgcttgaatgactcagatgacgactcaccagacttggaccttgatggaaatgagagcccattggccctattgatgtctaacggcagtacgaaaagggtgaagagtttatccaaatctcggcgaaccaagatagcaaagaaggtagacaaggctaggctgatggcagaacaggtgatggaagacgaatttgacttggattcagatgatgagctgcagattgacgagagattgggaaaggagaaggcgaccctgataataagaccaaaatttccccggaaattgccccgtgcgaagccttgctctgaccccaaccgagttcgtgaaccaggagaagttgagtttgacattgaggaggactatacaacagatgaggacatggtggaaggggttgaaggctatcagacagcaacccccgctcccgcccaaggtgccagcgaggccccagcttctcccagcactcaggaggccatccagggcatgctgtgcatggccaacctgcagtcctcatcgtcctcaccggctacctctagcctgcaggcctggtggactgggggacaggatcgaagcagtgggagctccagcagtgggctgggcacagtgtctaacagtcctgcttcccagcgcaccccagggaagcggcccatcaagcggccagcatactggagaaccgagagcgaggaggaggaggagaacgccagtctggatgaacaggacagcttgggagcgtgcttcaaggatgcagagtatatctatccttcactggagtctgatgatgatgaccctgctttgaaatctcgacccaagaaaaagaagaattcagatgatgctccatggagtcctaaagcccgcgtgaccccaactctgccgaagcaggaccgtcctgtgcgtgaggggacccgggtagcctctattgagacaggtttggctgcagcagctgcaaagctggcccagcaggtgaagaaaatgaagctctcattaactgactcaggataatacagccagtaaatggaggagacaactcaaactcatatcctctaacttcaaatttcatattactttctatttaaataaatgcttatgtagttcagtcattacatccta

SEQ ID NO: 164812 - DNA, 6062 bp, Homo sapiens
  Payload ID: 12462
  Gene Symbol: PHF8
  Gene Name: PHD finger protein 8
  Uniprot ID: Q9UPP1
  ENST ID: ENST00000338154
  CDS Start-End: 506-3580
gcggccgccagactaggcccaagccgcggtctccagtaggcccgaacggccgggccgaggggaatgttgtggaggaggctgctctgaagcaccgttgagcggctggcgccgcgcgacccagcggggggctcgaggggaaggcgagcgaggttcccggcggtacggggactatcccagaattcgacgcgcgtcgccgtaggggccggaactaccggacgagcctccgctgaggcgcttcgcagtcccggagctagcccggctgccggcgtgtcgctggggctgagctccgcgggcgtggagtccttgcagcccaaagcatgaggaggtccctgtaggattctggactgaagacgttcttgtcaggtttggggcgtgaggaggttcctgtcagttggggaagcgttaagattcctctatcgtccagagaggacgcgtgctgccgcctcccgcccctcttgacacgacgaacctggccggccgcagaacgctccagggccgagcgaagatggcctcggtgccggtgtattgcctctgccggctgccttacgatgtgacccgcttcatgatcgagtgtgacatgtgccaggactggtttcatggcagttgtgttggtgttgaagaggagaaggctgctgacattgacctctaccactgccccaactgtgaagtcttgcatgggccctccattatgaaaaaacgccgtggatcttcaaaggggcatgatacacacaaggggaaaccagtgaagaccgggagccctacgttcgtcagagagctccggagtaggacttttgacagctcagatgaagtgattctgaagcccactggaaatcaactgaccgtggaattcctggaagaaaatagcttcagtgtgcccatcctggtcctgaagaaggatgggttgggcatgacgctgccctcgccatcattcactgtgagggatgttgaacactatgttggttctgacaaagagattgatgtgattgatgtgacccgccaggctgactgcaagatgaagcttggtgattttgtgaaatactattacagcgggaagagggagaaagtcctcaatgtcattagtttggaattctctgataccagactttctaaccttgtggagacaccgaagattgttcgaaagctgtcatgggtcgaaaacttgtggccagaggaatgtgtctttgagagacccaatgtacagaagtactgcctcatgagtgtgcgagatagctatacagactttcacattgactttggtggcacctctgtctggtaccatgtactcaagggtgaaaagatcttctacctgatccgcccaacaaatgccaatctgactctctttgagtgctggagcagttcctctaatcagaatgagatgttctttggggaccaggtggacaagtgctacaagtgttccgtgaagcaaggacagacacttttcattcccacagggtggatccatgctgtgctgacgcctgtggactgccttgcctttggagggaacttcttacacagccttaacatcgagatgcagctcaaagcctatgagattgagaagcggctgagcacagcagacctcttcagattccccaactttgagaccatctgttggtatgtgggaaagcacatcctggacatctttcgcggtttgcgagagaacaggagacaccctgcctcctacctggtccatggtggcaaagccttgaacttggcctttagagcctggacaaggaaagaagctctgccagaccatgaggatgagatcccggagacagtgcgaaccgtacagctcattaaagatctggccagggagatccgcctggtggaagacatcttccaacagaacgttgggaagacgagcaatatctttgggctgcagaggatcttcccagccggctccattcccctaaccaggccagcccattccacttcagtgtccatgtccaggctgtcactgccctccaaaaatggttcaaagaagaaaggcctgaagcccaaggaactcttcaagaaggcagagcgaaagggcaaggagagttcagccttggggcctgctggccagttgagctataatctcatggacacatacagtcatcaggcactgaagacaggctctttccagaaagcaaagttcaacatcactggtgcctgcttgaatgactcagatgacgactcaccagacttggaccttgatggaaatgagagcccattggccctattgatgtctaacggcagtacgaaaagggtgaagagtttatccaaatctcggcgaaccaagatagcaaagaaggtagacaaggctaggctgatggcagaacaggtgatggaagacgaatttgacttggattcagatgatgagctgcagattgacgagagattgggaaaggagaaggcgaccctgataataagaccaaaatttccccggaaattgccccgtgcgaagccttgctctgaccccaaccgagttcgtgaaccaggagaagttgagtttgacattgaggaggactatacaacagatgaggacatggtggaaggggttgaaggcaagcttgggaatggtagtggcgctggtggcattcttgatctgctcaaggccagcaggcaggtggggggacctgactatgctgccctcaccgaggccccagcttctcccagcactcaggaggccatccagggcatgctgtgcatggccaacctgcagtcctcatcgtcctcaccggctacctctagcctgcaggcctggtggactgggggacaggatcgaagcagtgggagctccagcagtgggctgggcacagtgtctaacagtcctgcttcccagcgcaccccagggaagcggcccatcaagcggccagcatactggagaaccgagagcgaggaggaggaggagaacgccagtctggatgaacaggacagcttgggagcgtgcttcaaggatgcagagtatatctatccttcactggagtctgatgatgatgaccctgctttgaaatctcgacccaagaaaaagaagaattcagatgatgctccatggagtcctaaagcccgcgtgaccccaactctgccgaagcaggaccgtcctgtgcgtgaggggacccgggtagcctctattgagacaggtttggctgcagcagctgcaaagctggcccagcaggagctacagaaggcccaaaagaagaaatatatcaagaagaagcctttgctgaaggaggtagaacagcctcgccctcaagactccaatctcagtctgacagtaccagcccccactgtggctgccacaccacaacttgtcacctcctcctcacccctgcctcctcctgagcctaaacaagaggccctgtcaggaagtctcgctgaccatgagtacaccgctcgtcccaatgcctttggcatggcccaggcaaaccgcagcaccacacctatggcccccggtgtcttcttgacccagcggcgcccttcagttggctcccagagcaatcaggcaggacaaggaaagcgtcccaaaaagggcctggccacagcaaagcagagactcggccgtatcctgaaaatccacagaaatggcaaactacttctgtgagccctcctgtgtcccacccctcacccctttacccccattgccttctccattgtcaactcttggggcactcctggatcctatctgccctggacaaggtgctgaggtgcattgtcctgctttcttgggacttaccaaaggcacggacccctccaccgactccttctagttcccttccccactttcactagagcatcctgcctgccttctccactgaggagcaggtaaatgggagaggtttccagctgactagaaccctcttttctactcgtccaaaccactcccgtcacctgccttgtctgttctttattcttcatcccccgctagagctggaaggcaggatgaggagaggtatgaaggagcctgagccatgaagtgggaagcccagtgcttgacactttctgcaactctagccctatatccagaagcctgcccacctccacccattctgtttgccccatttccccagtccagtggacatgccccacctccagacttgctcatgggagaaggctgtggtctctgccccctcttgccaaatgcttcatggaaatgaagaggaaggcctagagcctccttcctgccccactgtgggccatttccagaagtggcctagaaatgccaacttcacttacctttcaaaagaaaggtgattcctatcacttgtcaaggtagggagaggtcagatgcccaagcctttgaccacggttttgtagcctgttggaggaagctacttttagctggctacacatgaggccacttgttttagggtgagctccagggatttgcctggattttgaaatcatgtagaacattatccacgtggctgtggctgtggctgtggctgggccctggcaggtggaaaaccatctcccagaaacctgaaagcacctgccaatgacgcagataaccctggccctacagcctgcttgctccgcctataccacagagcacagcctggacattatggagggtgtggcgggacggcccacacctgggtcctccatcgggaacttttcatgcttctttctccacctgaggtcttggtctgaagaagacctcaggactcacatcttcactcctgggcctttgcacttccagacgacaggtcatcgttcaagcagaatgcagacaggccattcacgagcccaagttgaagagaagagacgcccatccgtgaaggagcagaccatccatccgatcctccccttcccctgtccttccttcgtggattgtctccattgtccagacagtgcccccacctcccaccgccttgcctcactggcaatctggactcgatggagaacatccccccacctccatttggcactacccaagtggagtgtacccttgccctttccacctgtaccacccactccaacctcaccccagcttgcccaatgcttctggggaatttaatagctaccatgcaggccacagggaatttgtgaggcttcttttgtcatctttgtatctccagtttgtctttcttttctccatagccctgcctctactttccttccttggaatcaggggttcctttagcccatttgctttctctaccttggggaccccaggggccaagcagttctccatctagtcacaccaaaggcaaaaagcctggctacctcccccctagcacgtgagtccctactcccctcccctctgtttctgcccagctttgcttattttggggatttcaaggcagcagagggtagtgaggggagagcaggagaagcctctgtcctgtataggcaactgcctgactatgcggtgactgctgtaaccaagatcaggtccccagcccttttgtccattaacaccccttcttgatctttcaaaggcagctaattgctagcaaatccccccgattccggccttttccctctatttctttgttagaagttttctgtggagctgaaacccagcctctgtttgactgggtttcatttagcttagttgggttcttagagccccctgtttgttgttttgtgttgtttccaatgaaaagcaagtttaccctcagagttatgcttttccaaagaggctgatgtctttgtttttgttttttttaatgtttcaggttctaagtgaagtgagttggggaggggttgggagtgttagtaatcaaggtttagaacaccatgagatagttacccctgatctccagtccctagctgggggctggacagggggaagggagagaggatttctattcacctttaatatatttttacaaaaaaagcaaacaatttaaaaacaagcccaccgcttctgtacatgtctaaatatatttttagaagtgggtaggattgtgaatttctgatgcagggcctttttataaataggttagggtagcatcattcagacttctctgttgtttttgtccctgtctttttcttatgttgtgttactaatgtaatttatattttttttagatcctccctttcctatagagataaaagtgatttatcttggcaattgc

SEQ ID NO: 164813 - DNA, 4651 bp, Homo sapiens
  Payload ID: 12462
  Gene Symbol: PHF8
  Gene Name: PHD finger protein 8
  Uniprot ID: Q9UPP1
  ENST ID: ENST00000338946
  CDS Start-End: 506-3352
gcggccgccagactaggcccaagccgcggtctccagtaggcccgaacggccgggccgaggggaatgttgtggaggaggctgctctgaagcaccgttgagcggctggcgccgcgcgacccagcggggggctcgaggggaaggcgagcgaggttcccggcggtacggggactatcccagaattcgacgcgcgtcgccgtaggggccggaactaccggacgagcctccgctgaggcgcttcgcagtcccggagctagcccggctgccggcgtgtcgctggggctgagctccgcgggcgtggagtccttgcagcccaaagcatgaggaggtccctgtaggattctggactgaagacgttcttgtcaggtttggggcgtgaggaggttcctgtcagttggggaagcgttaagattcctctatcgtccagagaggacgcgtgctgccgcctcccgcccctcttgacacgacgaacctggccggccgcagaacgctccagggccgagcgaagatggcctcggtgccggtgtattgcctctgccggctgccttacgatgtgacccgcttcatgatcgagtgtgacatgtgccaggactggtttcatggcagttgtgttggtgttgaagaggagaaggctgctgacattgacctctaccactgccccaactgtgaagtcttgcatgggccctccattatgaaaaaacgccgtggatcttcaaaggggcatgatacacacaaggggaaaccagtgaagaccgggagccctacgttcgtcagagagctccggagtaggacttttgacagctcagatgaagtgattctgaagcccactggaaatcaactgaccgtggaattcctggaagaaaatagcttcagtgtgcccatcctggtcctgaagaaggatgggttgggcatgacgctgccctcgccatcattcactgtgagggatgttgaacactatgttggttctgacaaagagattgatgtgattgatgtgacccgccaggctgactgcaagatgaagcttggtgattttgtgaaatactattacagcgggaagagggagaaagtcctcaatgtcattagtttggaattctctgataccagactttctaaccttgtggagacaccgaagattgttcgaaagctgtcatgggtcgaaaacttgtggccagaggaatgtgtctttgagagacccaatgtacagaagtactgcctcatgagtgtgcgagatagctatacagactttcacattgactttggtggcacctctgtctggtaccatgtactcaagggtgaaaagatcttctacctgatccgcccaacaaatgccaatctgactctctttgagtgctggagcagttcctctaatcagaatgagatgttctttggggaccaggtggacaagtgctacaagtgttccgtgaagcaaggacagacacttttcattcccacagggtggatccatgctgtgctgacgcctgtggactgccttgcctttggagggaacttcttacacagccttaacatcgagatgcagctcaaagcctatgagattgagaagcggctgagcacagcagacctcttcagattccccaactttgagaccatctgttggtatgtgggaaagcacatcctggacatctttcgcggtttgcgagagaacaggagacaccctgcctcctacctggtccatggtggcaaagccttgaacttggcctttagagcctggacaaggaaagaagctctgccagaccatgaggatgagatcccggagacagtgcgaaccgtacagctcattaaagatctggccagggagatccgcctggtggaattcaacatcactggtgcctgcttgaatgactcagatgacgactcaccagacttggaccttgatggaaatgagagcccattggccctattgatgtctaacggcagtacgaaaagggtgaagagtttatccaaatctcggcgaaccaagatagcaaagaaggtagacaaggctaggctgatggcagaacaggtgatggaagacgaatttgacttggattcagatgatgagctgcagattgacgagagattgggaaaggagaaggcgaccctgataataagaccaaaatttccccggaaattgccccgtgcgaagccttgctctgaccccaaccgagttcgtgaaccaggagaagttgagtttgacattgaggaggactatacaacagatgaggacatggtggaaggggttgaaggcaagcttgggaatggtagtggcgctggtggcattcttgatctgctcaaggccagcaggcaggtggggggacctgactatgctgccctcaccgaggccccagcttctcccagcactcaggaggccatccagggcatgctgtgcatggccaacctgcagtcctcatcgtcctcaccggctacctctagcctgcaggcctggtggactgggggacaggatcgaagcagtgggagctccagcagtgggctgggcacagtgtctaacagtcctgcttcccagcgcaccccagggaagcggcccatcaagcggccagcatactggagaaccgagagcgaggaggaggaggagaacgccagtctggatgaacaggacagcttgggagcgtgcttcaaggatgcagagtatatctatccttcactggagtctgatgatgatgaccctgctttgaaatctcgacccaagaaaaagaagaattcagatgatgctccatggagtcctaaagcccgcgtgaccccaactctgccgaagcaggaccgtcctgtgcgtgaggggacccgggtagcctctattgagacaggtttggctgcagcagctgcaaagctggcccagcaggagctacagaaggcccaaaagaagaaatatatcaagaagaagcctttgctgaaggaggtagaacagcctcgccctcaagactccaatctcagtctgacagtaccagcccccactgtggctgccacaccacaacttgtcacctcctcctcacccctgcctcctcctgagcctaaacaagaggccctgtcaggaagtctcgctgaccatgagtacaccgctcgtcccaatgcctttggcatggcccaggcaaaccgcagcaccacacctatggcccccggtgtcttcttgacccagcggcgcccttcagttggctcccagagcaatcaggcaggacaaggaaagcgtcccaaaaagggcctggccacagcaaagcagagactcggccgtatcctgaaaatccacagaaatggcaaactacttctacgacaggtcatcgttcaagcagaatgcagacaggccattcacgagcccaagttgaagagaagagacgcccatccgtgaaggagcagaccatccatccgatcctccccttcccctgtccttccttcgtggattgtctccattgtccagacagtgcccccacctcccaccgccttgcctcactggcaatctggactcgatggagaacatccccccacctccatttggcactacccaagtggagtgtacccttgccctttccacctgtaccacccactccaacctcaccccagcttgcccaatgcttctggggaatttaatagctaccatgcaggccacagggaatttgtgaggcttcttttgtcatctttgtatctccagtttgtctttcttttctccatagccctgcctctactttccttccttggaatcaggggttcctttagcccatttgctttctctaccttggggaccccaggggccaagcagttctccatctagtcacaccaaaggcaaaaagcctggctacctcccccctagcacgtgagtccctactcccctcccctctgtttctgcccagctttgcttattttggggatttcaaggcagcagagggtagtgaggggagagcaggagaagcctctgtcctgtataggcaactgcctgactatgcggtgactgctgtaaccaagatcaggtccccagcccttttgtccattaacaccccttcttgatctttcaaaggcagctaattgctagcaaatccccccgattccggccttttccctctatttctttgttagaagttttctgtggagctgaaacccagcctctgtttgactgggtttcatttagcttagttgggttcttagagccccctgtttgttgttttgtgttgtttccaatgaaaagcaagtttaccctcagagttatgcttttccaaagaggctgatgtctttgtttttgttttttttaatgtttcaggttctaagtgaagtgagttggggaggggttgggagtgttagtaatcaaggtttagaacaccatgagatagttacccctgatctccagtccctagctgggggctggacagggggaagggagagaggatttctattcacctttaatatatttttacaaaaaaagcaaacaatttaaaaacaagcccaccgcttctgtacatgtctaaatatatttttagaagtgggtaggattgtgaatttctgatgcagggcctttttataaataggttagggtagcatcattcagacttctctgttgtttttgtccctgtctttttcttatgttgtgttactaatgtaatttatattttttttagatcctccctttcctatagagataaaagtgatttatcttggc

SEQ ID NO: 164814 - DNA, 6024 bp, Homo sapiens
  Payload ID: 12462
  Gene Symbol: PHF8
  Gene Name: PHD finger protein 8
  Uniprot ID: Q9UPP1
  ENST ID: ENST00000357988
  CDS Start-End: 360-3542
tttcctctcatcccccctcctctcccctcccctcaggctatagtcagaaaattgtgggacaggtgcaaacaaatccttgaactgtatttgaactgaagtgaaacagtagggtcaaagaagagttcagagggagttgtggagttggcagcagctttacagaggaactacactgagggcctggggacagaacgcgggtagcacagggcacaaggttcaacgtccctgctccgggactcaagtcacttggcttctcgaagcccctgccttcatttggtgataatcacagagcttccttcacagggggaagaaccaacaacgcagagaccgtgggaaagagcccagcctatcgaaggtgctcaatgaacaggagccgcgctatcgtccagagaggacgcgtgctgccgcctcccgcccctcttgacacgacgaacctggccggccgcagaacgctccagggccgagcgaagatggcctcggtgccggtgtattgcctctgccggctgccttacgatgtgacccgcttcatgatcgagtgtgacatgtgccaggactggtttcatggcagttgtgttggtgttgaagaggagaaggctgctgacattgacctctaccactgccccaactgtgaagtcttgcatgggccctccattatgaaaaaacgccgtggatcttcaaaggggcatgatacacacaaggggaaaccagtgaagaccgggagccctacgttcgtcagagagctccggagtaggacttttgacagctcagatgaagtgattctgaagcccactggaaatcaactgaccgtggaattcctggaagaaaatagcttcagtgtgcccatcctggtcctgaagaaggatgggttgggcatgacgctgccctcgccatcattcactgtgagggatgttgaacactatgttggttctgacaaagagattgatgtgattgatgtgacccgccaggctgactgcaagatgaagcttggtgattttgtgaaatactattacagcgggaagagggagaaagtcctcaatgtcattagtttggaattctctgataccagactttctaaccttgtggagacaccgaagattgttcgaaagctgtcatgggtcgaaaacttgtggccagaggaatgtgtctttgagagacccaatgtacagaagtactgcctcatgagtgtgcgagatagctatacagactttcacattgactttggtggcacctctgtctggtaccatgtactcaagggtgaaaagatcttctacctgatccgcccaacaaatgccaatctgactctctttgagtgctggagcagttcctctaatcagaatgagatgttctttggggaccaggtggacaagtgctacaagtgttccgtgaagcaaggacagacacttttcattcccacagggtggatccatgctgtgctgacgcctgtggactgccttgcctttggagggaacttcttacacagccttaacatcgagatgcagctcaaagcctatgagattgagaagcggctgagcacagcagacctcttcagattccccaactttgagaccatctgttggtatgtgggaaagcacatcctggacatctttcgcggtttgcgagagaacaggagacaccctgcctcctacctggtccatggtggcaaagccttgaacttggcctttagagcctggacaaggaaagaagctctgccagaccatgaggatgagatcccggagacagtgcgaaccgtacagctcattaaagatctggccagggagatccgcctggtggaagacatcttccaacagaacgttgggaagacgagcaatatctttgggctgcagaggatcttcccagccggctccattcccctaaccaggccagcccattccacttcagtgtccatgtccaggctgtcactgccctccaaaaatggttcaaagaagaaaggcctgaagcccaaggaactcttcaagaaggcagagcgaaagggcaaggagagttcagccttggggcctgctggccagttgagctataatctcatggacacatacagtcatcaggcactgaagacaggctctttccagaaagcaaagttcaacatcactggtgcctgcttgaatgactcagatgacgactcaccagacttggaccttgatggaaatgagagcccattggccctattgatgtctaacggcagtacgaaaagggtgaagagtttatccaaatctcggcgaaccaagatagcaaagaaggtagacaaggctaggctgatggcagaacaggtgatggaagacgaatttgacttggattcagatgatgagctgcagattgacgagagattgggaaaggagaaggcgaccctgataataagaccaaaatttccccggaaattgccccgtgcgaagccttgctctgaccccaaccgagttcgtgaaccaggagaagttgagtttgacattgaggaggactatacaacagatgaggacatggtggaaggggttgaaggcaagcttgggaatggtagtggcgctggtggcattcttgatctgctcaaggccagcaggcaggtggggggacctgactatgctgccctcaccgaggccccagcttctcccagcactcaggaggccatccagggcatgctgtgcatggccaacctgcagtcctcatcgtcctcaccggctacctctagcctgcaggcctggtggactgggggacaggatcgaagcagtgggagctccagcagtgggctgggcacagtgtctaacagtcctgcttcccagcgcaccccagggaagcggcccatcaagcggccagcatactggagaaccgagagcgaggaggaggaggagaacgccagtctggatgaacaggacagcttgggagcgtgcttcaaggatgcagagtatatctatccttcactggagtctgatgatgatgaccctgctttgaaatctcgacccaagaaaaagaagaattcagatgatgctccatggagtcctaaagcccgcgtgaccccaactctgccgaagcaggaccgtcctgtgcgtgaggggacccgggtagcctctattgagacaggtttggctgcagcagctgcaaagctggcccagcaggagctacagaaggcccaaaagaagaaatatatcaagaagaagcctttgctgaaggaggtagaacagcctcgccctcaagactccaatctcagtctgacagtaccagcccccactgtggctgccacaccacaacttgtcacctcctcctcacccctgcctcctcctgagcctaaacaagaggccctgtcaggaagtctcgctgaccatgagtacaccgctcgtcccaatgcctttggcatggcccaggcaaaccgcagcaccacacctatggcccccggtgtcttcttgacccagcggcgcccttcagttggctcccagagcaatcaggcaggacaaggaaagcgtcccaaaaagggcctggccacagcaaagcagagactcggccgtatcctgaaaatccacagaaatggcaaactacttctgtgagccctcctgtgtcccacccctcacccctttacccccattgccttctccattgtcaactcttggggcactcctggatcctatctgccctggacaaggtgctgaggtgcattgtcctgctttcttgggacttaccaaaggcacggacccctccaccgactccttctagttcccttccccactttcactagagcatcctgcctgccttctccactgaggagcaggtaaatgggagaggtttccagctgactagaaccctcttttctactcgtccaaaccactcccgtcacctgccttgtctgttctttattcttcatcccccgctagagctggaaggcaggatgaggagaggtatgaaggagcctgagccatgaagtgggaagcccagtgcttgacactttctgcaactctagccctatatccagaagcctgcccacctccacccattctgtttgccccatttccccagtccagtggacatgccccacctccagacttgctcatgggagaaggctgtggtctctgccccctcttgccaaatgcttcatggaaatgaagaggaaggcctagagcctccttcctgccccactgtgggccatttccagaagtggcctagaaatgccaacttcacttacctttcaaaagaaaggtgattcctatcacttgtcaaggtagggagaggtcagatgcccaagcctttgaccacggttttgtagcctgttggaggaagctacttttagctggctacacatgaggccacttgttttagggtgagctccagggatttgcctggattttgaaatcatgtagaacattatccacgtggctgtggctgtggctgtggctgggccctggcaggtggaaaaccatctcccagaaacctgaaagcacctgccaatgacgcagataaccctggccctacagcctgcttgctccgcctataccacagagcacagcctggacattatggagggtgtggcgggacggcccacacctgggtcctccatcgggaacttttcatgcttctttctccacctgaggtcttggtctgaagaagacctcaggactcacatcttcactcctgggcctttgcacttccagacgacaggtcatcgttcaagcagaatgcagacaggccattcacgagcccaagttgaagagaagagacgcccatccgtgaaggagcagaccatccatccgatcctccccttcccctgtccttccttcgtggattgtctccattgtccagacagtgcccccacctcccaccgccttgcctcactggcaatctggactcgatggagaacatccccccacctccatttggcactacccaagtggagtgtacccttgccctttccacctgtaccacccactccaacctcaccccagcttgcccaatgcttctggggaatttaatagctaccatgcaggccacagggaatttgtgaggcttcttttgtcatctttgtatctccagtttgtctttcttttctccatagccctgcctctactttccttccttggaatcaggggttcctttagcccatttgctttctctaccttggggaccccaggggccaagcagttctccatctagtcacaccaaaggcaaaaagcctggctacctcccccctagcacgtgagtccctactcccctcccctctgtttctgcccagctttgcttattttggggatttcaaggcagcagagggtagtgaggggagagcaggagaagcctctgtcctgtataggcaactgcctgactatgcggtgactgctgtaaccaagatcaggtccccagcccttttgtccattaacaccccttcttgatctttcaaaggcagctaattgctagcaaatccccccgattccggccttttccctctatttctttgttagaagttttctgtggagctgaaacccagcctctgtttgactgggtttcatttagcttagttgggttcttagagccccctgtttgttgttttgtgttgtttccaatgaaaagcaagtttaccctcagagttatgcttttccaaagaggctgatgtctttgtttttgttttttttaatgtttcaggttctaagtgaagtgagttggggaggggttgggagtgttagtaatcaaggtttagaacaccatgagatagttacccctgatctccagtccctagctgggggctggacagggggaagggagagaggatttctattcacctttaatatatttttacaaaaaaagcaaacaatttaaaaacaagcccaccgcttctgtacatgtctaaatatatttttagaagtgggtaggattgtgaatttctgatgcagggcctttttataaataggttagggtagcatcattcagacttctctgttgtttttgtccctgtctttttcttatgttgtgttactaatgtaatttatattttttttagatcctccctttcctatagagataaaagtgatttatcttggcaattgc

SEQ ID NO: 164815 - DNA, 3344 bp, Homo sapiens
  Payload ID: 12462
  Gene Symbol: PHF8
  Gene Name: PHD finger protein 8
  ENST ID: ENST00000396282
  CDS Start-End: 1-2861
acagctcagatgaagtgattctgaagcccactggaaatcaactgaccgtggaattcctggaagaaaatagcttcagtgtgcccatcctggtcctgaagaaggatgggttgggcatgacgctgccctcgccatcattcactgtgagggatgttgaacactatgttggttctgacaaagagattgatgtgattgatgtgacccgccaggctgactgcaagatgaagcttggtgattttgtgaaatactattacagcgggaagagggagaaagtcctcaatgtcattagtttggaattctctgataccagactttctaaccttgtggagacaccgaagattgttcgaaagctgtcatgggtcgaaaacttgtggccagaggaatgtgtctttgagagacccaatgtacagaagtactgcctcatgagtgtgcgagatagctatacagactttcacattgactttggtggcacctctgtctggtaccatgtactcaagggtgaaaagatcttctacctgatccgcccaacaaatgccaatctgactctctttgagtgctggagcagttcctctaatcagaatgagatgttctttggggaccaggtggacaagtgctacaagtgttccgtgaagcaaggacagacacttttcattcccacagggtggatccatgctgtgctgacgcctgtggactgccttgcctttggagggaacttcttacacagccttaacatcgagatgcagctcaaagcctatgagattgagaagcggctgagcacagcagacctcttcagattccccaactttgagaccatctgttggtatgtgggaaagcacatcctggacatctttcgcggtttgcgagagaacaggagacaccctgcctcctacctggtccatggtggcaaagccttgaacttggcctttagagcctggacaaggaaagaagctctgccagaccatgaggatgagatcccggagacagtgcgaaccgtacagctcattaaagatctggccagggagatccgcctggtggaagacatcttccaacagaacgttgggaagacgagcaatatctttgggctgcagaggatcttcccagccggctccattcccctaaccaggccagcccattccacttcagtgtccatgtccaggctgtcactgccctccaaaaatggttcaaagaagaaaggcctgaagcccaaggaactcttcaagaaggcagagcgaaagggcaaggagagttcagccttggggcctgctggccagttgagctataatctcatggacacatacagtcatcaggcactgaagacaggctctttccagaaagcaaagttcaacatcactggtgcctgcttgaatgactcagatgacgactcaccagacttggaccttgatggaaatgagagcccattggccctattgatgtctaacggcagtacgaaaagggtgaagagtttatccaaatctcggcgaaccaagatagcaaagaaggtagacaaggctaggctgatggcagaacaggtgatggaagacgaatttgacttggattcagatgatgagctgcagattgacgagagattgggaaaggagaaggcgaccctgataataagaccaaaatttccccggaaattgccccgtgcgaagccttgctctgaccccaaccgagttcgtgaaccaggagaagttgagtttgacattgaggaggactatacaacagatgaggacatggtggaaggggttgaaggcaagcttgggaatggtagtggcgctggtggcattcttgatctgctcaaggccagcaggcaggtggggggacctgactatgctgccctcaccgaggccccagcttctcccagcactcaggaggccatccagggcatgctgtgcatggccaacctgcagtcctcatcgtcctcaccggctacctctagcctgcaggcctggtggactgggggacaggatcgaagcagtgggagctccagcagtgggctgggcacagtgtctaacagtcctgcttcccagcgcaccccagggaagcggcccatcaagcggccagcatactggagaaccgagagcgaggaggaggaggagaacgccagtctggatgaacaggacagcttgggagcgtgcttcaaggatgcagagtatatctatccttcactggagtctgatgatgatgaccctgctttgaaatctcgacccaagaaaaagaagaattcagatgatgctccatggagtcctaaagcccgcgtgaccccaactctgccgaagcaggaccgtcctgtgcgtgaggggacccgggtagcctctattgagacaggtttggctgcagcagctgcaaagctggcccagcaggagctacagaaggcccaaaagaagaaatatatcaagaagaagcctttgctgaaggaggtagaacagcctcgccctcaagactccaatctcagtctgacagtaccagcccccactgtggctgccacaccacaacttgtcacctcctcctcacccctgcctcctcctgagcctaaacaagaggccctgtcaggaagtctcgctgaccatgagtacaccgctcgtcccaatgcctttggcatggcccaggcaaaccgcagcaccacacctatggcccccggtgtcttcttgacccagcggcgcccttcagttggctcccagagcaatcaggcaggacaaggaaagcgtcccaaaaagggcctggccacagcaaagcagagactcggccgtatcctgaaaatccacagaaatggcaaactacttctacgacaggtcatcgttcaagcagaatgcagacaggccattcacgagcccaagttgaagagaagagacgcccatccgtgaaggagcagaccatccatccgatcctccccttcccctgtccttccttcgtggattgtctccattgtccagacagtgcccccacctcccaccgccttgcctcactggcaatctggactcgatggagaacatccccccacctccatttggcactacccaagtggagtgtacccttgccctttccacctgtaccacccactccaacctcaccccagcttgcccaatgcttctggggaatttaatagctaccatgcaggccacagggaatttgtgaggcttcttttgtcatctttgtatctccagtttgtctttcttttctccatagccctgcctctactttccttccttggaatcaggggttcctttagcccatttgctttctctaccttggggaccccaggggccaagcagttctccatctagtcacaccaaaggcaaaaagcctggctacctcccccctagcacgtgagtccctactcccctccc

SEQ ID NO: 164816 - DNA, 580 bp, Homo sapiens
  Payload ID: 12462
  Gene Symbol: PHF8
  Gene Name: PHD finger protein 8
  ENST ID: ENST00000413386
  CDS Start-End: 1-525
aatgagatgttctttggggaccaggtggacaagtgctacaagtgttccgtgaagcaaggacagacacttttcattcccacagggtggatccatgctgtgctgacgcctgtggactgccttgcctttggagggaacttcttacacagccttaacatcgagatgcagctcaaagcctatgagattgagaagcggctgagcacagcagacctcttcagattccccaactttgagaccatctgttggtatgtgggaaagcacatcctggacatctttcgcggtttgcgagagaacaggagacaccctgcctcctacctggtccatggtggcaaagccttgaacttggcctttagagcctggacaaggaaagaagctctgccagaccatgaggatgagatcccggagacagtgcgaaccgtacagctcattaaagatctggccagggagatccgcctggtggaattctctcggggtgaagatgattacaaagccatgtttcaacaggtggcatataccacgaggcagtaaggtatagtgttcaacatcactggtgcctgcttgaatgactcagatgacgactcac

SEQ ID NO: 164817 - DNA, 2724 bp, Homo sapiens
  Payload ID: 12462
  Gene Symbol: PHF8
  Gene Name: PHD finger protein 8
  ENST ID: ENST00000443302
  CDS Start-End: 1-1978
gagtgtgcgagatagctatacagactttcacattgactttggtggcacctctgtctggtaccatgtactcaagggtgaaaagatcttctacctgatccgcccaacaaatgccaatctgactctctttgagtgctggagcagttcctctaatcagaatgagatgttctttggggaccaggtggacaagtgctacaagtgttccgtgaagcaaggacagacacttttcattcccacagggtggatccatgctgtgctgacgcctgtggactgccttgcctttggagggaacttcttacacagccttaacatcgagatgcagctcaaagcctatgagattgagaagcggctgagcacagcagacctcttcagattccccaactttgagaccatctgttggtatgtgggaaagcacatcctggacatctttcgcggtttgcgagagaacaggagacaccctgcctcctacctggtccatggtggcaaagccttgaacttggcctttagagcctggacaaggaaagaagctctgccagaccatgaggatgagatcccggagacagtgcgaaccgtacagctcattaaagatctggccagggagatccgcctggtggaagacatcttccaacagaacgttgggaagacgagcaatatctttgggctgcagaggatcttcccagccggctccattcccctaaccaggccagcccattccacttcagtgtccatgtccaggctgtcactgccctccaaaaatggttcaaagaagaaaggcctgaagcccaaggaactcttcaagaaggcagagcgaaagggcaaggagagttcagccttggggcctgctggccagttgagctataatctcatggacacatacagtcatcaggcactgaagacaggctctttccagaaagcaaagttcaacatcactggtgcctgcttgaatgactcagatgacgactcaccagacttggaccttgatggaaatgagagcccattggccctattgatgtctaacggcagtacgaaaagggtgaagagtttatccaaatctcggcgaaccaagatagcaaagaaggtagacaaggctaggctgatggcagaacaggtgatggaagacgaatttgacttggattcagatgatgagctgcagattgacgagagattgggaaaggagaaggcgaccctgataataagaccaaaatttccccggaaattgccccgtgcgaagccttgctctgaccccaaccgagttcgtgaaccaggagaagttgagtttgacattgaggaggactatacaacagatgaggacatggtggaaggggttgaaggcaagcttgggaatggtagtggcgctggtggcattcttgatctgctcaaggccagcaggcaggtggggggacctgactatgctgccctcaccgaggccccagcttctcccagcactcaggaggccatccagggcatgctgtgcatggccaacctgcagtcctcatcgtcctcaccggctacctctagcctgcaggcctggtggactgggggacaggatcgaagcagtgggagctccagcagtgggctgggcacagtgtctaacagtcctgcttcccagcgcaccccagggaagcggcccatcaagcggccagcatactggagaaccgagagcgaggaggaggaggagaacgccagtctggatgaacaggacagcttgggagcgtgcttcaaggatgcagagtatatctatccttcactggagtctgatgatgatgaccctgctttgaaatctcgacccaagaaaaagaagaattcagatgatgctccatggagtcctaaagcccgcgtgaccccaactctgccgaagcaggaccgtcctgtgcgtgaggggacccgggtagcctctattgagacaggtttggctgcagcagctgcaaagctggcccagcaggtgaagaaaatgaagctctcattaactgactcaggataatacagccagtaaatggaggagacaactcaaactcatatcctctaacttcaaatttcatattactttctatttaaataaatgcttatgtagttcagtcattacatcctatttaaatagtgtttaaatctttggcaatcttctttgaccagaacttctgtctcttatgtatatcccaatacagtgtaagctgtaatttgaaaaagggggttctactgttttatataaatataaattaagtaaagctgtgaaaattactcttagtgccttttaaggagctaaattctgtttgggatgatcagagataacctcaaagaagaggttttgaaattggggaggggctttgcaagctaagcttctggtaggggccagggaggcattctaaaagaagggacttccttcgtatagcacacaaagccctcttaaagtcctcttgatttggtctctagtcatctccctgacctccttccagcccctcatgcacaccttttatacagccatagtgcactgcaatactcatagtcccctcagtgagtatatcagattgtctcatgcttttgtgcctttacacaagatgttccttttacccattgagaatcataccctatcagatcccttacctaacagcccttcatactacctaccaccactttatttcagaggcctttttctatatgcttctacaacattcgtggtacttacaatcataaatgtatgttttggtgtttcttattaaactatgaatactt

SEQ ID NO: 164818 - DNA, 555 bp, Homo sapiens
  Payload ID: 12462
  Gene Symbol: PHF8
  Gene Name: PHD finger protein 8
  ENST ID: ENST00000437224
  CDS Start-End: 211-555
atatatgtagagaaatgaattggaaaagatcctgctgaggttccctctagagagggggaagaaccaacaacgcagagaccgtgggaaagagcccagcctatcgaaggtgctcaatgaacaggagccgcgagaggacgcgtgctgccgcctcccgcccctcttgacacgacgaacctggccggccgcagaacgctccagggccgagcgaagatggcctcggtgccggtgtattgcctctgccggctgccttacgatgtgacccgcttcatgatcgagtgtgacatgtgccaggactggtttcatggcagttgtgttggtgttgaagaggagaaggctgctgacattgacctctaccactgccccaactgtgaagtcttgcatgggccctccattatgaaaaaacgccgtggatcttcaaaggggcatgatacacacaaggggaaaccagtgaagaccgggagccctacgttcgtcagagagctccggagtaggacttttgacagctcagatgaagtgattctgaagcccactggaaatcaactgaccgtggaattc

SEQ ID NO: 164819 - DNA, 687 bp, Homo sapiens
  Payload ID: 12462
  Gene Symbol: PHF8
  Gene Name: PHD finger protein 8
  ENST ID: ENST00000415025
  CDS Start-End: 344-687
gcgacccagcggggggctcgaggggaaggcgagcgaggttcccggcggtacggggactatcccagaattcgacgcgcgtcgccgtaggggccggaactaccggacgagcctccgctgaggcgcttcgcagtcccggagctagcccggctgccggcgtgtcgctggggctgagctccgcgggcgtggagtccttgcagcccaaagcatgaggaggtccctgtaggattctggactgaagacgttcttgtcagctatcgtccagagaggacgcgtgctgccgcctcccgcccctcttgacacgacgaacctggccggccgcagaacgctccagggccgagcgaagatggcctcggtgccggtgtattgcctctgccggctgccttacgatgtgacccgcttcatgatcgagtgtgacatgtgccaggactggtttcatggcagttgtgttggtgttgaagaggagaaggctgctgacattgacctctaccactgccccaactgtgaagtcttgcatgggccctccattatgaaaaaacgccgtggatcttcaaaggggcatgatacacacaaggggaaaccagtgaagaccgggagccctacgttcgtcagagagctccggagtaggacttttgacagctcagatgaagtgattctgaagcccactggaaatcaactgaccgtggaatt

SEQ ID NO: 164820 - DNA, 534 bp, Homo sapiens
  Payload ID: 12462
  Gene Symbol: PHF8
  Gene Name: PHD finger protein 8
  ENST ID: ENST00000453905
  CDS Start-End: 91-534
aaaagatcctgctgaggttccctctagagagggggaagaaccaacaacgcagagaccgtgggaaagagcccagcctatcgaaggtgctcaatgaacaggagccgcgctatcgtccagagaggacgcgtgctgccgcctcccgcccctcttgacacgacgaacctggccggccgcagaacgctccagggccgagcgaagatggcctcggtgccggtgtattgcctctgccggctgccttacgatgtgacccgcttcatgatcgagtgtgacatgtgccaggactggtttcatggcagttgtgttggtgttgaagaggagaaggctgctgacattgacctctaccactgccccaactgtgaagtcttgcatgggccctccattatgaaaaaacgccgtggatcttcaaaggggcatgatacacacaaggggaaaccagtgaagaccgggagccctacgttcgtcagagagctccggagtaggacttttgacagctcagatgaagtgattctgaagcccactggaaatcaactgacc

SEQ ID NO: 164821 - DNA, 565 bp, Homo sapiens
  Payload ID: 12462
  Gene Symbol: PHF8
  Gene Name: PHD finger protein 8
  ENST ID: ENST00000425862
  CDS Start-End: 188-565
gaaagaaattctaagggccgggtggactttctctggttgccccctacagccgcaccagctgtgttgcatcccggcggcgtgttatttgtgcctagctatcgtccagagaggacgcgtgctgccgcctcccgcccctcttgacacgacgaacctggccggccgcagaacgctccagggccgagcgaagatggcctcggtgccggtgtattgcctctgccggctgccttacgatgtgacccgcttcatgatcgagtgtgacatgtgccaggactggtttcatggcagttgtgttggtgttgaagaggagaaggctgctgacattgacctctaccactgccccaactgtgaagtcttgcatgggccctccattatgaaaaaacgccgtggatcttcaaaggggcatgatacacacaaggggaaaccagtgaagaccgggagccctacgttcgtcagagagctccggagtaggacttttgacagctcagatgaagtgattctgaagcccactggaaatcaactgaccgtggaattcctggaagaaaatagcttcagtgtgcccatcctg

SEQ ID NO: 164822 - DNA, 555 bp, Homo sapiens
  Payload ID: 12462
  Gene Symbol: PHF8
  Gene Name: PHD finger protein 8
  ENST ID: ENST00000433120
  CDS Start-End: 263-555
gtgtgaaagaaattctaagggccgggtggactttctctggttgccccctacagccgcaccagctgtgttgcatcccggcggcggtaactctattggagaactgagggttggtgcaagggggtggggggcgggggctgattcactctgtaaaaagtgttatttgtgcctagctatcgtccagagaggacgcgtgctgccgcctcccgcccctcttgacacgacgaacctggccggccgcagaacgctccagggccgagcgaagatggcctcggtgccggtgtattgcctctgccggctgccttacgatgtgacccgcttcatgatcgagtgtgacatgtgccaggactggtttcatggcagttgtgttggtgttgaagaggagaaggctgctgacattgacctctaccactgccccaactgtgaagtcttgcatgggccctccattatgaaaaaacgccgtggatcttcaaaggggcatgatacacacaaggggaaaccagtgaagaccgggagccctacgttcgtcagagagctccggagtaggacttttgacag

SEQ ID NO: 164823 - DNA, 403 bp, Homo sapiens
  Payload ID: 12462
  Gene Symbol: PHF8
  Gene Name: PHD finger protein 8
  ENST ID: ENST00000448003
  CDS Start-End: 1-403
ctgtgctgacgcctgtggactgccttgcctttggagggaacttcttacacagccttaacatcgagatgcagctcaaagcctatgagattgagaagcggctgagcacagcagacctcttcagattccccaactttgagaccatctgttggtatgtgggaaagcacatcctggacatctttcgcggtttgcgagagaacaggagacaccctgcctcctacctggtccatggtggcaaagccttgaacttggcctttagagcctggacaaggaaagaagctctgccagaccatgaggatgagatcccggagacagtgcgaaccgtacagctcattaaagatctggccagggagatccgcctggtggaattcaacatcactggtgcctgcttgaatgactcagatga

SEQ ID NO: 164824 - DNA, 475 bp, Homo sapiens
  Payload ID: 12462
  Gene Symbol: PHF8
  Gene Name: PHD finger protein 8
  ENST ID: ENST00000445025
  CDS Start-End: 183-475
agtgagagatgaaagaagcttcccgaaaaggcttcaggtattttcttgaaacccggaaagaagttatcactgacaacggggccgaagaagctatcgtccagagaggacgcgtgctgccgcctcccgcccctcttgacacgacgaacctggccggccgcagaacgctccagggccgagcgaagatggcctcggtgccggtgtattgcctctgccggctgccttacgatgtgacccgcttcatgatcgagtgtgacatgtgccaggactggtttcatggcagttgtgttggtgttgaagaggagaaggctgctgacattgacctctaccactgccccaactgtgaagtcttgcatgggccctccattatgaaaaaacgccgtggatcttcaaaggggcatgatacacacaaggggaaaccagtgaagaccgggagccctacgttcgtcagagagctccggagtaggacttttgacag

SEQ ID NO: 164825 - DNA, 2726 bp, Homo sapiens
  Payload ID: 12462
  Gene Symbol: PHF8
  Gene Name: PHD finger protein 8
  ENST ID: ENST00000615775
  CDS Start-End: 865-1776
atgagtgtgcgagatagctatacagactttcacattgactttggtggcacctctgtctggtaccatgtactcaagggtgaaaagatcttctacctgatccgcccaacaaatgccaatctgactctctttgagtgctggagcagttcctctaatcagaatgagatgttctttggggaccaggtggacaagtgctacaagtgttccgtgaagcaaggacagacacttttcattcccacagggtggatccatgctgtgctgacgcctgtggactgccttgcctttggagggaacttcttacacagccttaacatcgagatgcagctcaaagcctatgagattgagaagcggctgagcacagcagacctcttcagattccccaactttgagaccatctgttggtatgtgggaaagcacatcctggacatctttcgcggtttgcgagagaacaggagacaccctgcctcctacctggtccatggtggcaaagccttgaacttggcctttagagcctggacaaggaaagaagctctgccagaccatgaggatgagatcccggagacagtgcgaaccgtacagctcattaaagatctggccagggagatccgcctggtggaagacatcttccaacagaacgttgggaagacgagcaatatctttgggctgcagaggatcttcccagccggctccattcccctaaccaggccagcccattccacttcagtgtccatgtccaggctgtcactgccctccaaaaatggttcaaagaagaaaggcctgaagcccaaggaactcttcaagaaggcagagcgaaagggcaaggagagttcagccttggggcctgctggccagttgagctataatctcatggacacatacagtcatcaggcactgaagacaggctctttccagaaagcaaagttcaacatcactggtgcctgcttgaatgactcagatgacgactcaccagacttggaccttgatggaaatgagagcccattggccctattgatgtctaacggcagtacgaaaagggtgaagagtttatccaaatctcggcgaaccaagatagcaaagaaggtagacaaggctaggctgatggcagaacaggtgatggaagacgaatttgacttggattcagatgatgagctgcagattgacgagagattgggaaaggagaaggcgaccctgataataagaccaaaatttccccggaaattgccccgtgcgagccttgctctgaccccaaccgagttcgtgaaccaggagaagttgagtttgacattgaggaggactatacaacagatgaggacatggtggaaggggttgaaggcaagcttgggaatggtagtggcgctggtggcattcttgatctgctcaaggccagcaggcaggtggggggacctgactatgctgccctcaccgaggccccagcttctcccagcactcaggaggccatccagggcatgctgtgcatggccaacctgcagtcctcatcgtcctcaccggctacctctagcctgcaggcctggtggactgggggacaggatcgaagcagtgggagctccagcagtgggctgggcacagtgtctaacagtcctgcttcccagcgcaccccagggaagcggcccatcaagcggccagcatactggagaaccgagagcgaggaggaggaggagaacgccagtctggatgaacaggacagcttgggagcgtgcttcaaggatgcagagtatatctatccttcactggagtctgatgatgatgaccctgctttgaaatctcgacccaagaaaaagaagaattcagatgatgctccatggagtcctaaagcccgcgtgaccccaactctgccgaagcaggaccgtcctgtgcgtgaggggacccgggtagcctctattgagacaggtttggctgcagcagctgcaaagctggcccagcaggtgaagaaaatgaagctctcattaactgactcaggataatacagccagtaaatggaggagacaactcaaactcatatcctctaacttcaaatttcatattactttctatttaaataaatgcttatgtagttcagtcattacatcctatttaaatagtgtttaaatctttggcaatcttctttgaccagaacttctgtctcttatgtatatcccaatacagtgtaagctgtaatttgaaaaagggggttctactgttttatataaatataaattaagtaaagctgtgaaaattactcttagtgccttttaaggagctaaattctgtttgggatgatcagagataacctcaaagaagaggttttgaaattggggaggggctttgcaagctaagcttctggtaggggccagggaggcattctaaaagaagggacttccttcgtatagcacacaaagccctcttaaagtcctcttgatttggtctctagtcatctccctgacctccttccagcccctcatgcacaccttttatacagccatagtgcactgcaatactcatagtcccctcagtgagtatatcagattgtctcatgcttttgtgcctttacacaagatgttccttttacccattgagaatcataccctatcagatcccttacctaacagcccttcatactacctaccaccactttatttcagaggcctttttctatatgcttctacaacattcgtggtacttacaatcataaatgtatgttttggtgtttcttattaaactatgaatacttc

SEQ ID NO: 164826 - DNA, 2165 bp, Homo sapiens
  Payload ID: 12463
  Gene Symbol: PBLD
  Gene Name: phenazine biosynthesis-like protein domain containing
  Uniprot ID: P30039
  ENST ID: ENST00000309049
  CDS Start-End: 186-1052
gcctcctttgtcctggatttgggagttgagcaccttcgtcgccattggctttcctcccccagctccagcctctctcatcttgggaatctgcgtcagaagtcactcgcagtcccgtcagcccagaagaagacgtaaagcaggctaccagcaattttgagaacttgcaaaaacagcttgcaaggaaaatgaagcttcctattttcatagcagatgcattcacagcaagagcatttcgtgggaatcctgctgctgtttgcctcctagaaaatgaattggatgaagacatgcatcagaaaattgcaagggagatgaacctctctgaaactgcttttatccgaaaactgcacccgacagacaactttgcacaaagttcctgctttggactgagatggtttacaccagcgagtgaggtcccactctgtggccatgccaccctggcttctgcagctgtgctgtttcacaaaataaaaaacatgaatagcacgctcacgtttgtcactctgagtggagaactaagggccagacgagcagaggatggcatcgtcctggacttgcctctttatccagcccacccccaggacttccatgaagtagaggacttgataaagactgccataggcaacacactggtccaggacatctgttattctccagatacccaaaagctcctcgtccgcctcagtgacgtttacaacaggtcgtttctggagaacctgaaagtgaacacggagaatctgctgcaagttgaaaacacagggaaggtgaaagggcttattcttacccttaaaggagagcctggtgggcagacccaagcatttgacttttactcaagatattttgcaccgtgggttggtgtggctgaagacccagtgacagggtctgcacacgctgttctcagcagctactggtcccagcatctggggaagaaagaaatgcatgcttttcagtgttcccaccgaggaggagagctgggaatttcccttcgtccagacggaagggttgacattagaggaggtgcagctgttgttttagagggcacactgacagcctagaggtggttatgctgtgacgctgctgtctctaaccaccaagtattttctgcttaaaaagaaatgtaaggggctgcctttagcaaatgtgcgtagtagtctacttaatcctcatgttaaaaatcgaaaaatgggccaggcgcagtggctcatgcctgtaatcgtagcactttgagaggccaaggtgggtggatcacctgaggtcaggggttcgacaccagcctggccaacatggtgaaacctcgtctctactacaaatacaaaaattagctgggtgtggtgccacatgcctgtaattccagctacttgggaggctgaggcatggagaatcgcttgaacccaggaggcagaagttgcagtgagcagagatcacaccactgcactccagcctgggcaacagagtaagactccatccacacacacacacacacacacaaaattgaaaagtgaagacattttaatggagatttaatagtgcttccagactaatgaactaatggagttttggctccactcatgagtgtatttgaaatgtaagtaaccagctacaaagaataatgtcacttcatttgattatgactaccaatcaagagaaggaggaatacatttctgaggagtgatactaaaccatttgagcttaaatgagtacctgattttgcagccattaaaatgagtcaataactatgtggaaatatagaaaaatattttataatataatactaagaaagaggacagtaggccataaagtgttagcagtgttatgctatgtctatataaataagcatgggccattaaaaatagcaaactgaaaacagttcatgtgtggggggcaagtttagaagtaattttaatgtatctaagaagtgatttcctttattgttgtactcaggtacgaagactaaaaatcaggatgaatccagaaaattaacacaaaaaagtatgtattaggctacttcctgtcatagtgaaattaaacactcaaagtaatgtaatctcagctgggcgtggcggctcatgcctgtaatcccagcactttggcaggacaaggcaggaggatcacttgaacctaggagttcgagaccagcctgggcaacacagcgagaacttgtctctatt

SEQ ID NO: 164827 - DNA, 2449 bp, Homo sapiens
  Payload ID: 12463
  Gene Symbol: PBLD
  Gene Name: phenazine biosynthesis-like protein domain containing
  ENST ID: ENST00000336578
  CDS Start-End: 165-932
aagtgccttgaattccttggtaattatttccttttaagcgtgtaactcttattattgctaaactgctttttaagttaatggtagttgttgtccaaaggaagtctgatctgtgtttttgaaacctcaatgatcgtctgtttctaattaaggaattggatgaagacatgcatcagaaaattgcaagggagatgaacctctctgaaactgcttttatccgaaaactgcacccgacagacaactttgcacaaagttcctgctttggactgagatggtttacaccagcgagtgaggtcccactctgtggccatgccaccctggcttctgcagctgtgctgtttcacaaaataaaaaacatgaatagcacgctcacgtttgtcactctgagtggagaactaagggccagacgagcagaggatggcatcgtcctggacttgcctctttatccagcccacccccaggacttccatgaagtagaggacttgataaagactgccataggcaacacactggtccaggacatctgttattctccagatacccaaaagctcctcgtccgcctcagtgacgtttacaacaggtcgtttctggagaacctgaaagtgaacacggagaatctgctgcaagttgaaaacacagggaaggtgaaagggcttattcttacccttaaaggagagcctggtgggcagacccaagcatttgacttttactcaagatattttgcaccgtgggttggtgtggctgaagacccagtgacagggtctgcacacgctgttctcagcagctactggtcccagcatctggggaagaaagaaatgcatgcttttcagtgttcccaccgaggaggagagctgggaatttcccttcgtccagacggaagggttgacattagaggaggtgcagctgttgttttagagggcacactgacagcctagaggtggttatgctgtgacgctgctgtctctaaccaccaagtattttctgcttaaaaagaaatgtaaggggctgcctttagcaaatgtgcgtagtagtctacttaatcctcatgttaaaaatcgaaaaatgggccaggcgcagtggctcatgcctgtaatcgtagcactttgagaggccaaggtgggtggatcacctgaggtcaggggttcgacaccagcctggccaacatggtgaaacctcgtctctactacaaatacaaaaattagctgggtgtggtgccacatgcctgtaattccagctacttgggaggctgaggcatggagaatcgcttgaacccaggaggcagaagttgcagtgagcagagatcacaccactgcactccagcctgggcaacagagtaagactccatccacacacacacacacacacacaaaattgaaaagtgaagacattttaatggagatttaatagtgcttccagactaatgaactaatggagttttggctccactcatgagtgtatttgaaatgtaagtaaccagctacaaagaataatgtcacttcatttgattatgactaccaatcaagagaaggaggaatacatttctgaggagtgatactaaaccatttgagcttaaatgagtacctgattttgcagccattaaaatgagtcaataactatgtggaaatatagaaaaatattttataatataatactaagaaagaggacagtaggccataaagtgttagcagtgttatgctatgtctatataaataagcatgggccattaaaaatagcaaactgaaaacagttcatgtgtggggggcaagtttagaagtaattttaatgtatctaagaagtgatttcctttattgttgtactcaggtacgaagactaaaaatcaggatgaatccagaaaattaacacaaaaaagtatgtattaggctacttcctgtcatagtgaaattaaacactcaaagtaatgtaatctcagctgggcgtggcggctcatgcctgtaatcccagcactttggcaggacaaggcaggaggatcacttgaacctaggagttcgagaccagcctgggcaacacagcgagaacttgtctctattaaaaaaaaaaaaaggaatgtaatttcaatctttttcttgatatatggcttgagaatgataatgtaaaaggaattcttctcttacttcaataaaatgggttttaacataactttaaattcagttaaatatacaatattgaatacctatagttgactttgggatggggactttttcaagtcattaagagtgtttgtttaaggtgatctcattgatggtagttctcagccgtctcaaaaactgcaagctaatcagtcagacattctttaatgaccccaattttttcactttaattgttaccatgttttctatttttactgatttttgctaaagcatgtaagagtgaatttattatagcagtaatcttgtgtttctcctgatgtgcaataaatcaataattcaccagc

SEQ ID NO: 164828 - DNA, 2587 bp, Homo sapiens
  Payload ID: 12463
  Gene Symbol: PBLD
  Gene Name: phenazine biosynthesis-like protein domain containing
  Uniprot ID: P30039
  ENST ID: ENST00000358769
  CDS Start-End: 204-1070
gaattacaaaggaggccgtctgcctcctttgtcctggatttgggagttgagcaccttcgtcgccattggctttcctcccccagctccagcctctctcatcttgggaatctgcgtcagaagtcactcgcagtcccgtcagcccagaagacgtaaagcaggctaccagcaattttgagaacttgcaaaaacagcttgcaaggaaaatgaagcttcctattttcatagcagatgcattcacagcaagagcatttcgtgggaatcctgctgctgtttgcctcctagaaaatgaattggatgaagacatgcatcagaaaattgcaagggagatgaacctctctgaaactgcttttatccgaaaactgcacccgacagacaactttgcacaaagttcctgctttggactgagatggtttacaccagcgagtgaggtcccactctgtggccatgccaccctggcttctgcagctgtgctgtttcacaaaataaaaaacatgaatagcacgctcacgtttgtcactctgagtggagaactaagggccagacgagcagaggatggcatcgtcctggacttgcctctttatccagcccacccccaggacttccatgaagtagaggacttgataaagactgccataggcaacacactggtccaggacatctgttattctccagatacccaaaagctcctcgtccgcctcagtgacgtttacaacaggtcgtttctggagaacctgaaagtgaacacggagaatctgctgcaagttgaaaacacagggaaggtgaaagggcttattcttacccttaaaggagagcctggtgggcagacccaagcatttgacttttactcaagatattttgcaccgtgggttggtgtggctgaagacccagtgacagggtctgcacacgctgttctcagcagctactggtcccagcatctggggaagaaagaaatgcatgcttttcagtgttcccaccgaggaggagagctgggaatttcccttcgtccagacggaagggttgacattagaggaggtgcagctgttgttttagagggcacactgacagcctagaggtggttatgctgtgacgctgctgtctctaaccaccaagtattttctgcttaaaaagaaatgtaaggggctgcctttagcaaatgtgcgtagtagtctacttaatcctcatgttaaaaatcgaaaaatgggccaggcgcagtggctcatgcctgtaatcgtagcactttgagaggccaaggtgggtggatcacctgaggtcaggggttcgacaccagcctggccaacatggtgaaacctcgtctctactacaaatacaaaaattagctgggtgtggtgccacatgcctgtaattccagctacttgggaggctgaggcatggagaatcgcttgaacccaggaggcagaagttgcagtgagcagagatcacaccactgcactccagcctgggcaacagagtaagactccatccacacacacacacacacacacaaaattgaaaagtgaagacattttaatggagatttaatagtgcttccagactaatgaactaatggagttttggctccactcatgagtgtatttgaaatgtaagtaaccagctacaaagaataatgtcacttcatttgattatgactaccaatcaagagaaggaggaatacatttctgaggagtgatactaaaccatttgagcttaaatgagtacctgattttgcagccattaaaatgagtcaataactatgtggaaatatagaaaaatattttataatataatactaagaaagaggacagtaggccataaagtgttagcagtgttatgctatgtctatataaataagcatgggccattaaaaatagcaaactgaaaacagttcatgtgtggggggcaagtttagaagtaattttaatgtatctaagaagtgatttcctttattgttgtactcaggtacgaagactaaaaatcaggatgaatccagaaaattaacacaaaaaagtatgtattaggctacttcctgtcatagtgaaattaaacactcaaagtaatgtaatctcagctgggcgtggcggctcatgcctgtaatcccagcactttggcaggacaaggcaggaggatcacttgaacctaggagttcgagaccagcctgggcaacacagcgagaacttgtctctattaaaaaaaaaaaaaggaatgtaatttcaatctttttcttgatatatggcttgagaatgataatgtaaaaggaattcttctcttacttcaataaaatgggttttaacataactttaaattcagttaaatatacaatattgaatacctatagttgactttgggatggggactttttcaagtcattaagagtgtttgtttaaggtgatctcattgatggtagttctcagccgtctcaaaaactgcaagctaatcagtcagacattctttaatgaccccaattttttcactttaattgttaccatgttttctatttttactgatttttgctaaagcatgtaagagtgaatttattatagcagtaatcttgtgtttctcctgatgtgcaataaatcaataattcaccagc

SEQ ID NO: 164829 - DNA, 439 bp, Homo sapiens
  Payload ID: 12463
  Gene Symbol: PBLD
  Gene Name: phenazine biosynthesis-like protein domain containing
  ENST ID: ENST00000468798
  CDS Start-End: 1-271
gctcctcgtccgcctcagtgacgtttacaacaggtcgtttctggagaacctgaaagtgaacacggagaatctgctgcaagttgaaaacacagggaaggtgaaagggcttattcttacccttaaaggagagcctggtgggcagacccaagcatttgacttttactcaagatattttgcaccgtgggttggtgtggctgaagacccagtgacaggtacgaagactaaaaatcaggatgaatccagaaaattaacacaaaaaagtatgtattaggctacttcctgtcatagtgaaattaaacactcaaagtaatgtaatctcagctgggcgtggcggctcatgcctgtaatcccagcactttggcaggacaaggcaggaggatcacttgaacctaggagttcgagaccagcctgggcaacacagcgagaacttgtctctatt

SEQ ID NO: 164830 - DNA, 1349 bp, Homo sapiens
  Payload ID: 12463
  Gene Symbol: PBLD
  Gene Name: phenazine biosynthesis-like protein domain containing
  Uniprot ID: P30039
  ENST ID: ENST00000495025
  CDS Start-End: 329-1171
cctcccaggagactttccgtttatctagctgccctagagaccagaaagctagggagagtacgccccttccccctcccgtcagcagccaagcctggcttaaaacccttcgccaccgggcggcagaattacaaaggaggccgtctgcctcctttgtcctggatttgggagttgagcaccttcgtcgccattggctttcctcccccagctccagcctctctcatcttgggaatctgcgtcagaagtcactcgcagtcccgtcagcccagaagaagacgtaaagcaggctaccagcaattttgagaacttgcaaaaacagcttgcaaggaaaatgaagcttcctattttcatagcagatgcattcacagcaagagcatttcgtgggaatcctgctgctgtttgcctcctagaaaatgaattggatgaagacatgcatcagaaaattgcaagggagatgaacctctctgaaactgcttttatccgaaaactgcacccgacagacaactttgcacaaagttcctgctttggactgagatggtttacaccagcgagtgaggtcccactctgtggccatgccaccctggcttctgcagctgtgctgtttcacaaaataaaaaacatgaatagcacgctcacgtttgtcactctgagtggagaactaagggccagacgagcagaggatggcatcgtcctggacttgcctctttatccagcccacccccaggacttccatgaagtagaggacttgataaagactgccataggcaacacactggtccaggacatctgttattctccagatacccaaaagctcctcgtccgcctcagtgacgtttacaacaggtcgtttctggagaacctgaaagtgaacacggagaatctgctgcaagttgaaaacacagggaaggtgaaagggcttattcttacccttaaaggagagcctggtgggcagacccaagcatttgacttttactcaagatattttgcaccgtgggttggtgtggctgaagacccagtgacagggtctgcacacgctgttctcagcagctactggtcccagcatctggggaagaaagaaatgcatggtaggacagctctttaccaatttcttttttatttgcctaattcgaagctagtgttccttctcatatgtactatccccttgaaaatgtaatacaatgtcatgtatcacccatgtgaaaatgaaaggttttaaaattccttcacccttaaagatcctccaccccaaacagccttcacctctgcctcccccaacatacagagactgtacagacacagatacagtaactgcccaataagtgtttgttgaataaaatagctgtataactttg

SEQ ID NO: 164831 - DNA, 2466 bp, Homo sapiens
  Payload ID: 12464
  Gene Symbol: PAH
  Gene Name: phenylalanine hydroxylase
  ENST ID: ENST00000307000
  CDS Start-End: 272-1615
accctttgtaactctcttctcctccctagtgcgaggttaaaaccttcagccccacgtgctgtttgcaaacctgcctgtacctgaggccctaaaaagccagagacctcactcccggggagccagcatgtccactgcggtcctggaaaacccaggcttgggcaggaaactctctgactttggacagttttaggtacctgctgcttattgtggacacacatagaattttatgtattatttttcgacttaggctaatgatttagcaaactctggaatgtcagccctaaccccaaccttggttttctgtcacatgcatgtagaaacaagctatattgaagacaactgcaatcaaaatggtgccatatcactgatcttctcactcaaagaagaagttggtgcattggccaaagtattgcgcttatttgaggagaatgatgtaaacctgacccacattgaatctagaccttctcgtttaaagaaagatgagtatgaatttttcacccatttggataaacgtagcctgcctgctctgacaaacatcatcaagatcttgaggcatgacattggtgccactgtccatgagctttcacgagataagaagaaagacacagtgccctggttcccaagaaccattcaagagctggacagatttgccaatcagattctcagctatggagcggaactggatgctgaccaccctggttttaaagatcctgtgtaccgtgcaagacggaagcagtttgctgacattgcctacaactaccgccatgggcagcccatccctcgagtggaatacatggaggaagaaaagaaaacatggggcacagtgttcaagactctgaagtccttgtataaaacccatgcttgctatgagtacaatcacatttttccacttcttgaaaagtactgtggcttccatgaagataacattccccagctggaagacgtttctcagttcctgcagacttgcactggtttccgcctccgacctgtggctggcctgctttcctctcgggatttcttgggtggcctggccttccgagtcttccactgcacacagtacatcagacatggatccaagcccatgtatacccccgaacctgacatctgccatgagctgttgggacatgtgcccttgttttcagatcgcagctttgcccagttttcccaggaaattggccttgcctctctgggtgcacctgatgaatacattgaaaagctcgccacaatttactggtttactgtggagtttgggctctgcaaacaaggagactccataaaggcatatggtgctgggctcctgtcatcctttggtgaattacagtactgcttatcagagaagccaaagcttctccccctggagctggagaagacagccatccaaaattacactgtcacggagttccagcccctctattacgtggcagagagttttaatgatgccaaggagaaagtaaggaactttgctgccacaatacctcggcccttctcagttcgctacgacccatacacccaaaggattgaggtcttggacaatacccagcagcttaagattttggctgattccattaacagtgaaattggaatcctttgcagtgccctccagaaaataaagtaaagccatggacagaatgtggtctgtcagctgtgaatctgttgatggagatccaactatttctttcatcagaaaaagtccgaaaagcaaaccttaatttgaaataacagccttaaatcctttacaagatggagaaacaacaaataagtcaaaataatctgaaatgacaggatatgagtacatactcaagagcataatggtaaatcttttggggtcatctttgatttagagatgataatcccatactctcaattgagttaaatcagtaatctgtcgcatttcatcaagattaattaaaatttgggacctgcttcattcaagcttcatatatgctttgcagagaactcataaaggagcatataaggctaaatgtaaaacacaagactgtcattagaattgaattattgggcttaatataaatcgtaacctatgaagtttattttctattttagttaactatgattccaattactactttgttattgtacctaagtaaattttctttaagtcagaagcccattaaaatagttacaagcattgaacttctttagtattatattaatataaaaacatttttgtatgttttattgtaatcataaatactgctgtataaggtaataaaactctgcacctaatccccataacttccagtatcattttccaattaattatcaagtctgttttgggaaacactttgaggacatttatgatgcagcagatgttgactaaaggcttggttggtagatattcaggaaatgttcactgaataaataagtaaatacattattgaaaagcaaatctgtataaatgtgaaatttttatttgtattagtaataaaacattagtagtttaaa

SEQ ID NO: 164832 - DNA, 705 bp, Homo sapiens
  Payload ID: 12464
  Gene Symbol: PAH
  Gene Name: phenylalanine hydroxylase
  ENST ID: ENST00000546844
  CDS Start-End: 354-705
tgagtgcgtcctggcgagtctcagcccccaagcgggtggaacgcaccaagggtctcatccgcgaggaagggctttaacgctcagggtcaggaacctctgagagctcttggggacttgcgcgcccttggatgctcttgcgttcaacagggctaggagactaccggctggggcgaggaatgcaggcgcctagagccttggagctcctgaaacgttcctgccgcctccggaaagcaagggcagtttaccgaagtgactgagtgcgaggttaaaaccttcagccccacgtgctgtttgcaaacctgcctgtacctgaggccctaaaaagccagagacctcactcccggggagccagcatgtccactgcggtcctggaaaacccaggcttgggcaggaaactctctgactttggacaggaaacaagctatattgaagacaactgcaatcaaaatggtgccatatcactgatcttctcactcaaagaagaagttggtgcattggccaaagtattgcgcttatttgaggagaatgatgtaaacctgacccacattgaatctagaccttctcgtttaaagaaagatgagtatgaatttttcacccatttggataaacgtagcctgcctgctctgacaaacatcatcaagatcttgaggcatgacattggtgccactgtccatgagctttcacgagataagaagaaagacacag

SEQ ID NO: 164833 - DNA, 675 bp, Homo sapiens
  Payload ID: 12464
  Gene Symbol: PAH
  Gene Name: phenylalanine hydroxylase
  ENST ID: ENST00000551337
  CDS Start-End: 268-675
gcggccgccgcggctgcggccgtggcaaagaaacaggctgcgggcggcaggaagggctgctggggctgcggctggggctgctggccggcgccgccgctctccatcttggcagagctttccatgcgcagcggcggccaaggagtcgcggaatcagagcgatccgggacgcgagtgcgaggttaaaaccttcagccccacgtgctgtttgcaaacctgcctgtacctgaggccctaaaaagccagagacctcactcccggggagccagcatgtccactgcggtcctggaaaacccaggcttgggcaggaaactctctgactttggacaggaaacaagctatattgaagacaactgcaatcaaaatggtgccatatcactgatcttctcactcaaagaagaagttggtgcattggccaaagtattgcgcttatttgaggagaatgatgtaaacctgacccacattgaatctagaccttctcgtttaaagaaagatgagtatgaatttttcacccatttggataaacgtagcctgcctgctctgacaaacatcatcaagatcttgaggcatgacattggtgccactgtccatgagctttcacgagataagaagaaagacacagtgccctggttcccaagaaccattcaagagctggacagatttgccaatcagattctc

SEQ ID NO: 164834 - DNA, 4122 bp, Homo sapiens
  Payload ID: 12464
  Gene Symbol: PAH
  Gene Name: phenylalanine hydroxylase
  Uniprot ID: P00439
  ENST ID: ENST00000553106
  CDS Start-End: 474-1832
cagctgggggtaaggggggcggattattcatataattgttataccagacggtcgcaggcttagtccaattgcagagaactcgcttcccaggcttctgagagtcccggaagtgcctaaacctgtctaatcgacggggcttgggtggcccgtcgctccctggcttcttccctttacccagggcgggcagcgaagtggtgcctcctgcgtcccccacaccctccctcagcccctcccctccggcccgtcctgggcaggtgacctggagcatccggcaggctgccctggcctcctgcgtcaggacaacgcccacgaggggcgttactgtgcggagatgcaccacgcaagagacaccctttgtaactctcttctcctccctagtgcgaggttaaaaccttcagccccacgtgctgtttgcaaacctgcctgtacctgaggccctaaaaagccagagacctcactcccggggagccagcatgtccactgcggtcctggaaaacccaggcttgggcaggaaactctctgactttggacaggaaacaagctatattgaagacaactgcaatcaaaatggtgccatatcactgatcttctcactcaaagaagaagttggtgcattggccaaagtattgcgcttatttgaggagaatgatgtaaacctgacccacattgaatctagaccttctcgtttaaagaaagatgagtatgaatttttcacccatttggataaacgtagcctgcctgctctgacaaacatcatcaagatcttgaggcatgacattggtgccactgtccatgagctttcacgagataagaagaaagacacagtgccctggttcccaagaaccattcaagagctggacagatttgccaatcagattctcagctatggagcggaactggatgctgaccaccctggttttaaagatcctgtgtaccgtgcaagacggaagcagtttgctgacattgcctacaactaccgccatgggcagcccatccctcgagtggaatacatggaggaagaaaagaaaacatggggcacagtgttcaagactctgaagtccttgtataaaacccatgcttgctatgagtacaatcacatttttccacttcttgaaaagtactgtggcttccatgaagataacattccccagctggaagacgtttctcagttcctgcagacttgcactggtttccgcctccgacctgtggctggcctgctttcctctcgggatttcttgggtggcctggccttccgagtcttccactgcacacagtacatcagacatggatccaagcccatgtatacccccgaacctgacatctgccatgagctgttgggacatgtgcccttgttttcagatcgcagctttgcccagttttcccaggaaattggccttgcctctctgggtgcacctgatgaatacattgaaaagctcgccacaatttactggtttactgtggagtttgggctctgcaaacaaggagactccataaaggcatatggtgctgggctcctgtcatcctttggtgaattacagtactgcttatcagagaagccaaagcttctccccctggagctggagaagacagccatccaaaattacactgtcacggagttccagcccctctattacgtggcagagagttttaatgatgccaaggagaaagtaaggaactttgctgccacaatacctcggcccttctcagttcgctacgacccatacacccaaaggattgaggtcttggacaatacccagcagcttaagattttggctgattccattaacagtgaaattggaatcctttgcagtgccctccagaaaataaagtaaagccatggacagaatgtggtctgtcagctgtgaatctgttgatggagatccaactatttctttcatcagaaaaagtccgaaaagcaaaccttaatttgaaataacagccttaaatcctttacaagatggagaaacaacaaataagtcaaaataatctgaaatgacaggatatgagtacatactcaagagcataatggtaaatcttttggggtcatctttgatttagagatgataatcccatactctcaattgagttaaatcagtaatctgtcgcatttcatcaagattaattaaaatttgggacctgcttcattcaagcttcatatatgctttgcagagaactcataaaggagcatataaggctaaatgtaaaacacaagactgtcattagaattgaattattgggcttaatataaatcgtaacctatgaagtttattttctattttagttaactatgattccaattactactttgttattgtacctaagtaaattttctttaagtcagaagcccattaaaatagttacaagcattgaacttctttagtattatattaatataaaaacatttttgtatgttttattgtaatcataaatactgctgtataaggtaataaaactctgcacctaatccccataacttccagtatcattttccaattaattatcaagtctgttttgggaaacactttgaggacatttatgatgcagcagatgttgactaaaggcttggttggtagatattcaggaaatgttcactgaataaataagtaaatacattattgaaaagcaaatctgtataaatgtgaaatttttatttgtattagtaataaaacattagtagtttaaacaatttcactgtttcagttatttcctggaatgaaatattcctctcactgccttagaaatacattagctagatagttttgtaacatgagaaaatggccagaggctcatatctccaaccctttgcaggggctccttgtgacactcaaagtcatgcctggacagtcaacggactttgacttttgttgattgtgtgtttgccatgaaaacatgaatatctgagaagcagtggggagaaaaaaaacaatatctttgtagctatgatttgaaattctcatactactttacattttattttggaaatagttaagtcttaaagaatttgcatagtgtttctttgagtttagttctcagaacagctgtagtatcatcaacagcaaattctgggtaccttcccagctccacccaatttgaatctctgaagataaggcccagagacctgtatttttaagtaccccatttttttaattattcatagccaaattctatcaggtacattcagtttgagaaaacctgatttgtggtggtcagtctgccactgccaatgatgtcaatgtggataagctgtttcccttctttagacctcagtgtcactctaacaatgagggagttaaactttataaaccaaggtccattgcagccttgaaatatgattcaagtgttcatatgtgtctttatatagctatgcctgatccactgatggggtgttacaatacctgcttatatatgccagctgggaggaaagaggaatttactgaatgtgtctgaagtttcattgttttgaagttggaattttatgcctgtatctatgtttatgcctttgtaaaacccactgattttaaaagtgaaaaaggacttttttctctgcttttactctaaacaccaaacaatccctgcaaagggattattctgatgtttcttcatttcacatgaaaagttaattattgactctggaacttaaatattagataatatttttgacaatattgaagagtgagttttagtccagtaaagatgttttaatgagcttgaaggtaaagtttcggttaagttatgattttcacaggaagttacatactgaatgaaagataatatttgtatttttggtaatgtgctactcagttcttagctcttttttatccagatataaaagcccagtctatagctatgggatttaataaatttccaatatgtaagtgtttttatttgtttaatttctagtaaatgagcaatattttagaaacagtatcagtctttactgacagatgatcttgctgagtacaatcaaaataaatacataaaaaattctaagcatgtggcattgatgtttaataagtttctgaaagtaggaatctgaattttaactgtaggtttctaagttatataatttagttgtgtttcaaaaaatccaccaataaaatgtcagctttataaaaacagaaa

SEQ ID NO: 164835 - DNA, 652 bp, Homo sapiens
  Payload ID: 12464
  Gene Symbol: PAH
  Gene Name: phenylalanine hydroxylase
  ENST ID: ENST00000550978
  CDS Start-End: 1-449
tggaaaacccaggcttgggcaggaaactctctgactttggacaggaaacaagctatattgaagacaactgcaatcaaaatggtgccatatcactgatcttctcactcaaagaagaagttggtgcattggccaaagtattgcgcttatttgaggagaatgatgtaaacctgacccacattgaatctagaccttctcgtttaaagaaagatgagtatgaatttttcacccatttggataaacgtagcctgcctgctctgacaaacatcatcaagatcttgaggcatgacattggtgccactgtccatgagctttcacgagataagaagaaagacacagtgccctggttcccaagaaccattcaagagctggacagatttgccaatcagattctcagctatggagcggaactggatgctgaccaccctgtgagtccatggcccgtaggatgagattttttcagtgcctctcctccactcccctcccttcctcttaccttctctacttggagcaatgtacttgttcacttgttcaacaaacacttattgtgttcctatttacacgagggctgggaaaaattagcaagactttattgtcatcatcattatcatggtcattatttttgtaggagcaaatataaatcactgtccagaaa

SEQ ID NO: 164836 - DNA, 429 bp, Homo sapiens
  Payload ID: 12464
  Gene Symbol: PAH
  Gene Name: phenylalanine hydroxylase
  ENST ID: ENST00000635477
  CDS Start-End: 1-429
acctgacatctgccatgagctgttgggacatgtgcccttgttttcagatcgcagctttgcccagttttcccagatttactggtttactgtggagtttgggctctgcaaacaaggagactccataaaggcatatggtgctgggctcctgtcatcctttggtgaattacagtactgcttatcagagaagccaaagcttctccccctggagctggagaagacagccatccaaaattacactgtcacggagttccagcccctctattacgtggcagagagttttaatgatgccaaggagaaagtaaggaactttgctgccacaatacctcggcccttctcagttcgctacgacccatacacccaaaggattgaggtcttggacaatacccagcagcttaagattttggctgattccattaacagtgaaattgg

SEQ ID NO: 164837 - DNA, 1663 bp, Homo sapiens
  Payload ID: 12465
  Gene Symbol: FARS2
  Gene Name: phenylalanyl-tRNA synthetase 2, mitochondrial
  Uniprot ID: O95363
  ENST ID: ENST00000274680
  CDS Start-End: 157-1512
gtcaaaatggcagcgcccagcgtgcgcgggtatctctgaagttggggtttaagattcttgcccgtgagagcgaacgagcctgccgtacttctgattttgaaacacctgggtctgggcttcccgggcgagcggtggaacctgtgagaagtttctacaatggtgggctcagctctcaggagaggtgcccatgcatatgtctacctggtgagtaaggccagtcacatctccagaggccatcagcaccaggcctggggatcgaggcctcctgcagcagagtgtgccacccaaagagctccaggcagtgtggtggagctgctgggcaaatcctaccctcaggacgaccacagcaacctcacccggaaggtcctcaccagagttggcaggaacctgcacaaccagcagcatcaccctctgtggctgatcaaggagagggtgaaggagcacttctacaagcagtatgtgggccgctttgggaccccgttgttctcggtctacgacaacctttctccagtggtcacgacctggcagaactttgacagcctgctcatcccagctgatcaccccagcaggaagaagggggacaactattacctgaatcggactcacatgctgagagcgcacacgtctgcacaccagtgggacttgctgcacgcgggactggatgccttcctggtggtgggtgatgtctacaggcgtgaccagatcgactcccagcactaccctattttccaccagctggaggccgtgcggctcttctccaagcatgagttatttgctggtataaaggatggagaaagcctgcagctctttgaacaaagttctcgctctgcgcataaacaagagacacacaccatggaggccgtgaagcttgtagagtttgatcttaagcaaacgcttaccaggctcatggcacatctttttggagatgagctggagataagatgggtagactgctacttcccttttacacatccttcctttgagatggagatcaactttcatggagaatggctggaagttcttggctgcggggtgatggaacaacaactggtcaattcagctggtgctcaagaccgaatcggctgggcttttggcctaggattagaaaggctagccatgatcctctacgacatccctgatatccgtctcttctggtgtgaggacgagcgcttcctgaagcagttctgtgtatccaacattaatcagaaggtgaagtttcagcctcttagcaaatatccggctgtgatcaatgatatttcattctggttgccctctgagaattacgcagaaaatgatttctatgacttagtccgaacaattggaggagacctggtggaaaaggttgatctcatagacaagtttgtacatccaaagacgcacaagaccagccactgctaccgcatcacgtaccgccacatggaacggactctgtcccagagagaggtcaggcacatccaccaggccttgcaggaggctgcagtccagctgttgggtgtggagggcaggttctgatgtcaccacttcactcaggctgcagccctcttggggctccaggatttgctgaaagagaaaaagatatggtttgtgaactggggcatcaatcatcttttgataaatggatcagttttaggactttcagaaaataaaagatcgctcttgaaaa

SEQ ID NO: 164838 - DNA, 1692 bp, Homo sapiens
  Payload ID: 12465
  Gene Symbol: FARS2
  Gene Name: phenylalanyl-tRNA synthetase 2, mitochondrial
  Uniprot ID: O95363
  ENST ID: ENST00000324331
  CDS Start-End: 337-1692
acgcggcgggagggcggggaaataagaggactggccgcccgtgcatccagccaagctcctggcggacggatatcggaggcccaggcattcgagggacgtgcagttgcatcacggagagcctttgggaaccgtctggggtcttggcggagacatttgtgtttcgggggcagcgccccttcctacatccaggaggccgcgttgcccgggttaccgaaggccgccgcaccgacgccccgcccctgaccgccgatgcccctcccacgccggctgcggtcgccctcggcgctgcctgagagagtttgcgggatttcaaggaacctgtgagaagtttctacaatggtgggctcagctctcaggagaggtgcccatgcatatgtctacctggtgagtaaggccagtcacatctccagaggccatcagcaccaggcctggggatcgaggcctcctgcagcagagtgtgccacccaaagagctccaggcagtgtggtggagctgctgggcaaatcctaccctcaggacgaccacagcaacctcacccggaaggtcctcaccagagttggcaggaacctgcacaaccagcagcatcaccctctgtggctgatcaaggagagggtgaaggagcacttctacaagcagtatgtgggccgctttgggaccccgttgttctcggtctacgacaacctttctccagtggtcacgacctggcagaactttgacagcctgctcatcccagctgatcaccccagcaggaagaagggggacaactattacctgaatcggactcacatgctgagagcgcacacgtctgcacaccagtgggacttgctgcacgcgggactggatgccttcctggtggtgggtgatgtctacaggcgtgaccagatcgactcccagcactaccctattttccaccagctggaggccgtgcggctcttctccaagcatgagttatttgctggtataaaggatggagaaagcctgcagctctttgaacaaagttctcgctctgcgcataaacaagagacacacaccatggaggccgtgaagcttgtagagtttgatcttaagcaaacgcttaccaggctcatggcacatctttttggagatgagctggagataagatgggtagactgctacttcccttttacacatccttcctttgagatggagatcaactttcatggagaatggctggaagttcttggctgcggggtgatggaacaacaactggtcaattcagctggtgctcaagaccgaatcggctgggcttttggcctaggattagaaaggctagccatgatcctctacgacatccctgatatccgtctcttctggtgtgaggacgagcgcttcctgaagcagttctgtgtatccaacattaatcagaaggtgaagtttcagcctcttagcaaatatccggctgtgatcaatgatatttcattctggttgccctctgagaattacgcagaaaatgatttctatgacttagtccgaacaattggaggagacctggtggaaaaggttgatctcatagacaagtttgtacatccaaagacgcacaagaccagccactgctaccgcatcacgtaccgccacatggaacggactctgtcccagagagaggtcaggcacatccaccaggccttgcaggaggctgcagtccagctgttgggtgtggagggcaggttctga

SEQ ID NO: 164839 - DNA, 434 bp, Homo sapiens
  Payload ID: 12465
  Gene Symbol: FARS2
  Gene Name: phenylalanyl-tRNA synthetase 2, mitochondrial
  ENST ID: ENST00000445533
  CDS Start-End: 1-306
ttatttgctggtataaaggatggagaaagcctgcagctctttgaacaaagttctcgctctgcgcataaacaagagacacacaccatggaggccgtgaagcttgtagagtttgatcttaagcaaacgcttaccaggctcatggcacatctttttggagatgagctggagataagatgggtagactgctacttcccttttacacatccttcctttgagatggagatcaactttcatggagaatggctggaagttcttggctgcggggtgatggaacaacaactggtcaattcaggcggcgccacctgactgagagaaaatggaaacacgaggttgctgattgaattctacgcatatctataggcatttcagaaagatctgtctggctcttttctgtaagaccattgcttaataaaaatgatggcttctaaatgtaa

SEQ ID NO: 164840 - DNA, 562 bp, Homo sapiens
  Payload ID: 12465
  Gene Symbol: FARS2
  Gene Name: phenylalanyl-tRNA synthetase 2, mitochondrial
  ENST ID: ENST00000602691
  CDS Start-End: 421-562
gcgctgcctgagagagtttgcgggatttcaagggtgacttgatttcgcctgatcctggtcggcagggtggggtttcttggcattcctcaggccgggggatgcgacgtctgggtgtggaggtgatgagctaggggttctgtggcactccggctctgctcagggcgacctgcgtaggggcctctggggcaggcccgctttctgtcaaaatggcagcgcccagcgtgcgcgggtatctctgaagttggggtttaagattcttgcccgtgagagcgaacgagcctgccgtacttctgattttgaaacacctgggtctgggcttcccgggcgagcggtggttgcattatcaaatcaaggaggaaatgcaatcagagaacaggcagaaaaactatgattataatgaacctgtgagaagtttctacaatggtgggctcagctctcaggagaggtgcccatgcatatgtctacctggtgagtaaggccagtcacatctccagaggccatcagcaccaggcctggggatcgaggcctcctgcagcagagtgtgccacccaaagagctccag

SEQ ID NO: 164841 - DNA, 1814 bp, Homo sapiens
  Payload ID: 12466
  Gene Symbol: FARSA
  Gene Name: phenylalanyl-tRNA synthetase, alpha subunit
  Uniprot ID: Q9Y285
  ENST ID: ENST00000314606
  CDS Start-End: 20-1546
gagcacactggaaggagtcatggcggatggtcaggtggcggaactgctgctccggcggctggaggcgtctgatggcggcctggacagcgccgagttggcggctgagctgggcatggagcaccaggcggtggtgggcgccgtgaagagccttcaggcgctgggcgaggtcatcgaggctgaacttcggtccaccaagcactgggagcttactgcggagggcgaggagattgcccgggagggcagccatgaggcccgtgtgtttcgaagcattcccccagagggcctggcccagagcgagcttatgcgactgcccagtggcaaagtgggcttcagcaaggccatgtccaacaagtggattcgggtggacaagagtgcggctgacgggccccgggtgttccgagtggtggacagcatggaggatgaggtgcagcggcggctccagctggtccgggggggacaggctgagaagctgggggagaaggagaggagcgagctgaggaagaggaagctgttggctgaagtgactctgaagacctactgggtgagcaaaggcagtgcctttagtaccagcatctccaagcaagagacagagctgagcccagagatgatctccagtggctcttggcgggaccggcccttcaagccctacaacttcttggcccacggtgtcctccccgacagcggccaccttcacccgctgctcaaggtccgctcccagttccgacagatcttcctggagatggggttcaccgagatgccgactgataacttcattgagagctccttctggaactttgacgccctcttccagccccagcagcacccagcccgtgaccagcacgacaccttcttccttcgagatccagcggaggccctgcagctcccaatggactatgtccagcgggtcaagcggacccactctcagggcggctacggctcacaggggtacaagtataactggaagctggacgaggcccggaaaaacctactgcgaacccacaccacatcagccagcgcccgtgcgctctaccgccttgcccagaagaagcccttcactccggtcaagtacttctccatcgaccgcgtattccggaatgagaccctggacgccacgcacctggctgagttccaccagatcgagggcgtggtggcggatcatggtctcaccttgggccacctcatgggcgttctgcgggagttcttcaccaagctgggtatcacgcaactccgcttcaagccagcctacaacccatacacagagcccagcatggaggtgttcagctaccaccaaggcctgaagaagtgggtggaggtcggaaactcgggggtcttccgtccagagatgctgctgcccatggggcttcccgagaacgtgtcggtcattgcctggggcctctccctggagcgcccaacgatgatcaaatatggcatcaacaatatccgggagctggtgggccacaaggtgaacctgcagatggtgtatgacagtcccctgtgccgcctggatgccgagccgaggccccctcccacacaggaggctgcgtgacatgggccactctaggacaggtcatcctccccgagtccctgctgctgcgctcctttgcatccctggccagtgaccttgtatttatgaggcctctgtgaggccagcccccaccttcctctttcccacctgtcccaggaccagaatcccagggacagaggactgggtagcaggttccttctgttgtcctgtgtggtgtgtctactgtgagggtgggccctgaggagacctgtgggccacctattgtctaataaagtgggcagttgccccc

SEQ ID NO: 164842 - DNA, 1720 bp, Homo sapiens
  Payload ID: 12466
  Gene Symbol: FARSA
  Gene Name: phenylalanyl-tRNA synthetase, alpha subunit
  Uniprot ID: Q9Y285
  ENST ID: ENST00000423140
  CDS Start-End: 19-1452
agcacactggaaggagtcatggcggatggtcaggtggcggaactgctgctccggcggctggaggcgtctgatggcggcctggacagcgccgagttggcggctgagctgggcatggagcaccaggcggtggtgggcgccgtgaagagccttcaggcgctgggcgaggtcatcgaggctgaacttcggtccaccaagcactgggagcttactgcggagggcgaggagattgcccgggagggcagccatgaggcccgtgtgtttcgaagcattcccccagagggcctggcccagagcgagcttatgcgactgcccagtggcaaagtgggcttcagcaaggccatgtccaacaagtggattcgggtggacaagagtgcggctgacgggccccgggtgttccgagtggtggacagcatggaggatgaggtgcagcggcggctccagctggtccgggggggacaggctgagaagctgggggagaaggagaggagcgagctgaggaagaggaagctgttggctgaagttggctcttggcgggaccggcccttcaagccctacaacttcttggcccacggtgtcctccccgacagcggccaccttcacccgctgctcaaggtccgctcccagttccgacagatcttcctggagatggggttcaccgagatgccgactgataacttcattgagagctccttctggaactttgacgccctcttccagccccagcagcacccagcccgtgaccagcacgacaccttcttccttcgagatccagcggaggccctgcagctcccaatggactatgtccagcgggtcaagcggacccactctcagggcggctacggctcacaggggtacaagtataactggaagctggacgaggcccggaaaaacctactgcgaacccacaccacatcagccagcgcccgtgcgctctaccgccttgcccagaagaagcccttcactccggtcaagtacttctccatcgaccgcgtattccggaatgagaccctggacgccacgcacctggctgagttccaccagatcgagggcgtggtggcggatcatggtctcaccttgggccacctcatgggcgttctgcgggagttcttcaccaagctgggtatcacgcaactccgcttcaagccagcctacaacccatacacagagcccagcatggaggtgttcagctaccaccaaggcctgaagaagtgggtggaggtcggaaactcgggggtcttccgtccagagatgctgctgcccatggggcttcccgagaacgtgtcggtcattgcctggggcctctccctggagcgcccaacgatgatcaaatatggcatcaacaatatccgggagctggtgggccacaaggtgaacctgcagatggtgtatgacagtcccctgtgccgcctggatgccgagccgaggccccctcccacacaggaggctgcgtgacatgggccactctaggacaggtcatcctccccgagtccctgctgctgcgctcctttgcatccctggccagtgaccttgtatttatgaggcctctgtgaggccagcccccaccttcctctttcccacctgtcccaggaccagaatcccagggacagaggactgggtagcaggttccttctgttgtcctgtgtggtgtgtctactgtgagggtgggccctgaggagacctgtgggccacctattgtctaataaagtgggcagttgccccc

SEQ ID NO: 164843 - DNA, 521 bp, Homo sapiens
  Payload ID: 12466
  Gene Symbol: FARSA
  Gene Name: phenylalanyl-tRNA synthetase, alpha subunit
  ENST ID: ENST00000587981
  CDS Start-End: 16-521
acactggaaggagtcatggcggatggtcaggtggcggaactgctgctccggcggctggaggcgtctgatggcggcctggacagcgccgagttggcggctgagctgggcatggagcaccaggcggtggtgggcgccgtgaagagccttcaggcgctgggcgaggtcatcgaggctgaacttcggtccaccaagcactgggagcttactgcggagggcgaggagattgcccgggagggcagccatgaggcccgtgtgtttcgaagcattcccccagagggcctggcccagagcgagcttatgcgactgcccagtggcaaagtgggcttcagcaaggccatgtccaacaagtggattcgggtggacaagagtgcggctgacgggccccgggtgttccgagtggtgcgttcctgcgggctggtcagggggcaggtggacgggcacatgggcccctggccctcatacccctcacactccttatcctggcaggtggacagcatggaggatgaggtgcagcggcggct

SEQ ID NO: 164844 - DNA, 1135 bp, Homo sapiens
  Payload ID: 12466
  Gene Symbol: FARSA
  Gene Name: phenylalanyl-tRNA synthetase, alpha subunit
  ENST ID: ENST00000593021
  CDS Start-End: 1-1135
tggcggaactgctgctccggcggctggaggcgtctgatggcggcctggacagcgccgagttggcggctgagctgggcatggagcaccaggcggtggtgggcgccgtgaagagccttcaggcgctgggcgaggtggacagcatggaggatgaggtgcagcggcggctccagctggtccgggggggacaggctgagaagctgggggagaaggagaggagcgagctgaggaagaggaagctgttggctgaagtgactctgaagacctactgggtgagcaaaggcagtgcctttagtaccagcatctccaagcaagagacagagctgagcccagagatgatctccagtggctcttggcgggaccggcccttcaagccctacaacttcttggcccacggtgtcctccccgacagcggccaccttcacccgctgctcaaggtccgctcccagttccgacagatcttcctggagatggggttcaccgagatgccgactgataacttcattgagagctccttctggaactttgacgccctcttccagccccagcagcacccagcccgtgaccagcacgacaccttcttccttcgagatccagcggaggccctgcagctcccaatggactatgtccagcgggtcaagcggacccactctcagggcggctacggctcacaggggtacaagtataactggaagctggacgaggcccggaaaaacctactgcgaacccacaccacatcagccagcgcccgtgcgctctaccgccttgcccagaagaagcccttcactccggtcaagtacttctccatcgaccgcgtattccggaatgagaccctggacgccacgcacctggctgagttccaccagatcgagggcgtggtggcggatcatggtctcaccttgggccacctcatgggcgttctgcgggagttcttcaccaagctgggtatcacgcaactccgcttcaagccagcctacaacccatacacagagcccagcatggaggtgttcagctaccaccaaggcctgaagaagtgggtggaggtcggaaactcgggggtcttccgtccagagatgctgctgcccatggggcttcccgagaacgtgtcggtcattgcctggggcctctccctggagcg

SEQ ID NO: 164845 - DNA, 2057 bp, Homo sapiens
  Payload ID: 12466
  Gene Symbol: FARSA
  Gene Name: phenylalanyl-tRNA synthetase, alpha subunit
  ENST ID: ENST00000588025
  CDS Start-End: 142-1788
agagggttctgtaacccagagacggggaagtccaaggtcacacagcccgctcgaagtgaggctagataaaactcaaaacagggcggtgcttctgaccttgagataatcaattttacccctctggtcaaccagacgccattgatggagccagggtggaggtgggaactgagtcccatgcaccttttgcggctccgtcgccacactcaagatgacgacacattgagccctgttctacagttagacacattcaagatggcggtacacactccggttccggtggcggaactgctgctccggcggctggaggcgtctgatggcggcctggacagcgccgagttggcggctgagctgggcatggagcaccaggcggtggtgggcgccgtgaagagccttcaggcgctgggcgaggtcatcgaggctgaacttcggtccaccaagcactgggagcttactgcggagggcgaggagattgcccgggagggcagccatgaggcccgtgtgtttcgaagcattcccccagagggcctggcccagagcgagcttatgcgactgcccagtggcaaagtgggcttcagcaaggccatgtccaacaagtggattcgggtggacaagagtgcggctgacgggccccgggtgttccgagtggtggacagcatggaggatgaggtgcagcggcggctccagctggtccgggggggacaggctgagaagctgggggagaaggagaggagcgagctgaggaagaggaagctgttggctgaagtgactctgaagacctactgggtgagcaaaggcagtgcctttagtaccagcatctccaagcaagagacagagctgagcccagagatgatctccagtggctcttggcgggaccggcccttcaagccctacaacttcttggcccacggtgtcctccccgacagcggccaccttcacccgctgctcaaggtccgctcccagttccgacagatcttcctggagatggggttcaccgagatgccgactgataacttcattgagagctccttctggaactttgacgccctcttccagccccagcagcacccagcccgtgaccagcacgacaccttcttccttcgagatccagcggaggccctgcagctcccaatggactatgtccagcgggtcaagcggacccactctcagggcggctacggctcacaggggtacaagtataactggaagctggacgaggcccggaaaaacctactgcgaacccacaccacatcagccagcgcccgtgcgctctaccgccttgcccagaagaagcccttcactccggtcaagtacttctccatcgaccgcgtattccggaatgagaccctggacgccacgcacctggctgagttccaccagatcgagggcgtggtggcggatcatggtctcaccttgggccacctcatgggcgttctgcgggagttcttcaccaagctgggtatcacgcaactccgcttcaagccagcctacaacccatacacagagcccagcatggaggtgttcagctaccaccaaggcctgaagaagtgggtggaggtcggaaactcgggggtcttccgtccagagatgctgctgcccatggggcttcccgagaacgtgtcggtcattgcctggggcctctccctggagcgcccaacgatgatcaaatatggcatcaacaatatccgggagctggtgggccacaaggtgaacctgcagatggtgtatgacagtcccctgtgccgcctggatgccgagccgaggccccctcccacacaggaggctgcgtgacatgggccactctaggacaggtcatcctccccgagtccctgctgctgcgctcctttgcatccctggccagtgaccttgtatttatgaggcctctgtgaggccagcccccaccttcctctttcccacctgtcccaggaccagaatcccagggacagaggactgggtagcaggttccttctgttgtcctgtgtggtgtgtctactgtgagggtgggccctgaggagacctgtgggccacctattgtctaataaagtgggcagttgccccca

SEQ ID NO: 164846 - DNA, 1707 bp, Homo sapiens
  Payload ID: 12466
  Gene Symbol: FARSA
  Gene Name: phenylalanyl-tRNA synthetase, alpha subunit
  ENST ID: ENST00000586146
  CDS Start-End: 1-708
atggcggatggtcaggtggcggaactgctgctccggcggctggaggcgtctgatggcggcctggacagcgccgagttggcggctgagctgggcatggagcaccaggcggtggtgggcgccgtgaagagccttcaggcgctgggcgaggtcatcgaggctgaacttcggtccaccaagcactgggagcttactgcggagggcgaggagattgcccgggagggcagccatgaggcccgtgtgtttcgaagcattcccccagagggcctggcccagagcgagcttatgcgactgcccagtggcaaagtgggcttcagcaaggccatgtccaacaagtggattcgggtggacaagagtgcggctgacgggccccgggtgttccgagtggtggacagcatggaggatgaggtgcagcggcggctccagctggtccgggggggacaggctgagaagctgggggagaaggagaggagcgagctgaggaagaggaagctgttggctgaagtgactctgaagacctactgggtgagcaaaggcagtgcctttagtaccagcatctccaagcaagagacagagctgagcccagagatgatctccagtggctcttggcgggaccggcccttcaagccctacaacttcttggcccacggtgtcctccccgacagcggccaccttcacccgctgctcaaggttcaccgagatgccgactgataacttcattgagagctccttctggaactttgacgccctcttccagccccagcagcacccagcccgtgaccagcacgacaccttcttccttcgagatccagcggaggccctgcagctcccaatggactatgtccagcgggtcaagcggacccactctcagggcggctacggctcacaggggtacaagtataactggaagctggacgaggcccggaaaaacctactgcgaacccacaccacatcagccagcgcccgtgcgctctaccgccttgcccagaagaagcccttcactccggtcaagtacttctccatcgaccgcgtattccggaatgagaccctggacgccacgcacctggctgagttccaccagatcgagggcgtggtggcggatcatggtctcaccttgggccacctcatgggcgttctgcgggagttcttcaccaagctgggtatcacgcaactccgcttcaagccagcctacaacccatacacagagcccagcatggaggtgttcagctaccaccaaggcctgaagaagtgggtggaggtcggaaactcgggggtcttccgtccagagatgctgctgcccatggggcttcccgagaacgtgtcggtcattgcctggggcctctccctggagcgcccaacgatgatcaaatatggcatcaacaatatccgggagctggtgggccacaaggtgaacctgcagatggtgtatgacagtcccctgtgccgcctggatgccgagccgaggccccctcccacacaggaggctgcgtgacatgggccactctaggacaggtcatcctccccgagtccctgctgctgcgctcctttgcatccctggccagtgaccttgtatttatgaggcctctgtgaggccagcccccaccttcctctttcccacctgtcccaggaccagaatcccagggacagaggactgggtagcaggttccttctgttgtcctgtgtggtgtgtctactgtgagggtgggccct

SEQ ID NO: 164847 - DNA, 514 bp, Homo sapiens
  Payload ID: 12466
  Gene Symbol: FARSA
  Gene Name: phenylalanyl-tRNA synthetase, alpha subunit
  ENST ID: ENST00000587488
  CDS Start-End: 1-478
tgataacttcattgagagctccttctggaactttgacgccctcttccagccccagcagcacccagcccgtgaccagcacgacaccttcttccttcgagatccagcggaggccctgcagctcccaatggactatgtccagcgggtcaagcggacccactctcagggcggctacggctcacaggggtacaagtataactggaagctggacgaggcccggaaaaacctactgcgaacccacaccacatcagccagcgcccgtgcgctctaccgccttgcccagaagaagcccttcactccggtcaagtacttctccatcgaccgcgtattccggaatgagaccctggacgccacgcacctggctgagttccaccagatcgagggcgtggtggcggatcatggtctcaccttgggccagcccccaccttcctctttcccacctgtcccaggaccagaatcccagggacagaggactgggtagcaggttccttctgttgtcctgtgtggtgtgtctact

SEQ ID NO: 164848 - DNA, 3369 bp, Homo sapiens
  Payload ID: 12467
  Gene Symbol: FARSB
  Gene Name: phenylalanyl-tRNA synthetase, beta subunit
  Uniprot ID: Q9NSD9
  ENST ID: ENST00000281828
  CDS Start-End: 265-2034
acattacaatgcctgacaaatcctagccagttctatcaaattatatctttcttacaggcttttaagctattagtctcataaagatacatttaatcagcgaggtaatggcatgatgagtgtttttaggttaaaaagagaacaggaactgttgccagcagaatggcgatattcaagacaacacgcacaagaagaggcgggtcctacgcgcttcgctagggaagcccgggtcagctcgctgcgcaggcgcagtgagttcgacacaccatgccgactgtcagcgtgaagcgtgatctgctcttccaagccctgggccgcacctacactgacgaagaatttgatgaactatgttttgaatttggtctggagcttgatgaaattacatctgagaaggaaataataagtaaagaacaaggtaatgtaaaggcagcaggagcctctgatgttgttctttacaaaattgacgtccctgccaatagatatgatctcctgtgtctggaaggattggttcgaggacttcaggtcttcaaagaaaggataaaggctccagtgtataaacgggtaatgcctgatggaaaaatccagaaattgattatcacagaagagacagctaagatacgtccttttgcggtagcagcagttctccgtaatataaagtttactaaagatcgatatgacagcttcattgaacttcaggagaaattacatcagaatatttgcaggaaaagagcactggttgccattggtacccatgatttggacactttgtcgggcccatttacttatactgcaaagcgtccttcagatatcaaattcaagcctctaaataagaccaaggagtatacagcctgtgaactgatgaacatatacaagactgacaatcacctgaaacattatttacatatcattgaaaacaaacccctgtatccagttatctatgatagcaatggtgtcgtcctttcaatgcctcccatcatcaatggggatcattccagaataacagtaaatactagaaatatttttattgaatgcacgggaactgactttactaaggcaaaaatagttcttgatattattgtcaccatgttcagtgaatattgtgagaatcaatttacggtcgaagctgctgaagtggtttttcctaatggaaaatcacatacctttccagaattagcttaccgaaaggagatggtgagagctgacctaattaacaaaaaagttggaatcagagaaactccagaaaatcttgccaaacttctgaccaggatgtatttaaaatcagaagtcataggtgatgggaatcagattgagattgaaatccctccaaccagagctgacattatccatgcatgtgatattgtagaagatgcagctattgcttatggatataacaacattcagatgactctcccgaaaacttacaccatagctaatcaatttcctcttaataagctcactgaacttctccgacatgacatggcagccgctggcttcactgaagcacttacctttgccctgtgctcccaagaagatattgctgataaactaggtgtggatatctctgcaacaaaggcagtccacataagtaatcctaaaacagctgaatttcaggtggcacgcactacccttcttcctggcctcctgaagaccatagcagcaaatcgtaagatgccccttccactgaaactgtttgaaatctctgacattgtaataaaagattctaatacagatgtaggtgcaaaaaactacagacatctctgtgctgtttattacaacaagaatcctgggtttgagatcattcatgggctgctggacagaattatgcagttgctcgatgtgcctcctggtgaagacaaggggggatatgtgatcaaagcatcagaagggcctgctttcttccccgggcgatgtgcagagatctttgccaggggtcaaagcgtcgggaagcttggggtccttcatcctgacgttatcaccaaatttgagctgaccatgccctgctcctccctagaaatcaatgttggaccctttttgtgaagattggtctctgtggtgtgattctcttcccaggtgtccctttctcctcccctagtgtccttaagtcctcctccacagggaacatctatttgggctttgatgtttaataaagtagaaagcactgtctggctgtgtgggtagagaccatcctttccctgcatattaggccagcttgtgccatataccagtgtggtgtctgtgtgtgaagctgcattgttgggtaaaagccccgtggagtgctggagaaatgcactagcagagtgcaggatctgttctgaaaggcagacgtgctcctcagacatcagaacatcacattggaacggattactcctgcataacaagatcccatttctttccttattgataaaacaagataatcgatgagaattcatgttgcatgagttcgagataactgaggggtttagctttgattttctacatttgacatgtattcatcattgagaaacactaaaataacaatatttttagaaaacgtttaagaatcaattatggtccaacaattatagcttctgaggtcagtttaaagtgaaagaaaaatctgtaatacaaggattcaaaatatgtgagggtgcataggtattttttactctatctgtgatactctaagatagagtacatgcaacaaagatctgttctgctgtaagagttaaaatggacaagtattgatatcaatgcagtatgaacattaggaaacaatgagaagcttatttttgccataggccatacatgttactgtaatcagtcagttataaaatcatggttttaaatacttaattgagctactagtttctctattgtcccagggagatattagacctctctttttctgaagctaagcttcagccaatcctccttgttttatatcctaatttcctttcttacttcaatctagaattctccagtaggtaccatctctggaaaaaagctgggtctcatgtttgagacaagttcccaggtactattgaagtaataagaaatatgataaaatataatactttaaagtcccagtagaaatagctaacaaaggctgggtgcgctgtggctcatgcctgtaatcctagcactttgggaggctgaggtgggcagatcacttgaggccaatagttcgagatcagcctgaccaacatggtgaaatgccatctccactaaaaatataaaaattagccaggcatggtggtgtgggcctgcagtcccagctacctgggaggctgagtcaggaaaatctcttgaaccaggaggtggacgttgcagtgatcccagattgtgccactgccctccagcctgggtgacagagtgagattctgtctacaaaaa

SEQ ID NO: 164849 - DNA, 1253 bp, Homo sapiens
  Payload ID: 12468
  Gene Symbol: PNMT
  Gene Name: phenylethanolamine N-methyltransferase
  Uniprot ID: P11086
  ENST ID: ENST00000269582
  CDS Start-End: 319-1167
ctgagggtggggggcgcccagaggcgggactcggggcggggcaggcgaggcggagggcgagggctgcgggagcaagtacggagccgggggtgtgggggacgattgccgctgcagccgccgccccactcacctccggtgtgtctgcagcccggacactaagggagatggatgaatgggtggggaggatgcggcgcacatggccccgggcggctcggcggtcagctgccgcccccacagcggaccggtcggggcgggggtcgggcggtagaaaaaagggccgcgaggcgagcggggcactgggcggaccgcggcggcagcatgagcggcgcagaccgtagccccaatgcgggcgcagcccctgactcggccccgggccaggcggcggtggcttcggcctaccagcgcttcgagccgcgcgcctacctccgcaacaactacgcgccccctcgcggggacctgtgcaacccgaacggcgtcgggccgtggaagctgcgctgcttggcgcagaccttcgccaccggtgaagtgtccggacgcaccctcatcgacattggttcaggccccaccgtgtaccagctgctcagtgcctgcagccactttgaggacatcaccatgacagatttcctggaggtcaaccgccaggagctggggcgctggctgcaggaggagccgggggccttcaactggagcatgtacagccaacatgcctgcctcattgagggcaagggggaatgctggcaggataaggagcgccagctgcgagccagggtgaaacgggtcctgcccatcgacgtgcaccagccccagcccctgggtgctgggagcccagctcccctgcctgctgacgccctggtctctgccttctgcttggaggctgtgagcccagatcttgccagctttcagcgggccctggaccacatcaccacgctgctgaggcctggggggcacctcctcctcatcggggccctggaggagtcgtggtacctggctggggaggccaggctgacggtggtgccagtgtctgaggaggaggtgagggaggccctggtgcgtagtggctacaaggtccgggacctccgcacctatatcatgcctgcccaccttcagacaggcgtagatgatgtcaagggcgtcttcttcgcctgggctcagaaggttgggctgtgagggctgtacctggtgccctgtggcccccacccacctggattccctgttctttgaagtggcacctaataaagaaataataccctgcc

SEQ ID NO: 164850 - DNA, 821 bp, Homo sapiens
  Payload ID: 12468
  Gene Symbol: PNMT
  Gene Name: phenylethanolamine N-methyltransferase
  ENST ID: ENST00000394246
  CDS Start-End: 183-737
gctgcgagggggaaactggggaaagggcctaattccccagtctccacctcgaatcaggaaagagaaggggcgggctgctgggcaaaagaggtgaagtgtccggacgcaccctcatcgacattggttcaggccccaccgtgtaccagctgctcagtgcctgcagccactttgaggacatcaccatgacagatttcctggaggtcaaccgccaggagctggggcgctggctgcaggaggagccgggggccttcaactggagcatgtacagccaacatgcctgcctcattgagggcaagggggaatgctggcaggataaggagcgccagctgcgagccagggtgaaacgggtcctgcccatcgacgtgcaccagccccagcccctgggtgctgggagcccagctcccctgcctgctgacgccctggtctctgccttctgcttggaggctgtgagcccagatcttgccagctttcagcgggccctggaccacatcaccacgctgctgaggcctggggggcacctcctcctcatcggggccctggaggagtcgtggtacctggctggggaggccaggctgacggtggtgccagtgtctgaggaggaggtgagggaggccctggtgcgtagtggctacaaggtccgggacctccgcacctatatcatgcctgcccaccttcagacaggcgtagatgatgtcaagggcgtcttcttcgcctgggctcagaaggttgggctgtgagggctgtacctggtgccctgtggcccccacccacctggattccctgttctttgaagtggcacctaataaagaaataataccctg

SEQ ID NO: 164851 - DNA, 677 bp, Homo sapiens
  Payload ID: 12468
  Gene Symbol: PNMT
  Gene Name: phenylethanolamine N-methyltransferase
  ENST ID: ENST00000581428
  CDS Start-End: 14-427
ccgcggcggcagcatgagcggcgcagaccgtagccccaatgcgggcgcagcccctgactcggccccgggccaggcggcggtggcttcggcctaccagcgcttcgagccgcgcgcctacctccgcaacaactacgcgccccctcgcggggacctgtgcaacccgaacggcgtcgggccgtggaagctgcgctgcttggcgcagaccttcgccaccggtgaagtgtccggacgcaccctcatcgacattggttcaggccccaccgtgtaccagctgctcagtgcctgcagccactttgaggacatcaccatgacagatttcctggaggtcaaccgccaggagctggggcgctggctgcaggaggagccgggggccttcaactggagcatgtacagccaacatgcctgcctcattgagggcaaggggtaaggactggggggtgagggttggggaggaggcttcccatagagtggctggttggggcaacagaggcctgagcgtagaacagccttgagccctgccttgtgcctcctgcacagggaatgctggcaggataaggagcgccagctgcgagccagggtgaaacgggtcctgcccatcgacgtgcaccagccccagcccctgggtgctgggagcccagctcccctgcctgctgacgccctggtctctgccttctgct

SEQ ID NO: 164852 - DNA, 1262 bp, Homo sapiens
  Payload ID: 12469
  Gene Symbol: PMAIP1
  Gene Name: phorbol-12-myristate-13-acetate-induced protein 1
  Uniprot ID: Q13794
  ENST ID: ENST00000269518
  CDS Start-End: 163-573
cgtgtgtagttggcatctccgcgcgtccggacacccgatcccagcatccctgcctgcaggactgttcgtgttcagctcgcgtcctgcagctgtccgaggtgctccagttggaggctgaggttcccgggctctgtagctgagtgggcggcggcaccggcggagatgcctgggaagaaggcgcgcaagaacgctcaaccgagccccgcgcgggctccagcaggaccggcgggtacggcgggtacggcgagggaccaagccggatttgcgattgggatgcagctgcgtttcaccaggggcaaaaagctcctttcctcctctctttcctcctcgccacttgcccttccccggggccacgaggaacaagtgcaagtagctggaagtcgagtgtgctactcaactcaggagatttggagacaaactgaacttccggcagaaacttctgaatctgatatccaaactcttctgctcaggaacctgactgcatcaaaaacttgcatgaggggactccttcaaaagagttttctcaggaggtgcacgtttcatcaatttgaagaaagactgcattgtaattgagaggaatgtgaaggtgcattcatgggtgcccttggaaacggaagatggaatacatcaaagtgaatttctgttcaagttttcccagattatcattctttgggatgagagaacattataaaaccactttgtttattttaaagcaagaatggaagacccttgaaaataaagaagtaattattgacacatttcttttttacttagagaatcgttctagtgtttttgccgaagattaccgctggcctactgtgaagggagatgacctgtgattagactgggcggctggggagaaacagttcagtgcattgttgttgttgctgtttttggtgttttgcttttcagtgccaactcagcacattgtatatgattcggtttatacatattaccttgttataatgaaaaaactcattctgagaacactgaaatgttatactcagtgttgatttcttcggtcactacacaacgtaaaatcatttgtttcttttgactcaaattgtattgcttctgttcagatgatctttcattcaatgtgttcctgttgggcgttactagaaactatggaaaactggaaaataactttgaaaaaattggataaagtataggagggttacttggggccagtaaatcagtagactgaacattcaatataataaaagaacatggggattttgtataaccagggataataaaaa

SEQ ID NO: 164853 - DNA, 1948 bp, Homo sapiens
  Payload ID: 12469
  Gene Symbol: PMAIP1
  Gene Name: phorbol-12-myristate-13-acetate-induced protein 1
  Uniprot ID: Q13794
  ENST ID: ENST00000316660
  CDS Start-End: 231-395
agggaagttctcactggacaaaagcgtggtctctggcgcggggatctcagagtttcccgggcactcaccgtgtgtagttggcatctccgcgcgtccggacacccgatcccagcatccctgcctgcaggactgttcgtgttcagctcgcgtcctgcagctgtccgaggtgctccagttggaggctgaggttcccgggctctgtagctgagtgggcggcggcaccggcggagatgcctgggaagaaggcgcgcaagaacgctcaaccgagccccgcgcgggctccagcagagctggaagtcgagtgtgctactcaactcaggagatttggagacaaactgaacttccggcagaaacttctgaatctgatatccaaactcttctgctcaggaacctgactgcatcaaaaacttgcatgaggggactccttcaaaagagttttctcaggaggtgcacgtttcatcaatttgaagaaagactgcattgtaattgagaggaatgtgaaggtgcattcatgggtgcccttggaaacggaagatggaatacatcaaagtgaatttctgttcaagttttcccagattatcattctttgggatgagagaacattataaaaccactttgtttattttaaagcaagaatggaagacccttgaaaataaagaagtaattattgacacatttcttttttacttagagaatcgttctagtgtttttgccgaagattaccgctggcctactgtgaagggagatgacctgtgattagactgggcggctggggagaaacagttcagtgcattgttgttgttgctgtttttggtgttttgcttttcagtgccaactcagcacattgtatatgattcggtttatacatattaccttgttataatgaaaaaactcattctgagaacactgaaatgttatactcagtgttgatttcttcggtcactacacaacgtaaaatcatttgtttcttttgactcaaattgtattgcttctgttcagatgatctttcattcaatgtgttcctgttgggcgttactagaaactatggaaaactggaaaataactttgaaaaaattggataaagtataggagggttacttggggccagtaaatcagtagactgaacattcaatataataaaagaacatggggattttgtataaccagggataataaaaagaaaaaagaagttaatttttaattgatgtttttgaaacttagtagaacaaatattcagaagtaacttgataagatatgaatgtttctaaagaagtttctaaaggttcggaaaatgctccttgtcacattagtgtgcatcctacaaaaagtgatctcttaatgtaaattaagaatattttcataattggaatatacttttcttaaaaaaaaggaacagttagttctcatctagaatgaaagttccatatatgcattggtgaatatatatgtatacacatacttacatacttatatgggtatctgtatagataatttgtattagagtattatatagcttcttagtagggtctcaagtaagtttcattttttttatctgggctatatacagtcctcaaataaataatgtcttgattttatttcagcaggaataattttatttattttgcctatttataattaaagtatttttctttagtttgaaaatgtgtattaaagttacatttttgagttacaagagtcttataactacttgaatttttagttaaaatgtcttaatgtaggttgtagtcactttagatggaaaattacctcacatctgttttcttcagtattacttaagattgtttatttagtggtagagagttttttttttcagcctagaggcagctattttaccatctggtatttatggtctaatttgtatttaaacatatgcacacatataaaagttgatactgtggcagtaaactattaaaagttttcactgttc

SEQ ID NO: 164854 - DNA, 1242 bp, Homo sapiens
  Payload ID: 12470
  Gene Symbol: PDC
  Gene Name: phosducin
  Uniprot ID: P20941
  ENST ID: ENST00000391997
  CDS Start-End: 89-829
acgagttcagtagacagggattctcacccactcaacaaggacaccaggcacagagatccaaactattatatcaaatccagtccctaaaatggaagaagccaaaagccaaagtttggaggaagactttgaaggacaggccacacatacaggacccaaaggagtaataaatgattggagaaagtttaaattagagagtcaagacagtgattcaattccacctagcaagaaggagattctcaggcaaatgtcttctcctcagagtaggaatggcaaagattcaaaggaacgagtcagcagaaagatgagcattcaagaatatgaactaatccataaagagaaagaggatgaaaactgccttcgtaaataccgtagacagtgtatgcaggatatgcaccagaagctgagttttgggcctagatatgggtttgtgtatgagctggaaactggaaagcaattcctagaaacaattgaaaaggaactgaagatcaccacaattgttgttcacatttatgaagatggtattaagggttgtgatgctctaaacagtagtttaacatgccttgcagcagaataccctatagttaagttttgtaaaataaaagcttcgaatacaggtgctggggaccgcttttccttagatgtacttcctacactgctcatctataaaggtggggaactcataagcaattttattagtgttgctgaacagtttgctgaagaattttttgctggggatgtggagtctttcctaaatgaatatgggttactacctgaaagagaggtacatgtcctagagcataccaaaatagaagaagaagatgttgaatgaagattcactatgtcaatatctcatgtttatcctttaggtattggatgatggttttggtagtatctatattgctttagtgaacacagagtatgggcacggctatgctaacttgacaaaaatgactgatgcaacaatcgagttattagcatttcttagtattagttactcaaattgatacaatgcttgactacaaaacagagctgtcttcagcaacattattagtagacaaagaggatgtggataatattatgacatttttcaaaaatccctttcaagttatgttttgtcttttttactccattttccctcatcactgttattatttggacttttcaaattacattattcattataattttctttgtgtaataaaaatgaaatctcatgagaaaataaattttctatttgaagtc

SEQ ID NO: 164855 - DNA, 1174 bp, Homo sapiens
  Payload ID: 12470
  Gene Symbol: PDC
  Gene Name: phosducin
  Uniprot ID: P20941
  ENST ID: ENST00000497198
  CDS Start-End: 193-777
aaatgtgtggagatttattttataatagcaatgtgaggaataccttcctaattatgacaaaaacaaaaacaacaacaaaaagaccattgaagaaaaggacccaaaggagtaataaatgattggagaaagtttaaattagagagtcaagacagtgattcaattccacctagcaagaaggagattctcaggcaaatgtcttctcctcagagtaggaatggcaaagattcaaaggaacgagtcagcagaaagatgagcattcaagaatatgaactaatccataaagagaaagaggatgaaaactgccttcgtaaataccgtagacagtgtatgcaggatatgcaccagaagctgagttttgggcctagatatgggtttgtgtatgagctggaaactggaaagcaattcctagaaacaattgaaaaggaactgaagatcaccacaattgttgttcacatttatgaagatggtattaagggttgtgatgctctaaacagtagtttaacatgccttgcagcagaataccctatagttaagttttgtaaaataaaagcttcgaatacaggtgctggggaccgcttttccttagatgtacttcctacactgctcatctataaaggtggggaactcataagcaattttattagtgttgctgaacagtttgctgaagaattttttgctggggatgtggagtctttcctaaatgaatatgggttactacctgaaagagaggtacatgtcctagagcataccaaaatagaagaagaagatgttgaatgaagattcactatgtcaatatctcatgtttatcctttaggtattggatgatggttttggtagtatctatattgctttagtgaacacagagtatgggcacggctatgctaacttgacaaaaatgactgatgcaacaatcgagttattagcatttcttagtattagttactcaaattgatacaatgcttgactacaaaacagagctgtcttcagcaacattattagtagacaaagaggatgtggataatattatgacatttttcaaaaatccctttcaagttatgttttgtcttttttactccattttccctcatcactgttattatttggacttttcaaattacattattcattataattttctttgtgtaataaaaatgaaatctcatgagaaaataaa

SEQ ID NO: 164856 - DNA, 2813 bp, Homo sapiens
  Payload ID: 12471
  Gene Symbol: PDCL
  Gene Name: phosducin-like
  Uniprot ID: Q13371
  ENST ID: ENST00000259467
  CDS Start-End: 167-1072
cgcaggaaggccgcctcattggtccgcgctgtcgggcttcggcggcttttctctttagcgctcagggcgctgacccactgctcttcctcttaagaaagtgctccattccttccggcgcccggagctgctggcccaaagggatccggagcgagctagggcagacaccatgaccacccttgatgataagttgctgggggagaaactgcagtactactatagcagcagtgaggatgaggacagtgaccacgaggacaaggaccgaggcagatgtgccccagccagcagttctgtgcctgcagaggctgagctggcaggcgaaggcatctcagttaacacaggcccaaaaggtgtgatcaatgactggcgccgcttcaagcagttggagacagagcagagggaggagcagtgccgggagatggaaaggctgatcaagaagctgtcaatgacttgcaggtcccatctggatgaagaggaggagcaacagaaacagaaagacctccaggagaagatcagtgggaagatgactctgaaggagtttgccataatgaatgaggaccaagatgatgaagagtttctgcagcagtaccggaagcagcgaatggaagagatgcggcagcagcttcacaaggggccccaattcaagcaggtttttgagatctccagtggagaagggtttttagacatgattgataaagaacagaaaagcattgtcatcatggttcatatttatgaggatggcattccagggaccgaagccatgaatggttgcatgatctgccttgccgcagagtacccagctgtcaagttctgcaaggtgaagagctcagttattggcgccagcagtcagttcaccaggaatgcccttcctgccctgctgatctataaggggggtgaattgatcggcaattttgttcgtgttactgaccagctgggggatgatttctttgctgtggaccttgaagcttttctccaggaatttggattactcccagaaaaggaagtcttggtgctgacatctgtgcgtaactctgccacgtgtcacagtgaggatagcgacctggaaatagattgaactgatagtctagttgcatagatttctcattgtttgggttggaatacacgtcattgtttatttttgttcctttgtcttctggcttttcagctgttctttgtagtcccttttattatgcataaaataaagaaattcttagattaaatcagaatgctgaataaccttgtagctagcaataaggtgacttacagttgtataaacaggaagccaggcttttgaactgtttacttaagattctgtggtgtgacatctctgttattgtttccagtcaatatttacaaagcatcctaaagacagggtcttggaaattgtcttcagatgatcttagaggtctctgccaagtctgagagtataattctgtaggtattgtgttatttgcaacgtaaatagtgcattttcttaatcaaatgattgtaaattatatttacttgtaatcagttccatagctttagacggtggttagattttttttttccccaccagggtcttgtttaaaggggtgagccaccgcacccagtcctgaggggtggcctctgctgctggatttcatgtcttcctccagcatgactaagtctggaacagcaggaagggttgatgcttactgacctggtgatgttagaagacaagtagtttatggatttaaacattagagctggagtggggctggaaatctttgtaaaggaagttctttcagtaagatgcccctgcttgtctttgtctcttttttgtttaacaaggtaactttttgtttaacaaggtaactttttgtttaacctagattttttttaaaactttttttttttttcatattggaaaagtaattcatattcagtagaggaaaactgaccaaaacagaagcaaaaataagaaaattaaaataatctctaatcctactacctagaataaaacactattaatattttggtctgtttcctgccaaggtgttttctgtgtatacatggatattttgtttgtttttaaacaaaacgatgggatcattctgaacatactgttctatagtatggtcagctaataatatatcagacctttttttatattattaaatattctacaactttttaaaaatgtctattaatattccatcgtatagatgtgatataatttgcttgatggttgtctcttaaaaagaaagatagcaaatactttttttaaattacaaaagtgatagatgttcattgtagaaaatgtaataaacactgttaagacttaaaagccatataattccaccaaccaaaattaatcccttttgtcatatttctagtcatttttatagcctttttttctatgtatttataataattatcatttgcgtttttttcctttttttaactttaaaaatgtatattctagggtcaggggaaatgtaatctggaattaaatattagccttaaaattcacaattttgattttcctggcttttcaggaattgactaactgtaaaagagtcttgaaagtatttagtcaacaaacagagtgcattttttttttttttgactaagaaagctcgttgtagtagaaagggtggaatgtattgaaaattattagaagcagggaagtattgttagtctagcttatttcctttcagtcttttttcaatatttttataaacattgagtacttactgaatttagttctgtgctcttccttatttagtgttgtatcataaatactttgatgtttcaaacattctaaataaataattttcagtggcttcataata

SEQ ID NO: 164857 - DNA, 595 bp, Homo sapiens
  Payload ID: 12471
  Gene Symbol: PDCL
  Gene Name: phosducin-like
  ENST ID: ENST00000394285
  CDS Start-End: 1-328
actgcagtactactatagcagcagtgaggatgaggacagtgaccacgaggacaaggaccgaggcagatgtgccccagccagcagttctgtgcctgcagaggctgagctggcaggcgaaggcatctcagttaacacaggcccaaaaggtgtgatcaatgactggcgccgcttcaagcagttggagacagagcagagggaggagcagtgccgggagatggaaaggctgatcaagaagctgtcaatgacttgcaggtcccatctggatgaagaggaggagcaacagaaacagaaagacctccaggagaagatcagtgggaaggagagatgaggctttgccatgttggccaggctggtcttgaactcctgacctcaagtgatccgctcgtctcagcctcccaaagtgctaggattacaggcgtgagccaccgcgcccggcccatattaactgttatcacgagtgttcagttttcatatttatgctcacttgctggtccgcctgcagatgactctgaaggagtttgccataatgaatgaggaccaagatgatgaagagtttctgcagcagtaccggaagcagcgaatggaagagatgcgg

SEQ ID NO: 164858 - DNA, 404 bp, Homo sapiens
  Payload ID: 12471
  Gene Symbol: PDCL
  Gene Name: phosducin-like
  ENST ID: ENST00000436632
  CDS Start-End: 1-274
atgtgccccagccagcagttctgtgcctgcagaggctgagctggcaggcgaaggcatctcagttaacacaggcccaaaaggtgtgatcaatgactggcgccgcttcaagcagttggagacagagcagagggaggagcagtgccgggagatggaaaggctgatcaagaagctgtcaatgacttgcaggtcccatctggatgaagaggaggagcaacagaaacagaaagacctccaggagaagatcagtgggaagaaatcttgggcaattctgtaagaagagaattgaagtaactgagaggaattttagggcacaggtttgctgaagactgtgctgaaaccacctttacagggaaatgatcttttaatttatttccacatctttctctattaaaaaaaaatcaatg

SEQ ID NO: 164859 - DNA, 861 bp, Homo sapiens
  Payload ID: 12472
  Gene Symbol: PDCL2
  Gene Name: phosducin-like 2
  Uniprot ID: Q8N4E4
  ENST ID: ENST00000295645
  CDS Start-End: 104-829
gaagcgggcgctcttccagcctggagaaggctgcgggtctccatccgtggcgcctcgccagctgcaggacgacgcgggctcttgaggggcagagcagcgcatcatgcaggatcccaatgaagatacagaatggaatgacattttaagagatttcggcattcttcctcctaaagaagagtcaaaagatgaaattgaagaaatggttttacgtttacagaaagaagcaatggtgaaaccatttgaaaagatgactcttgcacagctaaaggaagctgaagatgaatttgatgaagaagatatgcaggctgttgaaacatatagaaagaagcggttacaggaatggaaagctcttaagaaaaaacaaaaatttggagaattaagagaaatttctggaaatcagtatgtgaatgaagtcacaaatgcagaagaagatgtgtgggttataattcatctatacagatcaagcatcccaatgtgtttgttggttaaccagcatcttagtcttctagcaagaaagtttccagaaactaaatttgttaaagccatcgtgaatagctgtattcaacactaccatgacaattgtttaccaacaatttttgtgtataaaaatggtcagatagaagccaaattcattggaattatagaatgtggagggataaatctcaagctggaagaacttgaatggaagctagcagaagttggagcaatacagactgatttggaagaaaaccccagaaaagacatggtagatatgatggtatcttcaattagaaacacttctattcatgatgacagtgatagctccaacagtgataatgataccaaatagagagaaatattcaataaatagcttttagtata

SEQ ID NO: 164860 - DNA, 857 bp, Homo sapiens
  Payload ID: 12472
  Gene Symbol: PDCL2
  Gene Name: phosducin-like 2
  ENST ID: ENST00000615028
  CDS Start-End: 104-856
gaagcgggcgctcttccagcctggagaaggctgcgggtctccatccgtggcgcctcgccagctgcaggacgacgcgggctcttgaggggcagagcagcgcatcatgcaggatcccaatgaagatacagaatggaatgacattttaagagatttcggcattcttcctcctaaagaagagtcaaaagatgaaattgaagaaatggttttacgtttacagaaagaagcaatggtgaaaccatttgaaaagatgactcttgcacagctaaaggaagctgaagatgaatttgatgaagaagatatgcaggctgttgaaacatatagaaagaagcggttacaggaatggaaagctcttaagaaaaaacaaaaatttggagaattaagagaaatttctggaaatcagtatgtgaatgaagtcacaaatgcagaagaagatgtgtgggttataattcatctatacagatcaagcatcccaatgtgtttgttggttaaccagcatcttagtcttctagcaagaaagtttccagaaactaaatttgttaaagccatcgtgaatagctgtattcaacactaccatgacaattgtttaccaacaatttttgtgtataaaaatggtcagatagaagccaaattcattggaattatagaatgtggagggataaatctcaagctggaagaacttgaatggaagctagcagaagttggagcaatacagactgatttggaagaaaaccccagaaaagacatggtagatatgatggtatcttcaattagaaacacttctattcatgatgacagtgatagctccaacagtgataatgatccaaatagagagaaatattcaataaatagcttttagt

SEQ ID NO: 164861 - DNA, 1337 bp, Homo sapiens
  Payload ID: 12473
  Gene Symbol: PDCL3
  Gene Name: phosducin-like 3
  Uniprot ID: Q9H2J4
  ENST ID: ENST00000264254
  CDS Start-End: 379-1098
gtctttacaggtttgggccggcagctggaaaaggcacacggccccgggctcctcctccacccagccccacccctcctccgctgaagaccagccctaataaggcagccaccagaattagaaccaggtcaagtgcactccgagcaggacagtaggcagatcctatctggcgcatgcgaacgcttctgtgccagttccttgaagagcaggcgcagactcaaggctgttgcttccgcccttactccccgccgctcgtccctgggcggggcgaaggctgggctgggggaagaggcgtggcggcgctgtgcgcgtgcacaaaagagagctgaggggcgggggcgctgcggcacagctggtttgagcaactgaactggaaacaagatgcaggaccccaacgcagacactgaatggaatgacatcttacgcaaaaagggtatcttaccccccaaggaaagtctgaaagaattggaagaggaggcagaagaggagcagcgcatcctccagcagtcagtggtgaaaacatatgaagatatgactttggaagagctggaggatcatgaagacgagtttaatgaggaggatgaacgtgctattgaaatgtacagacggcggagactggctgagtggaaagcaactaaactgaagaataaattcggagaagttttggagatctcagggaaggattatgttcaagaagttaccaaagctggcgagggcttgtgggtcatcttgcacctttacaaacaaggaattcccctctgtgccctgataaatcagcacctcagtggacttgccaggaagtttcctgatgtcaaatttatcaaagccatttcaacaacctgcatacccaattatcctgataggaatctgcccacgatatttgtttacctggaaggagatatcaaggctcagtttattggtcctctggtgtttggcggcatgaacctgacaagagatgagttggaatggaaactgtctgaatctggagcaattatgacagacctggaggaaaaccctaagaagccgattgaagacgtgttgctgtcctcagtgcggcgctctgtcctcatgaagagggacagcgattccgagggtgactgaggctacagcttctatcacatgccgaactttcttgtgacaaattgtctggattttttaaaaaaggaaaaagcaagaatgaatccttgtggtttttagttttgtataaattatgtttcaaatctttacattttggaaataatcattgctggagattctgttaaatattttggaactctttttttttttaaattatagtatttcctctaaaaaaaattaaaaccagccatttgtatggcaaa

SEQ ID NO: 164862 - DNA, 662 bp, Homo sapiens
  Payload ID: 12473
  Gene Symbol: PDCL3
  Gene Name: phosducin-like 3
  ENST ID: ENST00000450127
  CDS Start-End: 1-452
tggaagagctggaggatcatgaagacgagtttaatgaggaggatgaacgtgctattgaaatgtacagacggcggagactggctgagtggaaagcaactaaactgaagaataaattcggagaagttttggagatctcagggaaggattatgttcaagaagttaccaaagctggcgagggcttgtgggtcatcttgcacctttacaaacaaggaattcccctctgtgccctgataaatcagcacctcagtggacttgccaggaagtttcctgatgtcaaatttatcaaagccatttcaacaacctgcatacccaattatcctgataggaatctgcccacgatatttgtttacctggaaggagatatcaaggctcagtttattggtcctctggtgtttggcggcatgaacctgacaagagatggtaagggctctgggagacaggcggggcagtgagagatgggaggcgcatttctgttggagagagtgtctatttcctggactcctgttacgatggtgggtcaagttcacttctgcctgtgtatgaggacggaagcacgtttaatctctcatcttagttgcgtaatcaggaacagttacaactgggctctactgattcttagttcaaggaaggcgtgatagacttaaatataaacattttttata

SEQ ID NO: 164863 - DNA, 657 bp, Homo sapiens
  Payload ID: 12473
  Gene Symbol: PDCL3
  Gene Name: phosducin-like 3
  ENST ID: ENST00000416255
  CDS Start-End: 397-657
ggcctgggcgtccccgcctcggtgtgccgggtcccccaaacctcgtcctccgggactatgtcttctcgcggtctctacccacccgggcctgtgaaggtcttgccggatcccgcctaacaaaagttacctcctctcctgaactcccctaaggcacacctgggcagaggtgttaggaagcggagggtccggcctggggtcttccgcacgtaaagcagcgccacagccggtgttcctggctccactgagagccaggaccccaacgcagacactgaatggaatgacatcttacgcaaaaagggtatcttaccccccaaggaaagtctgaaagaattggaagaggaggcagaagaggagcagcgcatcctccagcagtcagtggtgaaaacatatgaagatatgactttggaagagctggaggatcatgaagacgagtttaatgaggaggatgaacgtgctattgaaatgtacagacggcggagactggctgagtggaaagcaactaaactgaagaataaattcggagaagttttggagatctcagggaaggattatgttcaagaagttaccaaagctggcgagggcttgtgggtcatcttgcacctttacaaacaaggaattcccctctgtgccctgataaatcagcacctcagtggactt

SEQ ID NO: 164864 - DNA, 5332 bp, Homo sapiens; identical to SEQ ID NO: 164666
  Payload ID: 12474
  Gene Symbol: PHACTR1
  Gene Name: phosphatase and actin regulator 1
  Uniprot ID: Q9C0D0
  ENST ID: ENST00000332995
  CDS Start-End: 184-1926

SEQ ID NO: 164865 - DNA, 707 bp, Homo sapiens; identical to SEQ ID NO: 164664
  Payload ID: 12474
  Gene Symbol: PHACTR1
  Gene Name: phosphatase and actin regulator 1
  ENST ID: ENST00000379329
  CDS Start-End: 21-443

SEQ ID NO: 164866 - DNA, 943 bp, Homo sapiens; identical to SEQ ID NO: 164661
  Payload ID: 12474
  Gene Symbol: PHACTR1
  Gene Name: phosphatase and actin regulator 1
  ENST ID: ENST00000379335
  CDS Start-End: 106-540

SEQ ID NO: 164867 - DNA, 795 bp, Homo sapiens; identical to SEQ ID NO: 164667
  Payload ID: 12474
  Gene Symbol: PHACTR1
  Gene Name: phosphatase and actin regulator 1
  ENST ID: ENST00000379348
  CDS Start-End: 178-687

SEQ ID NO: 164868 - DNA, 4784 bp, Homo sapiens; identical to SEQ ID NO: 164663
  Payload ID: 12474
  Gene Symbol: PHACTR1
  Gene Name: phosphatase and actin regulator 1
  Uniprot ID: Q9C0D0
  ENST ID: ENST00000379350
  CDS Start-End: 130-1584

SEQ ID NO: 164869 - DNA, 792 bp, Homo sapiens; identical to SEQ ID NO: 164662
  Payload ID: 12474
  Gene Symbol: PHACTR1
  Gene Name: phosphatase and actin regulator 1
  ENST ID: ENST00000406205
  CDS Start-End: 1-792

SEQ ID NO: 164870 - DNA, 2257 bp, Homo sapiens; identical to SEQ ID NO: 164665
  Payload ID: 12474
  Gene Symbol: PHACTR1
  Gene Name: phosphatase and actin regulator 1
  ENST ID: ENST00000415087
  CDS Start-End: 29-1495

SEQ ID NO: 164871 - DNA, 760 bp, Homo sapiens; identical to SEQ ID NO: 164660
  Payload ID: 12474
  Gene Symbol: PHACTR1
  Gene Name: phosphatase and actin regulator 1
  ENST ID: ENST00000434977
  CDS Start-End: 1-693

SEQ ID NO: 164872 - DNA, 1851 bp, Homo sapiens
  Payload ID: 12475
  Gene Symbol: PHACTR2
  Gene Name: phosphatase and actin regulator 2
  Uniprot ID: O75167
  ENST ID: ENST00000305766
  CDS Start-End: 126-1790
atgaagtatgctcagtgtgccagcaagggctgataatcagcagaaggacagggtgcttcgttagtcagaagagccagggcttcccggctgccaggctacagaactcgcctcgccactcctgagacatggacaacgccgttgacggactggacaaagcttctatagcaaactcagatggccccacagcaggttcccaaacacctcccttcaaaagaaaggggaaactatccaccattggtaaaatctttaagccttggaaatggaggaaaaagaagaccagcgacaaatttagagaaacctcggcagtattagaaaggaagatatccacacgacaaagtagagaggagctgataagaaggggagtgcttaaggaattgcctgatcaagatggagatgtaacagttaactttgaaaattcaaacgggcacatgatacccatcggagaggaatctacccgagaggaaaatgtagtaaagtctgaagaaggtaatggctctgtatctgaaaaaacaccacctctggaggaacaggcagaagataagaaagctggctcctctcattcaaaaaaaacaactggctctaaagcatcagcttcgccatccacttcatccacctcatctcgtcccaaagcttcaaaggagacagtttctagcaaagcagggacagtggggaccaccaagggcaagagaaaaactgacaagcagccaataacttctcacctgtcctcagacacaacaacttctggcacatccgacctgaaaggagagcctgcagagaccagagtggagagtttcaaactcgaacagactgtccctggagctgaggagcagaacacaggcaaattcaagtccatggtccctccaccccctgtggctccagcaccttctcctctggccccccctctccctcttgaggatcagtgcattactgcctcagacactccagttgtcctcgtcagcgttggagctgacctgcccgtctctgccttagacccaagtcagcttctttgggctgaagagccgacgaacagaaccactctctactcaggcactggcttaagtgttaacagagaaaatgcaaaatgtttcacaaccaaagaggagctggggaagacagtgcctcagctactgactcctgggctgatgggcgaatcttcagaatcctttagtgcctcagaagatgaaggccacagggaataccaagccaatgactctgactcggacgggcctatcttgtacaccgatgatgaggacgaagacgaagatgaggatggcagtggagaaagtgctttggcaagtaaaatacgccggagggatactcttgctatcaaacttggcaacagaccatctaagaaagaactagaggacaaaaacatcttgcagcgtacatctgaagaagagaggcaggaaatccgacaacaaattggaaccaagttagtcaggaggctgagccagaggcccacaactgaagaattagagcaaagaaacatcctaaaacaaaagaatgaagaagaggaacaagaagcaaaaatggaacttaaacgcagactcagcagaaagctcagcctgagacccacagtggcagagctacaagctcgaaggatcctgcgatttaacgagtatgtagaagtcacggattctcctgactatgaccgccgagcagacaagccctgggccaggttaacacctgcagacaaggcagcaataaggaaagaactaaatgaatttaaaagcacagaaatggaagttcatgaagagagtcgacagtttacaaggtttcatcgtccataacgaagagtgagactatttggaaacagagactgatcatctttgggggaagccctgcttcctg

SEQ ID NO: 164873 - DNA, 4367 bp, Homo sapiens
  Payload ID: 12475
  Gene Symbol: PHACTR2
  Gene Name: phosphatase and actin regulator 2
  Uniprot ID: O75167
  ENST ID: ENST00000367582
  CDS Start-End: 182-1879
gccgcgccggctgcggccggccgggctgggagacccgcgcggggtagaaggtgaggggacccggcgggccgctcggcacaggccgggacatgaacgcctggaagtctggctgggagcggacccatgatcgaaggaccaaaggagccgcttgatcgctggacctggccctgcgaccccagtcatgggccagacctcggtgtccacgctgtccccgcagcccggcagcgttgacggactggacaaagcttctatagcaaactcagatggccccacagcaggttcccaaacacctcccttcaaaagaaaggggaaactatccaccattggtaaaatctttaagccttggaaatggaggaaaaagaagaccagcgacaaatttagagaaacctcggcagtattagaaaggaagatatccacacgacaaagtagagaggagctgataagaaggggagtgcttaaggaattgcctgatcaagatggagatgtaacagttaactttgaaaattcaaacgggcacatgatacccatcggagaggaatctacccgagaggaaaatgtagtaaagtctgaagaaggtaatggctctgtatctgaaaaaacaccacctctggaggaacaggcagaagataagaaagctggctcctctcattcaaaaaaaacaactggctctaaagcatcagcttcgccatccacttcatccacctcatctcgtcccaaagcttcaaaggagacagtttctagcaaagcagggacagtggggaccaccaagggcaagagaaaaactgacaagcagccaataacttctcacctgtcctcagacacaacaacttctggcacatccgacctgaaaggagagcctgcagagaccagagtggagagtttcaaactcgaacagactgtccctggagctgaggagcagaacacaggcaaattcaagtccatggtccctccaccccctgtggctccagcaccttctcctctggccccccctctccctcttgaggatcagtgcattactgcctcagacactccagttgtcctcgtcagcgttggagctgacctgcccgtctctgccttagacccaagtcagcttctttgggctgaagagccgacgaacagaaccactctctactcaggcactggcttaagtgttaacagagaaaatgcaaaatgtttcacaaccaaagaggagctggggaagacagtgcctcagctactgactcctgggctgatgggcgaatcttcagaatcctttagtgcctcagaagatgaaggccacagggaataccaagccaatgactctgactcggacgggcctatcttgtacaccgatgatgaggacgaagacgaagatgaggatggcagtggagaaagtgctttggcaagtaaaatacgccggagggatactcttgctatcaaacttggcaacagaccatctaagaaagaactagaggacaaaaacatcttgcagcgtacatctgaagaagagaggcaggaaatccgacaacaaattggaaccaagttagtcaggaggctgagccagaggcccacaactgaagaattagagcaaagaaacatcctaaaacaaaagaatgaagaagaggaacaagaagcaaaaatggaacttaaacgcagactcagcagaaagctcagcctgagacccacagtggcagagctacaagctcgaaggatcctgcgatttaacgagtatgtagaagtcacggattctcctgactatgaccgccgagcagacaagccctgggccaggttaacacctgcagacaaggcagcaataaggaaagaactaaatgaatttaaaagcacagaaatggaagttcatgaagagagtcgacagtttacaaggtttcatcgtccataacgaagagtgagactatttggaaacagagactgatcatctttgggggaagccctgcttcctgaaaacctgatattgcactgggatttgaatgtgtgtgtttccgtttaacttgtggtgaaggaagtgtgtgactcagcttggctgggaagtgctcctcacctgtgtggcccagatggctccaacaagcaaaaggaaggatgcagtgactcttgctgcccagaatgcacagcgatggtaagagacaccgtggatattcttcatcagaagctttaatcaaagaagatgagcagaagacaatcactggctccctgttaccagaaagccaaattttataatgcgggtgaaagaaaaatatagattaaaattgctgggcactgaaaaggggtgggagttggaaatcagaaagaaagagaaatatttcattatgttaatgaagaaaagagaaaattgaagcataaatgtatttttgaagtagttattcggtagctgagaacttattaagggatttaggaatttaacctcctgatgtggattcctcaaagacttgatcggagaatactcttgtttcaccattatgttggtacagtatagtaccattattttatgttgtgccagtgaatccagttgccagaaataagtctgaatgttttcatgcatctttttcttaaatgcaagagcttctactgactcttaacaagcatgcttacccaaattttgttgcatgcttttaagtagcattagctatgcacacttgacatttttaaatatccctttcctagtgtaccagccttcacaggataagaggactgggaataaagtcagatgtaatgtgaccctagaaaactgtagcaagcttcagaaataaatcttttgatctttccctatcttgattagatccaaagtcaaagcaaccatacttcacctagagaagacagtattggcaatcatgacacctgtaataaaaacttgaatccaaagtcaaaacttaagcaagatacaaatgtgctgcctgcagttagtcctgcatgggaataaggactagttatttttttagtgctgcatttttttaaagttggattgctgctatttaaaaaaaaaaaaaggacacagatcaaaaaaacacccaaaggcttaacagaacatggaaagttcccactaagttgtgtgtgaggaaatcctcatcttgtattttaagaatctgcagatggcatccatagatacagtacagtatttactgtcaatgcaaaagaatcagtgaggttaaagtagtggaagttttccctatgagcctacagtctgtattgtttacattaagaaactctctattattgtgttgctattttccatggagtcacaggcacactatgacttctgctcccaaatacatatgaccatatgtaaataccaccttgcatttcattgttcttcacaagtgctttgtgcccctttaattaaaaacacatgaaatgaataacaaaacaagacccaaatagagtttattttattctcagagtttggactacaattttctaagatgtttctggttcaagactgtcattttctatttcaaccgaaaagtaagcatttaacccggtgaataaatgtagatcctgccattcattggtattttaaagaaccacttgaaatcggatcattttatttaaaaataaaaaatgttaatgccagttggcctactataaaaagccaggaccatgttagaattaggaaaagtaaccagcattactgcacctcttgttagactctgtgcattaataaaacacacctagagtctgttgtcatttcactaataggataagacaaattttttgctttgaaaaaatttttctgcatgcccaggtgtctgtctctggctgaggttttgtctattttacagtgtttcaatccagccataaaaattaacttgtgattttttttttcccaaagtcatgcttttccttaattatatttttattttattattttagtgtcttgagaaaaataccaagagatataatgtttcttttaattgtctatgcttaatcatctttaaacactttttaaatttctaaccacaagacctctctataatggtaaatgtaagacatcaccattttatcactcaaagtatgttattgaaagtttctatttggttgataaaaggaacaattttttcccacttttgatgcctgtgatgcaattttttattgcctacaatgagatacacttagtacaaaaaatgaaaatctggtatttcaaaattgcatttcttgtataataggtcagatttattaactactcatactttttctttacactaatcgatacatttagaaaaaattttctaagttagagacaagtttaaaagtaaaaaaaaaaaaaaattagccactgctagtctactgtttaggtaatcggaatcaccaattattttattagaatgatggcttgagtaaaaagctgtggaaagaattaaaggattatgagctaa

SEQ ID NO: 164874 - DNA, 2490 bp, Homo sapiens
  Payload ID: 12475
  Gene Symbol: PHACTR2
  Gene Name: phosphatase and actin regulator 2
  ENST ID: ENST00000367584
  CDS Start-End: 147-2015
accggctcctcggcgcccggcgtccacctccccgcccttctcgctgcctccgggtcgcggcgcgcggggcagagccgggcagcagcgggcagcgcagccctcggcgccggccccacccggtgctccggccccgccgccgggagccgatggccgaggcgggctggcgccccgcggcgtccccggtcgatccggccgggcaggcggcggcggtcccagtccccgagcccgaggcgcccgccccgccggcggcgcctgccctgcgctggcttcccggggacccgagcccccgcggccgctcacagagcgacctctcgtcgtcctcgagcaggggccgcccgctccgggtccacatctccggctcagttgacggactggacaaagcttctatagcaaactcagatggccccacagcaggttcccaaacacctcccttcaaaagaaaggggaaactatccaccattggtaaaatctttaagccttggaaatggaggaaaaagaagaccagcgacaaatttagagaaacctcggcagtattagaaaggaagatatccacacgacaaagtagagaggagctgataagaaggggagtgcttaaggaattgcctgatcaagatggagatgtaacagttaactttgaaaattcaaacgggcacatgatacccatcggagaggaatctacccgagaggaaaatgtagtaaagtctgaagaaggtaatggctctgtatctgaaaaaacaccacctctggaggaacaggcagaagataagaaagctggctcctctcattcaaaaaaaacaactggctctaaagcatcagcttcgccatccacttcatccacctcatctcgtcccaaagcttcaaaggagacagtttctagcaaagcagggacagtggggaccaccaagggcaagagaaaaactgacaagcagccaataacttctcacctgtcctcagacacaacaacttctggcacatccgacctgaaaggagagcctgcagagaccagagtggagagtttcaaactcgaacagactgtccctggagctgaggagcagaacacaggcaaattcaagtccatggtccctccaccccctgtggctccagcaccttctcctctggccccccctctccctcttgaggatcagtgcattactgcctcagacactccagttgtcctcgtcagcgttggagctgacctgcccgtctctgccttagacccaagtcagcttctttgggctgaagagccgacgaacagaaccactctctactcaggcactggcttaagtgttaacagagaaaatgcaaaatgtttcacaaccaaagaggagctggggaagacagtgcctcagctactgactcctgggctgatgggcgaatcttcagaatcctttagtgcctcagaagatgaaggccacagggaataccaagccaatgactctgactcggacgggcctatcttgtacaccgatgatgaggacgaagacgaagatgaggatggcagtggagaaagtgctttggcaagtaaaatacgccggagggatactcttgctatcaaacttggcaacagaccatctaagaaagaactagaggacaaaaacatcttgcagcgtacatctgaagaagagaggcaggaaatccgacaacaaattggaaccaagttagtcaggaggctgagccagaggcccacaactgaagaattagagcaaagaaacatcctaaaacaaaagaatgaagaagaggaacaagaagcaaaaatggaacttaaacgcagactcagcagaaagctcagcctgagacccacagtggcagagctacaagctcgaaggatcctgcgatttaacgagtatgtagaagtcacggattctcctgactatgaccgccgagcagacaagccctgggccaggttaacacctgcagacaaggcagcaataaggaaagaactaaatgaatttaaaagcacagaaatggaagttcatgaagagagtcgacagtttacaaggtttcatcgtccataacgaagagtgagactatttggaaacagagactgatcatctttgggggaagccctgcttcctgaaaacctgatattgcactgggatttgaatgtgtgtgtttccgtttaacttgtggtgaaggaagtgtgtgactcagcttggctgggaagtgctcctcacctgtgtggcccagatggctccaacaagcaaaaggaaggatgcagtgactcttgctgcccagaatgcacagcgatggtaagagacaccgtggatattcttcatcagaagctttaatcaaagaagatgagcagaagacaatcactggctccctgttaccagaaagccaaattttataatgcgggtgaaagaaaaatatagattaaaattgctgggcactgaaaaggggtgggagttggaaatcagaaagaaagagaaatatttcattatgttaatgaagaaaagagaaaattgaagcataaatgtatttttgaagtag

SEQ ID NO: 164875 - DNA, 745 bp, Homo sapiens
  Payload ID: 12475
  Gene Symbol: PHACTR2
  Gene Name: phosphatase and actin regulator 2
  ENST ID: ENST00000397980
  CDS Start-End: 97-558
ggacatgaacgcctggaagtctggctgggagcggacccatgatcgaaggaccaaaggagccgcttgatcgctggacctggccctgcgaccccagtcatgggccagacctcggtgtccacgctgtccccgcagcccggcagcgttgacggactggacaaagcttctatagcaaactcagatggccccacagcaggttcccaaacacctcccttcaaaagaaaggggaaactatccaccattggtaaaatctttaagccttggaaatggaggaaaaagaagaccagcgacaaatttagagaaacctcggcagtattagaaaggaagatatccacacgacaaagtagagaggagctgataagaaggggagtgcttaaggaattgcctgatcaagatggagatgtaacagttaactttgaaaattcaaacgggcacatgatacccatcggagaggaatctacccgagaggaaaatgtagtaaagtctgaagaaggtaatggctctgtatctgaaaaaacaccacctctggaggaacaggcagaagataagaaagactgttgaatttcaaatccatctgtggtttgtccctggcagccttctcacatccaagaatcgcatcctgcattacgtaacagtgccatctctggtgcctggtccgtgcagggtattcgtcactggactggccagacatcaaaggaagtgtttcccttatcaacataataaaaagttcctgacagttttatatgaa

SEQ ID NO: 164876 - DNA, 9531 bp, Homo sapiens
  Payload ID: 12475
  Gene Symbol: PHACTR2
  Gene Name: phosphatase and actin regulator 2
  Uniprot ID: O75167
  ENST ID: ENST00000427704
  CDS Start-End: 131-2035
agtgcatgaagtatgctcagtgtgccagcaagggctgataatcagcagaaggacagggtgcttcgttagtcagaagagccagggcttcccggctgccaggctacagaactcgcctcgccactcctgagacatggacaacgccgttgacggactggacaaagcttctatagcaaactcagatggccccacagcaggttcccaaacacctcccttcaaaagaaaggggaaactatccaccattggtaaaatctttaagccttggaaatggaggaaaaagaagaccagcgacaaatttagagaaacctcggcagtattagaaaggaagatatccacacgacaaagtagagaggagctgataagaaggggagtgcttaaggaattgcctgatcaagatggagatgtaacagttaactttgaaaattcaaacgggcacatgatacccatcggagaggaatctacccgagaggaaaatgtagtaaagtctgaagaaggtaatggctctgtatctgaaaaaacaccacctctggaggaacaggcagaagataagaaagagaacactgaaaaccactctgaaacaccggcagctcctgctctacctccttctgctcctcctaagcctagacccaaacctaaacccaaaaaatcacctgtgcctccgaaaggggccactgctggggccagccacaaaggtgatgaagtgcctcccattaaaaaaaataccaaggctcctggtaagcaggcccccgtccctccacccaagccagcaagccgaaacacgacccgagaggctgctggctcctctcattcaaaaaaaacaactggctctaaagcatcagcttcgccatccacttcatccacctcatctcgtcccaaagcttcaaaggagacagtttctagcaaagcagggacagtggggaccaccaagggcaagagaaaaactgacaagcagccaataacttctcacctgtcctcagacacaacaacttctggcacatccgacctgaaaggagagcctgcagagaccagagtggagagtttcaaactcgaacagactgtccctggagctgaggagcagaacacaggcaaattcaagtccatggtccctccaccccctgtggctccagcaccttctcctctggccccccctctccctcttgaggatcagtgcattactgcctcagacactccagttgtcctcgtcagcgttggagctgacctgcccgtctctgccttagacccaagtcagcttctttgggctgaagagccgacgaacagaaccactctctactcaggcactggcttaagtgttaacagagaaaatgcaaaatgtttcacaaccaaagaggagctggggaagacagtgcctcagctactgactcctgggctgatgggcgaatcttcagaatcctttagtgcctcagaagatgaaggccacagggaataccaagccaatgactctgactcggacgggcctatcttgtacaccgatgatgaggacgaagacgaagatgaggatggcagtggagaaagtgctttggcaagtaaaatacgccggagggatactcttgctatcaaacttggcaacagaccatctaagaaagaactagaggacaaaaacatcttgcagcgtacatctgaagaagagaggcaggaaatccgacaacaaattggaaccaagttagtcaggaggctgagccagaggcccacaactgaagaattagagcaaagaaacatcctaaaacaaaagaatgaagaagaggaacaagaagcaaaaatggaacttaaacgcagactcagcagaaagctcagcctgagacccacagtggcagagctacaagctcgaaggatcctgcgatttaacgagtatgtagaagtcacggattctcctgactatgaccgccgagcagacaagccctgggccaggttaacacctgcagacaaggcagcaataaggaaagaactaaatgaatttaaaagcacagaaatggaagttcatgaagagagtcgacagtttacaaggtttcatcgtccataacgaagagtgagactatttggaaacagagactgatcatctttgggggaagccctgcttcctgaaaacctgatattgcactgggatttgaatgtgtgtgtttccgtttaacttgtggtgaaggaagtgtgtgactcagcttggctgggaagtgctcctcacctgtgtggcccagatggctccaacaagcaaaaggaaggatgcagtgactcttgctgcccagaatgcacagcgatggtaagagacaccgtggatattcttcatcagaagctttaatcaaagaagatgagcagaagacaatcactggctccctgttaccagaaagccaaattttataatgcgggtgaaagaaaaatatagattaaaattgctgggcactgaaaaggggtgggagttggaaatcagaaagaaagagaaatatttcattatgttaatgaagaaaagagaaaattgaagcataaatgtatttttgaagtagttattcggtagctgagaacttattaagggatttaggaatttaacctcctgatgtggattcctcaaagacttgatcggagaatactcttgtttcaccattatgttggtacagtatagtaccattattttatgttgtgccagtgaatccagttgccagaaataagtctgaatgttttcatgcatctttttcttaaatgcaagagcttctactgactcttaacaagcatgcttacccaaattttgttgcatgcttttaagtagcattagctatgcacacttgacatttttaaatatccctttcctagtgtaccagccttcacaggataagaggactgggaataaagtcagatgtaatgtgaccctagaaaactgtagcaagcttcagaaataaatcttttgatctttccctatcttgattagatccaaagtcaaagcaaccatacttcacctagagaagacagtattggcaatcatgacacctgtaataaaaacttgaatccaaagtcaaaacttaagcaagatacaaatgtgctgcctgcagttagtcctgcatgggaataaggactagttatttttttagtgctgcatttttttaaagttggattgctgctatttaaaaaaaaaaaaaggacacagatcaaaaaaacacccaaaggcttaacagaacatggaaagttcccactaagttgtgtgtgaggaaatcctcatcttgtattttaagaatctgcagatggcatccatagatacagtacagtatttactgtcaatgcaaaagaatcagtgaggttaaagtagtggaagttttccctatgagcctacagtctgtattgtttacattaagaaactctctattattgtgttgctattttccatggagtcacaggcacactatgacttctgctcccaaatacatatgaccatatgtaaataccaccttgcatttcattgttcttcacaagtgctttgtgcccctttaattaaaaacacatgaaatgaataacaaaacaagacccaaatagagtttattttattctcagagtttggactacaattttctaagatgtttctggttcaagactgtcattttctatttcaaccgaaaagtaagcatttaacccggtgaataaatgtagatcctgccattcattggtattttaaagaaccacttgaaatcggatcattttatttaaaaataaaaaatgttaatgccagttggcctactataaaaagccaggaccatgttagaattaggaaaagtaaccagcattactgcacctcttgttagactctgtgcattaataaaacacacctagagtctgttgtcatttcactaataggataagacaaattttttgctttgaaaaaatttttctgcatgcccaggtgtctgtctctggctgaggttttgtctattttacagtgtttcaatccagccataaaaattaacttgtgattttttttttcccaaagtcatgcttttccttaattatatttttattttattattttagtgtcttgagaaaaataccaagagatataatgtttcttttaattgtctatgcttaatcatctttaaacactttttaaatttctaaccacaagacctctctataatggtaaatgtaagacatcaccattttatcactcaaagtatgttattgaaagtttctatttggttgataaaaggaacaattttttcccacttttgatgcctgtgatgcaattttttattgcctacaatgagatacacttagtacaaaaaatgaaaatctggtatttcaaaattgcatttcttgtataataggtcagatttattaactactcatactttttctttacactaatcgatacatttagaaaaaattttctaagttagagacaagtttaaaagtaaaaaaaaaaaaaaattagccactgctagtctactgtttaggtaatcggaatcaccaattattttattagaatgatggcttgagtaaaaagctgtggaaagaattaaaggattatgagctaagctgtattttgcagaatatggttctattttagtagagcagagatgagacatatccccaccggccacccagccagaggtctcctacctgggggccctaaagggatgcagaggtctggcccaccctccgtgcataggcacctctgtccaccaccagcgtttcagcaatccaaccagtaagcatatgctgtataggaaaaataaaagtgtgtgggaattggatttcttttgttgtaacacaattccaggtttttggctatttaaagtttgacattaggctgacatcgaggaagtaagtgggttttcctgagttcccaagatatgattaaggaagaaaacaaacccatctccaggaagatcccaggcaggaaagaactagacagatgtagaaaccaaagtgaccattttagtttttttattggagaataaaacattaatattagggtattaagaagatgctcagcaagcttgatcagaatcttcatggtcattaccaatcagtctgacaaaatagttctctggtagtcagcattcatttaaggcagcttgcctgataatttcctgtgttatgtgaagtgtcttgcactttcacatgttagctataattccttaaattacttaactgaaatctgtaatagagaaccattttggcatttgaacagctattttacatggagaaaaagcaaacacatctgtttgctttacccagaaaaactgactttctggtttcatcttcatattgtttagtagcataatgagagtagtcctttatctttctctaatgttagtaaatatattctgttagtaggaagttctgaaattgaagggaaaatatatttaaggaaataaaggaattcaatacacccttcaaaagtcaccaaatactgaaaataagagatgagtccttaaaacctgagtcaaaaaaggtccagttttacagcctgcaattaattcagggctgcgttggcattaaaaaagaaaatatatatatatatatatatatatatatatatatatatatatatgtatattatatatacagtagcttacacttaaaagaggaaaaatttgcattaacattgcatattctgatatgtaccatattaacacataacaggcattttatttatgcttcatagaatcagacagacacaactttcaaaaatcttactgtattcacaatagaaaagggtagtcttgtctaccacagaggagtatgtccacacttaataatgaaaactttcttcctttcctgcccaaaaatttcttcagtctgttattatttttaagtgccccttgctgcaaatttcaaacagagcaagaaatcttcctcagagtaggtggtatgaaattaaactagtacaatatatatgaattcatgtcatttacccctgagtatggtagaattgttaaagcattcttaaattccaattatatgaagcctatcattactaggaaaagtatattctttgggataagaattaatttcttcacactattagagcatgttgtgagtagtaaggaactacttagatgcaatttatttacagaattgtcccttgacctcttgaaatggctagatctttcactactgtgtaggtagtctctacttactggtaggatagattacattgctttactggacaaagcagaatgaacttatataactaaaatatgtcctatattggctgggtgcggtggcttacacctgtaataccagcactttgggaggccaaggtgggtggatcagttgaggtcaggagttcgagaccagcctggccaacatggtgaaaccctgtctctactgaaaatacaaaaaaaaaaaagtatctgggcatggtggcttgtgcctgtaatcccagctacttgggaggctgaggcagggaaatcgcttaaacccgggaggtggaggttgcagtgggcccagatcgtgccactccactccagcctgggagacagagcaagactccatctcaaaataataataatagtaataatgaataaaataaaataaaatatgtcctccagggaaaagcaatgacagagtaatcaccaaattaataggaacatctttctagagaaagtacatgcccagttagttcaaacccaggtttcaaagaagtagcactgggctctactgtaaaggcaggcagtgaccaagaggtggtggggagagaggtagagtaccctcaaatcattcccattttcacttccaatttcccttttgtaatcattaagcttaagctatgtatggaaatgcaaagcaccattagcatttctagaaagcagctggaaccttacccaccaatgcttttttgaagacagtatcatcccaaatttaaaaatcctattgtatatgttgtaaaatttctggcaaagaaatggaggatcctgtggcagctattcccacctaaagccaaccctataaggatgggtcattttttagccatgctaggatttactgcacacacaaaaaatgtcatttagcttgtcacattgctagcacagctgcacatatgagcaaagcactgttggtctgtgtttctcagtgggggtactcttggcatttggagctggataggtctttgctgtacagaatcatcccatgcattgccagatgtttaatatcccaggcccctgctgactaaatgtcagtagcattctcagtcattgtaaacaccaagaataaaaagcattcccccaggttcaaatgccctccctgggaggttggtatcacctcccctgaatgccactgtctactgcattttgaggacacagggagaaaaagtgcctatcctcaaacattgtctctgctgccttgcatttctttgggccctgaatggtttttctcccttcatttttcgagcctttctctcagtgcagctgttcttcagggaggaggttactgggcagccttggccattcagtgggcatggggacttggcctagtccctatatatatatacttaaagtccctatatatacttaaaggagagatcatacatgaagaaagcttttttttttttttttttttttgccttacaacttttctttagaaccacattattggtcataatccttgttactgtcatgaggattgttgcatgggttaaacacaaacacagactagcaatgcacttgaacaaacctggtggtctttggaaataaatcaccattagatttcacctggttatgctgcatcccataagttccaaatgaatcacctgcttatcctattaacgaagcatttaattcacacacaaatgcttgaatttcccctgtataaatgtagtcatgcgattcaacttttctaataagatttgtgaatgctgcatcatgatgaaaatgtggattaactgtgggttgcatgcctgttgttcatacttcagtgatggtcacacacaaaacaagatgagttttacttaggtgaaacattattaaactgtactaacaatacagaaacatattctctttgtcgctttttatcaccaaaactgaatggcaaatatgtcttgacattacttggatgaactgtggctagcaaaatggaattaacttagccactataattttttaaaacattaaagtttctaaattgtttttggggccgagtaacgcagagtcaataaaggtggttatattgtaagcttttagatggtgcttaagaattcttatctttttaaatagcagtattttttttttaagaataaattgtaaggagcaaataaggcagaatgccactctaccctcaggtcaattttatggtatatgaaaatgccagtaatatttgtgccacttgccaactcgggggaggaggggcttttcccttactggatacttttgttatagtttgactatgtcattatgttgtttagagagcctccacaatgagaagttgccactgcagggctaactcgccttcagaaataatcagaatgattcaagggtcaaaccactttcatcccttaaaatatagggactaatatttctttttcttttttttaaaaaaaacatttcttctgtggcttagaaatgtgccagtgtgttcaaaacatttacaccaatttcaccagatttaggacctattaaaaattcaaacaagtttcttttttttttttttttttctgtgtaacagggatttttaaataacggactatatgcattcttttgttatttcacacttcagttaaagtgataacaatggtaaactgtgatcattatcagactgactgaatgctttctgatttccagtgagtgatctagttctacgtattacacaggtgtaatatctgtgagtgtaaataactggaactgtacactgattaacatgacagtttctcttttgttgttcttatctgtactgtattatagtatgtgggtataaatatctacaagtatacacacatatgtacttgtattccactattgtaacctgaaagaaagactatgtattcccttttttaattccgtactggtatttgtgttatttaaaaagcaaaattctgctctatttagttgtataatattagaggatactttgctgtgcacaattccaagtgccttagaacattgtttagctttcctaagtatatataaatgcatatatgtataaaattgggaaaagttacctcaataaaatcattgggaaatccccagttttagtttgttccagtttctcttatatttggatagtgctcagcctttttaaatgaaaaaagaaaaaagagtaagacaacttccctaattgcctgttatttcagcttcacctaagtttttaacacctctttgtatgtaaggtcttgagacatgtaaggcctggtactttttatttaaaatgtctgtctaaagaattactgctcttaaaagaaacttccagtattttttttaacttgctatctttttatgtctgaggtatttgatattgatgtttttattgccattattatatgtaaacataaaagatagtccatttagagtttataatatagaaaataaacagacttcctcatta

SEQ ID NO: 164877 - DNA, 675 bp, Homo sapiens
  Payload ID: 12475
  Gene Symbol: PHACTR2
  Gene Name: phosphatase and actin regulator 2
  ENST ID: ENST00000451827
  CDS Start-End: 141-675
gggtagaaggtgaggggacccggcgggccgctcggcacaggccgggacatgaacgcctggaagtctggctgggagcggacccatgatcgaaggaccaaaggagccgcttgatcgctggacctggccctgcgaccccagtcatgggccagacctcggtgtccacgctgtccccgcagcccggcagcgttgacggactggacaaagcttctatagcaaactcagatggccccacagcaggttcccaaacacctcccttcaaaagaaaggggaaactatccaccattggtaaaatctttaagccttggaaatggaggaaaaagaagaccagcgacaaatttagagaaacctcggcagtattagaaaggaagatatccacacgacaaagtagagaggagctgataagaaggggagtgcttaaggaattgcctgatcaagctggctcctctcattcaaaaaaaacaactggctctaaagcatcagcttcgccatccacttcatccacctcatctcgtcccaaagcttcaaaggagacagtttctagcaaagcagggacagtggggaccaccaagggcaagagaaaaactgacaagcagccaataacttctcacctgtcctcagacacaacaacttctggcacatccgacctgaaaggagagcctgcagagaccagagtgg

SEQ ID NO: 164878 - DNA, 2569 bp, Homo sapiens
  Payload ID: 12475
  Gene Symbol: PHACTR2
  Gene Name: phosphatase and actin regulator 2
  Uniprot ID: O75167
  ENST ID: ENST00000440869
  CDS Start-End: 200-2137
atccgctgggcaggatccgccgcgccggctgcggccggccgggctgggagacccgcgcggggtagaaggtgaggggacccggcgggccgctcggcacaggccgggacatgaacgcctggaagtctggctgggagcggacccatgatcgaaggaccaaaggagccgcttgatcgctggacctggccctgcgaccccagtcatgggccagacctcggtgtccacgctgtccccgcagcccggcagcgttgacggactggacaaagcttctatagcaaactcagatggccccacagcaggttcccaaacacctcccttcaaaagaaaggggaaactatccaccattggtaaaatctttaagccttggaaatggaggaaaaagaagaccagcgacaaatttagagaaacctcggcagtattagaaaggaagatatccacacgacaaagtagagaggagctgataagaaggggagtgcttaaggaattgcctgatcaagatggagatgtaacagttaactttgaaaattcaaacgggcacatgatacccatcggagaggaatctacccgagaggaaaatgtagtaaagtctgaagaaggtaatggctctgtatctgaaaaaacaccacctctggaggaacaggcagaagataagaaagagaacactgaaaaccactctgaaacaccggcagctcctgctctacctccttctgctcctcctaagcctagacccaaacctaaacccaaaaaatcacctgtgcctccgaaaggggccactgctggggccagccacaaaggtgatgaagtgcctcccattaaaaaaaataccaaggctcctggtaagcaggcccccgtccctccacccaagccagcaagccgaaacacgacccgagaggctgctggctcctctcattcaaaaaaaacaactggctctaaagcatcagcttcgccatccacttcatccacctcatctcgtcccaaagcttcaaaggagacagtttctagcaaagcagggacagtggggaccaccaagggcaagagaaaaactgacaagcagccaataacttctcacctgtcctcagacacaacaacttctggcacatccgacctgaaaggagagcctgcagagaccagagtggagagtttcaaactcgaacagactgtccctggagctgaggagcagaacacaggcaaattcaagtccatggtccctccaccccctgtggctccagcaccttctcctctggccccccctctccctcttgaggatcagtgcattactgcctcagacactccagttgtcctcgtcagcgttggagctgacctgcccgtctctgccttagacccaagtcagcttctttgggctgaagagccgacgaacagaaccactctctactcaggcactggcttaagtgttaacagagaaaatgcaaaatgtttcacaaccaaagaggagctggggaagacagtgcctcagctactgactcctgggctgatgggcgaatcttcagaatcctttagtgcctcagaagatgaaggccacagggaataccaagccaatgactctgactcggacgggcctatcttgtacaccgatgatgaggacgaagacgaagatgaggatggcagtggagaaagtgctttggcaagtaaaatacgccggagggatactcttgctatcaaacttggcaacagaccatctaagaaagaactagaggacaaaaacatcttgcagcgtacatctgaagaagagaggcaggaaatccgacaacaaattggaaccaagttagtcaggaggctgagccagaggcccacaactgaagaattagagcaaagaaacatcctaaaacaaaagaatgaagaagaggaacaagaagcaaaaatggaacttaaacgcagactcagcagaaagctcagcctgagacccacagtggcagagctacaagctcgaaggatcctgcgatttaacgagtatgtagaagtcacggattctcctgactatgaccgccgagcagacaagccctgggccaggttaacacctgcagacaaggcagcaataaggaaagaactaaatgaatttaaaagcacagaaatggaagttcatgaagagagtcgacagtttacaaggtttcatcgtccataacgaagagtgagactatttggaaacagagactgatcatctttgggggaagccctgcttcctgaaaacctgatattgcactgggatttgaatgtgtgtgtttccgtttaacttgtggtgaaggaagtgtgtgactcagcttggctgggaagtgctcctcacctgtgtggcccagatggctccaacaagcaaaaggaaggatgcagtgactcttgctgcccagaatgcacagcgatggtaagagacaccgtggatattcttcatcagaagctttaatcaaagaagatgagcagaagacaatcactggctccctgttaccagaaagccaaattttataatgcgggtgaaagaaaaatatagattaaaattgctgggcactgaaaaggggtgggagttggaaatcagaaagaaagagaaatatttcattatgttaat

SEQ ID NO: 164879 - DNA, 616 bp, Homo sapiens
  Payload ID: 12475
  Gene Symbol: PHACTR2
  Gene Name: phosphatase and actin regulator 2
  ENST ID: ENST00000542769
  CDS Start-End: 117-616
gggccgctcggcacaggccgggacatgaacgcctggaagtctggctgggagcggacccatgatcgaaggaccaaaggagccgcttgatcgctggacctggccctgcgaccccagtcatgggccagacctcggtgtccacgctgtccccgcagcccggcagcgtattagaaaggaagatatccacacgacaaagtagagaggagctgataagaaggggagtgcttaaggaattgcctgatcaagatggagatgtaacagttaactttgaaaattcaaacgggcacatgatacccatcggagaggaatctacccgagaggaaaatgtagtaaagtctgaagaaggtaatggctctgtatctgaaaaaacaccacctctggaggaacaggcagaagataagaaagctggctcctctcattcaaaaaaaacaactggctctaaagcatcagcttcgccatccacttcatccacctcatctcgtcccaaagcttcaaaggagacagtttctagcaaagcagggacagtggggaccaccaagggcaagagaaaaactgacaagcagccaataacttctcacctgtcctcagacacaacaacttctggcacatccgacctgaa

SEQ ID NO: 164880 - DNA, 2247 bp, Homo sapiens
  Payload ID: 12476
  Gene Symbol: PHACTR3
  Gene Name: phosphatase and actin regulator 3
  Uniprot ID: Q96KR7
  ENST ID: ENST00000355648
  CDS Start-End: 110-1666
acctttcagggagatttgagagaaagactccagaagcccgcggggagagcaggggttctggggaagataaagcccttcatccaggatccctctgtgaccataagatgagatggaccaaacgcccccggcgcgtcctgaatatctggtctcagggattcgaactccccctgtgaggaggaacagcaaactggccaccctgggcaggatcttcaaaccctggaaatggaggaaaaagaaaaacgaaaaactgaagcagacaacgtcagcgctggagaagaagatggccggcaggcaaggccgagaggagctcatcaagaaggggctgctggagatgatggagcaggatgctgaaagcaaaacttgcaaccccgatggaggaccccgatctgtacagagtgaaccacccactcccaagtcggagacgctgacttcagaagatgcccagcccggaagccccttggccactgggacggaccaggtctccctggacaagccactgtcctcagctgcccacttggacgatgcagccaagatgccttctgcatccagtggtgaagaagcagacgctggcagcctcctgcccaccaccaatgagctctcccaagccttagctggggctgactccctggacagtcctcccagacctctggagagatccgtgggccagctccccagccccccactgctgcccactccgccacccaaggcaagctccaaaaccacaaaaaatgtcacaggccaagccacactcttccaagcctccagcatgaagagtgccgacccttccctccggggccagctctccacacccacggggtctccgcatctcaccacggtccaccggcctcttcccccaagccgcgtcattgaggagctgcacagggcgctggccacgaagcaccgccaggacagttttcaaggaagagaaagtaaagggtctccaaagaagcggctggatgtccgtctgtcgagaacgtccagcgtggagcggggcaaggagagggaggaggcttggagctttgacggggcattggagaacaagcgaactgccgctaaggaatctgaggagaacaaggagaacctgatcataaattctgaactcaaagacgacttgcttttgtatcaggacgaggaggcgctgaacgactccattatttctggaacactgccacggaaatgcaagaaggagctcctggccgtgaagctaaggaaccggccaagcaaacaggaactagaagaccggaacattttccccagaaggactgatgaagaaagacaggagatccggcagcagatcgagatgaagctttccaaacggctgagccaaagacctgccgtggaagagctggagagaagaaatatcttgaaacaaaggaatgatcagacagagcaggaagaaagaagagaaatcaagcaaagattgacaagaaagcttaatcagagacccactgttgatgaattaagagacagaaaaattctgatacgattcagtgattacgtggaagtagcaaaagcgcaggactatgacaggagggcagacaaaccctggacgagactgtcagcagcagataaggcagcaattcgtaaagaattaaatgagtacaaaagtaatgaaatggaggtacatgcatcaagcaagcacttgacaagattccacaggccatagagattttcttctgagaagaatttgtgtttaattttttgataccaacactgaacattcatcagggaactttcctgaagttcagctcaagactaccctacctgctgtgtttgtgagaagagtaggatcacacacacaggtgcaatcttgaccacacttacctgcaagaggagtaaccagaggacacacttccttccttctttggtgtctgaggagtgtgaactgttggggtcagttaagacccaacataactctatcagaagaaaactgttgtttgcctttcaaccttgttttacagttctgcagtgtaatggaggacgggcaacgtgcatgtgcaggctcaccactcccaggcctctgacatgagggacatgtgacagtgtcattcagtattatgttcaaaagacatttttatcctgatcataattaatttgaaaactctttaagttcatgttatacaagatgatttactgtattatacttttccttttttatataatgtctaacaaaaaatacagctgcaacattttgattcctgttaattttgttctttaattaaatgactacttattgcaggaaattaa

SEQ ID NO: 164881 - DNA, 2252 bp, Homo sapiens
  Payload ID: 12476
  Gene Symbol: PHACTR3
  Gene Name: phosphatase and actin regulator 3
  Uniprot ID: Q96KR7
  ENST ID: ENST00000359926
  CDS Start-End: 1-1671
atgcgtggccgtggcggggggcgcgcccgctgtcctgcgcccctgcgctcgctgctgggcgccttcggggcccgggacgctgccgccgccgcccgagatcctgcgcaagatgagatggaccaaacgcccccggcgcgtcctgaatatctggtctcagggattcgaactccccctgtgaggaggaacagcaaactggccaccctgggcaggatcttcaaaccctggaaatggaggaaaaagaaaaacgaaaaactgaagcagacaacgtcagcgctggagaagaagatggccggcaggcaaggccgagaggagctcatcaagaaggggctgctggagatgatggagcaggatgctgaaagcaaaacttgcaaccccgatggaggaccccgatctgtacagagtgaaccacccactcccaagtcggagacgctgacttcagaagatgcccagcccggaagccccttggccactgggacggaccaggtctccctggacaagccactgtcctcagctgcccacttggacgatgcagccaagatgccttctgcatccagtggtgaagaagcagacgctggcagcctcctgcccaccaccaatgagctctcccaagccttagctggggctgactccctggacagtcctcccagacctctggagagatccgtgggccagctccccagccccccactgctgcccactccgccacccaaggcaagctccaaaaccacaaaaaatgtcacaggccaagccacactcttccaagcctccagcatgaagagtgccgacccttccctccggggccagctctccacacccacggggtctccgcatctcaccacggtccaccggcctcttcccccaagccgcgtcattgaggagctgcacagggcgctggccacgaagcaccgccaggacagttttcaaggaagagaaagtaaagggtctccaaagaagcggctggatgtccgtctgtcgagaacgtccagcgtggagcggggcaaggagagggaggaggcttggagctttgacggggcattggagaacaagcgaactgccgctaaggaatctgaggagaacaaggagaacctgatcataaattctgaactcaaagacgacttgcttttgtatcaggacgaggaggcgctgaacgactccattatttctggaacactgccacggaaatgcaagaaggagctcctggccgtgaagctaaggaaccggccaagcaaacaggaactagaagaccggaacattttccccagaaggactgatgaagaaagacaggagatccggcagcagatcgagatgaagctttccaaacggctgagccaaagacctgccgtggaagagctggagagaagaaatatcttgaaacaaaggaatgatcagacagagcaggaagaaagaagagaaatcaagcaaagattgacaagaaagcttaatcagagacccactgttgatgaattaagagacagaaaaattctgatacgattcagtgattacgtggaagtagcaaaagcgcaggactatgacaggagggcagacaaaccctggacgagactgtcagcagcagataaggcagcaattcgtaaagaattaaatgagtacaaaagtaatgaaatggaggtacatgcatcaagcaagcacttgacaagattccacaggccatagagattttcttctgagaagaatttgtgtttaattttttgataccaacactgaacattcatcagggaactttcctgaagttcagctcaagactaccctacctgctgtgtttgtgagaagagtaggatcacacacacaggtgcaatcttgaccacacttacctgcaagaggagtaaccagaggacacacttccttccttctttggtgtctgaggagtgtgaactgttggggtcagttaagacccaacataactctatcagaagaaaactgttgtttgcctttcaaccttgttttacagttctgcagtgtaatggaggacgggcaacgtgcatgtgcaggctcaccactcccaggcctctgacatgagggacatgtgacagtgtcattcagtattatgttcaaaagacatttttatcctgatcataattaatttgaaaactctttaagttcatgttatacaagatgatttactgtattatacttttccttttttatataatgtctaacaaaaaatacagctgcaacattttgattcctgttaattttgttctttaattaaatgactacttattgcaggaaattaa

SEQ ID NO: 164882 - DNA, 2162 bp, Homo sapiens
  Payload ID: 12476
  Gene Symbol: PHACTR3
  Gene Name: phosphatase and actin regulator 3
  Uniprot ID: Q96KR7
  ENST ID: ENST00000361300
  CDS Start-End: 235-1581
cattcaaacccagtccattctggctcatggggcccaagccttgctctgctgccccaggctgtgtaggatgcatctgcggtggccattcttctctccagaggtccttcctaggactgactttgtggagattctgtgctggtaggtggcggggcaagacacgcctgtctctccccctggaaggagtcagtccagcaagaaacctgatgaaaccagtgactcccagctctggatgagatggaccaaacgcccccggcgcgtcctgaatatctggtctcagggattcgaactccccctgtgaggaggaacagcaaactggccaccctgggcaggatcttcaaaccctggaaatggaggaaaaagaaaaacgaaaaactgaagcagacaacgtcagcgctggagaagaagatggccggcaggcaaggccgagaggagctcatcaagaaggggctgctggagatgatggagcaggatgctgaaagcaaaacttgcaaccccgatggaggaccccgatctgtacagagtgaaccacccactcccaagtcggagacgctgacttcagaagatgcccagcccggaagccccttggccactgggacggaccaggtctccctggacaagccactgtcctcagctgcccacttggacgatgcaggccaagccacactcttccaagcctccagcatgaagagtgccgacccttccctccggggccagctctccacacccacggggtctccgcatctcaccacggtccaccggcctcttcccccaagccgcgtcattgaggagctgcacagggcgctggccacgaagcaccgccaggacagttttcaaggaagagaaagtaaagggtctccaaagaagcggctggatgtccgtctgtcgagaacgtccagcgtggagcggggcaaggagagggaggaggcttggagctttgacggggcattggagaacaagcgaactgccgctaaggaatctgaggagaacaaggagaacctgatcataaattctgaactcaaagacgacttgcttttgtatcaggacgaggaggcgctgaacgactccattatttctggaacactgccacggaaatgcaagaaggagctcctggccgtgaagctaaggaaccggccaagcaaacaggaactagaagaccggaacattttccccagaaggactgatgaagaaagacaggagatccggcagcagatcgagatgaagctttccaaacggctgagccaaagacctgccgtggaagagctggagagaagaaatatcttgaaacaaaggaatgatcagacagagcaggaagaaagaagagaaatcaagcaaagattgacaagaaagcttaatcagagacccactgttgatgaattaagagacagaaaaattctgatacgattcagtgattacgtggaagtagcaaaagcgcaggactatgacaggagggcagacaaaccctggacgagactgtcagcagcagataaggcagcaattcgtaaagaattaaatgagtacaaaagtaatgaaatggaggtacatgcatcaagcaagcacttgacaagattccacaggccatagagattttcttctgagaagaatttgtgtttaattttttgataccaacactgaacattcatcagggaactttcctgaagttcagctcaagactaccctacctgctgtgtttgtgagaagagtaggatcacacacacaggtgcaatcttgaccacacttacctgcaagaggagtaaccagaggacacacttccttccttctttggtgtctgaggagtgtgaactgttggggtcagttaagacccaacataactctatcagaagaaaactgttgtttgcctttcaaccttgttttacagttctgcagtgtaatggaggacgggcaacgtgcatgtgcaggctcaccactcccaggcctctgacatgagggacatgtgacagtgtcattcagtattatgttcaaaagacatttttatcctgatcataattaatttgaaaactctttaagttcatgttatacaagatgatttactgtattatacttttccttttttatataatgtctaacaaaaaatacagctgcaacattttgattcctgttaattttgttctttaattaaatgactacttattgcaggaaattaa

SEQ ID NO: 164883 - DNA, 2728 bp, Homo sapiens
  Payload ID: 12476
  Gene Symbol: PHACTR3
  Gene Name: phosphatase and actin regulator 3
  Uniprot ID: Q96KR7
  ENST ID: ENST00000371015
  CDS Start-End: 468-2147
gcaattgcaagagcaaagattcttccttttcccttttttcctgggggggtggggggtggggtggggggagggagcgcccccagacattccaggacatcaccccctgccccaagcacgcaataaacactgacaagaaaaagtttttatttcctggttcaacttttttttttttccctggaatatagactgaagaatgggaataaacacgaataaataacaaagcgaggccgcgcacgccgggatgcgcctggctgcagccggcgaggctattgtctccccgccctgaagccagccccggcgtctttctccagctcgtttcctttcccggccttttttttttttttttttttttaattttcttttttaaaaagacgccccctccagccccctcgccggtgaccttggccgcctcggatgctctgattccacgcggctcgctctaacttgcccccgcgccggccgggcccatggccgcgtcggaggacgggagcggctgcctcgtgtcgcggggccgctcgcagagtgaccccagcgtcctcaccgactcctcggccacctcctccgcggacgccggggagaacccagatgagatggaccaaacgcccccggcgcgtcctgaatatctggtctcagggattcgaactccccctgtgaggaggaacagcaaactggccaccctgggcaggatcttcaaaccctggaaatggaggaaaaagaaaaacgaaaaactgaagcagacaacgtcagcgctggagaagaagatggccggcaggcaaggccgagaggagctcatcaagaaggggctgctggagatgatggagcaggatgctgaaagcaaaacttgcaaccccgatggaggaccccgatctgtacagagtgaaccacccactcccaagtcggagacgctgacttcagaagatgcccagcccggaagccccttggccactgggacggaccaggtctccctggacaagccactgtcctcagctgcccacttggacgatgcagccaagatgccttctgcatccagtggtgaagaagcagacgctggcagcctcctgcccaccaccaatgagctctcccaagccttagctggggctgactccctggacagtcctcccagacctctggagagatccgtgggccagctccccagccccccactgctgcccactccgccacccaaggcaagctccaaaaccacaaaaaatgtcacaggccaagccacactcttccaagcctccagcatgaagagtgccgacccttccctccggggccagctctccacacccacggggtctccgcatctcaccacggtccaccggcctcttcccccaagccgcgtcattgaggagctgcacagggcgctggccacgaagcaccgccaggacagttttcaaggaagagaaagtaaagggtctccaaagaagcggctggatgtccgtctgtcgagaacgtccagcgtggagcggggcaaggagagggaggaggcttggagctttgacggggcattggagaacaagcgaactgccgctaaggaatctgaggagaacaaggagaacctgatcataaattctgaactcaaagacgacttgcttttgtatcaggacgaggaggcgctgaacgactccattatttctggaacactgccacggaaatgcaagaaggagctcctggccgtgaagctaaggaaccggccaagcaaacaggaactagaagaccggaacattttccccagaaggactgatgaagaaagacaggagatccggcagcagatcgagatgaagctttccaaacggctgagccaaagacctgccgtggaagagctggagagaagaaatatcttgaaacaaaggaatgatcagacagagcaggaagaaagaagagaaatcaagcaaagattgacaagaaagcttaatcagagacccactgttgatgaattaagagacagaaaaattctgatacgattcagtgattacgtggaagtagcaaaagcgcaggactatgacaggagggcagacaaaccctggacgagactgtcagcagcagataaggcagcaattcgtaaagaattaaatgagtacaaaagtaatgaaatggaggtacatgcatcaagcaagcacttgacaagattccacaggccatagagattttcttctgagaagaatttgtgtttaattttttgataccaacactgaacattcatcagggaactttcctgaagttcagctcaagactaccctacctgctgtgtttgtgagaagagtaggatcacacacacaggtgcaatcttgaccacacttacctgcaagaggagtaaccagaggacacacttccttccttctttggtgtctgaggagtgtgaactgttggggtcagttaagacccaacataactctatcagaagaaaactgttgtttgcctttcaaccttgttttacagttctgcagtgtaatggaggacgggcaacgtgcatgtgcaggctcaccactcccaggcctctgacatgagggacatgtgacagtgtcattcagtattatgttcaaaagacatttttatcctgatcataattaatttgaaaactctttaagttcatgttatacaagatgatttactgtattatacttttccttttttatataatgtctaacaaaaaatacagctgcaacattttgattcctgttaattttgttctttaattaaatgactacttattgcaggaaattaa

SEQ ID NO: 164884 - DNA, 2372 bp, Homo sapiens
  Payload ID: 12476
  Gene Symbol: PHACTR3
  Gene Name: phosphatase and actin regulator 3
  Uniprot ID: Q96KR7
  ENST ID: ENST00000395636
  CDS Start-End: 235-1791
cattcaaacccagtccattctggctcatggggcccaagccttgctctgctgccccaggctgtgtaggatgcatctgcggtggccattcttctctccagaggtccttcctaggactgactttgtggagattctgtgctggtaggtggcggggcaagacacgcctgtctctccccctggaaggagtcagtccagcaagaaacctgatgaaaccagtgactcccagctctggatgagatggaccaaacgcccccggcgcgtcctgaatatctggtctcagggattcgaactccccctgtgaggaggaacagcaaactggccaccctgggcaggatcttcaaaccctggaaatggaggaaaaagaaaaacgaaaaactgaagcagacaacgtcagcgctggagaagaagatggccggcaggcaaggccgagaggagctcatcaagaaggggctgctggagatgatggagcaggatgctgaaagcaaaacttgcaaccccgatggaggaccccgatctgtacagagtgaaccacccactcccaagtcggagacgctgacttcagaagatgcccagcccggaagccccttggccactgggacggaccaggtctccctggacaagccactgtcctcagctgcccacttggacgatgcagccaagatgccttctgcatccagtggtgaagaagcagacgctggcagcctcctgcccaccaccaatgagctctcccaagccttagctggggctgactccctggacagtcctcccagacctctggagagatccgtgggccagctccccagccccccactgctgcccactccgccacccaaggcaagctccaaaaccacaaaaaatgtcacaggccaagccacactcttccaagcctccagcatgaagagtgccgacccttccctccggggccagctctccacacccacggggtctccgcatctcaccacggtccaccggcctcttcccccaagccgcgtcattgaggagctgcacagggcgctggccacgaagcaccgccaggacagttttcaaggaagagaaagtaaagggtctccaaagaagcggctggatgtccgtctgtcgagaacgtccagcgtggagcggggcaaggagagggaggaggcttggagctttgacggggcattggagaacaagcgaactgccgctaaggaatctgaggagaacaaggagaacctgatcataaattctgaactcaaagacgacttgcttttgtatcaggacgaggaggcgctgaacgactccattatttctggaacactgccacggaaatgcaagaaggagctcctggccgtgaagctaaggaaccggccaagcaaacaggaactagaagaccggaacattttccccagaaggactgatgaagaaagacaggagatccggcagcagatcgagatgaagctttccaaacggctgagccaaagacctgccgtggaagagctggagagaagaaatatcttgaaacaaaggaatgatcagacagagcaggaagaaagaagagaaatcaagcaaagattgacaagaaagcttaatcagagacccactgttgatgaattaagagacagaaaaattctgatacgattcagtgattacgtggaagtagcaaaagcgcaggactatgacaggagggcagacaaaccctggacgagactgtcagcagcagataaggcagcaattcgtaaagaattaaatgagtacaaaagtaatgaaatggaggtacatgcatcaagcaagcacttgacaagattccacaggccatagagattttcttctgagaagaatttgtgtttaattttttgataccaacactgaacattcatcagggaactttcctgaagttcagctcaagactaccctacctgctgtgtttgtgagaagagtaggatcacacacacaggtgcaatcttgaccacacttacctgcaagaggagtaaccagaggacacacttccttccttctttggtgtctgaggagtgtgaactgttggggtcagttaagacccaacataactctatcagaagaaaactgttgtttgcctttcaaccttgttttacagttctgcagtgtaatggaggacgggcaacgtgcatgtgcaggctcaccactcccaggcctctgacatgagggacatgtgacagtgtcattcagtattatgttcaaaagacatttttatcctgatcataattaatttgaaaactctttaagttcatgttatacaagatgatttactgtattatacttttccttttttatataatgtctaacaaaaaatacagctgcaacattttgattcctgttaattttgttctttaattaaatgactacttattgcaggaaattaa

SEQ ID NO: 164885 - DNA, 539 bp, Homo sapiens
  Payload ID: 12476
  Gene Symbol: PHACTR3
  Gene Name: phosphatase and actin regulator 3
  ENST ID: ENST00000434923
  CDS Start-End: 415-539
cacactgccagcgctcacactgcactcccaggccctgctgtaggtgctaatctgatgggggcagccttagggagggctctgtccccagcaggaggacccttggtgtctctgtggtccttgaatcctggtgtctgttgaaatgcctcctcctctgggcaccttccaggaccaggccaggtgacaccaccattccacccccgtctctacccctttcctggactttcttccttccctgccctggctggggaagcagcggctgcctgcctgtgttcaccccacaccaccgctggggttgtgagaatcgctccttagcaccctggaggacacctctccccctcgccggtgaccttggccgcctcggatgctctgattccacgcggctcgctctaacttgcccccgcgccggccgggcccatggccgcgtcggaggacgggagcggctgcctcgtgtcgcggggccgctcgcagagtgaccccagcgtcctcaccgactcctcggccacctcctccgcggacgccggggagaacccagatgagat

SEQ ID NO: 164886 - DNA, 2349 bp, Homo sapiens
  Payload ID: 12476
  Gene Symbol: PHACTR3
  Gene Name: phosphatase and actin regulator 3
  Uniprot ID: Q96KR7
  ENST ID: ENST00000541461
  CDS Start-End: 214-1770
aaaaacacaaagaaacaaaaagtacgggagaggatcagttcattctcctgactcctggttggtctcaagacctcccctgttgcctgtgctctggaagattccccatagtacctactaggtgggccagagaaggatggatttgtgggaccctggaaggctgggaagaggactgagaagccacagccctgcgctgggaagagccacggagatgagatggaccaaacgcccccggcgcgtcctgaatatctggtctcagggattcgaactccccctgtgaggaggaacagcaaactggccaccctgggcaggatcttcaaaccctggaaatggaggaaaaagaaaaacgaaaaactgaagcagacaacgtcagcgctggagaagaagatggccggcaggcaaggccgagaggagctcatcaagaaggggctgctggagatgatggagcaggatgctgaaagcaaaacttgcaaccccgatggaggaccccgatctgtacagagtgaaccacccactcccaagtcggagacgctgacttcagaagatgcccagcccggaagccccttggccactgggacggaccaggtctccctggacaagccactgtcctcagctgcccacttggacgatgcagccaagatgccttctgcatccagtggtgaagaagcagacgctggcagcctcctgcccaccaccaatgagctctcccaagccttagctggggctgactccctggacagtcctcccagacctctggagagatccgtgggccagctccccagccccccactgctgcccactccgccacccaaggcaagctccaaaaccacaaaaaatgtcacaggccaagccacactcttccaagcctccagcatgaagagtgccgacccttccctccggggccagctctccacacccacggggtctccgcatctcaccacggtccaccggcctcttcccccaagccgcgtcattgaggagctgcacagggcgctggccacgaagcaccgccaggacagttttcaaggaagagaaagtaaagggtctccaaagaagcggctggatgtccgtctgtcgagaacgtccagcgtggagcggggcaaggagagggaggaggcttggagctttgacggggcattggagaacaagcgaactgccgctaaggaatctgaggagaacaaggagaacctgatcataaattctgaactcaaagacgacttgcttttgtatcaggacgaggaggcgctgaacgactccattatttctggaacactgccacggaaatgcaagaaggagctcctggccgtgaagctaaggaaccggccaagcaaacaggaactagaagaccggaacattttccccagaaggactgatgaagaaagacaggagatccggcagcagatcgagatgaagctttccaaacggctgagccaaagacctgccgtggaagagctggagagaagaaatatcttgaaacaaaggaatgatcagacagagcaggaagaaagaagagaaatcaagcaaagattgacaagaaagcttaatcagagacccactgttgatgaattaagagacagaaaaattctgatacgattcagtgattacgtggaagtagcaaaagcgcaggactatgacaggagggcagacaaaccctggacgagactgtcagcagcagataaggcagcaattcgtaaagaattaaatgagtacaaaagtaatgaaatggaggtacatgcatcaagcaagcacttgacaagattccacaggccatagagattttcttctgagaagaatttgtgtttaattttttgataccaacactgaacattcatcagggaactttcctgaagttcagctcaagactaccctacctgctgtgtttgtgagaagagtaggatcacacacacaggtgcaatcttgaccacacttacctgcaagaggagtaaccagaggacacacttccttccttctttggtgtctgaggagtgtgaactgttggggtcagttaagacccaacataactctatcagaagaaaactgttgtttgcctttcaaccttgttttacagttctgcagtgtaatggaggacgggcaacgtgcatgtgcaggctcaccactcccaggcctctgacatgagggacatgtgacagtgtcattcagtattatgttcaaaagacatttttatcctgatcataattaatttgaaaactctttaagttcatgttatacaagatgatttactgtattatacttttccttttttatataatgtctaacaaaaaatacagctgcaacattttgattcctgttaattttgttctttaattaaatgactacttattgcaggaaatt

SEQ ID NO: 164887 - DNA, 3107 bp, Homo sapiens
  Payload ID: 12477
  Gene Symbol: PHACTR4
  Gene Name: phosphatase and actin regulator 4
  Uniprot ID: Q8IZ21
  ENST ID: ENST00000373836
  CDS Start-End: 215-2353
gtgtgaagacagttttgtaagaactgcaagtgctcaggctgtatgggaaacagaaacttcagcagatgaactgaccttatgccatttcctgatgtttggcagtgacactgaaagaggaccgcatgtcccctctttatgtggatttatcttttatgaaaagtttgcttttgtccgggacagtttgttgtcgtgagatacatcagacaatataatcatgggacaagctgatgtctccagaccggtaaatccagatgcagttgaggaagcagaccagcccactacagagccaggcatggtcctggacagtgtggaagcaggagacacaacacctcctaccaaaaggaagagcaagttctcaggctttggcaagatcttcaagccctggaaatggaggaaaaaaaaaagtagtgataaatttaaagagacttcagaagttttagaacggaaaatatctatgcgaaagccaagagaagagctggttaaaagaggggttctgttggaagaccctgagcaaggtggtgaggatccaggaaagccaagcgatgccatgttaaagaatggccataccacccccatagggaatgccagatcatctagtccagtccaagtagaggaagagccagtaagattagcaagtcttaggaaagctattccagaagaggacctaaagaaacgactaggctcaactggaagccagcctaattctgaagcagagtctgttcctgagaatgtacccaaaccacctttacttcctcccaaaagacccttgtcctcttctcatgaagcaagtgaagggcaagcaaaggatgccacttcctctggcggcacggcaaggttcatcatctccacctccatcaccacagcacccgctgccaccactgctgccacaagccttgcaaagactgttaatctctctgtcaccccttccccagcacccaggactctgcctgctgctcctgccagcactaacactactgctaccccaagcctcactcatatggtccctgccaagcagccccctatccctccccctaaaccagctcacagaaatagcaaccctgtcattgctgaactgtcccaagcaataaacagtggtacattgttatcaaaaccgtccccacccttaccacctaagagaggcattccatcaacctcagtacccaccttggagtctgctgctgccatcaccacaaaaacaccaagtgatgaaagagagaagagcacgtgttctatgggctcggaactactaccaatgatctcacctcgctctccgtcccccccactgcctactcatatacctccagagcctccacgcacccctccattccctgctaagacttttcaagttgtgccagaaattgagtttccaccatccttagatctacaccaggagattccccagcaggaagatcagaaaaaggaagtccccaagaggatactggaccagaactttggggagccccatataccctctaggctgcctccactcccactgcatattcgaatccagcaggccctcaccagcccacttcccatgactcctattctggagggttctcacagagctcattcgttgctttttgaaaacagtgacagcttttctgaggacagcagtacgctgggtcggaccaggtctcttcccatcactattgaaatgctaaaagttccagacgatgaagaagaagaggagcaaacctgtccatccacattcagtgaagaaatgacacctacctcagtcattcctaaattaccacagtgtctacgggaggaagaagagaaggagagcgactctgattcagaaggtcccattcagtaccgagatgaagaagatgaagatgaaagctatcagagtgctctcgccaacaaagtgaagaggaaagacacactggcaatgaagttgaaccacagacccagtgaaccagagttgaacctgaattcttggccttgtaaaagcaaggaggagtggaatgaaatacggcaccagattggaaacacactgatccggcgactgagtcaaagaccaacaccagaagaactagaacaacgcaatatattgcaacctaaaaatgaagctgatcgtcaggcagaaaaacgagaaattaaacgtcggctcactagaaagctcagtcaaaggccaactgtcgctgaactccttgccaggaagattctgaggtttaatgaatatgtagaggtaacagatgctcaagattatgaccggcgagccgacaaaccttggaccaaactgacccctgctgacaaggctgccataagaaaagaattaaatgaatttaaaagctccgagatggaggttcatgaagagagcaaacattttacacgctaccatcgtccatgatgccaaaggttgagagaggaatcaacatggctgctttgctgcttccttctccaaagtgacatatggagggaactttagcacttcccagcacagccagaattgcatcctctgggatcttctgaggtggacagcactttgaatgtagcatttcactggaacagagtcttatgtgctgcaccgggggcaaaacaacactttgtcagtgcttttgaacctttcaatattgtagcatgcttgaggagtttttcccttactggccaccaaagttctgaaccacttgcaggttccaggttttactggctgcaccacaccccttcccctagatgactgcctgtgcagagacacagtttgcaccattagccttacctgccctgccctgattgtgagacccaaatgtgtaggctctaaattccagccatcaaatccaattcctggtggggaaaaccttctggagacccccaaccttctgataaaagagtctctacctccagggaaagccttcttaccacactggcatatcagatgaaagcattgcactgtacctctcgtaacacagcaatacagtcctcttgaggcactcaagcctgagaggaagctcaggatctgacatgttcttccttttcctcacaagtcatcatgattttttattttaaaataatctggaagtaatgggaacttagtttttcctgaactccaaccagaatccaaattggttagatgaggccaggcgcggtggctcacgcctgtaatccca

SEQ ID NO: 164888 - DNA, 6190 bp, Homo sapiens
  Payload ID: 12477
  Gene Symbol: PHACTR4
  Gene Name: phosphatase and actin regulator 4
  Uniprot ID: Q8IZ21
  ENST ID: ENST00000373839
  CDS Start-End: 262-2370
cccgccattttgttcagcttgccgggcaaccggcccctgctggggactacaagtcccgtaagcctccgcggcggcacgtcctaccctacactgtccagccggctccctttttccccctccccgggggccaagggctccggctgctgcctggcggccaacgggccaggtaggatttccgggagaggctgctgtggaggctgaggaggcggcggcggagatctggaaacagtatctcacctccctaaactggttaatagtggcatggaagatccatttgaggaagcagaccagcccactacagagccaggcatggtcctggacagtgtggaagcaggagacacaacacctcctaccaaaaggaagagcaagttctcaggctttggcaagatcttcaagccctggaaatggaggaaaaaaaaaagtagtgataaatttaaagagacttcagaagttttagaacggaaaatatctatgcgaaagccaagagaagagctggttaaaagaggggttctgttggaagaccctgagcaaggtggtgaggatccaggaaagccaagcgatgccatgttaaagaatggccataccacccccatagggaatgccagatcatctagtccagtccaagtagaggaagagccagtaagattagcaagtcttaggaaagctattccagaagaggacctaaagaaacgactaggctcaactggaagccagcctaattctgaagcagagtctgttcctgagaatgtacccaaaccacctttacttcctcccaaaagacccttgtcctcttctcatgaagcaagtgaagggcaagcaaaggatgccacttcctctggcggcacggcaaggttcatcatctccacctccatcaccacagcacccgctgccaccactgctgccacaagccttgcaaagactgttaatctctctgtcaccccttccccagcacccaggactctgcctgctgctcctgccagcactaacactactgctaccccaagcctcactcatatggtccctgccaagcagccccctatccctccccctaaaccagctcacagaaatagcaaccctgtcattgctgaactgtcccaagcaataaacagtggtacattgttatcaaaaccgtccccacccttaccacctaagagaggcattccatcaacctcagtacccaccttggagtctgctgctgccatcaccacaaaaacaccaagtgatgaaagagagaagagcacgtgttctatgggctcggaactactaccaatgatctcacctcgctctccgtcccccccactgcctactcatatacctccagagcctccacgcacccctccattccctgctaagacttttcaagttgtgccagaaattgagtttccaccatccttagatctacaccaggagattccccagcaggaagatcagaaaaaggaagtccccaagaggatactggaccagaactttggggagccccatataccctctaggctgcctccactcccactgcatattcgaatccagcaggccctcaccagcccacttcccatgactcctattctggagggttctcacagagctcattcgttgctttttgaaaacagtgacagcttttctgaggacagcagtacgctgggtcggaccaggtctcttcccatcactattgaaatgctaaaagttccagacgatgaagaagaagaggagcaaacctgtccatccacattcagtgaagaaatgacacctacctcagtcattcctaaattaccacagtgtctacgggaggaagaagagaaggagagcgactctgattcagaaggtcccattcagtaccgagatgaagaagatgaagatgaaagctatcagagtgctctcgccaacaaagtgaagaggaaagacacactggcaatgaagttgaaccacagacccagtgaaccagagttgaacctgaattcttggccttgtaaaagcaaggaggagtggaatgaaatacggcaccagattggaaacacactgatccggcgactgagtcaaagaccaacaccagaagaactagaacaacgcaatatattgcaacctaaaaatgaagctgatcgtcaggcagaaaaacgagaaattaaacgtcggctcactagaaagctcagtcaaaggccaactgtcgctgaactccttgccaggaagattctgaggtttaatgaatatgtagaggtaacagatgctcaagattatgaccggcgagccgacaaaccttggaccaaactgacccctgctgacaaggctgccataagaaaagaattaaatgaatttaaaagctccgagatggaggttcatgaagagagcaaacattttacacgctaccatcgtccatgatgccaaaggttgagagaggaatcaacatggctgctttgctgcttccttctccaaagtgacatatggagggaactttagcacttcccagcacagccagaattgcatcctctgggatcttctgaggtggacagcactttgaatgtagcatttcactggaacagagtcttatgtgctgcaccgggggcaaaacaacactttgtcagtgcttttgaacctttcaatattgtagcatgcttgaggagtttttcccttactggccaccaaagttctgaaccacttgcaggttccaggttttactggctgcaccacaccccttcccctagatgactgcctgtgcagagacacagtttgcaccattagccttacctgccctgccctgattgtgagacccaaatgtgtaggctctaaattccagccatcaaatccaattcctggtggggaaaaccttctggagacccccaaccttctgataaaagagtctctacctccagggaaagccttcttaccacactggcatatcagatgaaagcattgcactgtacctctcgtaacacagcaatacagtcctcttgaggcactcaagcctgagaggaagctcaggatctgacatgttcttccttttcctcacaagtcatcatgattttttattttaaaataatctggaagtaatgggaacttagtttttcctgaactccaaccagaatccaaattggttagatgaggccaggcgcggtggctcacgcctgtaatcccagcactttgggaggccgaggtgggtggatcacctgaggtcaggagttcaagaccagcctggccaacatggtgaaaccccatctctactaaaaatacaaaaattagccaggtgtggtggcgcctggttgaggcatgagaatcgcttgaacccaggaggtggaggttgcagtgagccaagatcatgcctactgcactccagcctgggcaacaaagtgggactctgtcttaaaaaaaaaaaaaaaaaaaaaatcggttagatgagaaagcatgtatattttctatatacaaaaacaagaaaggcgttttgagcccctgtgctcaggcccactcccacactgtggagtgtactttcattttcaataaatccccttattccttccttgcaaaaaaaaaaaaaaaaaaagccttagccagattcagtggctcacgcctgtaatcccaacactttgggaggctgaggcgggtggatcacctgagttcaggagttcaagaccagcctggccaacatggcaaaaccctgtctctactaaaaagtaaaaaaaattagccgggcatggtggcttgtgccttgtagtcccagccactggggaggctgaggcgggagaattgcttgaacctgggaggtggagattgcagtgagccgagatcgcgccactgcactccagcctgggtgacagagcgagactccgtctcaaaaaaaaaaaaaaagccttaatattaatgctaacgtggcagaaaactagcaggttacattttataggctattgtagttttatttaccaaatgatattctctaaatcacttcgaccaataaatgtattctcctccttaaagcagagttgtatcaactctgtgggagcatttatgagctgtcagtccccacacttctagccagaatcacaataaggtctggctgggtgtggggtgctgcataggaaagggtctctggagaagcaagaagggcacaatcatggcccactgctcccctcttcttctcagtgctctttgccctctcctgctgcgtgcttcctcttcactccagtgctgatcctcctgctctctctggcagcttccacctcacccgcccctcttccacactataaccagtatggttggtgctggggcattgactcagcccccctgctttctgcatttgtaatagatattaatatgatttcctaaaacagaagattttgttgctttctttgaacttgtattgaaaaccatacagtctcactgttttgctttaattcctatccacactataaatggaagaaaaaaattaatagcttctgtttaatctgatgaatgtggctttttttcccttcactttaatgttcaagaagttgtggctatttcatagatttcttctgatttattctgtgggtccctgttatctgttctttatgtaatctttcagtagattttcatcctttcatatccacattcttatgtggacttgctgaagaaacagaatatcagttcaaaacaaaacctaggccaggcatggtggttcacgcctataatctcagcactttgggaagccaaggcggtcaggagtttgagaccagcctgaccaacatgatgaaaccctgtctctactaaaaatacaaaaattagcctggcgtggtggcacgcatctgtaatcccaactactcaggacgctgaggcaggagagtcgcttgaacccaggaggcggagattgcagtgagccaagattgcaccactgcactccagcctgggcaacagagcgagactccatcaaaaaaaaaaaaaaaaaagaaggaaggaaggaaagcaagccctgaatccacatctccttgaagttttttttgttttattttgtttttgagacagaattttgctcttgttgcccaggccggagtgcaatggtgcaatctcagctcactgcaacctccgcctcccgggttgaggcgattctcctacctcagcctcccaagtagctaggattacaggcatgagccaccacgcctggctaattttatatttctagtagagatgaggtttctccatgttggtcaggctggtctcaaactcccgacctcaggtgatccacccacctcagcctcccaaagtggtgggattacaggcatgagccaccgtgccgagccttccttgaagttttttgtttggttttgatttgttttgttttgttttgttttgttttgtttttggagatagggtctcactctgttacccatgctggagtgcagtggcacaatcttggctcagagcaacctctgcctcccaggctcaagcaatcctcccacttcagtctaagtagctgggactacaggcacgtgccaccaggcccagctaatttttgtgttttgttagagatgaggttttgccatattgcccaggctcgtcttgaacaccggggctcaaggaatctgcccatcttcgcctcccaaagttctgagatagcaggtgtgagtcatcatgcccagcctccttgaagtttactaacaattgggataactgagggaagagaagtgacaattccactcagtctattagaggtctggatataaggtagccacacaataactctaacttgacttctaaccattctatcttattgatttggaggctgtcttctgccagattttttgtggcttgagatgatattttcgaacccttctttcactacctttcttacccttaatgtgccaagcttgaaacaggatttgatttcctgagctacttgttcgccttctgtgcgtcaccaagtaatctggttcatctttcgtctcattcatgttattttcaagtgaaacaagacattttgggggtcaagtctctttgggtgttttgtttttatgtatataaaaatggattttgtgttccctttccatgtaagtaccaacttatatggaaactcacaatcataatgtaaagaagaaatgaaagcctggtgtattgtacttcaagatgcctccctgatgtatagaatctccttgtaaaataaataattgcattgtatatcagtcttctcatcaatattaattattaaatattttagaatttttaaataccaactata

SEQ ID NO: 164889 - DNA, 918 bp, Homo sapiens
  Payload ID: 12477
  Gene Symbol: PHACTR4
  Gene Name: phosphatase and actin regulator 4
  ENST ID: ENST00000632202
  CDS Start-End: 256-918
attttgttcagcttgccgggcaaccggcccctgctggggactacaagtcccgtaagcctccgcggcggcacgtcctaccctacactgtccagccggctccctttttccccctccccgggggccaagggctccggctgctgcctggcggccaacgggccaggtaggatttccgggagaggctgctgtggaggctgaggaggcggcggcggagatctggaaacagtatctcacctccctaaactggttaatagtggcatggaagatccatttgacttctccagagaaccttggaacaaggaagcagaccagcccactacagagccaggcatggtcctggacagtgtggaagcaggagacacaacacctcctaccaaaaggaagagcaagttctcaggctttggcaagatcttcaagccctggaaatggaggaaaaaaaaaagtagtgataaatttaaagagacttcagaagttttagaacggaaaatatctatgcgaaagccaagagaagagctggttaaaagaggggttctgttggaagaccctgagcaaggtggtgaggatccaggaaagccaagcgatgccatgttaaagaatggccataccacccccatagggaatgccagatcatctagtccagtccaagtagaggaagagccagtaagattagcaagtcttaggaaagctattccagaagaggacctaaagaaacgactaggctcaactggaagccagcctaattctgaagcagagtctgttcctgagaatgtacccaaaccacctttacttcctcccaaaagacccttgtcctcttctcatgaagcaagtgaagggcaagcaaaggatgccacttcctctggcggcacggcaaggttcatcatctccacctccatcaccacagcacccgctgccaccactgct

SEQ ID NO: 164890 - DNA, 553 bp, Homo sapiens
  Payload ID: 12477
  Gene Symbol: PHACTR4
  Gene Name: phosphatase and actin regulator 4
  ENST ID: ENST00000633167
  CDS Start-End: 235-553
ttcctgtgtgaagagtgccagtgtgaagacagttttgtaagaactgcaagtgctcaggctgtatgggaaacagaaacttcagcagatgaactgaccttatgccatttcctgatgtttggcagtgacactgaaagaggaccgcatgtcccctctttatgtggatttatcttttatgaaaagtttgcttttgtccgggacagtttgttgtcgtgagatacatcagacaatataatcatgggacaagctgatgtctccagaccggtaaatccagatgcagttgacttctccagagaaccttggaacaaggaagcagaccagcccactacagagccaggcatggtcctggacagtgtggaagcaggagacacaacacctcctaccaaaaggaagagcaagttctcaggctttggcaagatcttcaagccctggaaatggaggaaaaaaaaaagtagtgataaatttaaagagacttcagaagttttagaacggaaaatatctatgcgaaagccaagagaagagctggttaaaagaggggttctgttggaagaccctg

SEQ ID NO: 164891 - DNA, 3078 bp, Homo sapiens
  Payload ID: 12477
  Gene Symbol: PHACTR4
  Gene Name: phosphatase and actin regulator 4
  Uniprot ID: Q8IZ21
  ENST ID: ENST00000493669
  CDS Start-End: 121-312
tgctgcctggcggccaacgggccaggtaggatttccgggagaggctgctgtggaggctgaggaggcggcggcggagatctggaaacagtatctcacctccctaaactggttaatagtggcatggaagatccatttgacttctccagagaaccttggaacagtagaggaagcagaccagcccactacagagccaggcatggtcctggacagtgtggaagcaggagacacaacacctcctaccaaaaggaagagcaagttctcaggctttggcaagatcttcaagccctggaaatggaggaaaaaaaaaagtagtgataaatttaaagagacttcagaagttttagaacggaaaatatctatgcgaaagccaagagaagagctggttaaaagaggggttctgttggaagaccctgagcaaggtggtgaggatccaggaaagccaagcgatgccatgttaaagaatggccataccacccccatagggaatgccagatcatctagtccagtccaagtagaggaagagccagtaagattagcaagtcttaggaaagctattccagaagaggacctaaagaaacgactaggctcaactggaagccagcctaattctgaagcagagtctgttcctgagaatgtacccaaaccacctttacttcctcccaaaagacccttgtcctcttctcatgaagcaagtgaagggcaagcaaaggatgccacttcctctggcggcacggcaaggttcatcatctccacctccatcaccacagcacccgctgccaccactgctgccacaagccttgcaaagactgttaatctctctgtcaccccttccccagcacccaggactctgcctgctgctcctgccagcactaacactactgctaccccaagcctcactcatatggtccctgccaagcagccccctatccctccccctaaaccagctcacagaaatagcaaccctgtcattgctgaactgtcccaagcaataaacagtggtacattgttatcaaaaccgtccccacccttaccacctaagagaggcattccatcaacctcagtacccaccttggagtctgctgctgccatcaccacaaaaacaccaagtgatgaaagagagaagagcacgtgttctatgggctcggaactactaccaatgatctcacctcgctctccgtcccccccactgcctactcatatacctccagagcctccacgcacccctccattccctgctaagacttttcaagttgtgccagaaattgagtttccaccatccttagatctacaccaggagattccccagcaggaagatcagaaaaaggaagtccccaagaggatactggaccagaactttggggagccccatataccctctaggctgcctccactcccactgcatattcgaatccagcaggccctcaccagcccacttcccatgactcctattctggagggttctcacagagctcattcgttgctttttgaaaacagtgacagcttttctgaggacagcagtacgctgggtcggaccaggtctcttcccatcactattgaaatgctaaaagttccagacgatgaagaagaagaggagcaaacctgtccatccacattcagtgaagaaatgacacctacctcagtcattcctaaattaccacagtgtctacgggaggaagaagagaaggagagcgactctgattcagaaggtcccattcagtaccgagatgaagaagatgaagatgaaagctatcagagtgctctcgccaacaaagtgaagaggaaagacacactggcaatgaagttgaaccacagacccagtgaaccagagttgaacctgaattcttggccttgtaaaagcaaggaggagtggaatgaaatacggcaccagattggaaacacactgatccggcgactgagtcaaagaccaacaccagaagaactagaacaacgcaatatattgcaacaatatagagtgaaatttggccttaaaagtctcctcactgagaaggtttgggcttccttggggctatttgtgagcatgttcagtctgaccaatccatcccctgttctctcagcactacttggctaaaaatgaagctgatcgtcaggcagaaaaacgagaaattaaacgtcggctcactagaaagctcagtcaaaggccaactgtcgctgaactccttgccaggaagattctgaggtttaatgaatatgtagaggtaacagatgctcaagattatgaccggcgagccgacaaaccttggaccaaactgacccctgctgacaaggctgccataagaaaagaattaaatgaatttaaaagctccgagatggaggttcatgaagagagcaaacattttacacggcaggggcctggtgcagtggtacacacctgtaatcctagcactttgggaggccgaggtgggaggatcactttgagaccagcctgggaaacacgctaccatcgtccatgatgccaaaggttgagagaggaatcaacatggctgctttgctgcttccttctccaaagtgacatatggagggaactttagcacttcccagcacagccagaattgcatcctctgggatcttctgaggtggacagcactttgaatgtagcatttcactggaacagagtcttatgtgctgcaccgggggcaaaacaacactttgtcagtgcttttgaacctttcaatattgtagcatgcttgaggagtttttcccttactggccaccaaagttctgaaccacttgcaggttccaggttttactggctgcaccacaccccttcccctagatgactgcctgtgcagagacacagtttgcaccattagccttacctgccctgccctgattgtgagacccaaatgtgtaggctctaaattccagccatcaaatccaattcctggtggggaaaaccttctggagacccccaaccttctgataaaagagtctctacctccagggaaagccttcttaccacactggcatatcagatgaaagcattgcactgtacctctcgtaacacagcaatacagtcctcttgaggcactcaagcctgagaggaagctcaggatctga

SEQ ID NO: 164892 - DNA, 3375 bp, Homo sapiens
  Payload ID: 12477
  Gene Symbol: PHACTR4
  Gene Name: phosphatase and actin regulator 4
  ENST ID: ENST00000632421
  CDS Start-End: 155-280
tttttccccctccccgggggccaagggctccggctgctgcctggcggccaacgggccaggtaggatttccgggagaggctgctgtggaggctgaggaggcggcggcggagatctggaaacagtatctcacctccctaaactggttaatagtggcatggaagatccatttgagatggggttttaccatgttacccaggctggtcttgaactcctggactcaagcaacccccgcttggcctcccaaagtgctgggattagaggcgtgagccactgcacctgacctaagaggaagcagaccagcccactacagagccaggcatggtcctggacagtgtggaagcaggagacacaacacctcctaccaaaaggaagagcaagttctcaggctttggcaagatcttcaagccctggaaatggaggaaaaaaaaaagtagtgataaatttaaagagacttcagaagttttagaacggaaaatatctatgcgaaagccaagagaagagctggttaaaagaggggttctgttggaagaccctgagcaaggtggtgaggatccaggaaagccaagcgatgccatgttaaagaatggccataccacccccatagggaatgccagatcatctagtccagtccaagtagaggaagagccagtaagattagcaagtcttaggaaagctattccagaagaggacctaaagaaacgactaggctcaactggaagccagcctaattctgaagcagagtctgttcctgagaatgtacccaaaccacctttacttcctcccaaaagacccttgtcctcttctcatgaagcaagtgaagggcaagcaaaggatgccacttcctctggcggcacggcaaggttcatcatctccacctccatcaccacagcacccgctgccaccactgctgccacaagccttgcaaagactgttaatctctctgtcaccccttccccagcacccaggactctgcctgctgctcctgccagcactaacactactgctaccccaagcctcactcatatggtccctgccaagcagccccctatccctccccctaaaccagctcacagaaatagcaaccctgtcattgctgaactgtcccaagcaataaacagtggtacattgttatcaaaaccgtccccacccttaccacctaagagaggcattccatcaacctcagtacccaccttggagtctgctgctgccatcaccacaaaaacaccaagtgatgaaagagagaagagcacgtgttctatgggctcggaactactaccaatgatctcacctcgctctccgtcccccccactgcctactcatatacctccagagcctccacgcacccctccattccctgctaagacttttcaagttgtgccagaaattgagtttccaccatccttagatctacaccaggagattccccagcaggaagatcagaaaaaggaagtccccaagaggatactggaccagaactttggggagccccatataccctctaggctgcctccactcccactgcatattcgaatccagcaggccctcaccagcccacttcccatgactcctattctggagggttctcacagagctcattcgttgctttttgaaaacagtgacagcttttctgaggacagcagtacgctgggtcggaccaggtctcttcccatcactattgaaatgctaaaagttccagacgatgaagaagaagaggagcaaacctgtccatccacattcagtgaagaaatgacacctacctcagtcattcctaaattaccacagtgtctacgggaggaagaagagaaggagagcgactctgattcagaaggtcccattcagtaccgagatgaagaagatgaagatgaaagctatcagagtgctctcgccaacaaagtgaagaggaaagacacactggcaatgaagttgaaccacagacccagtgaaccagagttgaacctgaattcttggccttgtaaaagcaaggaggagtggaatgaaatacggcaccagattggaaacacactgatccggcgactgagtcaaagaccaacaccagaagaactagaacaacgcaatatattgcaacctaaaaatgaagctgatcgtcaggcagaaaaacgagaaattaaacgtcggctcactagaaagctcagtcaaaggccaactgtcgctgaactccttgccaggaagattctgaggtttaatgaatatgtagaggtaacagatgctcaagattatgaccggcgagccgacaaaccttggaccaaactgacccctgctgacaaggctgccataagaaaagaattaaatgaatttaaaagctccgagatggaggttcatgaagagagcaaacattttacacgctaccatcgtccatgatgccaaaggttgagagaggaatcaacatggctgctttgctgcttccttctccaaagtgacatatggagggaactttagcacttcccagcacagccagaattgcatcctctgggatcttctgaggtggacagcactttgaatgtagcatttcactggaacagagtcttatgtgctgcaccgggggcaaaacaacactttgtcagtgcttttgaacctttcaatattgtagcatgcttgaggagtttttcccttactggccaccaaagttctgaaccacttgcaggttccaggttttactggctgcaccacaccccttcccctagatgactgcctgtgcagagacacagtttgcaccattagccttacctgccctgccctgattgtgagacccaaatgtgtaggctctaaattccagccatcaaatccaattcctggtggggaaaaccttctggagacccccaaccttctgataaaagagtctctacctccagggaaagccttcttaccacactggcatatcagatgaaagcattgcactgtacctctcgtaacacagcaatacagtcctcttgaggcactcaagcctgagaggaagctcaggatctgacatgttcttccttttcctcacaagtcatcatgattttttattttaaaataatctggaagtaatgggaacttagtttttcctgaactccaaccagaatccaaattggttagatgaggccaggcgcggtggctcacgcctgtaatcccagcactttgggaggccgaggtgggtggatcacctgaggtcaggagttcaagaccagcctggccaacatggtgaaaccccatctctactaaaaatacaaaaattagccaggtgtggtggcgcctggttgaggcatgagaatcgcttgaacccaggaggtggaggttgcagtgagccaagatcatgcctactgcactccagcctgggcaacaaagtgggactctgtcttaaaaaaaaaaaaaaaa

SEQ ID NO: 164893 - DNA, 9027 bp, Homo sapiens
  Payload ID: 12478
  Gene Symbol: PTEN
  Gene Name: phosphatase and tensin homolog
  Uniprot ID: P60484
  ENST ID: ENST00000371953
  CDS Start-End: 1358-2569
ggtaacctcagactcgagtcagtgacactgctcaacgcacccatctcagctttcatcatcagtcctccacccccgccccacaacagcctaccctgcctccggctgggtttctgggcagaggccgaggcttagctcgttatcctcgcctcgcgttgctgcaaaagccgcagcaagtgcagctgcaggctggcggctgggaaccggcccgagcaagccccaggcagctacactgggcatgctcagtagagcctgcggcttggggactctgcgctcgcacccagagctaccgctctgccccctcctaccgccccctgccctgccctgccctcccctcgcccggcgcggtcccgtccgcctctcgctcgcctcccgcctcccctcggtcttccgaggcgcccgggctcccggcgcggcggcggagggggcgggcaggccggcgggcggtgatgtggcgggactctttatgcgctgcggcaggatacgcgctcggcgctgggacgcgactgcgctcagttctctcctctcggaagctgcagccatgatggaagtttgagagttgagccgctgtgaggcgaggccgggctcaggcgagggagatgagagacggcggcggccgcggcccggagcccctctcagcgcctgtgagcagccgcgggggcagcgccctcggggagccggccggcctgcggcggcggcagcggcggcgtttctcgcctcctcttcgtcttttctaaccgtgcagcctcttcctcggcttctcctgaaagggaaggtggaagccgtgggctcgggcgggagccggctgaggcgcggcggcggcggcggcacctcccgctcctggagcgggggggagaagcggcggcggcggcggccgcggcggctgcagctccagggagggggtctgagtcgcctgtcaccatttccagggctgggaacgccggagagttggtctctccccttctactgcctccaacacggcggcggcggcggctggcacatccagggacccgggccggttttaaacctcccgtgcgccgccgccgcaccccccgtggcccgggctccggaggccgccggcggaggcagccgttcggaggattattcgtcttctccccattccgctgccgccgctgccaggcctctggctgctgaggagaagcaggcccagtcgctgcaaccatccagcagccgccgcagcagccattacccggctgcggtccagagccaagcggcggcagagcgaggggcatcagctaccgccaagtccagagccatttccatcctgcagaagaagccccgccaccagcagcttctgccatctctctcctcctttttcttcagccacaggctcccagacatgacagccatcatcaaagagatcgttagcagaaacaaaaggagatatcaagaggatggattcgacttagacttgacctatatttatccaaacattattgctatgggatttcctgcagaaagacttgaaggcgtatacaggaacaatattgatgatgtagtaaggtttttggattcaaagcataaaaaccattacaagatatacaatctttgtgctgaaagacattatgacaccgccaaatttaattgcagagttgcacaatatccttttgaagaccataacccaccacagctagaacttatcaaacccttttgtgaagatcttgaccaatggctaagtgaagatgacaatcatgttgcagcaattcactgtaaagctggaaagggacgaactggtgtaatgatatgtgcatatttattacatcggggcaaatttttaaaggcacaagaggccctagatttctatggggaagtaaggaccagagacaaaaagggagtaactattcccagtcagaggcgctatgtgtattattatagctacctgttaaagaatcatctggattatagaccagtggcactgttgtttcacaagatgatgtttgaaactattccaatgttcagtggcggaacttgcaatcctcagtttgtggtctgccagctaaaggtgaagatatattcctccaattcaggacccacacgacgggaagacaagttcatgtactttgagttccctcagccgttacctgtgtgtggtgatatcaaagtagagttcttccacaaacagaacaagatgctaaaaaaggacaaaatgtttcacttttgggtaaatacattcttcataccaggaccagaggaaacctcagaaaaagtagaaaatggaagtctatgtgatcaagaaatcgatagcatttgcagtatagagcgtgcagataatgacaaggaatatctagtacttactttaacaaaaaatgatcttgacaaagcaaataaagacaaagccaaccgatacttttctccaaattttaaggtgaagctgtacttcacaaaaacagtagaggagccgtcaaatccagaggctagcagttcaacttctgtaacaccagatgttagtgacaatgaacctgatcattatagatattctgacaccactgactctgatccagagaatgaaccttttgatgaagatcagcatacacaaattacaaaagtctgaatttttttttatcaagagggataaaacaccatgaaaataaacttgaataaactgaaaatggacctttttttttttaatggcaataggacattgtgtcagattaccagttataggaacaattctcttttcctgaccaatcttgttttaccctatacatccacagggttttgacacttgttgtccagttgaaaaaaggttgtgtagctgtgtcatgtatatacctttttgtgtcaaaaggacatttaaaattcaattaggattaataaagatggcactttcccgttttattccagttttataaaaagtggagacagactgatgtgtatacgtaggaattttttccttttgtgttctgtcaccaactgaagtggctaaagagctttgtgatatactggttcacatcctacccctttgcacttgtggcaacagataagtttgcagttggctaagagaggtttccgaagggttttgctacattctaatgcatgtattcgggttaggggaatggagggaatgctcagaaaggaaataattttatgctggactctggaccatataccatctccagctatttacacacacctttctttagcatgctacagttattaatctggacattcgaggaattggccgctgtcactgcttgttgtttgcgcatttttttttaaagcatattggtgctagaaaaggcagctaaaggaagtgaatctgtattggggtacaggaatgaaccttctgcaacatcttaagatccacaaatgaagggatataaaaataatgtcataggtaagaaacacagcaacaatgacttaaccatataaatgtggaggctatcaacaaagaatgggcttgaaacattataaaaattgacaatgatttattaaatatgttttctcaattgtaacgacttctccatctcctgtgtaatcaaggccagtgctaaaattcagatgctgttagtacctacatcagtcaacaacttacacttattttactagttttcaatcataatacctgctgtggatgcttcatgtgctgcctgcaagcttcttttttctcattaaatataaaatattttgtaatgctgcacagaaattttcaatttgagattctacagtaagcgttttttttctttgaagatttatgatgcacttattcaatagctgtcagccgttccacccttttgaccttacacattctattacaatgaattttgcagttttgcacattttttaaatgtcattaactgttagggaattttacttgaatactgaatacatataatgtttatattaaaaaggacatttgtgttaaaaaggaaattagagttgcagtaaactttcaatgctgcacacaaaaaaaagacatttgatttttcagtagaaattgtcctacatgtgctttattgatttgctattgaaagaatagggtttttttttttttttttttttttttttttaaatgtgcagtgttgaatcatttcttcatagtgctcccccgagttgggactagggcttcaatttcacttcttaaaaaaaatcatcatatatttgatatgcccagactgcatacgattttaagcggagtacaactactattgtaaagctaatgtgaagatattattaaaaaggtttttttttccagaaatttggtgtcttcaaattataccttcaccttgacatttgaatatccagccattttgtttcttaatggtataaaattccattttcaataacttattggtgctgaaattgttcactagctgtggtctgacctagttaatttacaaatacagattgaataggacctactagagcagcatttatagagtttgatggcaaatagattaggcagaacttcatctaaaatattcttagtaaataatgttgacacgttttccataccttgtcagtttcattcaacaatttttaaatttttaacaaagctcttaggatttacacatttatatttaaacattgatatatagagtattgattgattgctcataagttaaattggtaaagttagagacaactattctaacacctcaccattgaaatttatatgccaccttgtctttcataaaagctgaaaattgttacctaaaatgaaaatcaacttcatgttttgaagatagttataaatattgttctttgttacaatttcgggcaccgcatattaaaacgtaactttattgttccaatatgtaacatggagggccaggtcataaataatgacattataatgggcttttgcactgttattatttttcctttggaatgtgaaggtctgaatgagggttttgattttgaatgtttcaatgtttttgagaagccttgcttacattttatggtgtagtcattggaaatggaaaaatggcattatatatattatatatataaatatatattatacatactctccttactttatttcagttaccatccccatagaatttgacaagaattgctatgactgaaaggttttcgagtcctaattaaaactttatttatggcagtattcataattagcctgaaatgcattctgtaggtaatctctgagtttctggaatattttcttagactttttggatgtgcagcagcttacatgtctgaagttacttgaaggcatcacttttaagaaagcttacagttgggccctgtaccatcccaagtcctttgtagctcctcttgaacatgtttgccatacttttaaaagggtagttgaataaatagcatcaccattctttgctgtggcacaggttataaacttaagtggagtttaccggcagcatcaaatgtttcagctttaaaaaataaaagtagggtacaagtttaatgtttagttctagaaattttgtgcaatatgttcataacgatggctgtggttgccacaaagtgcctcgtttacctttaaatactgttaatgtgtcatgcatgcagatggaaggggtggaactgtgcactaaagtgggggctttaactgtagtatttggcagagttgccttctacctgccagttcaaaagttcaacctgttttcatatagaatatatatactaaaaaatttcagtctgttaaacagccttactctgattcagcctcttcagatactcttgtgctgtgcagcagtggctctgtgtgtaaatgctatgcactgaggatacacaaaaataccaatatgatgtgtacaggataatgcctcatcccaatcagatgtccatttgttattgtgtttgttaacaaccctttatctcttagtgttataaactccacttaaaactgattaaagtctcattcttgtcattgtgtgggtgttttattaaatgagagtttataattcaaattgcttaagtccattgaagttttaattaatgggcagccaaatgtgaatacaaagttttcagtttttttttttcctgctgtccttcaaagcctactgtttaaaaaaaaaaaaaaaaaaaaacatggcctgagagtagagtatctgtctactcatgtttaattaaggaaaaacacttatttttagggctttagtcatcacttcataaattgtataagcacattaaatagcgttctagtcctgaaaaagtccaagattcttagaaaattgtgcatatttttattatgacagatgtttgaagataattccccagaatggatttgatactttagatttcaattttgtggcttttgtctattattctgtactctgccatcagcatatggaaagcttcatttactcatcatgacttgtgccatataaaaattgatatttcggaatagtctaaaggactttttgtacttgaatttaatcatgttgtttctaatattcttaaaagcttgaagactaaagcatatcctttcaacaaagcatagtaaggtaataagaaagtgtagtttgtacaagtgttaaaaaaataaagtagacaatgttacagtgggacttattatttcaagtttacattttctccatgtaattttttaaaaagtaaatgaaaaaatgtgcaataatgtaaaatatgaagtgtatgtgtacacacattttatttttcggtatcttgggtatacgtatggttgaaaactatactggagtctaaaagtattctaatttataagaagacattttggtgatgtttgaaaaatagaaatgtgctagttttgtttttatatcatgtcctttgtacgttgtaatatgagctggcttggttcagtaaatgccatcaccatttccattgagaatttaaaactcaccagtgtttaatatgcaggcttccaaaggcttatgaaaaaaatcaagacccttaaatctagttaatttgctgctaacatgaaactctttggttcttttatttttgccagataattagacacacatctaaagcttagtcttaaatggcttaagtgtagctattgattagtgctgttgctagttcagaaagaaatgtttgtgaatggaaacaagaatattcagtccaaactgttgtaaggacagtacctgaaaaccaggaaacaggataatggaaaaagtcttttaaagatgaaatgttggagccaactttcttatagaattaattgtatgtggctatagaaagcctaatgattgttgcttatttttgagagcatattattcttttatgaccataatcttgctgtttttccatcttccaaaagatcttccttctaatatgtatatcagaatgtgggtagccagtcagacaaattcatattggttggtagctttaaaaagtttgtaatgtgaagacaggaaaggacaaaatagtttgctttggtggtagtactctggttgttaagctaggtattttgagactacttccccatcacaacaacaataaaataatcactcataatcctatcacctggagacatagccatcgttaatatgttagtgactatacaatcatgttttcttctgtatatccatgtatattctttaaaaatgaaatttatactgtacctgatctcaaagctttttagcttagtatatctgtcatgaatttgtaggatgttccattgcatcagaaaacggacagtgatttgattactttctaatgccacagatgcagattacatgtagttattgagaatcctttcgaattcagtggcttaatcatgaatgtctaaatattgttgacattaggatgatacatgtaaattaaagttacatttgtttagcatagacaagcttaacattgtagatgtttctcttcaaaaatcatcttaaacatttgcatttggaattgtgttaaatagaatgtgtgaaacactgtattagtaaacttcatcacctttctacttccttatagtttgaacttttcagtttttgtagttcccaaacagttgctcaatttagagcaaattaatttaacacctgccaaaaaaaggctgctgttggcttatcagttgtctttaaattcaaatgctcatgtgacttttatcacatcaaaaaatatttcattaatgattcacctttagctctgaaaattaccgcgtttagtaattatagtgggcttataaaaacatgcaactctttttgatagttatttgagaattttggtgaaaaatatttagctgagggcagtatagaacttataaaccaatatattgatatttttaaaacatttttacatataagtaaactgccatctttgagcataactacatttaaaaataaagctgcatatttttaaatcaagtgtttaacaagaatttatattttttattttttaaaattaaaaataatttatatttcctctgttgcatgaggattctcatctgtgcttataatggttagagattttatttgtgtggaatgaagtgaggcttgtagtcatggttctagtgtttcagtttgccaagtctgtttactgcagtgaaattcatcaaatgtttcagtgtggttttctgtagcctatcatttactggctatttttttatgtacacctttaggattttctgcctactctatccagttgtccaaatgatatcctacattttacaaatgccctttcagtttctattttctttttccattaaattgccctcatgtcctaatgtgcagtttgtaagtgtgtgtgtgtgtgtctgtgtgtgtgtgaatttgattttcaagagtgctagacttccaatttgagagattaaataatttaattcaggcaaacatttttcattggaatttcacagttcattgtaatgaaaatgttaatcctggatgacctttgacatacagtaatgaatcttggatattaatgaatttgttagtagcatcttgatgtgtgttttaatgagttattttcaaagttgtgcattaaaccaaagttggcatactggaagtgtttatatcaagttccatttggctactgatggacaaaaaatagaaatgccttcctatggagagtatttttcctttaaaaaattaaaaaggttaattattttgacta

SEQ ID NO: 164894 - DNA, 1605 bp, Homo sapiens
  Payload ID: 12478
  Gene Symbol: PTEN
  Gene Name: phosphatase and tensin homolog
  ENST ID: ENST00000610634
  CDS Start-End: 1135-1605
cctcccctcgcccggcgcggtcccgtccgcctctcgctcgcctcccgcctcccctcggtcttccgaggcgcccgggctcccggcgcggcggcggagggggcgggcaggccggcgggcggtgatgtggcgggactctttatgcgctgcggcaggatacgcgctcggcgctgggacgcgactgcgctcagttctctcctctcggaagctgcagccatgatggaagtttgagagttgagccgctgtgaggcgaggccgggctcaggcgagggagatgagagacggcggcggccgcggcccggagcccctctcagcgcctgtgagcagccgcgggggcagcgccctcggggagccggccggcctgcggcggcggcagcggcggcgtttctcgcctcctcttcgtcttttctaaccgtgcagcctcttcctcggcttctcctgaaagggaaggtggaagccgtgggctcgggcgggagccggctgaggcgcggcggcggcggcggcacctcccgctcctggagcgggggggagaagcggcggcggcggcggccgcggcggctgcagctccagggagggggtctgagtcgcctgtcaccatttccagggctgggaacgccggagagttggtctctccccttctactgcctccaacacggcggcggcggcggctggcacatccagggacccgggccggttttaaacctcccgtgcgccgccgccgcaccccccgtggcccgggctccggaggccgccggcggaggcagccgttcggaggattattcgtcttctccccattccgctgccgccgctgccaggcctctggctgctgaggagaagcaggcccagtcgctgcaaccatccagcagccgccgcagcagccattacccggctgcggtccagagccaagcggcggcagagcgaggggcatcagctaccgccaagtccagagccatttccatcctgcagaagaagccccgccaccagcagcttctgccatctctctcctcctttttcttcagccacaggctcccagacatgacagccatcatcaaagagatcgttagcagaaacaaaaggagatatcaagaggatggattcgacttagacttgacctatatttatccaaacattattgctatgggatttcctgcagaaagacttgaaggcgtatacaggaacaatattgatgatgtagtaaggtttttggattcaaagcataaaaaccattacaagatatacaatctttgtgctgaaagacattatgacaccgccaaatttaattgcagagttgcacaatatccttttgaagaccataacccaccacagctagaacttatcaaacccttttgtgaagatcttgaccaatggctaagtgaagatgacaatcatgttgcagcaattcactgtaaagctggaaagggacgaactggtgtaatgatatgtgcatatttattacatcggggcaaatttttaaaggcacaagaggccctagatttctatggggaagtaaggaccagagacaaaaaggcagatcctacaggaggtattccagataaaggcattattgtcataggagatggcagctccatggatgttattgccccttaa

SEQ ID NO: 164895 - DNA, 644 bp, Homo sapiens
  Payload ID: 12478
  Gene Symbol: PTEN
  Gene Name: phosphatase and tensin homolog
  ENST ID: ENST00000472832
  CDS Start-End: 1-462
gcactgttgtttcacaagatgatgtttgaaactattccaatgttcagtggcggaacttgcaatcctcagtttgtggtctgccagctaaaggtgaagatatattcctccaattcaggacccacacgacgggaagacaagttcatgtactttgagttccctcagccgttacctgtgtgtggtgatatcaaagtagagttcttccacaaacagaacaagatgctaaaaaaggacaaaatgtttcacttttgggtaaatacattcttcataccaggaccagaggaaacctcagaaaaagtagaaaatggaagtctatgtgatcaagaaatcgatagcatttgcagtatagagcgtgcagataatgacaaggaatatctagtacttactttaacaaaaaatgatcttgacaaagcaaataaagacaaagccaaccgatacttttctccaaattttaaggtcagttaaattaaacattttgtgggggttgttgacttgtatgtatgtgatgtgtgtttaattctaggagtacagctgatgaagaacttgcttgacaagtttttaacttatgtattatttcgaagcagtgtttacgtagcagtaacatgaaagtttctaataaaatacccaatgtacacagcgtcaaaaaa

SEQ ID NO: 164896 - DNA, 4555 bp, Homo sapiens
  Payload ID: 12479
  Gene Symbol: PALD1
  Gene Name: phosphatase domain containing, paladin 1
  Uniprot ID: Q9ULE6
  ENST ID: ENST00000263563
  CDS Start-End: 269-2839
gcaggtcccgtcgccggtgagcacgggctccctctcgcgtggcctcgccgggtccgcctggcctgcccacctccggagccacctctgcccccgcatgggctggcgaagttgggaggagcgagctggagccagagcgcgcgccgggcgcgccccgtcgctgcctgactcggcgcccgcagttcgggcgcagcacgccggccgcaggagcacggatgccccccggagccgcgggctggcaggtctggggtcctgaggctgctggcagactatgggtacaacggccagcacagcccagcagacggtctcggcaggcaccccatttgagggcctacagggcagtggcacgatggacagtcggcactccgtcagcatccactccttccagagcactagcttgcataacagcaaggccaagtccatcatccccaacaaggtggcccctgttgtgatcacgtacaactgcaaggaggagttccagatccatgatgagctgctcaaggctcattacacgttgggccggctctcggacaacacccctgagcactacctggtgcaaggccgctacttcctggtgcgggatgtcactgagaagatggatgtgctgggcaccgtgggaagctgtggggcccccaacttccggcaggtgcagggtgggctcactgtgttcggcatgggacagcccagcctctcagggttcaggcgggtcctccagaaactccagaaggacggacatagggagtgtgtcatcttctgtgtgcgggaggaacctgtgcttttcctgcgtgcagatgaggactttgtgtcctacacacctcgagacaagcagaaccttcatgagaacctccagggccttggacccggggtccgggtggagagcctggagctggccatccggaaagagatccacgactttgcccagctgagcgagaacacataccatgtgtaccataacaccgaggacctgtggggggagccccatgctgtggccatccatggtgaggacgacttgcatgtgacggaggaggtgtacaagcggcccctcttcctgcagcccacctacaggtaccaccgcctgcccctgcccgagcaagggagtcccctggaggcccagttggacgcctttgtcagtgttctccgggagacccccagcctgctgcagctccgtgatgcccacgggcctcccccagccctcgtcttcagctgccagatgggcgtgggcaggaccaacctgggcatggtcctgggcaccctcatcctgcttcaccgcagtgggaccacctcccagccagaggctgcccccacgcaggccaagcccctgcctatggagcagttccaggtgatccagagctttctccgcatggtgccccagggaaggaggatggtggaagaggtggacagagccatcactgcctgtgccgagttgcatgacctgaaagaagtggtcttggaaaaccagaagaagttagaaggtatccgaccggagagcccagcccagggaagcggcagccgacacagcgtctggcagagggcgctgtggagcctggagcgatacttctacctgatcctgtttaactactaccttcatgagcagtacccgctggcctttgccctcagtttcagccgctggctgtgtgcccaccctgagctgtaccgcctgcccgtgacgctgagctcagcaggccctgtggctccgagggacctcatcgccaggggctccctacgggaggacgatctggtctccccggacgcgctcagcactgtcagagagatggatgtggccaacttccggcgggtgccccgcatgcccatctacggcacggcccagcccagcgccaaggccctggggagcatcctggcctacctgacggacgccaagaggaggctgcggaaggttgtctgggtgagccttcgggaggaggccgtgttggagtgtgacgggcacacctacagcctgcggtggcctgggccccctgtggctcctgaccagctggagaccctggaggcccagctgaaggcccatctaagcgagcctcccccaggcaaggagggccccctgacctacaggttccagacctgccttaccatgcaggaggtcttcagccagcaccgcagggcctgtcctggcctcacctaccaccgcatccccatgccggacttctgtgccccccgagaggaggactttgaccagctgctggaggccctgcgggccgccctctccaaggacccaggcactggcttcgtgttcagctgcctcagcggccagggccgtaccacaactgcgatggtggtggctgtcctggccttctggcacatccaaggcttccccgaggtgggtgaggaggagctcgtgagtgtgcctgatgccaagttcactaagggtgaatttcaggtagtaatgaaggtggtgcagctgctacccgatgggcaccgtgtgaagaaggaggtggacgcagcgctggacactgtcagcgagaccatgacgcccatgcactaccacctgcgggagatcatcatctgcacctaccgccaggcgaaggcagcgaaagaggcgcaagaaatgcggaggctgcagctgcggagcctgcagtacttggagcgctatgtctgcctgattctcttcaacgcgtacctccacctggagaaggccgactcctggcagaggcccttcagcacctggatgcaggaggtggcatcgaaggctggcatctacgagatccttaacgagctgggcttccccgagctggagagcggggaggaccagcccttctccaggctgcgctaccggtggcaggagcagagctgcagcctcgagccctctgcccccgaggacttgctgtagggggccttactccctgtccccccacccacagggccccacgcaggcctggggtgtctgaggtgctcttggctgggagcggccctgaggggtgctggccttgaaatgattcccccacttcctggagagactgagcggagttgggagcctttttagaaagaactttttataggacagggagacagcacagccatcccttgcaaaccaccaaggtgtgtggctgacctccagggaggagcactcactggagtgctcacaaggtgcacactgctgtgtgtaccttgcagacaggccggcgttcagcctccaaggggctcactcccccagttgccaaacactgtggatctctctgtcctcttctcccctctctcagattggcctggcagcccctggcacagagcagacccggccactggtagctccccacttccttactcctgctgctctgccattgccgctccccttgttgctgcccaagcactgccctcgggcgtctggcagcctgaggtgggtggaggggacagtgttctggatagatctattatgtgaaaggcagcttcacccagttttctggactctcatgcccccatctccgacctgggagacttcaggaatgacaacctacccagcctggtggggctggcaggatggtggaggtttctcaaggagctggagacttcagggagcccctctcatggggaggaaagagcttccagggggcgaacgcagcacagaggaagaggcctgctccacttgtctgggaacctgggcaggaggcacagaggaagccaaggcctggagctgcaggtcccccggcatctctctctgtcccggcagcccaggatggcctggtgcccccacctgctgcagcaggagccccaaggagtgctagctgagggtggttgctggggtggtcctcatggacagtgaggtgtgcaagggtgcactgagggtggtgggaggggatcacctgggttccaggccatccttgctgagcatctttgagcctgccttccggtgggagcagaaaaggccagaccctgctgagttagaggctgctgggatccactgtttccacacagcgggaaggctgctgggaacaggtggcagagaagtgccatgtttgcgttgagccttgcagctcttccagctggggactggtgcttgctgaaacccaggagctgaacagtgaggaggctgtccaccttgcttggctcactgggaccaggaaagcctgtctttggttaggctcgtgtacttctgcaggaaaaaaaaaaaaggatgtgtcattggtcatgatatttgaaaaggggaggaggccgaagttgttcccatttatccagtattggaaaatatttgacccccttggctgaattcttttgcagaactactgtgtgtctgttcactaccttttcaggtttattgtttttatttttgcatgaattaagacgttttaatttctttgcagacaaggtctagatgcggagtcagagatgggactgaatggggagggatcctttgtgttctcatggttggctctgactttcagctgtgttgggaccactggctgatcacatcacctctctgcctcagtttccccatctgtaaaatgggagaataatacttgcctacctacctcacaggggtgttgtgaggattcatttgtgattttttttttttttgtacagagcttttaagcattaaaaacagctaaatgtg

SEQ ID NO: 164897 - DNA, 1816 bp, Homo sapiens
  Payload ID: 12480
  Gene Symbol: PHOSPHO1
  Gene Name: phosphatase, orphan 1
  Uniprot ID: Q8TCT1
  ENST ID: ENST00000310544
  CDS Start-End: 129-932
cttccccacttcttacactccaaactcagccgggacagacctctgctgccgccgcccccacgaacgtgtgacgacggctggaggccaacagagtccctacaggtggtgctcacggtaatgcaccgacaatgagtggctgttttccagtttctggcctccgctgcctatctagggacggcaggatggccgcgcagggcgcgccgcgcttcctcctgaccttcgacttcgacgagactatcgtggacgaaaacagcgacgattcgatcgtgcgcgccgcgccgggccagcggctcccggagagcctgcgagccacctaccgcgagggcttctacaacgagtacatgcagcgcgtcttcaagtacctgggcgagcagggcgtgcggccgcgggacctgagcgccatctacgaagccatccctttgtcgccaggcatgagcgacctgctgcagtttgtggcaaaacagggcgcctgcttcgaggtgattctcatctccgatgccaacacctttggcgtggagagctcgctgcgcgccgccggccaccacagcctgttccgccgcatcctcagcaacccgtcggggccggatgcgcggggactgctggctctgcggccgttccacacacacagctgcgcgcgctgccccgccaacatgtgcaagcacaaggtgctcagcgactacctgcgcgagcgggcccacgacggcgtgcacttcgagcgcctcttctacgtgggcgacggcgccaacgacttctgccccatggggctgctggcgggcggcgacgtggccttcccgcgccgcggctaccccatgcaccgcctcattcaggaggcccagaaggccgagcccagctcgttccgcgccagcgtggtgccctgggaaacggctgcagatgtgcgcctccacctgcaacaggtgctgaagtcgtgctgagtctggccgcctgcaggggggtacccgggccaacggcggagggggcggggaagggagattcggcaaagacagctttactactcccttttccctttggctttgttatgtccctctgggaatttctggaatctcgtatttgggggcttggggaagggggctcagagccgtccctatctattcagttaacccacctcggctgcctcccccactccactgtgcacggttgagttctggagtctgacccatcgcggggtggcgcgcaaaccttggaaggcagcagtatttcctggtcctcccaactgggaggaaggggcccccccggcaggtgagagaaggaacatctcccgccgctgtaacttgttgcctcgggctgcgtgaccgcccctcctccagtctactgtggagggaacccaggatcctgaaattctcctggccgcaagaactccccacagaggcagaagagggtctccacctatggccccaggcctttgcgatcttgcttcacccaccgcgaccccacactatttctgtgctgtccacactctcttgcctcccgacccccgcactcccttctagcacccccaaaggaaaagccagaggaacaatcgcctcctggtggtggtacgaggtagcgcaccgtccggctcgggtccggacagccagtaacctcgcagagagtgacggtgtctccttgcatcccagcctcgtctatgcagcaagagaccagggacttcaccaaagtcaccctcgcgggctgggccttccacgcatcccccccaccccccatggaacagaaagccatgtttttaagcagaaccagcgaaacccaagcccctccttcctctggtgttttacaactataaaggaggtgaagggggaagaaa

SEQ ID NO: 164898 - DNA, 2173 bp, Homo sapiens
  Payload ID: 12480
  Gene Symbol: PHOSPHO1
  Gene Name: phosphatase, orphan 1
  Uniprot ID: Q8TCT1
  ENST ID: ENST00000413580
  CDS Start-End: 419-1297
gcggctccggctccggctccggctcccgggcatttaaaggggacgcggcggctgcccgggggggatgaggggcaagtggaggggacggctcagacgcacatcatcctcagtccctcgggactggagggactcgtgagccggagcccagaaatccgggggtggataagacaccgcgtcccctccaattcccgtaagcaccccttgctccatcctgcgccccaatacctcagctagcccccttccccacttcttacactccaaactcagccgggacagacctctgctgccgccgcccccacgaacgtgtgacgacggctggaggccaacagagtccctacaggtggtgctcacggtaatgcaccgacaatgagtggctgttttccagtttctggcctccgctgcctatctagggtgttggatgtgccagcgcctctggccgtggcccgctaaccagcctctcccgggcgggctcctgccgcgccccctctcgcttgccccctcctcctcctcctcctgctgctctcccccctgctcccaggacggcaggatggccgcgcagggcgcgccgcgcttcctcctgaccttcgacttcgacgagactatcgtggacgaaaacagcgacgattcgatcgtgcgcgccgcgccgggccagcggctcccggagagcctgcgagccacctaccgcgagggcttctacaacgagtacatgcagcgcgtcttcaagtacctgggcgagcagggcgtgcggccgcgggacctgagcgccatctacgaagccatccctttgtcgccaggcatgagcgacctgctgcagtttgtggcaaaacagggcgcctgcttcgaggtgattctcatctccgatgccaacacctttggcgtggagagctcgctgcgcgccgccggccaccacagcctgttccgccgcatcctcagcaacccgtcggggccggatgcgcggggactgctggctctgcggccgttccacacacacagctgcgcgcgctgccccgccaacatgtgcaagcacaaggtgctcagcgactacctgcgcgagcgggcccacgacggcgtgcacttcgagcgcctcttctacgtgggcgacggcgccaacgacttctgccccatggggctgctggcgggcggcgacgtggccttcccgcgccgcggctaccccatgcaccgcctcattcaggaggcccagaaggccgagcccagctcgttccgcgccagcgtggtgccctgggaaacggctgcagatgtgcgcctccacctgcaacaggtgctgaagtcgtgctgagtctggccgcctgcaggggggtacccgggccaacggcggagggggcggggaagggagattcggcaaagacagctttactactcccttttccctttggctttgttatgtccctctgggaatttctggaatctcgtatttgggggcttggggaagggggctcagagccgtccctatctattcagttaacccacctcggctgcctcccccactccactgtgcacggttgagttctggagtctgacccatcgcggggtggcgcgcaaaccttggaaggcagcagtatttcctggtcctcccaactgggaggaaggggcccccccggcaggtgagagaaggaacatctcccgccgctgtaacttgttgcctcgggctgcgtgaccgcccctcctccagtctactgtggagggaacccaggatcctgaaattctcctggccgcaagaactccccacagaggcagaagagggtctccacctatggccccaggcctttgcgatcttgcttcacccaccgcgaccccacactatttctgtgctgtccacactctcttgcctcccgacccccgcactcccttctagcacccccaaaggaaaagccagaggaacaatcgcctcctggtggtggtacgaggtagcgcaccgtccggctcgggtccggacagccagtaacctcgcagagagtgacggtgtctccttgcatcccagcctcgtctatgcagcaagagaccagggacttcaccaaagtcaccctcgcgggctgggccttccacgcatcccccccaccccccatggaacagaaagccatgtttttaagcagaaccagcgaaacccaagcccctccttcctctggtgttttacaactataaaggaggtgaaggg

SEQ ID NO: 164899 - DNA, 837 bp, Homo sapiens
  Payload ID: 12480
  Gene Symbol: PHOSPHO1
  Gene Name: phosphatase, orphan 1
  ENST ID: ENST00000503902
  CDS Start-End: 339-837
ggcatttaaaggggacgcggcggctgcccgggggggatgaggggcaagtggaggggacggctcagacgcacatcatcctcagtccctcgggactggagggactcgtgagccggagcccagaaatccgggggtggataagacaccgcgtcccctccaattcccgtaagcaccccttgctccatcctgcgccccaatacctcagctagcccccttccccacttcttacactccaaactcagccgggacagacctctgctgccgccgcccccacgaacgtgtgacgacggctggaggccaacagagtccctacaggtggtgctcacggtaatgcaccgacaatgagtggctgttttccagtttctggcctccgctgcctatctagggtgtgtcatggcctggtgcgggaggctcttacctccccaagccccactgcttctcctgctgcccgcttgcttcggactctggcagaaaccccacctgctgacacgttcctcctggggaattggtgttggatgtgccagcgcctctggccgtggcccgctaaccagcctctcccgggcgggctcctgccgcgccccctctcgcttgccccctcctcctcctcctcctgctgctctcccccctgctcccaggacggcaggatggccgcgcagggcgcgccgcgcttcctcctgaccttcgacttcgacgagactatcgtggacgaaaacagcgacgattcgatcgtgcgcgccgcgccgggccagcggctcccggagagcctgcgagccacctaccgcgagggcttctacaacgagtacatgcagcgcgtcttcaagtacctgggcgagcagggcg

SEQ ID NO: 164900 - DNA, 868 bp, Homo sapiens
  Payload ID: 12480
  Gene Symbol: PHOSPHO1
  Gene Name: phosphatase, orphan 1
  ENST ID: ENST00000511066
  CDS Start-End: 258-868
gcggctccggctccggctccggctcccgggcatttaaaggggacgcggcggctgcccgggggggatgaggggcaagtggaggggacggctcagacgcacatcatcctcagtccctcgggactggagggactcgtgagccggagcccagaaatccgggggtggataagacaccgcgtcccctccaattcccgaacgtgtgacgacggctggaggccaacagagtccctacaggtggtgctcacggtaatgcaccgacaatgagtggctgttttccagtttctggcctccgctgcctatctagggacggcaggatggccgcgcagggcgcgccgcgcttcctcctgaccttcgacttcgacgagactatcgtggacgaaaacagcgacgattcgatcgtgcgcgccgcgccgggccagcggctcccggagagcctgcgagccacctaccgcgagggcttctacaacgagtacatgcagcgcgtcttcaagtacctgggcgagcagggcgtgcggccgcgggacctgagcgccatctacgaagccatccctttgtcgccaggcatgagcgacctgctgcagtttgtggcaaaacagggcgcctgcttcgaggtgattctcatctccgatgccaacacctttggcgtggagagctcgctgcgcgccgccggccaccacagcctgttccgccgcatcctcagcaacccgtcggggccggatgcgcggggactgctggctctgcggccgttccacacacacagctgcgcgcgctgccccgccaacatgtgcaagcacaaggtgctcagcgactacctgcgcgagcgggcccacgacggcgtgcacttcgagcgcctcttctacgtgggcgacgg

SEQ ID NO: 164901 - DNA, 733 bp, Homo sapiens
  Payload ID: 12480
  Gene Symbol: PHOSPHO1
  Gene Name: phosphatase, orphan 1
  ENST ID: ENST00000512250
  CDS Start-End: 400-733
cggctcccgggcatttaaaggggacgcggcggctgcccgggggggatgaggggcaagtggaggggacggctcagacgcacatcatcctcagtccctcgggactggagggactcgtgagccggagcccagaaatccgggggtggataagacaccgcgtcccctccaattcccgtaagcaccccttgctccatcctgcgccccaatacctcagctagcccccttccccacttcttacactccaaactcagccgggacagacctctgctgccgccgcccccacgaacgtgtgacgacggctggaggccaacagagtccctacaggtggtgctcacggtaatgcaccgacaatgagtggctgttttccagtttctggcctccgctgcctatctagggtgttggatgtgccagcgcctctggccgtggcccgctaaccagcctctcccgggcgggctcctgccgcgccccctctcgcttgccccctcctcctcctcctcctgctgctctcccccctgctcccaggacggcaggatggccgcgcagggcgcgccgcgcttcctcctgaccttcgacttcgacgagactatcgtggacgaaaacagcgacgattcgatcgtgcgcgccgcgccgggccagcggctcccggagagcctgcgagccacctaccgcgagggcttctacaacgagtacatgcagcgcgtcttcaagtacctgggcgagcagggcgtgcggccgc

SEQ ID NO: 164902 - DNA, 1587 bp, Homo sapiens
  Payload ID: 12480
  Gene Symbol: PHOSPHO1
  Gene Name: phosphatase, orphan 1
  Uniprot ID: Q8TCT1
  ENST ID: ENST00000514112
  CDS Start-End: 123-1001
caggaacgtgtgacgacggctggaggccaacagagtccctacaggtggtgctcacggtaatgcaccgacaatgagtggctgttttccagtttctggcctccgctgcctatctagggtgttggatgtgccagcgcctctggccgtggcccgctaaccagcctctcccgggcgggctcctgccgcgccccctctcgcttgccccctcctcctcctcctcctgctgctctcccccctgctcccaggacggcaggatggccgcgcagggcgcgccgcgcttcctcctgaccttcgacttcgacgagactatcgtggacgaaaacagcgacgattcgatcgtgcgcgccgcgccgggccagcggctcccggagagcctgcgagccacctaccgcgagggcttctacaacgagtacatgcagcgcgtcttcaagtacctgggcgagcagggcgtgcggccgcgggacctgagcgccatctacgaagccatccctttgtcgccaggcatgagcgacctgctgcagtttgtggcaaaacagggcgcctgcttcgaggtgattctcatctccgatgccaacacctttggcgtggagagctcgctgcgcgccgccggccaccacagcctgttccgccgcatcctcagcaacccgtcggggccggatgcgcggggactgctggctctgcggccgttccacacacacagctgcgcgcgctgccccgccaacatgtgcaagcacaaggtgctcagcgactacctgcgcgagcgggcccacgacggcgtgcacttcgagcgcctcttctacgtgggcgacggcgccaacgacttctgccccatggggctgctggcgggcggcgacgtggccttcccgcgccgcggctaccccatgcaccgcctcattcaggaggcccagaaggccgagcccagctcgttccgcgccagcgtggtgccctgggaaacggctgcagatgtgcgcctccacctgcaacaggtgctgaagtcgtgctgagtctggccgcctgcaggggggtacccgggccaacggcggagggggcggggaagggagattcggcaaagacagctttactactcccttttccctttggctttgttatgtccctctgggaatttctggaatctcgtatttgggggcttggggaagggggctcagagccgtccctatctattcagttaacccacctcggctgcctcccccactccactgtgcacggttgagttctggagtctgacccatcgcggggtggcgcgcaaaccttggaaggcagcagtatttcctggtcctcccaactgggaggaaggggcccccccggcaggtgagagaaggaacatctcccgccgctgtaacttgttgcctcgggctgcgtgaccgcccctcctccagtctactgtggagggaacccaggatcctgaaattctcctggccgcaagaactccccacagaggcagaagagggtctccacctatggccccaggcctttgcgatcttgcttcacccaccgcgaccccacactatttctgtgctgtccacactctcttgcctcccgacccccgcactcccttctagcacccccaaa

SEQ ID NO: 164903 - DNA, 391 bp, Homo sapiens
  Payload ID: 12480
  Gene Symbol: PHOSPHO1
  Gene Name: phosphatase, orphan 1
  ENST ID: ENST00000574638
  CDS Start-End: 133-391
gggaagaaacccaagatgcctgactttctgccttggagactgaaagaaacaagggcaactcaccaaacagtgtgacgacggctggaggccaacagagtccctacaggtggtgctcacggtaatgcaccgacaatgagtggctgttttccagtttctggcctccgctgcctatctagggacggcaggatggccgcgcagggcgcgccgcgcttcctcctgaccttcgacttcgacgagactatcgtggacgaaaacagcgacgattcgatcgtgcgcgccgcgccgggccagcggctcccggagagcctgcgagccacctaccgcgagggcttctacaacgagtacatgcagcgcgtcttcaagtacctgggcgagcagggcgtgcggccgc

SEQ ID NO: 164904 - DNA, 1125 bp, Homo sapiens
  Payload ID: 12481
  Gene Symbol: PHOSPHO2
  Gene Name: phosphatase, orphan 2
  Uniprot ID: Q8TCD6
  ENST ID: ENST00000359744
  CDS Start-End: 389-1114
tgctgcagttggcggtcgggctagagaagagaggcgcctgcgcttgcgagctgggcttgtgagtggggctgccgagagggcaggcgtggggcgaggccaaaggactgaacccgcaggagcgtcacgggcgccggggcggctgccgacggcgggactgggttttctatcagatgttccacgtaataatgctggagttaagaagtttccattattttgctccaaaccagaagactctgttccctgtatatagaataggagtaatatttgaaaacaactggctgatgtttaaaactgaagattgtcatgattgtttatcctaatcccaatgctgaagtaagattgtcttggaaatactaagttggggtaatccaaatctatttctggaaccatgaaaattttgctagtttttgactttgacaatacaatcatagatgacaatagtgacacttggattgtacaatgtgctcccaacaaaaagcttcctattgaactacgtgattcttatcgaaaaggattttggacagaatttatgggcagagtctttaagtatttgggagataagggtgtaagagaacatgaaatgaaaagagcagtgacatcattgcctttcactccagggatggtggaactcttcaactttataagaaagaataaggataaatttgactgcattattatttcagattcaaattcggtcttcatagattgggttttagaagctgccagttttcatgacatatttgataaagtgtttacaaatccagcagcttttaatagcaatggtcatctcactgttgaaaattatcatactcattcttgcaatagatgcccaaagaatctttgcaaaaaggtagttttgatagaatttgtagataaacagttacaacagggagtgaattatacacaaattgtttatattggtgatggtggaaatgatgtctgtccagtcacctttttaaagaatgatgatgttgccatgccacggaaaggatataccttacagaaaactctttccagaatgtctcaaaatcttgagcctatggaatattctgttgtagtttggtcctcaggtgttgatataatttctcatttacaatttctaataaaggattaatatgtcagcaa

SEQ ID NO: 164905 - DNA, 468 bp, Homo sapiens
  Payload ID: 12481
  Gene Symbol: PHOSPHO2
  Gene Name: phosphatase, orphan 2
  ENST ID: ENST00000438838
  CDS Start-End: 302-468
agttggcggtcgggctagagaagagaggcgcctgcgcttgcgagctgggcttgtgagtggggctgccgagagggcaggcgtggggcgaggccaaaggactgaacccgcaggagcgtcacgggcgccggggcggctgccgacggcgggactgggttttctatcagatgttccacgtaataatgctgggaaccagtcagaagcatctggattaggcatttagtgatacaaggatccagaataacaaaaactatgtaccagccacattcacacaacagggtaatccaaatctatttctggaaccatgaaaattttgctagtttttgactttgacaatacaatcatagatgacaatagtgacacttggattgtacaatgtgctcccaacaaaaagcttcctattgaactacgtgattcttatcgaaaaggattttggacagaatttatgggcagagtctttaagtatttggg

SEQ ID NO: 164906 - DNA, 908 bp, Homo sapiens
  Payload ID: 12481
  Gene Symbol: PHOSPHO2
  Gene Name: phosphatase, orphan 2
  ENST ID: ENST00000438710
  CDS Start-End: 502-908
agttggcggtcgggctagagaagagaggcgcctgcgcttgcgagctgggcttgtgagtggggctgccgagagggcaggcgtggggcgaggccaaaggactgaacccgcaggagcgtcacgggcgccggggcggctgccgacggcgggactgggtcagtgagaagcccgtgggcccccgccctgcctgctactcccatccccacctgcgcgctccccatgggggacgacccccgattgggtccgatgcctaccctcggggtggagccggcaggttttctatcagatgttccacgtaataatgctggagttaagaagtttccattattttgctccaaaccagaagactctgttccctgtatatagaataggagtaatatttgaaaacaactggctgatgtttaaaactgaagattgtcatgattgtttatcctaatcccaatgctgaagtaagattgtcttggaaatactaagttggggtaatccaaatctatttctggaaccatgaaaattttgctagtttttgactttgacaatacaatcatagatgacaatagtgacacttggattgtacaatgtgctcccaacaaaaagcttcctattgaactacgtgattcttatcgaaaaggattttggacagaatttatgggcagagtctttaagtatttgggagataagggtgtaagagaacatgaaatgaaaagagcagtgacatcattgcctttcactccagggatggtggaactcttcaactttataagaaagaataaggataaatttgactgcattattatttcagattcaaattcggtcttcatagattgggttttagaagctgccagttttcatgacatatttgataaagtgtttacaaatccagcagcttttaatagcaatggtcatctcactgt

SEQ ID NO: 164907 - DNA, 631 bp, Homo sapiens
  Payload ID: 12481
  Gene Symbol: PHOSPHO2
  Gene Name: phosphatase, orphan 2
  ENST ID: ENST00000449906
  CDS Start-End: 485-631
agagaagagaggcgcctgcgcttgcgagctgggcttgtgagtggggctgccgagagggcaggcgtggggcgaggccaaaggactgaacccgcaggagcgtcacgggcgccggggcggctgccgacggcgggactgggttttctatcagatgttccacgtaataatgctggagttaagaagtttccattattttgctccaaaccagaagactctgttccctgtatatagaataggagtaatatttgaaaacaactggctgatgtttaaaactgaagattgtcatgattgtttatcctaatcccaatgctgaagtaagattgtcttggaaatactaagttgggaaagtgaattctgcatttaaatttcagggaaccagtcagaagcatctggattaggcatttagtgatacaaggatccagaataacaaaaactatgtaccagccacattcacacaacagggtaatccaaatctatttctggaaccatgaaaattttgctagtttttgactttgacaatacaatcatagatgacaatagtgacacttggattgtacaatgtgctcccaacaaaaagcttcctattgaactacgtgattcttatcgaaaaggattttggacagaatttatgggc

SEQ ID NO: 164908 - DNA, 1253 bp, Homo sapiens
  Payload ID: 12481
  Gene Symbol: PHOSPHO2
  Gene Name: phosphatase, orphan 2
  Uniprot ID: Q8TCD6
  ENST ID: ENST00000616524
  CDS Start-End: 519-1244
aacaagggaggtgctgcagttggcggtcgggctagagaagagaggcgcctgcgcttgcgagctgggcttgtgagtggggctgccgagagggcaggcgtggggcgaggccaaaggactgaacccgcaggagcgtcacgggcgccggggcggctgccgacggcgggactgggtcagtgagaagcccgtgggcccccgccctgcctgctactcccatccccacctgcgcgctccccatgggggacgacccccgattgggtccgatgcctaccctcggggtggagccggcaggttttctatcagatgttccacgtaataatgctggagttaagaagtttccattattttgctccaaaccagaagactctgttccctgtatatagaataggagtaatatttgaaaacaactggctgatgtttaaaactgaagattgtcatgattgtttatcctaatcccaatgctgaagtaagattgtcttggaaatactaagttggggtaatccaaatctatttctggaaccatgaaaattttgctagtttttgactttgacaatacaatcatagatgacaatagtgacacttggattgtacaatgtgctcccaacaaaaagcttcctattgaactacgtgattcttatcgaaaaggattttggacagaatttatgggcagagtctttaagtatttgggagataagggtgtaagagaacatgaaatgaaaagagcagtgacatcattgcctttcactccagggatggtggaactcttcaactttataagaaagaataaggataaatttgactgcattattatttcagattcaaattcggtcttcatagattgggttttagaagctgccagttttcatgacatatttgataaagtgtttacaaatccagcagcttttaatagcaatggtcatctcactgttgaaaattatcatactcattcttgcaatagatgcccaaagaatctttgcaaaaaggtagttttgatagaatttgtagataaacagttacaacagggagtgaattatacacaaattgtttatattggtgatggtggaaatgatgtctgtccagtcacctttttaaagaatgatgatgttgccatgccacggaaaggatataccttacagaaaactctttccagaatgtctcaaaatcttgagcctatggaatattctgttgtagtttggtcctcaggtgttgatataatttctcatttacaatttctaataaaggattaatatgtcagc

SEQ ID NO: 164909 - DNA, 1252 bp, Homo sapiens
  Payload ID: 12481
  Gene Symbol: PHOSPHO2
  Gene Name: phosphatase, orphan 2
  Uniprot ID: Q8TCD6
  ENST ID: ENST00000616481
  CDS Start-End: 518-1243
aacaagggaggtgctgcagttggcggtcgggctagagaagagaggcgcctgcgcttgcgagctgggcttgtgagtggggctgccgagagggcaggcgtggggcgaggccaaaggactgaacccgcaggagcgtcacgggcgccggggcggctgccgacggcgggactgggttttctatcagatgttccacgtaataatgctggagttaagaagtttccattattttgctccaaaccagaagactctgttccctgtatatagaataggagtaatatttgaaaacaactggctgatgtttaaaactgaagattgtcatgattgtttatcctaatcccaatgctgaagtaagattgtcttggaaatactaagttgggaaagtgaattctgcatttaaatttcagggaaccagtcagaagcatctggattaggcatttagtgatacaaggatccagaataacaaaaactatgtaccagccacattcacacaacagggtaatccaaatctatttctggaaccatgaaaattttgctagtttttgactttgacaatacaatcatagatgacaatagtgacacttggattgtacaatgtgctcccaacaaaaagcttcctattgaactacgtgattcttatcgaaaaggattttggacagaatttatgggcagagtctttaagtatttgggagataagggtgtaagagaacatgaaatgaaaagagcagtgacatcattgcctttcactccagggatggtggaactcttcaactttataagaaagaataaggataaatttgactgcattattatttcagattcaaattcggtcttcatagattgggttttagaagctgccagttttcatgacatatttgataaagtgtttacaaatccagcagcttttaatagcaatggtcatctcactgttgaaaattatcatactcattcttgcaatagatgcccaaagaatctttgcaaaaaggtagttttgatagaatttgtagataaacagttacaacagggagtgaattatacacaaattgtttatattggtgatggtggaaatgatgtctgtccagtcacctttttaaagaatgatgatgttgccatgccacggaaaggatataccttacagaaaactctttccagaatgtctcaaaatcttgagcctatggaatattctgttgtagtttggtcctcaggtgttgatataatttctcatttacaatttctaataaaggattaatatgtcagc

SEQ ID NO: 164910 - DNA, 1053 bp, Homo sapiens
  Payload ID: 12481
  Gene Symbol: PHOSPHO2
  Gene Name: phosphatase, orphan 2
  Uniprot ID: Q8TCD6
  ENST ID: ENST00000617738
  CDS Start-End: 319-1044
aacaagggaggtgctgcagttggcggtcgggctagagaagagaggcgcctgcgcttgcgagctgggcttgtgagtggggctgccgagagggcaggcgtggggcgaggccaaaggactgaacccgcaggagcgtcacgggcgccggggcggctgccgacggcgggactgggttttctatcagatgttccacgtaataatgctgggaaccagtcagaagcatctggattaggcatttagtgatacaaggatccagaataacaaaaactatgtaccagccacattcacacaacagggtaatccaaatctatttctggaaccatgaaaattttgctagtttttgactttgacaatacaatcatagatgacaatagtgacacttggattgtacaatgtgctcccaacaaaaagcttcctattgaactacgtgattcttatcgaaaaggattttggacagaatttatgggcagagtctttaagtatttgggagataagggtgtaagagaacatgaaatgaaaagagcagtgacatcattgcctttcactccagggatggtggaactcttcaactttataagaaagaataaggataaatttgactgcattattatttcagattcaaattcggtcttcatagattgggttttagaagctgccagttttcatgacatatttgataaagtgtttacaaatccagcagcttttaatagcaatggtcatctcactgttgaaaattatcatactcattcttgcaatagatgcccaaagaatctttgcaaaaaggtagttttgatagaatttgtagataaacagttacaacagggagtgaattatacacaaattgtttatattggtgatggtggaaatgatgtctgtccagtcacctttttaaagaatgatgatgttgccatgccacggaaaggatataccttacagaaaactctttccagaatgtctcaaaatcttgagcctatggaatattctgttgtagtttggtcctcaggtgttgatataatttctcatttacaatttctaataaaggattaatatgtcagc

SEQ ID NO: 164911 - DNA, 5597 bp, Homo sapiens
  Payload ID: 12482
  Gene Symbol: PCYT1A
  Gene Name: phosphate cytidylyltransferase 1, choline, alpha
  Uniprot ID: P49585
  ENST ID: ENST00000292823
  CDS Start-End: 174-1277
cccgggcgtctccccgcaacctcctcaacttccctagtcagtgacgcggcgccggccagaaatccgaccggaccgggctcgggggagcgtgagttgcagcatgtgccgaagcgccacctcagaagataaaaagaaatgagtctcatatttggcattcttttagttaaaagaagatggatgcacagtgttcagccaaggtcaatgcaaggaagaggagaaaagaggcgcccggacccaacggggcaacagaagaagatggggttccttccaaagtgcagcgctgtgcagtgggcttacggcaaccagctcctttttctgatgaaattgaagttgactttagtaagccctatgtcagggtaactatggaagaagccagcagaggaactccttgtgagcgacctgtgagagtttatgccgatggaatatttgacttatttcactctggtcacgcccgagctctgatgcaagcgaagaaccttttccctaatacgtacctcattgtgggagtttgcagtgatgagctcacacacaacttcaaaggcttcacggtgatgaacgagaatgagcgctatgacgcagtccagcactgccgctacgtggatgaggtggtgaggaatgcgccctggacgctgacacccgagttcctggccgaacaccggattgattttgtagcccatgatgatattccttattcatctgctggcagtgatgatgtttataagcacatcaaggaggcaggcatgtttgctccaacacagaggacagaaggtatctccacatcagacatcatcacccgaattgtgcgggattatgatgtgtatgcgaggcggaacctgcagaggggctacacagcaaaggagctcaatgtcagctttatcaacgagaagaaataccacttgcaggagagggttgacaaagtaaagaagaaagtgaaagatgtggaggaaaagtcaaaagaatttgttcagaaggtggaggaaaaaagcattgacctcattcagaagtgggaggagaagtcccgagaattcattggaagttttctggaaatgtttggtccggaaggagcactgaaacatatgctgaaagaggggaagggccggatgctgcaggccatcagcccgaagcagagccccagcagcagccctactcgcgagcgctccccctccccctctttccgatggcccttctccggcaagacttccccaccttgctccccagcaaatctctccaggcacaaggctgcagcctatgatatcagtgaggatgaagaagactaatgtttcctccctcctttcctgtcctccctttctgtcccattaccttcagaagctctctgttgaattccaaattgtgaccccaacactaaacctaaggacagctacaaaggaaagacaactggggaaagaagacctaggactgggggaacccaaacagcctgtcctgcaagtgacatcactcacccacacgaaggagggggactgcaccttagaagcctgctctgcatccatttacccccccccaagggctttgtttcactgtttatgttcacgtgatctcaacagggaaattgtcattttcattaattttttaaaaaattcgtctttcaaatgtagaactaattttttgcccctgaggagtgggcagaagaaggaggtagtgtaatacgcagaggccttttcttcccggtatactatagcatttgccttccgttctgaagctatgtggcttgccaagtccttcacgaaatgagccacgctgatgggtaatttgtggagaaatatcttaattttgatttccttaaggaaaagcgaaaagcagagttacagtcacaaatcccctgaacgtactgctgtcaccagtgtcattgtggctgcgggaaggagatctgaacctaacttttcttactccctgaggagtttcttgttggacccaatggggtccatgaagacactgatggggatggaagcagacccatggcatcaactgcagtgtttctgctgtgttcatcttctcagaaaactctgtgacccagttctttgggagcttttgtcagtctctttcgtgccatctaccttcgaaggaaggaacacttttagagttacaatgatgaggagaggagcgggacaatactcaatcctataccaagtcgattgagattagtttcctactgggagtaagtgcctggccctgctactcctatttgaatgctattaatattacctagccttttacaaaggatactttgtaaatgtctgctgttggaacttgatgttaatccattttggtcatagccatattagagagatttgcacagaatgtaaaggcaaaagcataggaaacaccttcctttctaaagcaacagccttatcaccttgacctctgtccctcttcagaacattcttccctggaaccagtgctccacatctttcttttcctctgagagctgcagctggcagggacctccctctgctgctcctccagcaagccacagagcataccctcacgtgacaagagtgtggtaggttttctccccacttttcacacacgcctggtggttgtggttccatctgccttgttggcttgcccggggggattcaacacttgactttcaaatcaaagaatgctaatgcttagcacttgctgttgagcatgctctaacttttaaagccctggcctcctgtctccttagctgcttagctacgcggcctagcagatcatcacccatcagtaatcctgtggctagatccaggggaaaattgcttatgtccaggccccacccctgtcactcataaataccccttgtgggggtggaattttagtgttttcagctaagaaaaccacattttctctttccttgcctctgctaggactgtgagcatctcatagtccactccctaaacactttctggtaacacctagttttccgcctgagggtcagaggctagaatcattgcctgcacagcaggactaccttggttcttaaaacttggatcacccaggcaaggcgtggtggctcacgcctgtcatctcagcactttgggagactgaggctggtggatcacttgaggccacgagtttgagaccagcctgaccaacgtggtgaaaccccatctctactaaaaatacaaaaattagccaggcgtggtggtgggcacctgtaatcccagctacttgggaggctgaggcaggagaatcccttgaacccaggaggcggaggttgcagtgagcagagatggtgccgctgcagtccagcctgggtgacagagcgagactctgtctccaaaacaaaacaaaaaccacacacacatacagaaataaagagaaataatcaactagaaaaaaaacaaaacttggatcacccagaaagagcgtcacagaggcgagggagaatgaagcctcttgttatcctgatcgcctatgacaacgacatttctaactcttctttgaagcgcagttcttactcttaaatctggtcatacaagctttggcttggaatcctgtctgtctttgaaacagctgaagttagtgttttcctgtgttacccagtgttacatagtctcatctttgaacttttctgcgtcagccttctctctttgggaatgctgcctgtttctgtctaacttattctccctggtgtggtgtggcagtgaagtctgtgctgaagcccatctgcttggttcctccaagtgcacattatgcaagtgtatttggatagacagggagatgcccggaacgtggttttcctcctccctccctattggagccatacctcctaaatatattgtctgggtcccaaatgtttgagccctcttcctctgctctcagtgggctgctcttggcatgccctgtgcttggaacgggacctgcaggctgacaggcctctgagactgctagggccagcaaacgtacatgttattgggaaactccctttccccttttggtgagcttctaccacctcagtctaatcgttttgactgaaagctatttgtctgactgaaagctaaaatcttttatagtgtggcctgttagatactttggggtaaatgtggtctgaggtgctggactagcacgggtagatggagaaagctgttgggaagttgcataatgtggtcatctgtgcctaattaaatgaggttagaggtgtgcacaccaccacaatgcctgggatctaaatcttcagatattaacgtttgaggctatggagctgtttccctgaatcacacacgagaaagcagtcaacatgggtgggccaaatgtggccaagatgagagagccagaagtgttggccttagagcagagcctctgtgtgtgagacattagaaggccagagccggggaggtgccggcgcagccactgccttccggtgggccggacggaaagcttggtcttatgctagattcagaagcactgaagaatggaggttgacactttagaggactaggaagggatcatttgtgctcttgcagctattgctgatagctagagccaaagaccattatattgctgaggcttgggtaagaaagttagggatgtgaggaggttgaaaatcctgaagaagagaaaaaatatgagggaggctaaggaaacttagccactttctgatcactgatgactccttaggctgcacctgagtgatggtggtgtttttggaggctgtacctgagtgatggtggtttttggggggctgcacctgagcgatagtgatttttttttggaggctgcacagctggtcagaccatctctagatgttctttccacagtggttcatagggcgtcattcccccttcctggattattttgactatgggtagcttattttcaagagctctttgcctttttaatcctgttccagatcacttatccaaaatctttccaaatcaattatattttgctgcttttctttaattccctaaaagccatagcttctagattttctatcagcacacattctcaccagaagttgaaccaatacaggtagaaaaagaaagcccccttaatgtttttaactgatgatatttttttaagcttaccaatataagtatttttaaaggttctatttttcaaagtcataacaatgattgttcttgttttctctcatagaatagactgccatcggataaagagtggtccctagcttctatttttccaagtaaataagtagaacatgttcttgggattataccattaaatgttaattttcttgaagaagaaagattgttgtctgccaagattttatgttagcgctcggattgaggcagaaaacggaagcaccaggtttaacactgggatgacttgggttgtgttcctggaggtttgaagtgggccttcccgccttttgagggggaaaactgactgttttgaacacatatcctggattagttgggttgttttgtattgaggatccctaaaagacaaaagagtcttggaaaggactgctggcttcgtcttgaacgttcgccccatcaccagtgtgagtccgtggggaagtcttcctcaagtggggttcagtctgtaattttcctgtctgttcttagtttgttctgagttattttggattttgttctttagccaaataaaggcagtgtggttttacctga

SEQ ID NO: 164912 - DNA, 411 bp, Homo sapiens
  Payload ID: 12482
  Gene Symbol: PCYT1A
  Gene Name: phosphate cytidylyltransferase 1, choline, alpha
  ENST ID: ENST00000433733
  CDS Start-End: 1-411
aacgagaatgagcgctatgacgcagtccagcactgccgctacgtggatgaggtggtgaggaatgcgccctggacgctgacacccgagttcctggccgaacaccggattgattttgtagcccatgatgatattccttattcatctgctggcagtgatgatgtttataagcacatcaaggaggcaggcatgtttgctccaacacagaggacagaaggtatctccacatcagacatcatcacccgaattgtgcgggattatgatgtgtatgcgaggcggaacctgcagaggggctacacagcaaaggagctcaatgtcagctttatcaacgctatgagccctcctcgtgtggatagtgacacccgacacaccacttcccacacagacctgagttttaaatttggattgacgaaa

SEQ ID NO: 164913 - DNA, 1325 bp, Homo sapiens
  Payload ID: 12482
  Gene Symbol: PCYT1A
  Gene Name: phosphate cytidylyltransferase 1, choline, alpha
  ENST ID: ENST00000419333
  CDS Start-End: 11-1153
ttaaaagaagatggatgcacagtgttcagccaaggtcaatgcaaggaagaggagaaaagaggcgcccggacccaacggggcaacagaagaagatggggttccttccaaagtgcagcgctgtgcagtgggcttacggcaaccagctcctttttctgatgaaattgaagttgactttagtaagccctatgtcagggtaactatggaagaagccagcagaggaactccttgtgagcgacctgtgagagtttatgccgatggaatatttgacttatttcactctggtcacgcccgagctctgatgcaagcgaagaaccttttccctaatacgtacctcattgtgggagtttgcagtgatgagctcacacacaacttcaaaggcttcacggtgatgaacgagaatgagcgctatgacgcagtccagcactgccgctacgtggatgaggtggtgaggaatgcgccctggacgctgacacccgagttcctggccgaacaccggattgattttgtagcccatgatgatattccttattcatctgctggcagtgatgatgtttataagcacatcaaggaggcaggcatgtttgctccaacacagaggacagaaggtatctccacatcagacatcatcacccgaattgtgcgggattatgatgtgtatgcgaggcggaacctgcagaggggctacacagcaaaggagctcaatgtcagctttatcaacgagaagaaataccacttgcaggagagggttgacaaagtaaagaagaaagtgaaagatgtggaggaaaagtcaaaagaatttgttcagaaggtggaggaaaaaagcattgacctcattcagaagtgggaggagaagtcccgagaattcattggaagttttctggaaatgtttggtccggaaggagcactgaaacatatgctgaaagaggggaagggccggatgctgcaggccatcagcccgaagcagagccccagcagcagccctactcgcgagcgctccccctccccctctttccgatggcccttctccggcaagacttccccaccttgctccccagcaaatctctccaggcacaaggctgcagcctatgatatcaggtatagttacctggaacagagcaaatttggctcccatgttctgctcacccaggtgtagcctggcttgacgggaaatgatgcccagggtccagagagccagcagtgtggacacgccaaggaaagtgttgatccatagagctgtgctcccctcagaaatctggtggcaacagaaagtagtcagtgaggcaggcaagctctctctctctctctctctctttcaagagatggtg

SEQ ID NO: 164914 - DNA, 555 bp, Homo sapiens
  Payload ID: 12482
  Gene Symbol: PCYT1A
  Gene Name: phosphate cytidylyltransferase 1, choline, alpha
  ENST ID: ENST00000438634
  CDS Start-End: 74-346
gtcagtgacgcggcgccggccagaaatccgaccggaccgggctcgggggagcgtgagttgcagttaaaagaagatggatgcacagtgttcagccaaggtcaatgcaaggaagaggagaaaagaggcgcccggacccaacggggcaacagaagaagatggggttccttccaaagtgcagcgctgtgcagtgtctctccagcctctggaagccactaatctgctttctgattctgtggatttgcctgttctggacattcatacaaatgacatcatacgggcttacggcaaccagctcctttttctgatgaaattgaagttgactttagtaagccctatgtcagggtaactatggaagaagccagcagaggaactccttgtgagcgacctgtgagagtttatgccgatggaatatttgacttatttcactctggtcacgcccgagctctgatgcaagcgaagaaccttttccctaatacgtacctcattgtgggagtttgcagtgatgagctcacacacaacttcaaaggcttcacggtgatgaacgagaatgagcgc

SEQ ID NO: 164915 - DNA, 724 bp, Homo sapiens
  Payload ID: 12482
  Gene Symbol: PCYT1A
  Gene Name: phosphate cytidylyltransferase 1, choline, alpha
  ENST ID: ENST00000441879
  CDS Start-End: 87-724
ctcaacttccctagtcagtgacgcggcgccggccagaaatccgaccggaccgggctcgggggagcgtgagttgcagttaaaagaagatggatgcacagtgttcagccaaggtcaatgcaaggaagaggagaaaagaggcgcccggacccaacggggcaacagaagaagatggggttccttccaaagtgcagcgctgtgcagtgggcttacggcaaccagctcctttttctgatgaaattgaagttgactttagtaagccctatgtcagggtaactatggaagaagccagcagaggaactccttgtgagcgacctgtgagagtttatgccgatggaatatttgacttatttcactctggtcacgcccgagctctgatgcaagcgaagaaccttttccctaatacgtacctcattgtgggagtttgcagtgatgagctcacacacaacttcaaaggcttcacggtgatgaacgagaatgagcgctatgacgcagtccagcactgccgctacgtggatgaggtggtgaggaatgcgccctggacgctgacacccgagttcctggccgaacaccggggaatgaactccattgcctttgtgtgcaggaagccggaagcacgaccactctttaccctcggcctcattacaagaccaagacctctgcctcggcgcggcagctctcacctggaatcccagcactttgggaggccgaagcggacggatcacct

SEQ ID NO: 164916 - DNA, 549 bp, Homo sapiens
  Payload ID: 12482
  Gene Symbol: PCYT1A
  Gene Name: phosphate cytidylyltransferase 1, choline, alpha
  ENST ID: ENST00000443555
  CDS Start-End: 205-549
acatccgtatcccacttcaaggagacgtcttcgctgcatcctccggttccgggtggaggctgaccctgggccattccgtctccggtctctggtatttctgctgggtcacttcatcccgggggcctctgaggaggcggaactactgtgtcaggagtcgtggttttcaaggagaagtcgtggtcggattgacagagttaaaagaagatggatgcacagtgttcagccaaggtcaatgcaaggaagaggagaaaagaggcgcccggacccaacggggcaacagaagaagatggggttccttccaaagtgcagcgctgtgcagtgggcttacggcaaccagctcctttttctgatgaaattgaagttgactttagtaagccctatgtcagggtaactatggaagaagccagcagaggaactccttgtgagcgacctgtgagagtttatgccgatggaatatttgacttatttcactctggtcacgcccgagctctgatgcaagcgaagaaccttttccctaatacgtacctcattgtgggagtttgcagtgat

SEQ ID NO: 164917 - DNA, 1482 bp, Homo sapiens
  Payload ID: 12482
  Gene Symbol: PCYT1A
  Gene Name: phosphate cytidylyltransferase 1, choline, alpha
  Uniprot ID: P49585
  ENST ID: ENST00000431016
  CDS Start-End: 242-1345
atcccgggggcctctgaggaggcggaactactgtgtcaggagtcgtggttttcaaggagaagtcgtggtcggattgacagaggtaggggaagtaggcggaacttccggctggctcttccatcagctgccttccccgggcgtctccccgcaacctcctcaacttccctagtcagtgacgcggcgccggccagaaatccgaccggaccgggctcgggggagcgtgagttgcagttaaaagaagatggatgcacagtgttcagccaaggtcaatgcaaggaagaggagaaaagaggcgcccggacccaacggggcaacagaagaagatggggttccttccaaagtgcagcgctgtgcagtgggcttacggcaaccagctcctttttctgatgaaattgaagttgactttagtaagccctatgtcagggtaactatggaagaagccagcagaggaactccttgtgagcgacctgtgagagtttatgccgatggaatatttgacttatttcactctggtcacgcccgagctctgatgcaagcgaagaaccttttccctaatacgtacctcattgtgggagtttgcagtgatgagctcacacacaacttcaaaggcttcacggtgatgaacgagaatgagcgctatgacgcagtccagcactgccgctacgtggatgaggtggtgaggaatgcgccctggacgctgacacccgagttcctggccgaacaccggattgattttgtagcccatgatgatattccttattcatctgctggcagtgatgatgtttataagcacatcaaggaggcaggcatgtttgctccaacacagaggacagaaggtatctccacatcagacatcatcacccgaattgtgcgggattatgatgtgtatgcgaggcggaacctgcagaggggctacacagcaaaggagctcaatgtcagctttatcaacgagaagaaataccacttgcaggagagggttgacaaagtaaagaagaaagtgaaagatgtggaggaaaagtcaaaagaatttgttcagaaggtggaggaaaaaagcattgacctcattcagaagtgggaggagaagtcccgagaattcattggaagttttctggaaatgtttggtccggaaggagcactgaaacatatgctgaaagaggggaagggccggatgctgcaggccatcagcccgaagcagagccccagcagcagccctactcgcgagcgctccccctccccctctttccgatggcccttctccggcaagacttccccaccttgctccccagcaaatctctccaggcacaaggctgcagcctatgatatcagtgaggatgaagaagactaatgtttcctccctcctttcctgtcctccctttctgtcccattaccttcagaagctctctgttgaattccaaattgtgaccccaacactaaacctaaggacagctacaaaggaaagacaactggggaaagaagacctag

SEQ ID NO: 164918 - DNA, 724 bp, Homo sapiens
  Payload ID: 12482
  Gene Symbol: PCYT1A
  Gene Name: phosphate cytidylyltransferase 1, choline, alpha
  ENST ID: ENST00000444822
  CDS Start-End: 87-491
ctcaacttccctagtcagtgacgcggcgccggccagaaatccgaccggaccgggctcgggggagcgtgagttgcagttaaaagaagatggatgcacagtgttcagccaaggtcaatgcaaggaagaggagaaaagaggcgcccggacccaacggggcaacagaagaagatggggttccttccaaagtgcagcgctgtgcagtgggcttacggcaaccagctcctttttctgatgaaattgaagttgactttagtaagccctatgtcagggtaactatggaagaagccagcagaggaactccttgtgagcgacctgtgagagtttatgccgatggaatatttgacttatttcactctggtcacgcccgagctctgatgcaagcgaagaaccttttccctaatacgtacctcattgtgggagacttttttccagttggggaagatggttgcagtcctaagcagtgggagaagatgggagaggtcggtggctgaggaggtgctaagcaaagaggactccaacacacaatttatgatgtggtgaaccagtttgcagtgatgagctcacacacaacttcaaaggcttcacggtgatgaacgagaatgagcgctatgacgcagtccagcactgccgctacgtggatgaggtggtgaggaatgcgccctggacgctgacacccgagttcctggccgaacaccggattgattttgtagcccatgatgatatt

SEQ ID NO: 164919 - DNA, 1084 bp, Homo sapiens
  Payload ID: 12482
  Gene Symbol: PCYT1A
  Gene Name: phosphate cytidylyltransferase 1, choline, alpha
  ENST ID: ENST00000411591
  CDS Start-End: 206-1084
atcagctgccttccccgggcgtctccccgcaacctcctcaacttccctagtcagtgacgcggcgccggccagaaatccgaccggaccgggctcgggggagcgtgagttgcaggtgtgtgcctatctttgcgtctctgtttgagaggacaaactgtggggctgggaccgcgaggtgactgtgactgaggaagagtgttaaaagaagatggatgcacagtgttcagccaaggtcaatgcaaggaagaggagaaaagaggcgcccggacccaacggggcaacagaagaagatggggttccttccaaagtgcagcgctgtgcagtgggcttacggcaaccagctcctttttctgatgaaattgaagttgactttagtaagccctatgtcagggtaactatggaagaagccagcagaggaactccttgtgagcgacctgtgagagtttatgccgatggaatatttgacttatttcactctggtcacgcccgagctctgatgcaagcgaagaaccttttccctaatacgtacctcattgtgggagtttgcagtgatgagctcacacacaacttcaaaggcttcacggtgatgaacgagaatgagcgctatgacgcagtccagcactgccgctacgtggatgaggtggtgaggaatgcgccctggacgctgacacccgagttcctggccgaacaccggattgattttgtagcccatgatgatattccttattcatctgctggcagtgatgatgtttataagcacatcaaggaggcaggcatgtttgctccaacacagaggacagaaggtatctccacatcagacatcatcacccgaattgtgcgggattatgatgtgtatgcgaggcggaacctgcagaggggctacacagcaaaggagctcaatgtcagctttatcaacgagaagaaataccacttgcaggagagggttgacaaagtaaagaagaaagtgaaagatgtggaggaaaagtcaaaagaatttgttcagaaggtggaggaaaaaagcattgacctcattcagaagtgggaggagaagtcccgagaattcattggaagttttctggaaatgttt

SEQ ID NO: 164920 - DNA, 499 bp, Homo sapiens
  Payload ID: 12482
  Gene Symbol: PCYT1A
  Gene Name: phosphate cytidylyltransferase 1, choline, alpha
  ENST ID: ENST00000412869
  CDS Start-End: 99-499
gcggccgcgaggggactccgacccagagcagtgacttcgaggggctgacttggagaagaggatggcatccgtgatgggcgatggcgctttaaaagaagatggatgcacagtgttcagccaaggtcaatgcaaggaagaggagaaaagaggcgcccggacccaacggggcaacagaagaagatggggttccttccaaagtgcagcgctgtgcagtgggcttacggcaaccagctcctttttctgatgaaattgaagttgactttagtaagccctatgtcagggtaactatggaagaagccagcagaggaactccttgtgagcgacctgtgagagtttatgccgatggaatatttgacttatttcactctggtcacgcccgagctctgatgcaagcgaagaaccttttccctaatacgtacctcattgtgggagtttgcagtgatgagctcacacacaacttcaaaggcttcacggtgatgaacgagaatgagcgctatga

SEQ ID NO: 164921 - DNA, 798 bp, Homo sapiens
  Payload ID: 12482
  Gene Symbol: PCYT1A
  Gene Name: phosphate cytidylyltransferase 1, choline, alpha
  ENST ID: ENST00000430755
  CDS Start-End: 1-606
gccagcagaggaactccttgtgagcgacctgtgagagtttatgccgatggaatatttgacttatttcactctggtcacgcccgagctctgatgcaagcgaagaaccttttccctaatacgtacctcattgtgggagtttgcagtgatgagctcacacacaacttcaaaggcttcacggtgatgaacgagaatgagcgctatgacgcagtccagcactgccgctacgtggatgaggtggtgaggaatgcgccctggacgctgacacccgagttcctggccgaacaccggattgattttgtagcccatgatgatattccttattcatctgctggcagtgatgatgtttataagcacatcaaggaggcaggcatgtttgctccaacacagaggacagaaggtatctccacatcagacatcatcacccgaattgtgcgggattatgatgtgtatgcgaggcggaacctgcagaggggctacacagcaaaggagctcaatgtcagctttatcaacgtgagttccagccttaccccagagttccctgactctgtaggagacatatcacctcccactccatctcagctgaactggctttgcagttggctttgatgatcactcccaaaagttcagtgaatgaattaccactatgttaactgttcacaaaaagaatgaaacagacagtttctgccgttacggtctggtaccaacacattcgtataaagccatacagccaactaaataaatgagtaatttatatagtgcagtatttctgtcaataaatggaaaacggtgtctcttaaa

SEQ ID NO: 164922 - DNA, 1289 bp, Homo sapiens
  Payload ID: 12483
  Gene Symbol: PCYT1B
  Gene Name: phosphate cytidylyltransferase 1, choline, beta
  Uniprot ID: Q9Y5K3
  ENST ID: ENST00000356768
  CDS Start-End: 54-1046
gcctgggaggagactctctgagggtgtagagctagagggagcattcactggccatgccagtagttaccactgatgctgagtcagaaacaggtatcccaaaatccctttccaatgagcctccctcagaaaccatggaggaaatagagcacacatgcccacagcctcgactgaccctgactgcacctgccccatttgctgatgaaaccaactgccagtgtcaagcaccccatgaaaaactgaccattgctcaggcccgcttaggaacaccagctgacaggcctgtcagagtatacgccgatggaatatttgacctcttccactcaggtcatgcaagagcccttatgcaagcaaaaacactgtttcccaacagctacttgttggtaggagtttgcagtgatgatctcacccacaaattcaaaggtttcaccgtgatgaatgaagccgagagatacgaagctctcagacactgtcgctacgtagacgaagttatcagagatgctccctggacactcacgccagagtttctggaaaaacacaagattgactttgtggctcatgatgacattccgtattcctctgctggctctgatgatgtttacaagcacataaaggaagcagggatgttcgttccaacgcagagaacagaaggcatctcaacatcggacatcattaccagaattgttcgtgactatgatgtttatgcccgacgtaacctccagagagggtatacagccaaggaactgaatgtcagctttataaatgagaagaggtaccgtttccagaaccaagtggacaaaatgaaggaaaaagtcaagaatgtggaggaaagatcaaaggaatttgtgaacagagtggaagaaaagagccatgatctaattcaaaagtgggaagagaagtcaagggaattcattggcaacttcctagaactgtttggacctgatggagcatggaagcagatgttccaggagaggagcagccggatgctgcaggccttatccccgaagcagagccctctgaagagttgggcgaggtgcagagacttctagctggacaacctacacaaaccttagcgtctagagtcactctaaccttgctaaggaaggatgcagagttccctagagagacttgcactgatggggtgacttctgctttggtccttccaccacccccaccaagtaaaccacctgtggcagcggctgttccctcaacctgctacttctgcgtccataagggtcctgcacgttgcctcccaccaccccagctctgccagaataaaattgtttccaata

SEQ ID NO: 164923 - DNA, 1692 bp, Homo sapiens
  Payload ID: 12483
  Gene Symbol: PCYT1B
  Gene Name: phosphate cytidylyltransferase 1, choline, beta
  Uniprot ID: Q9Y5K3
  ENST ID: ENST00000379144
  CDS Start-End: 132-1241
agaaagaaggggagaagaagcggggggatgggtggagggtagaggggagaaaaatacgtgacaaagaaaacattctctgcctgggaggagactctctgagggtgtagagctagagggagcattcactggccatgccagtagttaccactgatgctgagtcagaaacaggtatcccaaaatccctttccaatgagcctccctcagaaaccatggaggaaatagagcacacatgcccacagcctcgactgaccctgactgcacctgccccatttgctgatgaaaccaactgccagtgtcaagcaccccatgaaaaactgaccattgctcaggcccgcttaggaacaccagctgacaggcctgtcagagtatacgccgatggaatatttgacctcttccactcaggtcatgcaagagcccttatgcaagcaaaaacactgtttcccaacagctacttgttggtaggagtttgcagtgatgatctcacccacaaattcaaaggtttcaccgtgatgaatgaagccgagagatacgaagctctcagacactgtcgctacgtagacgaagttatcagagatgctccctggacactcacgccagagtttctggaaaaacacaagattgactttgtggctcatgatgacattccgtattcctctgctggctctgatgatgtttacaagcacataaaggaagcagggatgttcgttccaacgcagagaacagaaggcatctcaacatcggacatcattaccagaattgttcgtgactatgatgtttatgcccgacgtaacctccagagagggtatacagccaaggaactgaatgtcagctttataaatgagaagaggtaccgtttccagaaccaagtggacaaaatgaaggaaaaagtcaagaatgtggaggaaagatcaaaggaatttgtgaacagagtggaagaaaagagccatgatctaattcaaaagtgggaagagaagtcaagggaattcattggcaacttcctagaactgtttggacctgatggagcatggaagcagatgttccaggagaggagcagccggatgctgcaggccttatccccgaagcagagccctgtgagcagcccaacccggagccggtccccttcccgctccccatcgcccaccttctcatggcttccactcaaaacctcacccccttcctcacccaaagcagcctcagcctctatcagcagcatgagcgagggggatgaggatgaaaagtagaggctgctgggaggcaagagccgcaccatgcaggatggggaggagggcgagagtcacagggttgcctgggtggtgtttgaagggtaatagtcacaggagctgcagctcagcagagagaccctgaactctgctaagggaaggtcttgggaccagttctctctcactctccgtacagctgaagagttgggcgaggtgcagagacttctagctggacaacctacacaaaccttagcgtctagagtcactctaaccttgctaaggaaggatgcagagttccctagagagacttgcactgatggggtgacttctgctttggtccttccaccacccccaccaagtaaaccacctgtggcagcggctgttccctcaacctgctacttctgcgtccataagggtcctgcacgttgcctcccaccaccccagctctgccagaataaaattgtttccaata

SEQ ID NO: 164924 - DNA, 5307 bp, Homo sapiens
  Payload ID: 12483
  Gene Symbol: PCYT1B
  Gene Name: phosphate cytidylyltransferase 1, choline, beta
  Uniprot ID: Q9Y5K3
  ENST ID: ENST00000379145
  CDS Start-End: 46-1101
aaagggtagaggcctctagagaagataaaaagatcaggagcaggcatggtaggccatcaggagtgcatcatggaagaggacaatcgcgctccccaattgtggcgcaagaccctgactgcacctgccccatttgctgatgaaaccaactgccagtgtcaagcaccccatgaaaaactgaccattgctcaggcccgcttaggaacaccagctgacaggcctgtcagagtatacgccgatggaatatttgacctcttccactcaggtcatgcaagagcccttatgcaagcaaaaacactgtttcccaacagctacttgttggtaggagtttgcagtgatgatctcacccacaaattcaaaggtttcaccgtgatgaatgaagccgagagatacgaagctctcagacactgtcgctacgtagacgaagttatcagagatgctccctggacactcacgccagagtttctggaaaaacacaagattgactttgtggctcatgatgacattccgtattcctctgctggctctgatgatgtttacaagcacataaaggaagcagggatgttcgttccaacgcagagaacagaaggcatctcaacatcggacatcattaccagaattgttcgtgactatgatgtttatgcccgacgtaacctccagagagggtatacagccaaggaactgaatgtcagctttataaatgagaagaggtaccgtttccagaaccaagtggacaaaatgaaggaaaaagtcaagaatgtggaggaaagatcaaaggaatttgtgaacagagtggaagaaaagagccatgatctaattcaaaagtgggaagagaagtcaagggaattcattggcaacttcctagaactgtttggacctgatggagcatggaagcagatgttccaggagaggagcagccggatgctgcaggccttatccccgaagcagagccctgtgagcagcccaacccggagccggtccccttcccgctccccatcgcccaccttctcatggcttccactcaaaacctcacccccttcctcacccaaagcagcctcagcctctatcagcagcatgagcgagggggatgaggatgaaaagtagaggctgctgggaggcaagagccgcaccatgcaggatggggaggagggcgagagtcacagggttgcctgggtggtgtttgaagggtaatagtcacaggagctgcagctcagcagagagaccctgaactctgctaagggaaggtcttgggaccagttctctctcactctccgtacagctgaagagttgggcgaggtgcagagacttctagctggacaacctacacaaaccttagcgtctagagtcactctaaccttgctaaggaaggatgcagagttccctagagagacttgcactgatggggtgacttctgctttggtccttccaccacccccaccaagtaaaccacctgtggcagcggctgttccctcaacctgctacttctgcgtccataagggtcctgcacgttgcctcccaccaccccagctctgccagaataaaattgtttccaatagaggtggcaaagtgcttctgaaatagtcgagaaaaagacagattccaacctcctcagtccagccactgagacctgatgttggaacgcatcagctccttccagttccatgaatgtggctcatagacaaagccttgctttaggctggttataaaaggtcatctagtgtgaaccttaactttttattcaaaggacagttttgtcaagaactccacgtaaggcctgatgtgctcctggttgtactttctcatcactggtttgacttcattgttttgcagaaattaccttaatccgtgggaactgcaacaaagaaaaacttcctaatatataaaaaagaggagctgctttgctttgcctccaggtttagcggacaagaaatgtctcctgaagcttctccttaaaggatgctattatggaatggcttttcccatttctgaccagttaacagtttcatagacctcaagtaacagtttgaggtatcaaacatagtataccaatagggggtgctacctgcacgtatctgttctatatatgctccaatatgtcatccccgggtgtatcccatgtgcaatatgagtatatagtggtggcattttataatagaccccactcctgcgctccaccataatactcctctgaaatccttggtctcaagaaacatctgttctcttgtgacttgggcactttgtcaagcttattccagattcctgtggaaacgttttatcccaaccaggaaattagtattttgttctcgtggcctcctataacatttttgggtgaaggagaactcaagactttttacagagaactgtgggctcagttatgatctcagcatctgaatggtctaggtagtatcaccattatctctggccctaggtttgccaagtaggatgaagactctaagtgttcctgctgagttgtccaaaggtcctgctccttagtcacctgtgcgaaatgagcagggagagttaaggcatagaaccaaactctttgggttattgtatgggtatgccagtaaattcagacacagagctggggtctgactgaatagaggcccaaaccagcaacttgtaggcagagcccagaatctcttgtgatagaaataccccttttcagaggccttgggaaccagccttctaggtgacaaggggacaaccagtgaaggaaggcggcatgtctttccccttcttgttggggttgaactacctccctatccacttggagatgagtgctgtctgctgtgaagcaaaactatgaggctgagctggcttggaacctctttgttcttggcactttccttctccaggactctgggaagcactcatatgggacagagggctggcaggaacatggcatgtgaagaagaaaacttctttttgcagtcaagggccacccagaatattgctcttcagagagggacaagggcctcattcttccatttggtctctgtcttccatcatgcactcaggtcaagccatgcaagtctgcctaccatttgagttagttggcacttgtagcagtgaaggatgaggccagccaggcaagggaaggtggcgggaacaagggaagagaaaaggaggaaagaagttcctggagggaggaaaggaggataaagaaaatctgctctcataaaaccatttcaggacctcactttacaggtgagactctcttgggaaggcctttgtgcccctgctccatggcccagggcagatagattcacttttacctgaatcttatactctggagcaaatagtgtatcaggctgactatacatttgcaggccttacacgccatactgacaggtgccacttacgtgactcatcagataatgtcaccattgctgccaattatgggaaataactaatgcctattccagggatgagcccaaaccacacataaatgggttctaaatctcaccctcctaacctgcagtgagtccccccgttccaccctcttgaggctgcaaatctactgagaaggaatgggaaggattctacaacccaacttttgatactttttggccatctctcagtctctcccagcccctacccccacaccacctccctgctcccaggcagagaccgggttgcactttgttagggccagcaggtcaactgtaatggccaagagtgagttaaggctggaatgagaaatatgccccaagcttggaggggtaagcaggaataacacaaagcaaggaaagagattctttttgccctagtgaggaaaggaagcttcagaatgagggctggaggatagcaacttaggactgcagaagggggcagcttatgaagatgggagaaagtgggactgaagttgtaggggagcaggagggtagtgattttccgcttttctttctttctttcttttactttctttctctttctttctctctctctctctttctttttctttcttctttctctttttctttcctctttttctttctttctttttctttctctttcttccttctttctttcattcttctttgttctttcttctttctttctttttttttttttttgagatggagttttgctcttgttgctcaggctggagtgcaatggcacaatctcggctcactgcagcctccacctcccaggttcaaggggttcttctgcctcagcctcccaagtagctgggattacaggtgcctgccacgacacccagctaatttttgtatgtttagtagagacggggtttcaccatgttggccaggctggtctcaaattcctgacctcaggtgattctcccgcctcggcctcccaaagtgctgggattatgagcacgagccacggcgtccagccgattttccgctccctttcaagtgttaactcaccccctgacaggtgaagagggaagggttccttttacgcacaaccaaggttagcaaatgcccatgcaggatatggggtccctgcctctctggttgcttcatttcagcacttctatattagctgcttatggggaccctaaaatgaactggtcacccctccaccagctaagaaacaagggtgggattgctgtgccataagtcacactgaacgacttgcttctggcaagcatgctcctgtgtgtcaggaccttaccaaggcaaagaaatgccaggctcaagaggagcaggacgtgagacattggcctggcttctaacctggtctgagtggaagagacacagcttagggatttcagttttgctcttaggctactagatactgttatttcaccccctgagggagggacaggaagagcacggatttattttctctccgtcttcagtacttattttagcatctagtcataccccagggagagatgcgagacggtgtcactggctcagctgaagcagatgagcccgtctctagcagagatgtgcctgtttcttaggcatccgttcagcactagtcttggccatcagatttttaaaaaagaaatagctcatgaggcatttgcaacttctcctctctagacttctttctagttttcctctgttgtgtcactgcgatgtgtccagggacaaagccataagtagagcatacatacttaagactatgctgtacatataagacaagacctgtctgggttaaagcacgaccttatgcccaagcatttactctggtgctgaataacgcgaactactggaatcagcctcccccaactctgcgcgccccctgcccccctgctcctatcccattcttgctctcaaatggaccacaccattctcaactcgtttataaataaagggatgcagaattgca

SEQ ID NO: 164925 - DNA, 856 bp, Homo sapiens
  Payload ID: 12483
  Gene Symbol: PCYT1B
  Gene Name: phosphate cytidylyltransferase 1, choline, beta
  ENST ID: ENST00000496020
  CDS Start-End: 12-545
cctcagaaaccatggaggaaatagagcacacatgcccacagcctcgactgaccctgactgcacctgccccatttgctgatgaaaccaactgccagtgtcaagcaccccatgaaaaactgaccattgctcaggcccgcttaggaacaccagctgacaggcctgtcagagtatacgccgatggaatatttgacctcttccactcaggtcatgcaagagcccttatgcaagcaaaaacactgtttcccaacagctacttgttggtaggagtttgcagtgatgatctcacccacaaattcaaaggtttcaccgtgatgaatgaagccgagagatacgaagctctcagacactgtcgctacgtagacgaagttatcagagatgctccctggacactcacgccagagtttctggaaaaacacaagggatgttcgttccaacgcagagaacagaaggcatctcaacatcggacatcattaccagaattgttcgtgactatgatgtttatgcccgacgtaacctccagagagggtatacagccaaggaactgaatgtcagctttataaatgagaagaggtaccgtttccagaaccaagtggacaaaatgaaggaaaaagtcaagaatgtggaggaaagatcaaaggaatttgtgaacagagtggaagaaaagagccatgatctaattcaaaagtgggaagagaagtcaagggaattcattggcaacttcctagaactgtttggacctgatggagcatggaagcagatgttccaggagaggagcagccggatgctgcaggccttatccccgaagcagagccctgtgagcagcccaacccggagccggtccccttcccgctcccca

SEQ ID NO: 164926 - DNA, 2147 bp, Homo sapiens
  Payload ID: 12484
  Gene Symbol: PCYT2
  Gene Name: phosphate cytidylyltransferase 2, ethanolamine
  Uniprot ID: Q99447
  ENST ID: ENST00000331285
  CDS Start-End: 705-1640
gttctgggtggcgtcctcgtccggcatgggccggggctggcaggctgcggggctcgcctgccgggagggtcgggctgcagaggctccgcgccctgccgtgggcgaccccgtctacctctggcggaggccccgcccggtcacgccgacctctccggtgcagccaccgcgctgagatctggagccacggcctccctgcttctccgtaaccaccagcaaccagcttgcccggctccggtccaggggttcccctggcctccgggcgagcgtccctgtagctatgacatggtgcattacggccactccaaccagctgcgccaggcacgggccatgggtgactacctcatcgtaggcgtgcacaccgatgctaaagagaaggggcacctgctccccaccactgccagcgaggctcccaagccttcaggggctgagcacctgctcgtcagaaggaatctctgcctttgcctgagaccctcgcagggaagagagccacccagttggccagcactagtgggctaagggccagggtagagagacagcctgcccccaccggccctcttgtgtggctacagctgggtgctgggaaggggcctcctactggaggggccgggtgggctggggtccccagtctccccgttgtccttttcctagaggagatcgccaagcacaaggggcccccggtgttcactcaggaggagagatacaagatggtgcaggccatcaaatgggtggacgaggtggtgccagcggctccctacgtcactacactagagaccctggacaaatacaactgtgacttctgtgttcacggcaatgacatcaccctgactgtagatggccgggacacctatgaggaagtaaagcaggctgggaggtacagagaatgcaagcgcacgcaaggggtgtccaccacagacctcgtgggccgcatgctgctggtaaccaaagcccatcacagcagccaggagatgtcctctgagtaccgggagtatgcagacagttttggcaagtgccctggtgggcggaacccctggaccggggtatcccagttcctgcagacatctcagaagatcatccagtttgcttctgggaaggagccccagccaggggagacagtcatctatgtggctggtgccttcgacctgttccacatcgggcatgtggacttcctggagaaggtgcacaggctggcagagaggccctacatcatcgcgggcttacactttgaccaggaggtcaatcactacaaggggaagaactaccccatcatgaatctgcatgaacggactctgagcgtgctggcctgccggtacgtgtcagaagtggtgattggagccccgtacgcggtcacagcagagctcctaagtcacttcaaggtggacctggtgtgtcacggcaagacagaaattatccctgacagggatggctccgacccataccaggagcccaagagaaggggcatcttccgtcagattgacagtggcagcaacctcaccacagacctcatcgtccagcggatcatcaccaacaggttggagtatgaggcgcgaaaccagaagaaggaagccaaggagctggccttcctggaggctgccaggcagcaggcggcacagcccctgggggagcgcgatggtgacttctaacctggcagaggccctggccggccctccccctgctctgcttctgcgccttctgcgtttggacataggactctgcagggccgccctctctaactggcctggctctggaagggctggtgaggactctgcctccttgcctgcctacaaggtgcctggtttgcagcaggctctccgctctttccagcaaagctgctcagagagggtgtccagcacagtggagaggccggaagtgagacgggcagacggcacctgcagcctgaaacgcaccgctcctgcgtgcgcccccacctggtccccggatgcccccaccacctggacagaggccacactgactgcccacccagctgtggcgggaggtgcagagcagagggctttagggagcagtgactgcggtcacccctttagttctctgggtgtagaccacaccacctcccactgggcaccccccaacacggtgtcctgccacccagcgcctggctccaggaaaacacgcttgccttccttcccggc

SEQ ID NO: 164927 - DNA, 5147 bp, Homo sapiens
  Payload ID: 12484
  Gene Symbol: PCYT2
  Gene Name: phosphate cytidylyltransferase 2, ethanolamine
  Uniprot ID: Q99447
  ENST ID: ENST00000538936
  CDS Start-End: 110-1279
agcgggtgaggcccgcgtgacggccgctgagcgtgcgcctggcggggcgggcggcggcgctcggagtcgccgggagctgccaggctgtccgcgccgccgctgcggggccatgatccggaacgggcgcggggctgcaggcggcgcagagcagccgggcccggggggcaggcgcgccgtgagggtgtggtgcgatggctgctatgacatggtgcattacggccactccaaccagctgcgccaggcacgggccatgggtgactacctcatcgtaggcgtgcacaccgatgaggagatcgccaagcacaaggggcccccggtgttcactcaggaggagagatacaagatggtgcaggccatcaaatgggtggacgaggtggtgccagcggctccctacgtcactacactagagaccctggacaaatacaactgtgacttctgtgttcacggcaatgacatcaccctgactgtagatggccgggacacctatgaggaagtaaagcaggctgggaggtacagagaatgcaagcgcacgcaaggggtgtccaccacagacctcgtgggccgcatgctgctggtaaccaaagcccatcacagcagccaggagatgtcctctgagtaccgggagtatgcagacagttttggcaagtgccctggtgggcggaacccctggaccggggtatcccagttcctgcagacatctcagaagatcatccagtttgcttctgggaaggagccccagccaggggagacagtcatctatgtggctggtgccttcgacctgttccacatcgggcatgtggacttcctggagaaggtgcacaggctggcagagaggccctacatcatcgcgggcttacactttgaccaggaggtcaatcactacaaggggaagaactaccccatcatgaatctgcatgaacggactctgagcgtgctggcctgccggtacgtgtcagaagtggtgattggagccccgtacgcggtcacagcagagctcctaagtcacttcaaggtggacctggtgtgtcacggcaagacagaaattatccctgacagggatggctccgacccataccaggagcccaagagaaggggcatcttccgtcagattgacagtggcagcaacctcaccacagacctcatcgtccagcggatcatcaccaacaggttggagtatgaggcgcgaaaccagaagaaggaagccaaggagctggccttcctggaggctgccaggcagcaggcggcacagcccctgggggagcgcgatggtgacttctaacctggcagaggccctggccggccctccccctgctctgcttctgcgccttctgcgtttggacataggactctgcagggccgccctctctaactggcctggctctggaagggctggtgaggactctgcctccttgcctgcctacaaggtgcctggtttgcagcaggctctccgctctttccagcaaagctgctcagagagggtgtccagcacagtggagaggccggaagtgagacgggcagacggcacctgcagcctgaaacgcaccgctcctgcgtgcgcccccacctggtccccggatgcccccaccacctggacagaggccacactgactgcccacccagctgtggcgggaggtgcagagcagagggctttagggagcagtgactgcggtcacccctttagttctctgggtgtagaccacaccacctcccactgggcaccccccaacacggtgtcctgccacccagcgcctggctccaggaaaacacgcttgccttccttcccggcagcttcgccactctccttatggactctgttctgtttgtacatggctgacggaaatctctttggtacaaccgaataaagcctggtggcagtgctgcgcggggctcccagccctgctgggaaggaccagggaaccactcagcaaggagaccctcttggccctgcccccaccatgcacccagcagccgggagtgcagcgggcagcctggcagtgagtgaaacccaggcctccagccctccaaagcctggggccaccccctgtagcaggcgatgctagaataaggaggagagccagagctgaggctccttgccccttggcccctccaggggccatgggatctctgtctcccacacccctgtcacggcccgcctggagcagcccagaggccgaagaggttcttactgcagcctccgggaggtgtctagggaggccatagattgcctggtctcgccgcattcaaaatgaggcttatgatcagtacttttttcagccccacattcctctccagaatggcctctgccctacagcacctggcccatgtggcaccccatgggcctgtcctctgctgttgtgaggtcgacctcacgacccagcacaggagctggaggcgaggtgcacgcgaggctctccacagcccaggaaggcagcctgtcaccctgctctccgagccaggggccaaggtgtggggggcacaggccatcctcatcctgccaggcccccgctttcaggagtggggtggtgccaatgctcccactcagaaccctggactgcggggtcccctgagcagagggaccagccagttccccatagacagattggtgctggacaggggctgcctgggccccaggcttggggagggtagaaaggccctgcagtgctgctgcctgggcccggaggtgggcctggccccgtagcagcattggaggccagagcccaagccagttccggagtcacacccaacggcggagggagaacctacccatctcccaccttcagctctggggaggcatgctctgggcctctggagccagggctcaggcccccaactctcctccttgcccctgcaccctcggacttggcctggccagaagggatgggggcaagaggaaggcagccaggggctccagcccatgccctcacagatttggctctcgagttggggagcgaagggctgggggaggacactgggaaccgggccagccgtggccctgcacttcccccagggagcaccaaggctaggcgcggcttcaccgcggggctgggtcgtggccagcttcgcccctgggtctgaagacctctgggcggcccaggccaaccttgccctgccgccgcacactcggctgccttctcatacccaggcttggggatttccaggtcccgttcccctcgtggcctggctgccagtcctccagcacccctcactccgaggccgcctcatttatttattcgtttgccattaactgcggggtgagcggagtaggggagacctggggcgccatcccgcgccggaggggcctggggtcaccgagtgggacggtgggggcggggggcccccagcggtgccaggagaggtccgggctcaggcggcgaggcagtcggctgcgcgcagggacaggaagacgttcgccttgcactggtaggtcccgcggccgtcggggagccgctcgcacctctgcaggtttggggcgacgtcctggacgcacacagcctggggggcaggcaagcaaaggctgaggggccgccgcacccccacccacgtcctgccgccgccccccatcagtccccggcacgccggactcacgaggctccgcagcctggggtgcagttgcagctccggggaggcgccggccccgcccgggggttccgcccctctgtagggctgggagcgccgcgcgtacggggacctgcggaggccggacagcagccccgcggcgcggcccaccgagtaggagctgtgccccgccgctggcttgtaccacgcgaggccaggcggcgccagcagcaggcacagcgccagggcggcggccgccagtgtcgcggaccgggccatggggacgccggctgactggtgggcggcggcgtccgggctcggagcagccaccgcctgggccgccttatatctgcggcgagggcgggccgaggctgcggagggccgggaggggcggcgggcgggctggggtgcagcgggcgcgcgcggaggagccgtcgcacctccgcatcccaaaggaaccagccgcgcgggcgagcgctggaggcgcgcaaggatctggcgcttggtgggagcccaacgccccctcaagctccccacccatgccgctcgcgcccttcaggcccggcttgcgtgggccgcagtggcagcaggggagggcccacgggcgcccagccctaggagtcgtcccccaggcaatccccagtactcctgatgctggagagccagccacactgcacagtgccccgggggcggtttctaccaccctaaggggtattcttggctccaggcatcagagtccatgtggcttgtggggccctcatttctttcatgcccactggggaaggttccaccagcagggctgttactggcggggtcctctgggaggggggcaagaaggccagccacaccaaggcactggagctccacgactcctggccttcgattggaggcccctctctgccagctctgccccttggggggcaccaggcaggactgccagccgctctcctggcaggtgacatcagccttcaagctcactgtgccctcaccatttcatgctcccccaaggtcctggtcatgtcttctcttgggtatcttcccaggacaggcactggcactggagccctggcacttgtttctgggttccatgcttcccaggtgtgatggtgaatgctgagtgtcagcttgactggattgaaggatgcaaagtattgtcactgggtgtgtctgtgagggtgttgccagaggagattcccatttgagtcagtgggctgggagaggcagacccaccctcaatccaggtgggcaccacctaatcggctgccagcacagccaggatacaagcaggcagaggaacgtggaaagactagactggctgaatctggcctccatctttctcccatgctggatgcttcccgccctcgcacgtcggcctccaggttcttcagcttttggactctcggacctacaccagtggcttgccaggggctctgcagcctttggccacaggatgaaggctgcactatcggcttctctacttttgttttgggactcagactggcttccttgctcctcaccttgcacatggcttattgtgggacttcaccttgtgatcacgtgagtcaatactcccaataaactcttcatatata

SEQ ID NO: 164928 - DNA, 1765 bp, Homo sapiens
  Payload ID: 12484
  Gene Symbol: PCYT2
  Gene Name: phosphate cytidylyltransferase 2, ethanolamine
  Uniprot ID: Q99447
  ENST ID: ENST00000538721
  CDS Start-End: 52-1275
gctcggagtcgccgggagctgccaggctgtccgcgccgccgctgcggggccatgatccggaacgggcgcggggctgcaggcggcgcagagcagccgggcccggggggcaggcgcgccgtgagggtgtggtgcgatggctgctatgacatggtgcattacggccactccaaccagctgcgccaggcacgggccatgggtgactacctcatcgtaggcgtgcacaccgatgaggagatcgccaagcacaaggggcccccggtgttcactcaggaggagagatacaagatggtgcaggccatcaaatgggtggacgaggtggtgccagcggctccctacgtcactacactagagaccctggacaaatacaactgtgacttctgtgttcacggcaatgacatcaccctgactgtagatggccgggacacctatgaggaagtaaagcaggctgggaggtacagagaatgcaagcgcacgcaaggggtgtccaccacagacctcgtgggccgcatgctgctggtaaccaaagcccatcacagcagccaggagatgtcctctgagtaccgggagtatgcagacagttttggcaagccccctcacccgatacccgccggggacatactttcctcagaaggctgctcccagtgccctggtgggcggaacccctggaccggggtatcccagttcctgcagacatctcagaagatcatccagtttgcttctgggaaggagccccagccaggggagacagtcatctatgtggctggtgccttcgacctgttccacatcgggcatgtggacttcctggagaaggtgcacaggctggcagagaggccctacatcatcgcgggcttacactttgaccaggaggtcaatcactacaaggggaagaactaccccatcatgaatctgcatgaacggactctgagcgtgctggcctgccggtacgtgtcagaagtggtgattggagccccgtacgcggtcacagcagagctcctaagtcacttcaaggtggacctggtgtgtcacggcaagacagaaattatccctgacagggatggctccgacccataccaggagcccaagagaaggggcatcttccgtcagattgacagtggcagcaacctcaccacagacctcatcgtccagcggatcatcaccaacaggttggagtatgaggcgcgaaaccagaagaaggaagccaaggagctggccttcctggaggctgccaggcagcaggcggcacagcccctgggggagcgcgatggtgacttctaacctggcagaggccctggccggccctccccctgctctgcttctgcgccttctgcgtttggacataggactctgcagggccgccctctctaactggcctggctctggaagggctggtgaggactctgcctccttgcctgcctacaaggtgcctggtttgcagcaggctctccgctctttccagcaaagctgctcagagagggtgtccagcacagtggagaggccggaagtgagacgggcagacggcacctgcagcctgaaacgcaccgctcctgcgtgcgcccccacctggtccccggatgcccccaccacctggacagaggccacactgactgcccacccagctgtggcgggaggtgcagagcagagggctttagggagcagtgactgcggtcacccctttagttctctgggtgtagaccacaccacctcccactgggcaccccccaacacggtgtcctgccacccagcgcctggctccaggaaaacacgc

SEQ ID NO: 164929 - DNA, 1474 bp, Homo sapiens
  Payload ID: 12484
  Gene Symbol: PCYT2
  Gene Name: phosphate cytidylyltransferase 2, ethanolamine
  Uniprot ID: Q99447
  ENST ID: ENST00000570388
  CDS Start-End: 518-1453
tgatccggaacgggcgcggggctgcaggcggcgcagagcagccgggcccggggggcaggcgcgccgtgagggtgtggtgcgatggctgctatgacatggtgcattacggccactccaaccagctgcgccaggcacgggccatgggtgactacctcatcgtaggcgtgcacaccgatgctaaagagaaggggcacctgctccccaccactgccagcgaggctcccaagccttcaggggctgagcacctgctcgtcagaaggaatctctgcctttgcctgagaccctcgcagggaagagagccacccagttggccagcactagtgggctaagggccagggtagagagacagcctgcccccaccggccctcttgtgtggctacagctgggtgctgggaaggggcctcctactggaggggccgggtgggctggggtccccagtctccccgttgtccttttcctagaggagatcgccaagcacaaggggcccccggtgttcactcaggaggagagatacaagatggtgcaggccatcaaatgggtggacgaggtggtgccagcggctccctacgtcactacactagagaccctggacaaatacaactgtgacttctgtgttcacggcaatgacatcaccctgactgtagatggccgggacacctatgaggaagtaaagcaggctgggaggtacagagaatgcaagcgcacgcaaggggtgtccaccacagacctcgtgggccgcatgctgctggtaaccaaagcccatcacagcagccaggagatgtcctctgagtaccgggagtatgcagacagttttggcaagtgccctggtgggcggaacccctggaccggggtatcccagttcctgcagacatctcagaagatcatccagtttgcttctgggaaggagccccagccaggggagacagtcatctatgtggctggtgccttcgacctgttccacatcgggcatgtggacttcctggagaaggtgcacaggctggcagagaggccctacatcatcgcgggcttacactttgaccaggaggtcaatcactacaaggggaagaactaccccatcatgaatctgcatgaacggactctgagcgtgctggcctgccggtacgtgtcagaagtggtgattggagccccgtacgcggtcacagcagagctcctaagtcacttcaaggtggacctggtgtgtcacggcaagacagaaattatccctgacagggatggctccgacccataccaggagcccaagagaaggggcatcttccgtcagattgacagtggcagcaacctcaccacagacctcatcgtccagcggatcatcaccaacaggttggagtatgaggcgcgaaaccagaagaaggaagccaaggagctggccttcctggaggctgccaggcagcaggcggcacagcccctgggggagcgcgatggtgacttctaacctggcagaggccctggccgg

SEQ ID NO: 164930 - DNA, 1028 bp, Homo sapiens
  Payload ID: 12484
  Gene Symbol: PCYT2
  Gene Name: phosphate cytidylyltransferase 2, ethanolamine
  ENST ID: ENST00000573401
  CDS Start-End: 23-157
tccgcgccgccgctgcggggccatgatccggaacgggcgcggggctgcaggcggcgcagagcagccgggcccggggggcaggcgcgccgtgagggtgtggtgcgatggctgccaccgcgctgagatctggagccacggcctccctgcttctccgtaaccaccagcaaccagcttgcccggctccggtccaggggttcccctggcctccgggcgagcgtccctgtagctatgacatggtgcattacggccactccaaccagctgcgccaggcacgggccatgggtgactacctcatcgtaggcgtgcacaccgatgaggagatcgccaagcacaaggggcccccggtgttcactcaggaggagagatacaagatggtgcaggccatcaaatgggtggacgaggtggtgccagcggctccctacgtcactacactagagaccctggacaaatacaactgtgacttctgtgttcacggcaatgacatcaccctgactgtagatggccgggacacctatgaggaagtaaagcaggctgggaggtacagagaatgcaagcgcacgcaaggggtgtccaccacagacctcgtgggccgcatgctgctggtaaccaaagcccatcacagcagccaggagatgtcctctgagtaccgggagtatgcagacagttttggcaagccccctcacccgatacccgccggggacatactttcctcagaaggctgctcccagtgccctggtgggcggaacccctggaccggggtatcccagttcctgcagacatctcagaagatcatccagtttgcttctgggaaggagccccagccaggggagacagtcatctatgtggctggtgccttcgacctgttccacatcgggcatgtggacttcctggagaaggtgcacaggctggcagagaggccctacatcatcgcgggcttacactttgaccaggaggtcaatcactacaaggggaagaactaccccatcatgaatctgcatgaacggactctgagcgtgctggcctgccgg

SEQ ID NO: 164931 - DNA, 778 bp, Homo sapiens
  Payload ID: 12484
  Gene Symbol: PCYT2
  Gene Name: phosphate cytidylyltransferase 2, ethanolamine
  ENST ID: ENST00000573927
  CDS Start-End: 534-778
cggggctcgcctgccgggagggtcgggctgcagaggctccgcgccctgccgtgggcgaccccgtctacctctggcggaggccccgcccggtcacgccgacctctccggtgcagccaccgcgctgagatctggagccacggcctccctgcttctccgtaaccaccagcaaccagcttgcccggctccggtccaggggttcccctggcctccgggcgagcgtccctgtagctatgacatggtgcattacggccactccaaccagctgcgccaggcacgggccatgggtgactacctcatcgtaggcgtgcacaccgatgctaaagagaaggggcacctgctccccaccactgccagcgaggctcccaagccttcaggggctgagcacctgctcgtcagaaggaatctctgcctttgcctgagaccctcgcagggaagagagccacccagttggccagcactagtgggctaagggccaggaggagatcgccaagcacaaggggcccccggtgttcactcaggaggagagatacaagatggtgcaggccatcaaatgggtggacgaggtggtgccagcggctccctacgtcactacactagagaccctggacaaatacaactgtgacttctgtgttcacggcaatgacatcaccctgactgtagatggccgggacacctatgaggaagtaaagcaggctgggaggtacagagaatgcaagcgcacgcaaggggtgtccaccacagacctcgtgggccgcatgctgctggtaaccaaagccca

SEQ ID NO: 164932 - DNA, 575 bp, Homo sapiens
  Payload ID: 12484
  Gene Symbol: PCYT2
  Gene Name: phosphate cytidylyltransferase 2, ethanolamine
  ENST ID: ENST00000572473
  CDS Start-End: 472-575
gtgcgcctggcggggcgggcggcggcgctcggagtcgccgggagctgccaggctgtccgcgccgccgctgcggggccatgatccggaacgggcgcggggctgcaggcggcgcagagcagccgggcccggggggcaggcgcgccgtgagggtgtggtgcgatggctgctatgacatggtgcattacggccactccaaccagctgcgccaggcacgggccatgggtgactacctcatcgtaggcgtgcacaccgatgctaaagagaaggggcacctgctccccaccactgccagcgaggctcccaagccttcaggggctgagcacctgctcgtcagaaggaatctctgcctttgcctgagaccctcgcagggaagagagccacccagttggccagcactagtgggctaagggccaggaggagatcgccaagcacaaggggcccccggtgttcactcaggaggagagatacaagatggtgcaggccatcaaatgggtggacgaggtggtgccagcggctccctacgtcactacactagagaccctggacaaatacaactgtgacttctgtgttcacgg

SEQ ID NO: 164933 - DNA, 1006 bp, Homo sapiens
  Payload ID: 12484
  Gene Symbol: PCYT2
  Gene Name: phosphate cytidylyltransferase 2, ethanolamine
  ENST ID: ENST00000576343
  CDS Start-End: 64-1006
gcgggcggcggcgctcggagtcgccgggagctgccaggctgtccgcgccgccgctgcggggccatgatccggaacgggcgcggggctgcaggcggcgcagagcagccgggcccggggggcaggcgcgccgtgagggtgtggtgcgatggctgctatgacatggtgcattacggccactccaaccagctgcgccaggcacgggccatgggtgactacctcatcgtaggcgtgcacaccgatgatgacatcaccctgactgtagatggccgggacacctatgaggaagtaaagcaggctgggaggtacagagaatgcaagcgcacgcaaggggtgtccaccacagacctcgtgggccgcatgctgctggtaaccaaagcccatcacagcagccaggagatgtcctctgagtaccgggagtatgcagacagttttggcaagtgccctggtgggcggaacccctggaccggggtatcccagttcctgcagacatctcagaagatcatccagtttgcttctgggaaggagccccagccaggggagacagtcatctatgtggctggtgccttcgacctgttccacatcgggcatgtggacttcctggagaaggtgcacaggctggcagagaggccctacatcatcgcgggcttacactttgaccaggaggtcaatcactacaaggggaagaactaccccatcatgaatctgcatgaacggactctgagcgtgctggcctgccggtacgtgtcagaagtggtgattggagccccgtacgcggtcacagcagagctcctaagtcacttcaaggtggacctggtgtgtcacggcaagacagaaattatccctgacagggatggctccgacccataccaggagcccaagagaaggggcatcttccgtcagattgacagtggcagcaacctcaccacagacctcatcgtccagcggatcatcaccaacaggttggagtatgaggcgcgaaaccagaagaaggaagccaaggagctgg

SEQ ID NO: 164934 - DNA, 1628 bp, Homo sapiens
  Payload ID: 12484
  Gene Symbol: PCYT2
  Gene Name: phosphate cytidylyltransferase 2, ethanolamine
  ENST ID: ENST00000571105
  CDS Start-End: 59-1162
cggcggcgctcggagtcgccgggagctgccaggctgtccgcgccgccgctgcggggccatgatccggaacgggcgcggggctgcaggcggcgcagagcagccgggcccggggggcaggcgcgccgtgagggtgtggtgcgatggctgctatgacatggtgcattacggccactccaaccagctgcgccaggcacgggccatgggtgactacctcatcgtaggcgtgcacaccgatgaggagatcgccaagcacaaggggcccccggtgttcactcaggaggagagatacaagatggtgcaggccatcaaatgggtggacgaggtggtgccagcggctccctacgtcactacactagagaccctggacaaatacaactgtgacttctgtgttcacggcaatgacatcaccctgactgtagatggccgggacacctatgaggaagtaaagcaggctgggaggtacagagaatgcaagcgcacgcaaggggtgtccaccacagacctcgtgggccgcatgctgctggtaaccaaagcccatcacagcagccaggagatgtcctctgagtaccgggagtatgcagacagttttggcaagtgccctggtgggcggaacccctggaccggggtatcccagttcctgcagacatctcagaagatcatccagtttgcttctgggaaggagccccagccaggggagacagtcatctatgtggctggtgccttcgacctgttccacatcgggcatgtggacttcctggagaaggtgcacaggctggcagagaggccctacatcatcgcgggcttacactttgaccaggaggtcaatcactacaaggggaagaactaccccatcatgaatctgcatgaacggactctgagcgtgctggcctgccggtacgtgtcagaagtggtgattggagccccgtacgcggtcacagcagagctcctaagtcacttcaaggagcccaagagaaggggcatcttccgtcagattgacagtggcagcaacctcaccacagacctcatcgtccagcggatcatcaccaacaggttggagtatgaggcgcgaaaccagaagaaggaagccaaggagctggccttcctggaggctgccaggcagcaggcggcacagcccctgggggagcgcgatggtgacttctaacctggcagaggccctggccggccctccccctgctctgcttctgcgccttctgcgtttggacataggactctgcagggccgccctctctaactggcctggctctggaagggctggtgaggactctgcctccttgcctgcctacaaggtgcctggtttgcagcaggctctccgctctttccagcaaagctgctcagagagggtgtccagcacagtggagaggccggaagtgagacgggcagacggcacctgcagcctgaaacgcaccgctcctgcgtgcgcccccacctggtccccggatgcccccaccacctggacagaggccacactgactgcccacccagctgtggcgggaggtgcagagcagagggctttagggagcagtgactgcggtcacccctttagttctctgggtgtagaccacaccacctcccactgggcaccccccaacacggtgtcctgccaccca

SEQ ID NO: 164935 - DNA, 913 bp, Homo sapiens
  Payload ID: 12484
  Gene Symbol: PCYT2
  Gene Name: phosphate cytidylyltransferase 2, ethanolamine
  ENST ID: ENST00000573636
  CDS Start-End: 56-913
cggcgctcggagtcgccgggagctgccaggctgtccgcgccgccgctgcggggccatgatccggaacgggcgcggggctgcaggcggcgcagagcagccgggcccggggggcaggcgcgccgtgagggtgtggtgcgatggctgctatgacatggtgcattacggccactccaaccagctgcgccaggcacgggccatgggtgactacctcatcgtaggcgtgcacaccgatgaggagatcgccaagcacaaggggcccccggtgttcactcaggaggagagatacaagatggtgcaggccatcaaatgggtggacgaggtggtgccagcggctccctacgtcactacactagagaccctggacaaatacaactgtgacttctgtgttcacggcaatgacatcaccctgactgtagatggccgggacacctatgaggaagtaaagcaggctgggaggtacagagaatgcaagcgcacgcaaggggtgtccaccacagacctcgtgggccgcatgctgctggtaaccaaagcccatcacagcagccagtgccctggtgggcggaacccctggaccggggtatcccagttcctgcagacatctcagaagatcatccagtttgcttctgggaaggagccccagccaggggagacagtcatctatgtggctggtgccttcgacctgttccacatcgggcatgtggacttcctggagaaggtgcacaggctggcagagaggccctacatcatcgcgggcttacactttgaccaggaggtcaatcactacaaggggaagaactaccccatcatgaatctgcatgaacggactctgagcgtgctggcctgccggtacgtgtcagaagtggtgattggagccccgtacgcggtcacagcagagctcctaagtcacttcaag

SEQ ID NO: 164936 - DNA, 804 bp, Homo sapiens
  Payload ID: 12484
  Gene Symbol: PCYT2
  Gene Name: phosphate cytidylyltransferase 2, ethanolamine
  ENST ID: ENST00000572995
  CDS Start-End: 1-622
caaagcccatcacagcagccaggagatgtcctctgagtaccgggagtatgcagacagttttggcaagtgccctggtgggcggaacccctggaccggggtatcccagttcctgcagacatctcagaagatcatccagtttgcttctgggaaggagccccagccaggggagacagtcatctatgtggctggtgccttcgacctgttccacatcgggcatgtggacttcctggagaaggtgcacaggctggcagagaggccctacatcatcgcgggcttacactttgaccagtacgtgtcagaagtggtgattggagccccgtacgcggtcacagcagagctcctaagtcacttcaaggtggacctggtgtgtcacggcaagacagaaattatccctgacagggatggctccgacccataccaggagcccaagagaaggggcatcttccgtcagattgacagtggcagcaacctcaccacagacctcatcgtccagcggatcatcaccaacaggttggagtatgaggcgcgaaaccagaagaaggaagccaaggagctggccttcctggaggctgccaggcagcaggcggcacagcccctgggggagcgcgatggtgacttctaacctggcagaggccctggccggccctccccctgctctgcttctgcgccttctgcgtttggacataggactctgcagggccgccctctctaactggcctggctctggaagggctggtgaggactctgcctccttgcctgcctacaaggtgcctggtttgcagcaggctctccgctctttccagc

SEQ ID NO: 164937 - DNA, 1857 bp, Homo sapiens
  Payload ID: 12484
  Gene Symbol: PCYT2
  Gene Name: phosphate cytidylyltransferase 2, ethanolamine
  Uniprot ID: Q99447
  ENST ID: ENST00000570391
  CDS Start-End: 375-1448
ggtgagcgcggggccggggcgggccgcgggggcgccggggccggcttccttccggggcgccgcgccagccgttgcccggggaccgggcccgcgttctgggtggcgtcctcgtccggcatgggccggggctggcaggctgcggggctcgcctgccgggagggtcgggctgcagaggctccgcgccctgccgtgggcgaccccgtctacctctggcggaggccccgcccggtcacgccgacctctccggtgcagccaccgcgctgagatctggagccacggcctccctgcttctccgtaaccaccagcaaccagcttgcccggctccggtccaggggttcccctggcctccgggcgagcgtccctgtagctatgacatggtgcattacggccactccaaccagctgcgccaggcacgggccatgggtgactacctcatcgtaggcgtgcacaccgatgaggagatcgccaagcacaaggggcccccggtgttcactcaggaggagagatacaagatggtgcaggccatcaaatgggtggacgaggtggtgccagcggctccctacgtcactacactagagaccctggacaaatacaactgtgacttctgtgttcacggcaatgacatcaccctgactgtagatggccgggacacctatgaggaagtaaagcaggctgggaggtacagagaatgcaagcgcacgcaaggggtgtccaccacagacctcgtgggccgcatgctgctggtaaccaaagcccatcacagcagccaggagatgtcctctgagtaccgggagtatgcagacagttttggcaagtgccctggtgggcggaacccctggaccggggtatcccagttcctgcagacatctcagaagatcatccagtttgcttctgggaaggagccccagccaggggagacagtcatctatgtggctggtgccttcgacctgttccacatcgggcatgtggacttcctggagaaggtgcacaggctggcagagaggccctacatcatcgcgggcttacactttgaccaggaggtcaatcactacaaggggaagaactaccccatcatgaatctgcatgaacggactctgagcgtgctggcctgccggtacgtgtcagaagtggtgattggagccccgtacgcggtcacagcagagctcctaagtcacttcaaggtggacctggtgtgtcacggcaagacagaaattatccctgacagggatggctccgacccataccaggagcccaagagaaggggcatcttccgtcagattgacagtggcagcaacctcaccacagacctcatcgtccagcggatcatcaccaacaggttggagtatgaggcgcgaaaccagaagaaggaagccaaggagctggccttcctggaggctgccaggcagcaggcggcacagcccctgggggagcgcgatggtgacttctaacctggcagaggccctggccggccctccccctgctctgcttctgcgccttctgcgtttggacataggactctgcagggccgccctctctaactggcctggctctggaagggctggtgaggactctgcctccttgcctgcctacaaggtgcctggtttgcagcaggctctccgctctttccagcaaagctgctcagagagggtgtccagcacagtggagaggccggaagtgagacgggcagacggcacctgcagcctgaaacgcaccgctcctgcgtgcgcccccacctggtccccggatgcccccaccacctggacagaggccacactgactgcccacccagctgtggcgggaggtgcagagcagagggctttagggagcagtgactgcggtcacccctttagttctctg

SEQ ID NO: 164938 - DNA, 442 bp, Homo sapiens
  Payload ID: 12484
  Gene Symbol: PCYT2
  Gene Name: phosphate cytidylyltransferase 2, ethanolamine
  ENST ID: ENST00000572157
  CDS Start-End: 283-442
gttctgggtggcgtcctcgtccggcatgggccggggctggcaggctgcggggctcgcctgccgggagggtcgggctgcagaggctccgcgccctgccgtgggcgaccccgtctacctctggcggaggccccgcccggtcacgccgacctctccggtgcagccaccgcgctgagatctggagccacggcctccctgcttctccgtaaccaccagcaaccagcttgcccggctccggtccaggggttcccctggcctccgggcgagcgtccctgtagctatgacatggtgcattacggccactccaaccagctgcgccaggcacgggccatgggtgactacctcatcgtaggcgtgcacaccgatggaggagagatacaagatggtgcaggccatcaaatgggtggacgaggtggtgccagcggctccctacgtcactacacta

SEQ ID NO: 164939 - DNA, 6172 bp, Homo sapiens
  Payload ID: 12485
  Gene Symbol: PHEX
  Gene Name: phosphate regulating endopeptidase homolog, X-linked
  Uniprot ID: P78562
  ENST ID: ENST00000379374
  CDS Start-End: 566-2815
aagggactcacacactgaaagaatatctttgatgaagacaattcaggcaagcagaatgattcttgcaacagaattacatgattaattgagatcttgaagtgggtccggtgaatcctggccacctaacttatcatgatttgggggagtttcacgagaatccagttttgataaaacaattgtttttttcctccccaagtgactatacatttaaatagctaaaacatctgttcagcaacatagtaaaacatatatactcggaacgcttgagagaagagcctgccaaacagggactttgctgagggagagcaccaagataaagcaacactgtttgttttgtctagtcagggggaaagccaaggcaaccaatattttggtttttataattttcatttgtgaagaattatttgagaaagggtggcgaggggagatttcctgacggcagtttcttaagctgtccattagtagaagagcaagaaagccttggatgtcaacgcctcgctcttgagaccagccaccaaaccacgaaaagtgactttcttctcgtgtgctctctacggcccttctgatggaagcagaaacagggagcagcgtggagactggaaagaaggccaacagaggcactcgaattgccctggtcgtgtttgtcggtggcaccctagttctgggcacgatcctctttctagtgagtcaaggtctcttaagtctccaagctaaacaggagtactgcctgaagccagaatgcatcgaagcggctgctgccatcttaagtaaagtaaatctgtctgtggatccttgtgataatttcttccggttcgcttgtgatggctggataagcaataatccaattcccgaagatatgccaagctatggggtttatccttggctgagacataatgttgacctcaagttgaaggaacttttggagaaatcaatcagtagaaggcgggacaccgaagccatacagaaagccaaaatcctttattcatcctgcatgaatgagaaagcgattgaaaaagcagatgccaagccactgctacacatcctacggcattcacctttccgctggcccgtgcttgaatctaatattggccctgaaggggtttggtcagagagaaagttcagccttctgcagacacttgcaacgtttcgtggtcaatacagcaattctgtgttcatccgtttgtatgtgtcccctgatgacaaagcatccaatgaacatatcttgaagctggaccaagcaacactctccctggccgtgagggaagactaccttgataacagtacagaagccaagtcttatcgggatgccctttacaagttcatggtggatactgccgtgcttttaggagctaacagttccagagcagagcatgacatgaagtcagtgctcagattggaaattaagatagctgagataatgattccacatgaaaaccgaaccagcgaggccatgtacaacaaaatgaacatttctgaactgagtgctatgattccccagttcgactggctgggctacatcaagaaggtcattgacaccagactctacccccatctgaaagacatcagcccctccgagaatgtggtggtccgcgtcccgcagtactttaaagatttgtttaggatattagggtctgagagaaagaagaccattgccaactatttggtgtggagaatggtttattccagaattccaaaccttagcaggcgctttcagtatagatggctggaattctcaagggtaatccaggggaccacaactttgctgcctcaatgggacaaatgtgtaaactttattgaaagtgccctcccttatgttgttggaaagatgtttgtagatgtgtacttccaggaagataagaaggaaatgatggaggaattggttgagggcgttcgctgggcctttattgacatgctagagaaagaaaatgagtggatggatgcaggaacgaaaaggaaagccaaagaaaaggcgagagctgttttggcaaaagttggctatccagagtttataatgaatgatactcatgttaatgaagacctcaaagctatcaagttttcagaagccgactactttggcaacgtcctacaaactcgcaagtatttagcacagtctgatttcttctggctaagaaaagccgttccaaaaacagagtggtttacaaatccgacgactgtcaatgccttctacagtgcatccaccaaccagatccgatttccagcaggagagctccagaagcctttcttttggggaacagaatatcctcgatctctgagttatggtgctataggagtaattgtcggacatgaatttacacatggatttgataataatggtagaaaatatgataaaaatggaaacctggatccttggtggtctactgaatcagaagaaaagtttaaggaaaaaacaaaatgcatgattaaccagtatagcaactattattggaagaaagctggcttaaatgtcaaggggaagaggaccctgggagaaaatattgctgataatggaggcctgcgggaagcttttagggcttacaggaaatggataaatgacagaaggcagggacttgaggagcctcttctaccaggcatcacattcaccaacaaccagctcttcttcctgagttatgctcatgtgaggtgcaattcctacagaccagaagctgcccgagaacaagtccaaattggtgctcacagtccccctcagtttagggtcaatggtgcaattagtaactttgaagaattccagaaagcttttaactgtccacccaattccacgatgaacagaggcatggactcctgccgactctggtagctgggacgctggtttatggcatcctgagacagttgcacagtgccagcggaggctgcactgagccttcatcgcccattgctttaggcctggagactttcatttttagtgcattttcattatttgggtaggtgacctgcttggatctagacagcatctgttcaaagttgtagggcttataaagtggaatataagaatgaactaagtatgtttctttagaaaatcaaaccaacaaaaataaatccctaggctacttttgttaaaatgctatctgctaaattgttgctattgtccattttagggtgttggccacagttatgtggtacatagcatttcaatctatagctttgtgggaagcctaaattgatgtatcctttaaaagttcaatctattaaacttgtagcctctcaatgatgaagacatgtgcatgaatacctgggagggcttgctgctctgtggaatgcagtgcacgtttttatggacagtaattacacagcattcctcaactgtaaggtagttaaattagaaatatgtttgatctccattttacactttttgatgaagttcttgccttcagctttggagtctgttggaatgaaactgtgtctcacagcttgcatctgatgtagcagattgccctgttcaagtcagcatgaacaaagctcgcagaaaggctactaggtaacggatttgagtttattcagtagaaaaaaagggaatgaggacatatctttaggtcccagaagcagcaaaacctcctagttacataacagcagggaaactaggagatgaaatctccaaaattttgtccagtctgtatgaactgcagtgattgtctgtctgctagacacttttttttagcctaattcttgttcgtttcattaccttcatatgtgtgcattgtactggttttgaaatgagcagacattgagaaaacaattttctgattccccattaggaacatatgattttcatttccctttagtgcaaaggaacaaacatcacattgaggagggagaagtgtacccttctttttcagcttaatgttacctctctttaaaaaaaaaacatttttgaaaaatttcttgactgatgacattctagaatttattgattcaatttaaaattccctgcatagtccaaataaacataatttttactcttcaagtcatctaaagagttgtgagaaagagcagtactatgtgttttatccttagagcattatccttctaagtgaactcctttcttattactgagcgtgtgtgtgtgtgtgtgtgtgtgtgtgtgtgtaggataaaattgtaatggccttaaagttgttacctggcatttttggtttcttaaaataggcatccccctactccctttacattattcattagacatgaggtgctgggttaagtgggccaataggaaaatctcaaaagcaaaatgacaaattcagattaaccacaggaagccattgtgtgtccctgtgatttgtgattcttttaaaaaaaaaaaaaatatatatatatatatatatatatatatatatgtatatctacctaagtgtgtgccatgtccttttgtagccatgggaacgtttgaatggagaaaaatggaggggcaccatcatgaggaaacaattatactgcattagtcagaggagagcgattttccctttgacttcttcctctctgaatggataaacttgtgaagggcagctaccttgtcctcctcttaacctggcttaatgtgaccttagtttgtatttccaaaaacaagcagtattaggttggaattgtatgtgtcttttctctggaggaagcattctgacttggtttagacatataagatactctgttttattcctggacttgggtgtttaaaatcagctgaggtttatcatgcttatatgaatagtgtttcccttctagatttcctttataaactccaaataaacacattcctgcaggtcagagaaagtgtttgataaaagcatagaattatggctttggaaagacaaactaagtcacttgttggtttagcaaaactggttggtgattagttggggccctcacagtttctagatgagaagcttaccttatcctgattaactttacttgctgtaactgttataccgaaaattgtaggtaggatgtccattactcaaacaaagcagaacaaaacaacaaaccaaaagcagcaataccaaatcatcactactagctagaacaatgagaaggattgaatttccaaatacatgcttatgtttaactcaactcttccaattacattctcattgtcctttctcttggataccgattgctaagataaacagacactgattaagtggtagaaagagaaaggtaaaatgcaactggaagggaaagaaaaaagtagggagaagctggcctatggatgtggctttgaagagaagacaggattttggcattccttgctaagcacgttcaatggaggagagccatgaagttttacaaaaataattatggtaaattaaaaggatattagatattggatctcagactagggctgctataatacagttctctgattcgcacaccagatgttctgccagcgaactgttgtctgggcattggaaggagttaggttttttgtgtttgtgaaaatctcctggattagtaaaaaaattttctagatataaagtggttttatttgggctcatgaccattgcccaaagtgtactgagcttttcactaagtgctcagcattggcctcctgttctcatttattcattttatgagatggacttggacatcactaatgcaaacacaggattcataaattattctgaagtttatttagtgccttgcctcaatggagcttaaagcatagcacataaattttatcttatttagccctggagcatcactaagaagcagctaggaactatggcttgccagacagattatgcttgtgccagagaagtggagaagcctgaaatcccttgtcaagtattccacaggaaggaaaggtagtctttgggctttggtctactgacctgtggattaaactctatcccttagattatcccatttctaaatacatttattcaatcagtatttctataatcacttagcatttgataggcttcttccttgatacatttaacataacgcctcagttgcatattacattatggaagaatatacgattgcttcatataacaacattctcatcaccagtgacagtgtcctactggtttgaagaaagatattcttggattatgtgttttatatctaaatggttattctgagactggttgtattttcttctcctactcgtgaaacgatgtgaacaagcattttaaggacaataaaaagttagctggttgaa

SEQ ID NO: 164940 - DNA, 2044 bp, Homo sapiens
  Payload ID: 12486
  Gene Symbol: PCTP
  Gene Name: phosphatidylcholine transfer protein
  Uniprot ID: Q9UKL6
  ENST ID: ENST00000268896
  CDS Start-End: 126-770
agtttcctgccaatgacgctggggcagccggggcagccggggcagcccggtcaccccgcccccaggcccacactaagggtgtccgcggcctgccctccaggcggaggagcccggactgcggaaggatggagctggccgccggaagcttctcggaggagcagttctgggaggcctgcgccgagctccagcagcccgctctggccggggccgactggcagctcctagtggagacctcgggcatcagcatctaccggctgctggacaagaagactggactttatgagtataaagtctttggtgttctggaggactgctcaccaactctactggcagacatctatatggactcagattacagaaaacaatgggaccagtatgttaaagaactctatgaacaagaatgcaacggagagactgtggtctactgggaagtgaagtacccttttcccatgtccaacagagactatgtctaccttcggcagcggcgagacctggacatggaagggaggaagatccatgtgatcctggcccggagcacctccatgcctcagcttggcgagaggtctggggtgatccgggtgaagcaatacaagcagagcctggcgatcgagagtgacggcaagaaggggagcaaagttttcatgtattacttcgataacccgggtggccaaattccgtcctggctcattaactgggccgccaagaatggagttcctaacttcttgaaagacatggcaagagcctgtcagaactacctcaagaaaacctaagaaagagaactgggaacattgcatccatgggttgatgtctctggaagtgcaaccacccaatgtctctggaagtgccacctggaagtgccacctggaagtgtctctggaagagcacccaccactgttcagccttcccctgctgtttctgtcttcagaggcctacacactaccacatcctttctaagcatgtttgcctgacatccagctcactcgtctgcttcctttctcgctccccccatcctgggctgggctgccttcttctacagttcaatatggggcagactagggaaacctttgcttgcttactattaggaggggaagtcttcagtagggaacacgatcattccattgtgcaattttacggggatgggtgggcggagggacacaacaaaatttaagaatgactatttgggcgggctggctcttttgcagcttgtgatttcttccagcttgggaggggctgctggaagtggcatttcgttcagagctgactttcagtgcacccaaactggatgacgtgccaatgtccatttgccttatgctttgtggagctgattaggctgggatttgaggtgataatccagtaagtctttcctcgttcctacttgtggaggatcagtagctgttatgatgccagaccatttggagaagtatcagaggcctgaccggacacataatatgacaaccacatttttcctcatcatccatgaggaaatggatgatttctcttttccatatgtcactgggggaaaggctgcctgtacctctcaagctttgcattttactggaaactgaggcgtcaagatggctgtggcagctagcaaaagcaaagatgctttgtgcatagccttgtgaaaaagtatctttctatgcaataagatgaattttcctcccagaatatttagaaatgtagaagggataacagttcacagccaggtaaaatttaactggtggcttaatgactctgcacctttttctcaggaattctgcctaagttgtctgccttttctaccaccaaaaagacttttagttttctatgctttctcctgaattttggtagggtaaggtatttctatgtcaaaggcacagccttgatgatctcagggaaaaattttaatcactgtgtataatgatactgaaccttgattaataacagaaattcaggatgtaaagccacagaatgggatttattaatgtgggatacctcagactgtttgttttctttctgggaagaaaagtgtgttctataatgaataaatatagagtggttttta

SEQ ID NO: 164941 - DNA, 1856 bp, Homo sapiens
  Payload ID: 12486
  Gene Symbol: PCTP
  Gene Name: phosphatidylcholine transfer protein
  Uniprot ID: Q9UKL6
  ENST ID: ENST00000325214
  CDS Start-End: 154-582
ctagcgcaggggcggtgcctccaagtgactgccgtgcagatccaggggagttggaaggtcacaggagttcagcctcagaagactggactttatgagtataaagtctttggtgttctggaggactgctcaccaactctactggcagacatctatatggactcagattacagaaaacaatgggaccagtatgttaaagaactctatgaacaagaatgcaacggagagactgtggtctactgggaagtgaagtacccttttcccatgtccaacagagactatgtctaccttcggcagcggcgagacctggacatggaagggaggaagatccatgtgatcctggcccggagcacctccatgcctcagcttggcgagaggtctggggtgatccgggtgaagcaatacaagcagagcctggcgatcgagagtgacggcaagaaggggagcaaagttttcatgtattacttcgataacccgggtggccaaattccgtcctggctcattaactgggccgccaagaatggagttcctaacttcttgaaagacatggcaagagcctgtcagaactacctcaagaaaacctaagaaagagaactgggaacattgcatccatgggttgatgtctctggaagtgcaaccacccaatgtctctggaagtgccacctggaagtgccacctggaagtgtctctggaagagcacccaccactgttcagccttcccctgctgtttctgtcttcagaggcctacacactaccacatcctttctaagcatgtttgcctgacatccagctcactcgtctgcttcctttctcgctccccccatcctgggctgggctgccttcttctacagttcaatatggggcagactagggaaacctttgcttgcttactattaggaggggaagtcttcagtagggaacacgatcattccattgtgcaattttacggggatgggtgggcggagggacacaacaaaatttaagaatgactatttgggcgggctggctcttttgcagcttgtgatttcttccagcttgggaggggctgctggaagtggcatttcgttcagagctgactttcagtgcacccaaactggatgacgtgccaatgtccatttgccttatgctttgtggagctgattaggctgggatttgaggtgataatccagtaagtctttcctcgttcctacttgtggaggatcagtagctgttatgatgccagaccatttggagaagtatcagaggcctgaccggacacataatatgacaaccacatttttcctcatcatccatgaggaaatggatgatttctcttttccatatgtcactgggggaaaggctgcctgtacctctcaagctttgcattttactggaaactgaggcgtcaagatggctgtggcagctagcaaaagcaaagatgctttgtgcatagccttgtgaaaaagtatctttctatgcaataagatgaattttcctcccagaatatttagaaatgtagaagggataacagttcacagccaggtaaaatttaactggtggcttaatgactctgcacctttttctcaggaattctgcctaagttgtctgccttttctaccaccaaaaagacttttagttttctatgctttctcctgaattttggtagggtaaggtatttctatgtcaaaggcacagccttgatgatctcagggaaaaattttaatcactgtgtataatgatactgaaccttgattaataacagaaattcaggatgtaaagccacagaatgggatttattaatgtgggatacctcagactgtttgttttctttctgggaagaaaagtgtgttctataatgaataaatatagagtggttttta

SEQ ID NO: 164942 - DNA, 2234 bp, Homo sapiens
  Payload ID: 12486
  Gene Symbol: PCTP
  Gene Name: phosphatidylcholine transfer protein
  ENST ID: ENST00000417982
  CDS Start-End: 449-643
tggagctggccgccggaagcttctcggaggagcagttctgggaggcctgcgccgagctccagcagcccgctctggccggggccgactggcagctcctagtggagacctcgggcatcagcatctaccggctgctggacaaggtagcggccaacccgctggaggaccgcggggcctagaatgcgccggggtcgacctccccgcagggagtgcggggcggcagtcgcggaagggacaggggcgcgtcttctccggctcaggaaggagctccgcccggaccctgtctcaagctctggagctagcgcaggggcggtgcctccaagtgactgccgtgcagatccaggggagttggaaggtcacaggagttcagcctcagaagactggactttatgagtataaagtctttggtgttctggaggactgctcaccaactctactggcagacatctatatggactcagattacagaaaacaatgggaccagtatgttaaagaactctatgaacaagaatgcaacggagagactgtggtctactgggaagtgaagtacccttttcccatgtccaacagagacgtatcctttccacaagcttgtggcgctttccttctgtctgtctacaatgctggcgttggtgtcttgccttaactggctatgcagtatgtctaccttcggcagcggcgagacctggacatggaagggaggaagatccatgtgatcctggcccggagcacctccatgcctcagcttggcgagaggtctggggtgatccgggtgaagcaatacaagcagagcctggcgatcgagagtgacggcaagaaggggagcaaagttttcatgtattacttcgataacccgggtggccaaattccgtcctggctcattaactgggccgccaagaatggagttcctaacttcttgaaagacatggcaagagcctgtcagaactacctcaagaaaacctaagaaagagaactgggaacattgcatccatgggttgatgtctctggaagtgcaaccacccaatgtctctggaagtgccacctggaagtgccacctggaagtgtctctggaagagcacccaccactgttcagccttcccctgctgtttctgtcttcagaggcctacacactaccacatcctttctaagcatgtttgcctgacatccagctcactcgtctgcttcctttctcgctccccccatcctgggctgggctgccttcttctacagttcaatatggggcagactagggaaacctttgcttgcttactattaggaggggaagtcttcagtagggaacacgatcattccattgtgcaattttacggggatgggtgggcggagggacacaacaaaatttaagaatgactatttgggcgggctggctcttttgcagcttgtgatttcttccagcttgggaggggctgctggaagtggcatttcgttcagagctgactttcagtgcacccaaactggatgacgtgccaatgtccatttgccttatgctttgtggagctgattaggctgggatttgaggtgataatccagtaagtctttcctcgttcctacttgtggaggatcagtagctgttatgatgccagaccatttggagaagtatcagaggcctgaccggacacataatatgacaaccacatttttcctcatcatccatgaggaaatggatgatttctcttttccatatgtcactgggggaaaggctgcctgtacctctcaagctttgcattttactggaaactgaggcgtcaagatggctgtggcagctagcaaaagcaaagatgctttgtgcatagccttgtgaaaaagtatctttctatgcaataagatgaattttcctcccagaatatttagaaatgtagaagggataacagttcacagccaggtaaaatttaactggtggcttaatgactctgcacctttttctcaggaattctgcctaagttgtctgccttttctaccaccaaaaagacttttagttttctatgctttctcctgaattttggtagggtaaggtatttctatgtcaaaggcacagccttgatgatctcagggaaaaattttaatcactgtgtataatgatactgaaccttgattaataacagaaattcaggatgtaaagccacagaatgggatttattaatgtgggatacctcagactgtttgttttctttctgggaagaaaagtgtgttctataatgaataaatatagagtggttttt

SEQ ID NO: 164943 - DNA, 2680 bp, Homo sapiens
  Payload ID: 12486
  Gene Symbol: PCTP
  Gene Name: phosphatidylcholine transfer protein
  ENST ID: ENST00000576183
  CDS Start-End: 44-655
ccgcggcctgccctccaggcggaggagcccggactgcggaaggatggagctggccgccggaagcttctcggaggagcagttctgggaggcctgcgccgagctccagcagcccgctctggccggggccgactggcagctcctagtggagacctcgggcatcagcatctaccggctgctggacaagaagactggactttatgagtataaagtctttggtgttctggaggactgctcaccaactctactggcagacatctatatggactcagattacagaaaacaatgggaccagtatgttaaagaactctatgaacaagaatgcaacggagagactgtggtctactgggaagtgaagtacccttttcccatgtccaacagagactatgtctaccttcggcagcggcgagacctggacatggaagggaggaagatccatgtgatcctggcccggagcacctccatgcctcagcttggcgagaggtctggggtgatccgggtgaagcaatacaagcagagcctggcgatcgagagtgacggcaagaaggggagcaaagttttcatgtattacttcgataacccgggtggccaaattccgtcctggctcattaactgggccgccaagggagggaactgcagtggtagtttgtatcactagagactgcccaggagcctggcattatggggaccatcagcctgctttgcacaagatctactactagagagctcaacagattccttggaagagtgaaaaagcacatcaactttggagtcaaacagacgcaatttcaaatcctggctctgctactgactgtcttgttttatttaaggaagccatgcatttcttcctttttaaaaatgaagatagatgtcttctactgcatagagggggagtaaataagacaatatttaggaaaagtcttgcccagtgctcaacattaactaaataataatatatcctgctccttgatccccaatccttaccattttctaattcagtaaagcaagtgctttcatttctttggaagaatgtaacaatccagcccaagcccatttcttgtgttttcttttttccagaaacactgtttcagaaacatcttcgctttttcctagaaaaagctaacatataaggcctttttgcaacagaagttcctgttgactggtcttacttttgtcctcagtcctactttttgtcatcatctgcaacaacattctgttgaaatccagttagggagcctattcatttttgttcgtcctaaagccaacattgtttaccttctgccacatcccaaagaatcaagagtgaccactgtgaagacatagaaatgacagtctcatttcctttgcagaatggagttcctaacttcttgaaagacatggcaagagcctgtcagaactacctcaagaaaacctaagaaagagaactgggaacattgcatccatgggttgatgtctctggaagtgcaaccacccaatgtctctggaagtgccacctggaagtgccacctggaagtgtctctggaagagcacccaccactgttcagccttcccctgctgtttctgtcttcagaggcctacacactaccacatcctttctaagcatgtttgcctgacatccagctcactcgtctgcttcctttctcgctccccccatcctgggctgggctgccttcttctacagttcaatatggggcagactagggaaacctttgcttgcttactattaggaggggaagtcttcagtagggaacacgatcattccattgtgcaattttacggggatgggtgggcggagggacacaacaaaatttaagaatgactatttgggcgggctggctcttttgcagcttgtgatttcttccagcttgggaggggctgctggaagtggcatttcgttcagagctgactttcagtgcacccaaactggatgacgtgccaatgtccatttgccttatgctttgtggagctgattaggctgggatttgaggtgataatccagtaagtctttcctcgttcctacttgtggaggatcagtagctgttatgatgccagaccatttggagaagtatcagaggcctgaccggacacataatatgacaaccacatttttcctcatcatccatgaggaaatggatgatttctcttttccatatgtcactgggggaaaggctgcctgtacctctcaagctttgcattttactggaaactgaggcgtcaagatggctgtggcagctagcaaaagcaaagatgctttgtgcatagccttgtgaaaaagtatctttctatgcaataagatgaattttcctcccagaatatttagaaatgtagaagggataacagttcacagccaggtaaaatttaactggtggcttaatgactctgcacctttttctcaggaattctgcctaagttgtctgccttttctaccaccaaaaagacttttagttttctatgctttctcctgaattttggtagggtaaggtatttctatgtcaaaggcacagccttgatgatctcagggaaaaattttaatcactgtgtataatgatactgaaccttgattaataacagaaattcaggatgtaaagccacagaatgggatttattaatgtgggatacctcagactgtttgttttctttctgggaagaaaagtgtgttctataatgaataaatatagagtgg

SEQ ID NO: 164944 - DNA, 919 bp, Homo sapiens
  Payload ID: 12486
  Gene Symbol: PCTP
  Gene Name: phosphatidylcholine transfer protein
  ENST ID: ENST00000573500
  CDS Start-End: 11-670
ctgcggaaggatggagctggccgccggaagcttctcggaggagcagttctgggaggcctgcgccgagctccagcagcccgctctggccggggccgactggcagctcctagtggagacctcgggcatcagcatctaccggctgctggacaagaagactggactttatgagtataaagtctttggtgttctggaggactgctcaccaactctactggcagacatctatatggactcagattacagaaaacaatgggaccagtatgttaaagaactctatgaacaagaatgcaacggagagactgtggtctactgggaagtgaagtacccttttcccatgtccaacagagactatgtctaccttcggcagcggcgagacctggacatggaagggaggaagatccatgtgatcctggcccggagcacctccatgcctcagcttggcgagaggtctggggtgatccgggtgaagcaatacaagcagagcctggcgatcgagagtgacggcaagaaggggagcaaagttttcatgtattacttcgataacccgggtggccaaattccgtcctggctcattaactgggccgccaagaatcagagcagaaccaagcgggaagctcagaatcagagagacctcatcaagtttttggcaaacccaaacattctgcaatagattgagtggaaggaagaggaaggacataaagataaagacatgagaaaagaagctgagtctttgttgaaacactgaaatgggtgcaggtatcatttcttatctcattgttttttctcataagccctgaattaattcatttattcacagtattttcgcagatgtgaaattcacatattattcacagatgtgttcactatcatctatgtactggaaagatagcagtgaataaaatggacaaaattacctgcc

SEQ ID NO: 164945 - DNA, 647 bp, Homo sapiens
  Payload ID: 12486
  Gene Symbol: PCTP
  Gene Name: phosphatidylcholine transfer protein
  ENST ID: ENST00000572536
  CDS Start-End: 1-441
cggcagcggcgagacctggacatggaagggaggaagatccatgtgatcctggcccggagcacctccatgcctcagcttggcgagaggtctggggtgatccgggtgaagcaatacaagcagagcctggcgatcgagagtgacggcaagaaggggagcaaagttttcatgtattacttcgataacccgggtggccaaattccgtcctggctcattaactgggccgccaaggctggccttgagctcctgacctcaagcaatccactggcctcggcctctcaaagtgctgggattacaggcatgagccaccacacccggccaatcagagcagaaccaagcgggaagctcagaatcagagagacctcatcaagtttttggcaaacccaaacattctgcaatagattgagtggaaggaagaggaaggacataaagataaagacatgagaaaagaagctgagtctttgttgaaacactgaaatgggtgcaggtatcatttcttatctcattgttttttctcataagccctgaattaattcatttattcacagtattttcgcagatgtgaaattcacatattattcacagatgtgttcactatcatctatgtactggaaagatagcagtgaataaaatggacaaaattacctgcc

SEQ ID NO: 164946 - DNA, 1697 bp, Homo sapiens
  Payload ID: 12487
  Gene Symbol: PEBP1
  Gene Name: phosphatidylethanolamine binding protein 1
  Uniprot ID: P30086
  ENST ID: ENST00000261313
  CDS Start-End: 353-916
tctctcttcggcgaacctattccagggcgcccttcattttcatttcttgaaacaacagccttgcaggccgagccgctgttcccgagaactcggcagccacagggagcaggttgcatggacccaggagcgcgagaggccctgctctgccagcttcggccaatcagaggccagggagcggtgggcgtgacgtggggcggtgcgcggggctgggcggcggctgaggcgcgtgctctcgcgtggtcgctgggtctgcgtcttcccgagccagtgtgctgagctctccgcgtcgcctctgtcgcccgcgcctggcctaccgcggcactcccggctgcacgctctgcttggcctcgccatgccggtggacctcagcaagtggtccgggcccttgagcctgcaagaagtggacgagcagccgcagcacccgctgcatgtcacctacgccggggcggcggtggacgagctgggcaaagtgctgacgcccacccaggttaagaatagacccaccagcatttcgtgggatggtcttgattcagggaagctctacaccttggtcctgacagacccggatgctcccagcaggaaggatcccaaatacagagaatggcatcatttcctggtggtcaacatgaagggcaatgacatcagcagtggcacagtcctctccgattatgtgggctcggggcctcccaagggcacaggcctccaccgctatgtctggctggtttacgagcaggacaggccgctaaagtgtgacgagcccatcctcagcaaccgatctggagaccaccgtggcaaattcaaggtggcgtccttccgtaaaaagtatgagctcagggccccggtggctggcacgtgttaccaggccgagtgggatgactatgtgcccaaactgtacgagcagctgtctgggaagtagggggttagcttggggacctgaactgtcctggaggccccaagccatgttccccagttcagtgttgcatgtataatagatttctcctcttcctgccccccttggcatgggtgagacctgaccagtcagatggtagttgagggtgacttttcctgctgcctggcctttataattttactcactcactctgatttatgttttgatcaaatttgaacttcattttggggggtattttggtactgtgatggggtcatcaaattattaatctgaaaatagcaacccagaatgtaaaaaagaaaaaactggggggaaaaagaccaggtctacagtgatagagcaaagcatcaaagaatctttaagggaggtttaaaaaaaaaaaaaaaaaaaaagattggttgcctctgcctttgtgatcctgagtccagaatggtacacaatgtgattttatggtgatgtcactcacctagacaaccagaggctggcattgaggctaacctccaacacagtgcatctcagatgcctcagtaggcatcagtatgtcactctggtccctttaaagagcaatcctggaagaagcaggagggagggtggctttgctgttgttgggacatggcaatctagaccggtagcagcgctcgctgacagcttgggaggaaacctgagatctgtgttttttaaattgatcgttcttcatgggggtaagaaaagctggtctggagttgctgaatgttgcattaattgtgctgtttgcttgtagttgaataaaaatagaaacctgaatgaa

SEQ ID NO: 164947 - DNA, 1013 bp, Homo sapiens
  Payload ID: 12488
  Gene Symbol: PEMT
  Gene Name: phosphatidylethanolamine N-methyltransferase
  Uniprot ID: Q9UBM1
  ENST ID: ENST00000255389
  CDS Start-End: 75-785
ggctctataggtccggttccgggggcgcgtggctgcagcggggcccgcgtggtgcctcctgaggcggcccccggatgaagagatctgggaacccgggagccgaggtaacgaacagctcggtggcagggcctgactgctgcggaggcctcggcaatattgattttagacaggcagacttctgcgttatgacccggctgctgggctacgtggaccccctggatcccagctttgtggctgccgtcatcaccatcaccttcaatccgctctactggaatgtggttgcacgatgggaacacaagacccgcaagctgagcagggccttcggatccccctacctggcctgctactctctaagcgtcaccatcctgctcctgaacttcctgcgctcgcactgcttcacgcaggccatgctgagccagcccaggatggagagcctggacacccccgcggcctacagcctgggcctcgcgctcctgggactgggcgtcgtgctcgtgctctccagcttctttgcactggggttcgctggaactttcctaggtgattacttcgggatcctcaaggaggcgagagtgaccgtgttccccttcaacatcctggacaaccccatgtactggggaagcacagccaactacctgggctgggccatcatgcacgccagccccacgggcctgctcctgacggtgctggtggccctcacctacatagtggctctcctatacgaagagcccttcaccgctgagatctaccggcagaaagcctccgggtcccacaagaggagctgattgagctgcaacagctttgctgaaggcctggccagcctcctggcctgccccaagtggcaggccctgcgcagggcgagaatggtgcctgctgctcagggctcgcccccggcgtgggctgccccagtgccttggaacctgctgccttggggaccctggacgtgccgacatatggccattgagctccaacccacacattcccattcaccaataaaggcaccctgaccccaa

SEQ ID NO: 164948 - DNA, 1050 bp, Homo sapiens
  Payload ID: 12488
  Gene Symbol: PEMT
  Gene Name: phosphatidylethanolamine N-methyltransferase
  Uniprot ID: Q9UBM1
  ENST ID: ENST00000395781
  CDS Start-End: 83-781
acttacccggctctataggtccggttccgggggcgcgtggctgcagcggggcccgcgtggtgcctcctgaggcggcccccggatgaagagatctgggaacccgggagccgaggtaacgaacagctcggtggcagggcctgactgctgcggaggcctcggcaatattgattttagacaggcagacttctgcgttatgacccggctgctgggctacgtggaccccctggatcccagctttgtggctgccgtcatcaccatcaccttcaatccgctctactggaatgtggttgcacgatgggaacacaagacccgcaagctgagcagggccttcggatccccctacctggcctgctactctctaagcgtcaccatcctgctcctgaacttcctgcgctcgcactgcttcacgcaggccatgctgagccagcccaggatggagagcctggacacccccgcggcctacagcctgggcctcgcgctcctgggactgggcgtcgtgctcgtgctctccagcttctttgcactggggttcgctggaactttcctaggtgattacttcgggatcctcaaggaggcgagagtgaccgtgttccccttcaacatcctggacaaccccatgtactggggaagcacagccaactacctgggctgggccatcatcccagcacctgcgggagctgtgggatcagaggcacgccagccccacgggcctgctcctgacggtgctggtggccctcacctacatagtggctctcctatacgaagagcccttcaccgctgagatctaccggcagaaagcctccgggtcccacaagaggagctgattgagctgcaacagctttgctgaaggcctggccagcctcctggcctgccccaagtggcaggccctgcgcagggcgagaatggtgcctgctgctcagggctcgcccccggcgtgggctgccccagtgccttggaacctgctgccttggggaccctggacgtgccgacatatggccattgagctccaacccacacattcccattcaccaataaaggcaccctgacccc

SEQ ID NO: 164949 - DNA, 895 bp, Homo sapiens
  Payload ID: 12488
  Gene Symbol: PEMT
  Gene Name: phosphatidylethanolamine N-methyltransferase
  Uniprot ID: Q9UBM1
  ENST ID: ENST00000395782
  CDS Start-End: 68-667
ggcgaggagaggcacaccactattgttttaatttgcttttacctgattcctggcagacttctgcgttatgacccggctgctgggctacgtggaccccctggatcccagctttgtggctgccgtcatcaccatcaccttcaatccgctctactggaatgtggttgcacgatgggaacacaagacccgcaagctgagcagggccttcggatccccctacctggcctgctactctctaagcgtcaccatcctgctcctgaacttcctgcgctcgcactgcttcacgcaggccatgctgagccagcccaggatggagagcctggacacccccgcggcctacagcctgggcctcgcgctcctgggactgggcgtcgtgctcgtgctctccagcttctttgcactggggttcgctggaactttcctaggtgattacttcgggatcctcaaggaggcgagagtgaccgtgttccccttcaacatcctggacaaccccatgtactggggaagcacagccaactacctgggctgggccatcatgcacgccagccccacgggcctgctcctgacggtgctggtggccctcacctacatagtggctctcctatacgaagagcccttcaccgctgagatctaccggcagaaagcctccgggtcccacaagaggagctgattgagctgcaacagctttgctgaaggcctggccagcctcctggcctgccccaagtggcaggccctgcgcagggcgagaatggtgcctgctgctcagggctcgcccccggcgtgggctgccccagtgccttggaacctgctgccttggggaccctggacgtgccgacatatggccattgagctccaacccacacattcccattcaccaataaaggcaccctgaccccaa

SEQ ID NO: 164950 - DNA, 1008 bp, Homo sapiens
  Payload ID: 12488
  Gene Symbol: PEMT
  Gene Name: phosphatidylethanolamine N-methyltransferase
  Uniprot ID: Q9UBM1
  ENST ID: ENST00000395783
  CDS Start-End: 181-780
ctgaccacagagcgctgctcccgagaaccctgcacccctcaatggagtaaattaccataaagcctcttccttacccatgctttggggtgttaacagctgaggctattcgtcggtgacctgtgggactcgagctattcctgcagctcagcagacctcctggccgtggcagacttctgcgttatgacccggctgctgggctacgtggaccccctggatcccagctttgtggctgccgtcatcaccatcaccttcaatccgctctactggaatgtggttgcacgatgggaacacaagacccgcaagctgagcagggccttcggatccccctacctggcctgctactctctaagcgtcaccatcctgctcctgaacttcctgcgctcgcactgcttcacgcaggccatgctgagccagcccaggatggagagcctggacacccccgcggcctacagcctgggcctcgcgctcctgggactgggcgtcgtgctcgtgctctccagcttctttgcactggggttcgctggaactttcctaggtgattacttcgggatcctcaaggaggcgagagtgaccgtgttccccttcaacatcctggacaaccccatgtactggggaagcacagccaactacctgggctgggccatcatgcacgccagccccacgggcctgctcctgacggtgctggtggccctcacctacatagtggctctcctatacgaagagcccttcaccgctgagatctaccggcagaaagcctccgggtcccacaagaggagctgattgagctgcaacagctttgctgaaggcctggccagcctcctggcctgccccaagtggcaggccctgcgcagggcgagaatggtgcctgctgctcagggctcgcccccggcgtgggctgccccagtgccttggaacctgctgccttggggaccctggacgtgccgacatatggccattgagctccaacccacacattcccattcaccaataaaggcaccctgaccccaa

SEQ ID NO: 164951 - DNA, 960 bp, Homo sapiens
  Payload ID: 12488
  Gene Symbol: PEMT
  Gene Name: phosphatidylethanolamine N-methyltransferase
  ENST ID: ENST00000435340
  CDS Start-End: 54-689
ggggcgcgtggctgcagcggggcccgcgtggtgcctcctgaggcggcccccggatgaagagatctgggaacccgggagccgaggcagacttctgcgttatgacccggctgctgggctacgtggaccccctggatcccagctttgtggctgccgtcatcaccatcaccttcaatccgctctactggaatgtggttgcacgatgggaacacaagacccgcaagctgagcagggccttcggatccccctacctggcctgctactctctaagcgtcaccatcctgctcctgaacttcctgcgctcgcactgcttcacgcaggccatgctgagccagcccaggatggagagcctggacacccccgcggcctacagcctgggcctcgcgctcctgggactgggcgtcgtgctcgtgctctccagcttctttgcactggggttcgctggaactttcctaggtgattacttcgggatcctcaaggaggcgagagtgaccgtgttccccttcaacatcctggacaaccccatgtactggggaagcacagccaactacctgggctgggccatcatcagcccagcacctgcgggagctgtgggatcagaggcacgccagccccacgggcctgctcctgacggtgctggtggccctcacctacatagtggctctcctatacgaagagcccttcaccgctgagatctaccggcagaaagcctccgggtcccacaagaggagctgattgagctgcaacagctttgctgaaggcctggccagcctcctggcctgccccaagtggcaggccctgcgcagggcgagaatggtgcctgctgctcagggctcgcccccggcgtgggctgccccagtgccttggaacctgctgccttggggaccctggacgtgccgacatatggccattgagctccaacccacacattcccattcaccaataaaggcaccctgaccccaa

SEQ ID NO: 164952 - DNA, 708 bp, Homo sapiens
  Payload ID: 12488
  Gene Symbol: PEMT
  Gene Name: phosphatidylethanolamine N-methyltransferase
  ENST ID: ENST00000580147
  CDS Start-End: 58-297
tccgggggcgcgtggctgcagcggggcccgcgtggtgcctcctgaggcggcccccggatgaagagatctgggaacccgggagccgaggtaacgaacagctcggtggcagggcctgactgctgcggaggcctcggcaatattgattttagacaggcagacttctgcgttatgacccggctgctgggctacgtggaccccctggatcccagctttgtggctgccgtcatcaccatcaccttcaatccgctctactggaatgtggtgattacttcgggatcctcaaggaggcgagagtgaccgtgttccccttcaacatcctggacaaccccatgtactggggaagcacagccaactacctgggctgggccatcatgcacgccagccccacgggcctgctcctgacggtgctggtggccctcacctacatagtggctctcctatacgaagagcccttcaccgctgagatctaccggcagaaagcctccgggtcccacaagaggagctgattgagctgcaacagctttgctgaaggcctggccagcctcctggcctgccccaagtggcaggccctgcgcagggcgagaatggtgcctgctgctcagggctcgcccccggcgtgggctgccccagtgccttggaacctgctgccttggggaccctggacgtgccgacatatggccattgagctccaacccacacattcccatt

SEQ ID NO: 164953 - DNA, 591 bp, Homo sapiens
  Payload ID: 12488
  Gene Symbol: PEMT
  Gene Name: phosphatidylethanolamine N-methyltransferase
  ENST ID: ENST00000461404
  CDS Start-End: 75-368
ggctctataggtccggttccgggggcgcgtggctgcagcggggcccgcgtggtgcctcctgaggcggcccccggatgaagagatctgggaacccgggagccgaggtaacgaacagctcggtggcagggcctgactgctgcggaggcctcggcaatattgattttagacaggcagacttctgcgttatgacccggctgctgggctacgtggaccccctggatcccagctttgtggctgccgtcatcaccatcaccttcaatccgctctactggaatgtggtgttggtggctggtgagcctgggctggctgtggggacccttcgcttacaggcaaggttgcacgatgggaacacaagacccgcaagctgagcagggccttcggatccccctacctggcctgctactctctaagcgtcaccatcctgctcctgaacttcctgcgctcgcactgcttcacgcaggccatgctgagccagcccaggatggagagcctggacacccccgcggcctacagcctgggcctcgcgctcctgggactgggcgtcgtgctcgtgctctccagcttctttgcactggggttcgctggaacttt

SEQ ID NO: 164954 - DNA, 895 bp, Homo sapiens
  Payload ID: 12489
  Gene Symbol: PEBP4
  Gene Name: phosphatidylethanolamine-binding protein 4
  Uniprot ID: Q96S96
  ENST ID: ENST00000256404
  CDS Start-End: 93-776
cccaaagtacttgtgtccgggtggtggactggattagctgcggagccctggaagctgcctgtccttctccctgtgcttaaccagaggtgcccatgggttggacaatgaggctggtcacagcagcactgttactgggtctcatgatggtggtcactggagacgaggatgagaacagcccgtgtgcccatgaggccctcttggacgaggacaccctcttttgccagggccttgaagttttctacccagagttggggaacattggctgcaaggttgttcctgattgtaacaactacagacagaagatcacctcctggatggagccgatagtcaagttcccgggggccgtggacggcgcaacctatatcctggtgatggtggatccagatgcccctagcagagcagaacccagacagagattctggagacattggctggtaacagatatcaagggcgccgacctgaagaaagggaagattcagggccaggagttatcagcctaccaggctccctccccaccggcacacagtggcttccatcgctaccagttctttgtctatcttcaggaaggaaaagtcatctctctccttcccaaggaaaacaaaactcgaggctcttggaaaatggacagatttctgaaccgtttccacctgggcgaacctgaagcaagcacccagttcatgacccagaactaccaggactcaccaaccctccaggctcccagagaaagggccagcgagcccaagcacaaaaaccaggcggagatagctgcctgctagatagccggctttgccatccgggcatgtggccacactgcccaccaccgacgatgtgggtatggaaccccctctggatacagaaccccttcttttccaaataaaaaaaaaatcatccaggg

SEQ ID NO: 164955 - DNA, 459 bp, Homo sapiens
  Payload ID: 12489
  Gene Symbol: PEBP4
  Gene Name: phosphatidylethanolamine-binding protein 4
  ENST ID: ENST00000522278
  CDS Start-End: 179-459
gggacgacgccggcgccgccgcgctgctgctgggctccagcctcccggccagctcgcggccactcagaaactccggcagggcagcccaggccggacgtgggcccaggagcggacgcgcgcgctgcactgcagccgctgccccttccggatcagcatcgccccgcgcgccaggcgcccaatgtcacggcggcgcgcggagccgggctgcggaggcagcgggcggcgcgcaggggcgccgggagaggggcgaggccgccgccgctacgcgcccgggcccgcggcgaaggcgctgccgcgaagacgcctggcgctgcagtcccaggtgcccatgggttggacaatgaggctggtcacagcagcactgttactgggtctcatgatggtggtcactggagacgaggatgagaacagcccgtgtgcccatgaggccctcttggacgaggacaccctcttttgcca

SEQ ID NO: 164956 - DNA, 2201 bp, Homo sapiens
  Payload ID: 12490
  Gene Symbol: PGS1
  Gene Name: phosphatidylglycerophosphate synthase 1
  Uniprot ID: Q32NB8
  ENST ID: ENST00000262764
  CDS Start-End: 27-1697
agcggaagcggaagcggcgagtctccatggcggtggcggcggcagctgcggcgggacccgtgttctggaggcgactgctgggcctcctgcctggccgcccagggctggccgcgctcctgggacgcctgtccgaccgcctcggcaggaaccgggaccgccagcgcaggaggtcaccatggctgttattggctcccttgctgtccccagctgttccccaggtcacctccccaccttgctgcctgtgtccagaaggcgtgcaccggttccagtggatcagaaacctggttccagaatttggagtctccagttctcacgttagggtgctttcttccccggcagagtttttcgagctcatgaaggggcagataagagtagccaagaggcgggtcgtgatggcatccctctacctggggacaggtcctttggaacaggagctggtggactgcctggaaagtactctagaaaagtcactccaagcaaagtttccttcaaatctcaaggtctccattctcttagacttcacgcggggctcacgaggccggaagaactcccgcacaatgctgctcccactcctgcggaggttcccagagcaggtccgagtctccctctttcacacgccgcacctccgtgggctgcttcggctcctcatccctgagcgcttcaacgagaccatcggcctccagcacattaaggtgtacctcttcgacaacagcgtcatcttgagcggtgcaaacctgagtgactcctacttcaccaaccgccaggaccgctacgtgttcctgcaggactgtgcggagattgccgacttcttcacggagctggtggacgcggtgggggatgtgtccctgcagctgcagggggacgacacggtgcaggtggtggatgggatggtgcatccttacaaaggggaccgggccgagtactgcaaggcagccaataagagggtcatggatgtgatcaactcagccaggacccgccagcagatgctgcatgcccagaccttccacagcaactctcttttgacccaggaagatgcagcagctgctggggatcgcagaccagcccctgacacctggatttatccgctgattcagatgaagcccttcgagattcaaatcgatgagattgtcactgagaccctgttgactgaggcggagcgcggggcaaaggtctacctcaccactggctatttcaacctgacccaggcctacatggacctggtcttgggcactcgggctgagtaccagatcctgctggcctcaccagaggtgaatggcttctttggggccaagggggtggccggcgccatcccagcggcctatgtgcacatcgagcgacagttcttcagtgaggtgtgcagcctgggacagcaggagcgggtccagcttcaggagtactggcggaggggctggacgttccacgccaaaggcctctggctgtacctggcagggagcagcctgccctgtctcacgctgattggctctcctaattttgggtacaggtcagttcaccgggacctggaggcccagattgcgatcgtgacggagaaccaggccctgcagcagcagcttcaccaggagcaagagcagctctacctgaggtcaggtgtggtgtcctctgccaccttcgagcagccgagtcgccaggtgaagctgtgggtgaagatggtgactccactgatcaagaacttcttctgaggacagacaggaatggccttgatgaagatgacaggcatggccggggtcagctctttcagccgcgcttcagcgatgactccagtctgggtgtcccagcgagcccctgcagggacagtatggctgagggtcaggtgtgctgccagtaagtgagggaggggctggcaggaagggtggggtcctcacactccccgccctctgcagagctgggctctaccccaaaaggcttcaggccagctgccacggctggaagcagaggccttcgtaggtgatggcctgcatgttgtaactaccccgtcccgctgggctcaaggaacagctcagctaaagccctcgggttccatccgtttaaatctgtggcattttcagagcctcatctgtcagccttaatgtcagtggcaggaagtcataactccagctaaaaattacagagtaaagttccctgattcttaatgtgtaatgtctgccctatgtgtacatacacaatataattatacatctgtgcat

SEQ ID NO: 164957 - DNA, 792 bp, Homo sapiens
  Payload ID: 12490
  Gene Symbol: PGS1
  Gene Name: phosphatidylglycerophosphate synthase 1
  ENST ID: ENST00000587356
  CDS Start-End: 1-792
gcggcagctgcggcgggacccgtgttctggaggcgactgctgggcctcctgcctggccgcccagggctggccgcgctcctgggacgcctgtccgaccgcctcggcaggaaccgggaccgccagcgcaggagctgttccccaggtcacctccccaccttgctgcctgtgtccagaaggcgtgcaccggttccagtggatcagaaacctggttccagaatttggagtctccagttctcacgttagggtgctttcttccccggcagagtttttcgagctcatgaaggggcagataagagtagccaagaggcgggtcgtgatggcatccctctacctggggacaggtcctttggaacaggagctggtggactgcctggaaagtactctagaaaagtcactccaagcaaagtttccttcaaatctcaaggtctccattctcttagacttcacgcggggctcacgaggccggaagaactcccgcacaatgctgctcccactcctgcggaggttcccagagcaggtccgagtctccctctttcacacgccgcacctccgtgggctgcttcggctcctcatccctgagcgcttcaacgagaccatcggcctccagcacattaaggtgtacctcttcgacaacagcgtcatcttgagcgggaccgctacgtgttcctgcaggactgtgcggagattgccgacttcttcacggagctggtggacgcggtgggggatgtgtccctgcagctgcagggggacgacacggtgcaggtggtggatgggatggtgcatccttacaaa

SEQ ID NO: 164958 - DNA, 1944 bp, Homo sapiens
  Payload ID: 12490
  Gene Symbol: PGS1
  Gene Name: phosphatidylglycerophosphate synthase 1
  Uniprot ID: Q32NB8
  ENST ID: ENST00000589425
  CDS Start-End: 18-170
ggaagcggcgagtctccatggcggtggcggcggcagctgcggcgggacccgtgttctggaggcgactgctgggcctcctgcctggccgcccagggctggccgcgctcctgggacgcctgtccgaccgcctcggcaggaaccgggaccgccagcgcaggaggggcagataagagtagccaagaggcgggtcgtgatggcatccctctacctggggacaggtcctttggaacaggagctggtggactgcctggaaagtactctagaaaagtcactccaagcaaagtttccttcaaatctcaaggtctccattctcttagacttcacgcggggctcacgaggccggaagaactcccgcacaatgctgctcccactcctgcggaggttcccagagcaggtccgagtctccctctttcacacgccgcacctccgtgggctgcttcggctcctcatccctgagcgcttcaacgagaccatcggcctccagcacattaaggtgtacctcttcgacaacagcgtcatcttgagcgggactgtgcggagattgccgacttcttcacggagctggtggacgcggtgggggatgtgtccctgcagctgcagggggacgacacggtgcaggtggtggatgggatggtgcatccttacaaaggggaccgggccgagtactgcaaggcagccaataagagggtcatggatgtgatcaactcagccaggacccgccagcagatgctgcatgcccagaccttccacagcaactctcttttgacccaggaagatgcagcagctgctggggatcgcagaccagcccctgacacctggatttatccgctgattcagatgaagcccttcgagattcaaatcgatgagattgtcactgagaccctgttgactgaggcggagcgcggggcaaaggtctacctcaccactggctatttcaacctgacccaggcctacatggacctggtcttgggcactcgggctgagtaccagatcctgctggcctcaccagaggtgaatggcttctttggggccaagggggtggccggcgccatcccagcggcctatgtgcacatcgagcgacagttcttcagtgaggtgtgcagcctgggacagcaggagcgggtccagcttcaggagtactggcggaggggctggacgttccacgccaaaggcctctggctgtacctggcagggagcagcctgccctgtctcacgctgattggctctcctaattttgggtacaggtcagttcaccgggacctggaggcccagattgcgatcgtgacggagaaccaggccctgcagcagcagcttcaccaggagcaagagcagctctacctgaggtcaggtgtggtgtcctctgccaccttcgagcagccgagtcgccaggtgaagctgtgggtgaagatggtgactccactgatcaagaacttcttctgaggacagacaggaatggccttgatgaagatgacaggcatggccggggtcagctctttcagccgcgcttcagcgatgactccagtctgggtgtcccagcgagcccctgcagggacagtatggctgagggtcaggtgtgctgccagtaagtgagggaggggctggcaggaagggtggggtcctcacactccccgccctctgcagagctgggctctaccccaaaaggcttcaggccagctgccacggctggaagcagaggccttcgtaggtgatggcctgcatgttgtaactaccccgtcccgctgggctcaaggaacagctcagctaaagccctcgggttccatccgtttaaatctgtggcattttcagagcctcatctgtcagccttaatgtcagtggcaggaagtcataactccagctaaaaattacagagtaaagttccctgattcttaatgtgtaatgtctgccctatgtgtacatacacaatataattatacatctgtgcat

SEQ ID NO: 164959 - DNA, 1168 bp, Homo sapiens
  Payload ID: 12490
  Gene Symbol: PGS1
  Gene Name: phosphatidylglycerophosphate synthase 1
  ENST ID: ENST00000589689
  CDS Start-End: 16-1168
aagcggcgagtctccatggcggtggcggcggcagctgcggcgggacccgtgttctggaggcgactgctgggcctcctgcctggccgcccagggctggccgcgctcctgggacgcctgtccgaccgcctcggcaggaaccgggaccgccagcgcaggaggtcaccatggctgttattggctcccttgctgtccccagctgttccccaggtcacctccccaccttgctgcctgtgtccagaaggcgtgcaccggttccagtggatcagaaacctggttccagaatttggagtctccagttctcacgttagggtgctttcttccccggcagagtttttcgagctcatgaaggtggactgcctggaaagtactctagaaaagtcactccaagcaaagtttccttcaaatctcaaggtctccattctcttagacttcacgcggggctcacgaggccggaagaactcccgcacaatgctgctcccactcctgcggaggttcccagagcaggtccgagtctccctctttcacacgccgcacctccgtgggctgcttcggctcctcatccctgagcgcttcaacgagaccatcggcctccagcacattaaggtgtacctcttcgacaacagcgtcatcttgagcggtgcaaacctgagtgactcctacttcaccaaccgccaggaccgctacgtgttcctgcaggactgtgcggagattgccgacttcttcacggagctggtggacgcggtgggggatgtgtccctgcagctgcagggggacgacacggtgcaggtggtggatgggatggtgcatccttacaaaggggaccgggccgagtactgcaaggcagccaataagagggtcatggatgtgatcaactcagccaggacccgccagcagatgctgcatgcccagaccttccacagcaactctcttttgacccaggaagatgcagcagctgctggggatcgcagaccagcccctgacacctggatttatccgctgattcagatgaagcccttcgagattcaaatcgatgagattgtcactgagaccctgttgactgaggcggagcgcggggcaaaggtctacctcaccactggctatttcaacctgacccaggcctacatggacctggtcttgggcactcgggctgagtaccagatcctgctgg

SEQ ID NO: 164960 - DNA, 988 bp, Homo sapiens
  Payload ID: 12490
  Gene Symbol: PGS1
  Gene Name: phosphatidylglycerophosphate synthase 1
  ENST ID: ENST00000592043
  CDS Start-End: 1-988
cggtggcggcggcagctgcggcgggacccgtgttctggaggcgactgctgggcctcctgcctggccgcccagggctggccgcgctcctgggacgcctgtccgaccgcctcggcaggaaccgggaccgccagcgcaggaggtcaccatggctgttattggctcccttgctgtccccagctgttccccaggtcacctccccaccttgctgcctgtgtccagaaggcgtgcaccggttccagtggatcagaaacctggttccagaatttggagtctccagttctcacgttagggtgctttcttccccggcagagtttttcgagctcatgaaggggcagataagagtagccaagaggcgggtcgtgatggcatccctctacctggggacaggtcctttggaacaggagctggtggactgcctggaaagtactctagaaaagtcactccaagcaaagtttccttcaaatctcaaggtctccattctcttagacttcacgcggggctcacgaggccggaagaactcccgcacaatgctgctcccactcctgcggaggttcccagagcaggtccgagtctccctctttcacacgccgcacctccgtgggctgcttcggctcctcatccctgagcgcttcaacgagaccatcggcctccagcacattaaggtgtacctcttcgacaacagcgtcatcttgagcggtgcaaacctgagtgactcctacttcaccaaccgccaggaccgctacgtgttcctgcaggactgtgcggagattgccgacttcttcacggagctggtggacgcggtgggggatgtgtccctgcagctgcagggggacgacacggtgcaggtggtggatgggatggtgcatccttacaaaggggaccgggccgagtactgcaaggcagccaataagagggtcatggatgtgatcaactcagccaggacccgccagcagatgctgcatgcccagaccttccacagcaactctct

SEQ ID NO: 164961 - DNA, 572 bp, Homo sapiens
  Payload ID: 12490
  Gene Symbol: PGS1
  Gene Name: phosphatidylglycerophosphate synthase 1
  ENST ID: ENST00000586019
  CDS Start-End: 1-398
acctcaccactggctatttcaacctgacccaggcctacatggacctggtcttgggcactcgggctgagtaccagatcctgctggcctcaccagaggtgaatggcttctttggggccaagggggtggccggcgccatcccagcggcctatgtgcacatcgagcgacagttcttcagtgaggtgtgcagcctgggacagcaggagcgggtccagcttcaggagtactggcggaggggctggacgttccacgccaaaggagcaagagcagctctacctgaggtcaggtgtggtgtcctctgccaccttcgagcagccgagtcgccaggtgaagctgtgggtgaagatggtgactccactgatcaagaacttcttctgaggacagacaggtgctgtctctagcatcacctctcagcacgattttcccgagagttcacaggtggggcaggtggttgttctgactcaaccagagcttccagagggctctttgatccctttctcagttaaacacagagcagcatcttcaggggtatggcagctgtcctcaaagttagaagctggatgctaaattaggca

SEQ ID NO: 164962 - DNA, 584 bp, Homo sapiens
  Payload ID: 12490
  Gene Symbol: PGS1
  Gene Name: phosphatidylglycerophosphate synthase 1
  ENST ID: ENST00000586355
  CDS Start-End: 1-345
gcgccatcccagcggcctatgtgcacatcgagcgacagttcttcagtgaggtgtgcagcctgggacagcaggagcgggtccagcttcaggagtactggcggaggggctggacgttccacgccaaaggtcagttcaccgggacctggaggcccagattgcgatcgtgacggagaaccaggccctgcagcagcagcttcaccaggagcaagagcagctctacctgaggtcaggtgtggtgtcctctgccaccttcgagcagccgagtcgccaggtgaagctgtgggtgaagatggtgactccactgatcaagaacttcttctgaggacagacaggtgctgtctctagcatcacctctcagcacgattttcccgagagttcacaggtggggcaggtggttgttctgactcaaccagagcttccagagggctctttgatccctttctcagttaaacacagagcagcatcttcaggggtatggcagctgtcctcaaagttagaagctggatgctaaattaggcagtctgttcactttccatctggtacccactccactaagtcccaaggcgcctgtgctggggtcggca

SEQ ID NO: 164963 - DNA, 1700 bp, Homo sapiens
  Payload ID: 12490
  Gene Symbol: PGS1
  Gene Name: phosphatidylglycerophosphate synthase 1
  ENST ID: ENST00000588169
  CDS Start-End: 5-259
ctccatggcggtggcggcggcagctgcggcgggacccgtgttctggaggcgactgctgggcctcctgcctggccgcccagggctggccgcgctcctgggacgcctgtccgaccgcctcggcaggaaccgggaccgccagcgcaggagctgttccccaggtcacctccccaccttgctgcctgtgtccagaaggcgtgcaccggttccagtggatcagaaacctggttccagaatttggagtctccagttctcacgttagggtgctttcttccccggcagagtttttcgagctcatgaaggtggactgcctggaaagtactctagaaaagtcactccaagcaaagtttccttcaaatctcaaggtctccattctcttagacttcacgcggggctcacgaggccggaagaactcccgcacaatgctgctcccactcctgcggaggttcccagagcaggtccgagtctccctctttcacacgccgcacctccgtgggctgcttcggctcctcatccctgagcgcttcaacgagaccatcggcctccagcacattaaggtgtacctcttcgacaacagcgtcatcttgagcggtgcaaacctgagtgactcctacttcaccaaccgccaggaccgctacgtgttcctgcaggactgtgcggagattgccgacttcttcacggagctggtggacgcggtgggggatgtgtccctgcagctgcagggggacgacacggtgcaggtggtggatgggatggtgcatccttacaaaggggaccgggccgagtactgcaaggcagccaataagagggtcatggatgtgatcaactcagccaggacccgccagcagatgctgcatgcccagaccttccacagcaactctcttttgacccaggaagatgcagcagctgctggggatcgcagaccagcccctgacacctggatttatccgctgattcagatgaagcccttcgagattcaaatcgatgagattgtcactgagaccctgttgactgaggcggagcgcggggcaaaggtctacctcaccactggctatttcaacctgacccaggcctacatggacctggtcttgggcactcgggctgagtaccagatcctgctggcctcaccagaggtgaatggcttctttggggccaagggggtggccggcgccatcccagcggcctatgtgcacatcgagcgacagttcttcagtgaggtgtgcagcctgggacagcaggagcgggtccagcttcaggagtactggcggaggggctggacgttccacgccaaaggcctctggctgtacctggcagggagcagcctgccctgtctcacgctgattggctctcctaattttgggtacaggtcagttcaccgggacctggaggcccagattgcgatcgtgacggagaaccaggccctgcagcagcagcttcaccaggagcaagagcagctctacctgaggtcaggtgtggtgtcctctgccaccttcgagcagccgagtcgccaggtgaagctgtgggtgaagatggtgactccactgatcaagaacttcttctgaggacagacaggtgctgtctctagcatcacctctcagcacgattttcccgagagttcacaggaatggccttgatgaagatgacaggcatggccggggtcagctctttcagccgcgcttcagcgatgactccagtctgggtgt

SEQ ID NO: 164964 - DNA, 2033 bp, Homo sapiens
  Payload ID: 12490
  Gene Symbol: PGS1
  Gene Name: phosphatidylglycerophosphate synthase 1
  Uniprot ID: Q32NB8
  ENST ID: ENST00000589426
  CDS Start-End: 10-1374
cgagtctccatggcggtggcggcggcagctgcggcgggacccgtgttctggaggcgactgctgggcctcctgcctggccgcccagggctggccgcgctcctgggacgcctgtccgaccgcctcggcaggaaccgggaccgccagcgcaggaggtcaccatggctgttattggctcccttgctgtccccagctgttccccaggtcacctccccaccttgctgcctgtgtccagaaggcgtgcaccggttccagtggatcagaaacctggttccagaatttggagtctccagttctcacgttagggtgctttcttccccggcagagtttttcgagctcatgaaggtggactgcctggaaagtactctagaaaagtcactccaagcaaagtttccttcaaatctcaaggtctccattctcttagacttcacgcggggctcacgaggccggaagaactcccgcacaatgctgctcccactcctgcggaggttcccagagcaggtccgagtctccctctttcacacgccgcacctccgtgggctgcttcggctcctcatccctgagcgcttcaacgagaccatcggcctccagcacattaaggtgtacctcttcgacaacagcgtcatcttgagcggtgcaaacctgagtgactcctacttcaccaaccgccaggaccgctacgtgttcctgcaggactgtgcggagattgccgacttcttcacggagctggtggacgcggtgggggatgtgtccctgcagctgcagggggacgacacggtgcaggtggtggatgggatggtgcatccttacaaaggggaccgggccgagtactgcaaggcagccaataagagggtcatggatgtgatcaactcagccaggacccgccagcagatgctgcatgcccagaccttccacagcaactctcttttgacccaggaagatgcagcagctgctggggatcgcagaccagcccctgacacctggatttatccgctgattcagatgaagcccttcgagattcaaatcgatgagattgtcactgagaccctgttgactgaggcggagcgcggggcaaaggtctacctcaccactggctatttcaacctgacccaggcctacatggacctggtcttgggcactcgggctgagtaccagatcctgctggcctcaccagaggtgaatggcttctttggggccaagggggtggccggcgccatcccagcggcctatgtgcacatcgagcgacagttcttcagtgaggtgtgcagcctgggacagcaggagcgggtccagcttcaggagtactggcggaggggctggacgttccacgccaaaggtcagttcaccgggacctggaggcccagattgcgatcgtgacggagaaccaggccctgcagcagcagcttcaccaggagcaagagcagctctacctgaggtcaggtgtggtgtcctctgccaccttcgagcagccgagtcgccaggtgaagctgtgggtgaagatggtgactccactgatcaagaacttcttctgaggacagacaggaatggccttgatgaagatgacaggcatggccggggtcagctctttcagccgcgcttcagcgatgactccagtctgggtgtcccagcgagcccctgcagggacagtatggctgagggtcaggtgtgctgccagtaagtgagggaggggctggcaggaagggtggggtcctcacactccccgccctctgcagagctgggctctaccccaaaaggcttcaggccagctgccacggctggaagcagaggccttcgtaggtgatggcctgcatgttgtaactaccccgtcccgctgggctcaaggaacagctcagctaaagccctcgggttccatccgtttaaatctgtggcattttcagagcctcatctgtcagccttaatgtcagtggcaggaagtcataactccagctaaaaattacagagtaaagttccctgattcttaatgtgtaatgtctgccctatgtgtacatacacaatataattatacatctgtgcat

SEQ ID NO: 164965 - DNA, 567 bp, Homo sapiens
  Payload ID: 12490
  Gene Symbol: PGS1
  Gene Name: phosphatidylglycerophosphate synthase 1
  ENST ID: ENST00000586510
  CDS Start-End: 18-470
ggaagcggcgagtctccatggcggtggcggcggcagctgcggcgggacccgtgttctggaggcgactgctgggcctcctgcctggccgcccagggctggccgcgctcctgggacgcctgtccgaccgcctcggcaggaaccgggaccgccagcgcaggagatggagtcccactctgtcgcccaggctggagtgcaatggcacgatctcggctcactgcaagctccgcctcccgggttcaagcgattctcctgcctcagcctccggagtagctgggaatacaggtcaccatggctgttattggctcccttgctgtccccagctgttccccaggtcacctccccaccttgctgcctgtgtccagaaggcgtgcaccggttccagtggatcagaaacctggttccagaatttggagtctccagttctcacgttagggtgctttcttccccggcagagtttttcgagctcatgaaggggcagataagagtagccaagaggcgggtcgtgatggcatccctctacctggggacaggtcctttggaacaggagctggtggactgcctggaaag

SEQ ID NO: 164966 - DNA, 5142 bp, Homo sapiens
  Payload ID: 12491
  Gene Symbol:
  Gene Name: Phosphatidylinositol 3-kinase regulatory subunit beta  [Source:UniProtKB/Swiss-Prot
  Acc:O00459]
  Uniprot ID: O00459
  ENST ID: ENST00000593731
  CDS Start-End: 561-2747
gggccaggccgctcggaaccgtggcggcggcggaggcggggatcccgcggctgcggcgacggtggccgcggtggagccacggggcgggcttggcttggtgtgacggcggctgcggcggcggtggcggccgcgaccaggtcggcgtcctcagctggccgagcatggtggcagcctgcacccttggctcccttgtctggtgcagccagcagagccgccagccttgggcgcccatggccctccgtgtgagggcgtgagcggcctgccccagcctcacctgctgatggaggactcaatggcccagtgacctgacaccacaccaccaactccctcccaccagctgacgaatggtggacccagtgacgagtggcccttgtaagggtcatggaataatttgaagcgaggcatgagcggcccctgtggtcgcctgtgactgctggagatagaggtcccagcaccccaagccaacccagcggaccctcccagccctgcttcaaccaatggggccagtggggctccaagcagccacctaaccatccagaccccaccccactcacgcggccatggcgggccctgagggcttccagtaccgcgctctgtacccgttccgccgggagcggccggaggacctggagctgctgcccggcgacgtgctggtagtgagccgggcggccttgcaggcgctgggcgtggccgagggtggcgagcgctgcccacagagcgtgggctggatgcccggcctcaacgagcgcacacggcagcgaggtgacttccctggcacctatgtggagttcctggggcccgtggccctggcccggcccggccctcgcccacggggcccccgcccactgcccgccaggccccgtgatggggcccctgagccaggcctcacactccccgacttgcccgagcagttctccccacctgatgtggctccccctcttctggtgaagcttgtggaggccattgaaaggacagggctggacagcgaatctcactaccgcccggagctgcccgcaccgcgtacagactggtccctgagcgacgtggatcagtgggacacggcagccctggctgacggcattaagagcttcctgctggcactgcccgcgccgctcgtgacccccgaggcctcggccgaggcgcgccgggccctgcgggaggccgcggggcccgtggggccggcgctggagccaccgacgctgccgctgcaccgcgcgctcacgctgcgcttcctgctccagcacctgggccgcgtggccagccgcgccccggccctgggtcccgcggtccgggccctgggcgccacctttgggccgctgctgctgcgcgcgccgccgccgccgtcctcgccgccgccagggggcgctcccgacgggagtgagcccagccctgacttcccggcgctgctggtggagaagctgcttcaggaacacttggaagagcaggaggttgcgcccccagcgctgccgcctaaaccccccaaggcaaagccggcctccacagtcctggccaatggagggagcccaccctccctgcaggatgctgagtggtactggggggacatttcaagggaggaggtgaacgagaaactccgggacactcccgatggcaccttcctagtccgagatgcttctagcaagatccagggcgagtacacgctgaccctcaggaaaggcgggaacaataagctgatcaaggtcttccaccgagatgggcactatggcttctcagagccactcaccttctgctccgttgtggacctcatcaatcactaccgccacgagtctctggcccagtacaatgccaagctggacacacggctcctctaccctgtgtccaaataccagcaggaccagattgtcaaggaggacagcgtggaggcagtgggcgcccagcttaaggtctatcaccagcagtaccaggacaagagccgcgagtatgaccagctttatgaagagtacacacggacctcccaggagctgcagatgaagcgtactgcaattgaggccttcaatgagactatcaagatctttgaagagcagggccagactcaagagaaatgcagcaaggaatacctggagcgcttccggcgtgagggcaacgagaaagagatgcaaaggatcctgctgaactccgagcggctcaagtcccgcattgccgagatccatgagagccgcacgaagctggagcagcagctgcgggcccaggcctcggacaacagagagatcgacaagcgcatgaacagcctcaagccggacctcatgcagctgcgcaagatccgagaccagtacctcgtgtggctcacccagaaaggcgcccggcagaagaaaatcaacgagtggctggggattaaaaatgagactgaggaccagtacgcactcatggaggacgaggacgatctcccgcaccacgaggaacgcacttggtacgtgggcaagatcaaccgcacgcaggcagaggagatgctgagtggcaagcgggatggcaccttcctcatccgcgagagcagccagcggggctgctacgcctgctccgtggtagtggacggcgacaccaagcactgcgtcatctaccgcacggccaccggcttcggcttcgcggagccctacaacctgtacgggtcgctgaaggagctggtgctgcactaccagcacgcctcgctggtgcagcacaacgacgcgctcaccgtcaccctggcgcacccagtgcgcgccccgggccccggcccgccgcctgccgcccgctgagcaccgaggacccgccccaagcagagccgcccctgggcccgtctgcgccggaggctgcggcggcgggagccacggaccagaccagccacatccaggggtcctcatttctccggctctggctcttgtttggggttctctcaccctctttctctttccttccctcccccattctccagatctccctctgtctccttttctctgtctttcttggcccctgtctctctccatgttgggggtcctaactcccccaccccatatctacgtgtcctccgggcattgccctctccatggctctggtcaccctgaccctctgccctgcccaccgcaggtcccccggggtcccggaagccccttctggctgcacctgccatgtttacagagggcccctgggctgcgcggccccagcctgggcaccctgatttttaagccatagacctggggtcagggcaggaaggaacttcactctgctgcttccgagaacctcggccgtgacattcggggccgggcgggacccgccccacagactccaacttcccctccaaaccccgaagtgaaacccgccaccgggttacccccacaagggggccgctgcgagaagttcacccacccccgaaaaaataattaaactcgcaggccaggcacggtggctcatgcctgtaatcccagcactttgggaggccaagacgggcggatcttttgaggtcgggagttggaggccagcctggccaaaatggcaaaaccccgcatctactaaaatacaaaaattagccgggcgtggtggcggccgcctgtaatcccagctacttgggaggctgaggcgtgagaatctcttgaacccaggagatggaggttgcagtgagcagagatcgtgccactgcactccagcctgggtaacagagggagactcctccgtctcaaaaaaataaataaataaacttgtgagctggccccaacccctcctaggaatcacagctccccgtactggtgccgccgcagtggccaagttgcgacactgcccacggcccctccctctgatgcagattcagggcttctcttcgatcatgttgggttttgattctgtttttccttgactgcaaaaccctctttcctctcctcttttgggacaagagccctggttttctacgctgcccttggccaccacactgcctgccccacgagctgggaggcaggttttgtacgggctggtgcctggtaactactggaaaaattgtagcaattatatttatggttatttcttcaatcccacccggcatagggctattctctctgccttcactgttggggccactgtcctgtgtaggcaccaaggcctgaccatgccatccagaagccccagcctgggacaactctcccccacctgcctctgagccctccatggcagccgctgcagtcgccacacctttgcccctgctgcgatgaccctgtcgccacttctgctgttcctgccaccgctgctgctgctgctggacgtccccacggcggcggtgcaggcgtcccctctgcaagcgttagacttctttgggaatgggccaccagttaactacaagacaggcaatctatacctgcgggggcccctgaagaagtccaatgcaccgcttgtcaatgtgaccctctactatgaagcactgtgcggtggctgccgagccttcctgatccgggagctcttcccaacatggctgttggtcatggagatcctcaatgtcacgctggtgccctacggaaacgcacaggaacaaaatgtcagtggcaggtgggagttcaagtgccagcatggagaagaggagtgcaaattcaacaaggtggaggcctgcgtgttggatgaacttgacatggagctagccttcctgaccattgtctgcatggaagagtttgaggacatggagagaagtctgccactatgcctgcagctctacgccccagggctgtcgccagacactatcatggagtgtgcaatgggggaccgcggcatgcagctcatgcacgccaacgcccagcggacagatgctctccagccaccacacgagtatgtgccctgggtcaccgtcaatgggaaacccttggaagatcagacccagctccttacccttgtctgccagttgtaccagggcaagaagccggatgtctgcccttcctcaaccagctccctcaggagtgtttgcttcaagtgatggccggtgagctgcggagagctcatggaaggcgagtgggaacccggctgcctgcctttttttctgatccagaccctcggcacctgctacttaccaactggaaaattttatgcatcccatgaagcccagatacacaaaattccaccccatgatcaagaatcctgctccactaagaatggtgctaaagtaaaactagtttaataagc

SEQ ID NO: 164967 - DNA, 9443 bp, Homo sapiens
  Payload ID: 12492
  Gene Symbol: PIK3C3
  Gene Name: phosphatidylinositol 3-kinase, catalytic subunit type 3
  Uniprot ID: Q8NEB9
  ENST ID: ENST00000262039
  CDS Start-End: 87-2750
cgtgttgtggggctcagctggttcatttatgttgtttttcctgtacctaagttcccgctgtaggtggtacctttgcagacggtgcgatgggggaagcagagaagtttcactacatctatagttgtgacctggatatcaacgtccagcttaagataggaagcttggaagggaagagagaacaaaagagttataaagctgtcctggaagacccaatgttgaagttctcaggactatatcaagagacatgctctgatctttatgttacttgtcaagtttttgcagaagggaagcctttggccttgccagtgagaacatcctacaaagcatttagtacaagatggaactggaatgaatggctgaaactaccagtaaaataccctgacctgcccaggaatgcccaagtggccctcaccatatgggatgtgtatggtcccggaaaagcagtgcctgtaggaggaacaacggtttcgctctttggaaaatacggcatgtttcgccaagggatgcatgacttgaaagtctggcctaatgtagaagcagatggatcagaacccacaaaaactcctggcagaacaagtagcactctctcagaagatcagatgagccgtcttgccaagctcaccaaagctcatcgacaaggacacatggtgaaagtagattggctggatagattgacatttagagaaatagaaatgataaatgagagtgaaaaacgaagttctaatttcatgtacctgatggttgaatttcgatgtgtcaagtgtgatgataaggaatatggtattgtttattatgaaaaggacggtgatgaatcatctccaattttaacaagttttgaattagtgaaagttcctgacccccagatgtctatggagaatttagttgagagcaaacaccacaagcttgcccggagtttaagaagtggaccttctgaccacgatctgaaacccaatgctgccacgagagatcagttaaatattattgtgagttatccaccaaccaagcaacttacatatgaagaacaagatcttgtttggaagtttagatattatcttacgaatcaagaaaaagccttgacaaaattcttgaaatgtgttaattgggatctacctcaagaggccaaacaggccttggaacttctgggaaaatggaagccgatggatgtagaggactccttggagctgttatcctctcattacaccaacccaactgtgaggcgttatgctgttgcccggttgcgacaggccgatgatgaggatttgttgatgtacctattacaattggtccaggctctcaaatatgaaaattttgatgatataaagaatggattggaacctaccaagaaggatagtcagagttcagtgtcagaaaatgtgtcaaattctggaataaattctgcagaaatagatagctcccaaattataaccagcccccttccttcagtctcttcacctcctcctgcatcaaaaacaaaagaagttccagatggcgaaaatctggaacaagatctctgtaccttcttgatatcgagagcctgcaaaaactcaacactggctaattatttatactggtatgtgatagtggaatgtgaagatcaagatactcagcagagagatccaaagacccatgagatgtacttgaacgtaatgagaagattcagccaagcattgttgaagggtgataagtctgtcagagttatgcgttctttgctggctgcacaacagacatttgtagatcggttggtgcatctaatgaaggcagtacaacgcgaaagtggaaatcgtaagaaaaagaatgagagactacaggcattgcttggagataatgaaaagatgaatttgtcagatgtggaacttatcccgttgcctttagaaccccaagtgaaaattagaggaataattccggaaacagctacactgtttaaaagtgcccttatgcctgcacagttgttttttaagacggaagatggaggcaaatatccagttatatttaagcatggagatgatttacgtcaagatcaacttattcttcaaatcatttcactcatggacaagctgttacggaaagaaaatctggacttgaaattgacaccttataaggtgttagccaccagtacaaaacatggcttcatgcagtttatccagtcagttcctgtggctgaagttcttgatacagagggaagcattcagaacttttttagaaaatatgcaccaagtgagaatgggccaaatgggattagtgctgaggtcatggacacttacgttaaaagctgtgctggatattgcgtgatcacctatatacttggagttggagacaggcacctggataaccttttgctaacaaaaacaggcaaactcttccacatagactttggatatattttgggtcgggatccaaagcctcttcctccaccaatgaagctgaataaagaaatggtagaaggaatggggggcacacagagtgagcagtaccaagagttccgtaaacagtgttacacggctttcctccacctgcgaaggtattctaatctgattttgaacttgttttccttgatggttgatgcaaacattccagatattgcacttgaaccagataaaactgtgaaaaaggttcaggataaattccgcttagacctgtcggatgaagaggctgtgcattacatgcagagtctgattgatgagagtgtccatgctctttttgctgcagtggtggaacagattcacaagtttgcccagtactggagaaaatgaaactgggattgacccatcaagatgcttggctcaataagaaaaccacgttaggagcaacctttgtatattggagacttcagagtaaccagcaaggaagagaaatcttaatcttcaagttaccatattttccaaatattacatggtacctgagttctgcttccttggatgtcattgcttaaatatagtcttgaagggcttgttttgaaatattgtatatattttttcaaatgtatacattgttaataaattaagaaatgagaaacattcttatttatgtacatgttatgagagttctggaggaagtaatatgttgaaatagtaaaacattttagtttttgagtttaaaatgttattttttcctcttatatcttcatatcaggacagcagtaacctgaatttagattgtcacagtttacaagtttttgtttgttccttctttcctctctcttctcccactcacttttgtgtgttgtttgtttttgcctaatttacatgtttaaagttctacttaaaatttttcttcaagttttacatgtgatggctcattcttctgcagttcaagaattgcttatatttttagaagatactcattttctcttacaaataattaattttttgtaaactacagttaatagttcttctagcttgtaagtgtgtaaagtagaatatgaaaatgtggctatttagataactggccaaaaggtcatatgaccaccagttttagtattgagcataagatatttttacatattcatgtaagacaatgtaaattgtctttctgcaataaattttttggatgcaaatttagatttcaaaagctttttgatgttataaaggagttgaggaacaaaaagctctttgaaatagctcacctagacctgttaatgtaatatattctttctgaattaagcaaaattttttttgtcttttaagactagaactaatccctctagcttttttactggaactttggggaaaaagaacaaatacaaatatacaaatgatatgaacaatatggtaataatcttttgcaacttaatatgttacatagtcatatgacttggtcttggaagaaaaagaattgttttggtgctgaataaatattagaaatcaagtgacagagaagatgaaggtaaaattgtggcacagtttcagagaatgccgttaatgataacgtgttatttgtctcaaattcttagccctgggcttgcctcttcagagtggggttaccggcgagagggcaagcatgtaattaagagacactctagaggcatatggaatatagtttgtataaaacatacctgctgattagaaaaatggtaaaaatgaaaatacctttgtacatcatcttaagagagcttatatataaactaaatgggcaggctccatcgtctacctttctttttcttttcttcacatgtttatgtcttttttgttattagtcagacatttttagccctctgtatgctcattcttgtagttctatttctattgaaacttcctccaaaacttttctctgaattacccttgttgaaactgacctttcttccgtgtgaactcctacacttgcatctcctatttcaggatttggcatactttttctttaatgggctaagaaagtaaatatcttcagctttggggggcatatgatcccaatagcatcaacttaactctgctaactggaaggcaaaagtgtatcatcttactcgtctttataaactccacagcactctgcatagatatgaccatgtttataaggaactcaataaataattttgacacaaacatgaaattctagaagggcagacactgacaactagtaaggaagttgatcatgagtaactttgtattcagtgccaccttaacaagaattgtaaagaggataaacctttctaggaaggttgatgcgtgttgggtgaggaaggagcatctctcaggagggtaaacagtagctgtggttttgctgagagattttggctgtgagtgacaagcctatatcaaaaagaaaagtggcttatcaatctcagtttttattgctcaaagcaattctttactcctattttttccaaattccattgtttttactctttagagctctatcctcagagtgtagtctgcatatttctttattatcattgccatgtgacttctttggtgacaagttcagtgatatttcaagcatgatgttttgagtttgagaaatgtatttgtgaggacacatcactttaattaaaaaagtgtgagtactatggtcattaagttattcagagtgagatttctgagaggagaagagagaatgtagatggcagttattgagagtggggctataggacaaaaagaagaaaagtatggttaacattgccaaataaagggtcatacagccttgctttttgctggagttagcaaaaatcattctccatatgatagttttagatgttccccagctcatttgtattattgagttttcagctgggtatatattataataacagtcaacatgatgtaggggctcagtattacatggcagggctatactaattgcttcatatgccttatctcattattctgtgagatagaattgtctcctcattttttagttgaaataactgaagtttaaagcaattgaatcatctgcccaaggataagctgctggtgagagcagagttgggatttgaagtcgagttagaccccagtgatcacagtcttgacgattaaattcttccagctttcatttttcactgagataatggtagtgatagtactgacctctaatgtgtgcatttgtgggtatgtggtccattcagctttaatccccagaagacaaggcttattccttttcttatttttggtcatgttttatttttccattgcttttaacaggattaccaaaggcacactcagtagtcagtaaacacatttctaggaaaggtgttgtgtcatcatgccacatattcatactttccttgggttggaaaatagatcattcagtaaaaacatacaggaaaaatgaatcttgccaatgcaattgttaacctacaaccataatataccttaagtatatttttgcacataagtataacattgcgatttaaaacaataaaccagattgagattctaaggagcattttgtaagtaattactaatgtttattttagagagatcacacaacttcaaataaaaactgacatagattgaacaccttgagaataaactttagtgccaaatggaaaataattttttacaagtaaatttgaagaacaatgtgaactttctataattatatacagaaaatatactgatttgccaaaatgagtaattttgatatattaatatttcacttataagaatgcataccacctgatccaggatgggatccaggaacagaaaaagaacattaggtaaaaatgacagaaatctgaatatagtatagagtagctaaaaacaaaccaaaaaaaaaaaaaaaaaaaaaggaaaaacagaataagcctcagaagatagtgagcatcccacctgggtgaccacttagagaagctgaggtgggacccctgcatccgataagtggctgcactagaccacaggaaccagactccactgtaagaactagagtgggaatggacatgtcaaaacctcctgggaaccttattaaatgtgcacattcccaatccccactcctgagcagccaaatcaatctgcaggtgggccttgtgagttttcccaggggattccgatgcctgctagatttaaccagtagatgagatgttaagttatcctgtagtccagagattccacaggccagtgtcagggaacaggggccagggctgggaaggcataagaacagaagataaatttgaggctctgttacgctggtcatccaacccaaccaggtatctcttgttatatgctaacttcattttccctttcttgtccatagtgggaaaaaataatttttaactggctatgtagttaaaaaacctaacaaaaagcacttttctatataatgagtggtttatattaagaataggtacaatgtaaatactggtaagtgaaagttcattttgttcagtgctatgggctggtacattgcatttcaacactagttttttacttttatctaccctgagggtagataacccatattccaaaatacagtattattttcatttgctgtaacattttaagaaatatgtagtttctaaaacttcatatactttatatggaatatgaacaactttaatatgaataaatagtctagaaaaaaatttaggaaaaattgccatgaaatcatgagctaagtcaatggttattttaaaccacttaattttgagactagtatttcatacagaaaaagctaatactgatatcacacactaattgtgtataaaacactaggaatgtcaaaatagaacataagaaaatgagtctagtggacccactgcatagtgtaactttgggatgaatttaaaagaatatttaagtcacagtcaattttctgttggtctaattttaccaaataaccccctaaataagaagtctgatttatctaaaatagaagttaacatagcatcccagtattgccattctaaaactctggcatgtaaatgggagaaatggaaataagctcaaaatgggtagagtaacccatttctgcatgaaccatagaatttaactagaatttggctggctcatgcctgtaatgccagcactttgggaggccaaggcaggcagatcacttgagcccaggagtttgagaccagcccgggcaacatggtgaaactccatctcttcaaaaatatatatttgtgtgtgtgtgtgtgtgtatgtgcgtgcacaaaaattagctgagtgtggtggttcacacttgtaatcacagctacctgggaggctgaggcaggaggattgcttgagcctgggaggcagaggttgcagtgagctgagattgcaccattgcactgcagcctgggtaatagagcgagacaactctatctcaaaaaaaagaatttcactagaatttatatcttcagtgtttgcattagattgtcaccagcactatctgccttgtgactgtcaggactaatccttatatcatttatcttatgtcctttacctcagtttatgtctgtcaccacaagaaacccagacctccctaatcataccatatgccctggtcttacccacatacagctcggtacaactgcatttccccaaacctcagaactccttgggccatcactgtcagagacatttgaactagagcaactccatcttgagtagggactgggtataatgaagctgagacccactgggctgcattcccaggaagttaggcattcttagtcacaggatgagataggagattggctcaagataaggtcacaaagaccttgctgataaaacagtctgtggtaaagaagccagccaaaacccaccaaaaccaagacgggaatgaaagtgacctccggtcatcctcactgctcattatacgctagttataatgcattgacatgctaagagacactcccaccagcaccatgacagtttacaaatgccataacaacatcaggaagttaccctatatggtctaaaaaggggaggaaccctcagttctgagaatttccttgaaaattcatgaataatccaccccttgtttagcatatgatcaagaaataatcattaaaaaatagccaaccagcagctcatgctgctggtctgcctatggagtagccatcctttctttattaacctgctttcactttatggactcccctgaattcttctgcaggagatccaagaaccctctcttggagtcttaaccaggatccctttccagtaacttcagcaggatctgtgagtgccagtttccttctgtggtgcaaaactaggtgctaagtacactttttcccccctttcctctatttttaaaagaactttcagcccttttgaagtgggtacattgtctggagtacataccctggggttcattgttataggagaatttaggacacagacacacgaggagtttaggagcagaggtttaataggtagaagagaagggaaagagaaacagcttcctctatagatgtctgcactgacaccgtggctttaaggcatggcccatgatgtgtctccgagtggaaaagactggttggtggtgaatgcgccaaattttatagtccggtttgaggaggtggtttctgattggttgcatcatgtatgacgtttgcaaggtgcatgtggaaggctggtcgccccaccctaatcttatgcaaatgggctttccagttgattgggtccatcttgtgtaacacgtggctggcagagaagggaagatgaagccaccatcttgaaaatgtctagtccttagtttctgctggcattcacccatgcaagctgccagcttgtctatgtctgcagctcaactttacaggctgctctttgttagcaaatgatttggagcttcttttcattaaagaaaaaagccttaccgaggactcccatacccttgctttctgcttaagtgatttcttcttaactcctatgtcaattttatacagcatgaaataatgatgtatctataaatgagcctttgcaagattaccatttatcaaagaaaaccagtgatgtttagttaactgtttgtaaaaataaatggttagtagaatgtctaattcaataaatgtttcataaatgagtaaa

SEQ ID NO: 164968 - DNA, 9206 bp, Homo sapiens
  Payload ID: 12492
  Gene Symbol: PIK3C3
  Gene Name: phosphatidylinositol 3-kinase, catalytic subunit type 3
  ENST ID: ENST00000398870
  CDS Start-End: 39-2513
aagttcccgctgtaggtggtacctttgcagacggtgcgatgggggaagcagagaagtttcactacatctatagttgtgacctggatatcaacgtccagcttaagatctggaatgaatggctgaaactaccagtaaaataccctgacctgcccaggaatgcccaagtggccctcaccatatgggatgtgtatggtcccggaaaagcagtgcctgtaggaggaacaacggtttcgctctttggaaaatacggcatgtttcgccaagggatgcatgacttgaaagtctggcctaatgtagaagcagatggatcagaacccacaaaaactcctggcagaacaagtagcactctctcagaagatcagatgagccgtcttgccaagctcaccaaagctcatcgacaaggacacatggtgaaagtagattggctggatagattgacatttagagaaatagaaatgataaatgagagtgaaaaacgaagttctaatttcatgtacctgatggttgaatttcgatgtgtcaagtgtgatgataaggaatatggtattgtttattatgaaaaggacggtgatgaatcatctccaattttaacaagttttgaattagtgaaagttcctgacccccagatgtctatggagaatttagttgagagcaaacaccacaagcttgcccggagtttaagaagtggaccttctgaccacgatctgaaacccaatgctgccacgagagatcagttaaatattattgtgagttatccaccaaccaagcaacttacatatgaagaacaagatcttgtttggaagtttagatattatcttacgaatcaagaaaaagccttgacaaaattcttgaaatgtgttaattgggatctacctcaagaggccaaacaggccttggaacttctgggaaaatggaagccgatggatgtagaggactccttggagctgttatcctctcattacaccaacccaactgtgaggcgttatgctgttgcccggttgcgacaggccgatgatgaggatttgttgatgtacctattacaattggtccaggctctcaaatatgaaaattttgatgatataaagaatggattggaacctaccaagaaggatagtcagagttcagtgtcagaaaatgtgtcaaattctggaataaattctgcagaaatagatagctcccaaattataaccagcccccttccttcagtctcttcacctcctcctgcatcaaaaacaaaagaagttccagatggcgaaaatctggaacaagatctctgtaccttcttgatatcgagagcctgcaaaaactcaacactggctaattatttatactggtatgtgatagtggaatgtgaagatcaagatactcagcagagagatccaaagacccatgagatgtacttgaacgtaatgagaagattcagccaagcattgttgaagggtgataagtctgtcagagttatgcgttctttgctggctgcacaacagacatttgtagatcggttggtgcatctaatgaaggcagtacaacgcgaaagtggaaatcgtaagaaaaagaatgagagactacaggcattgcttggagataatgaaaagatgaatttgtcagatgtggaacttatcccgttgcctttagaaccccaagtgaaaattagaggaataattccggaaacagctacactgtttaaaagtgcccttatgcctgcacagttgttttttaagacggaagatggaggcaaatatccagttatatttaagcatggagatgatttacgtcaagatcaacttattcttcaaatcatttcactcatggacaagctgttacggaaagaaaatctggacttgaaattgacaccttataaggtgttagccaccagtacaaaacatggcttcatgcagtttatccagtcagttcctgtggctgaagttcttgatacagagggaagcattcagaacttttttagaaaatatgcaccaagtgagaatgggccaaatgggattagtgctgaggtcatggacacttacgttaaaagctgtgctggatattgcgtgatcacctatatacttggagttggagacaggcacctggataaccttttgctaacaaaaacaggcaaactcttccacatagactttggatatattttgggtcgggatccaaagcctcttcctccaccaatgaagctgaataaagaaatggtagaaggaatggggggcacacagagtgagcagtaccaagagttccgtaaacagtgttacacggctttcctccacctgcgaaggtattctaatctgattttgaacttgttttccttgatggttgatgcaaacattccagatattgcacttgaaccagataaaactgtgaaaaaggttcaggataaattccgcttagacctgtcggatgaagaggctgtgcattacatgcagagtctgattgatgagagtgtccatgctctttttgctgcagtggtggaacagattcacaagtttgcccagtactggagaaaatgaaactgggattgacccatcaagatgcttggctcaataagaaaaccacgttaggagcaacctttgtatattggagacttcagagtaaccagcaaggaagagaaatcttaatcttcaagttaccatattttccaaatattacatggtacctgagttctgcttccttggatgtcattgcttaaatatagtcttgaagggcttgttttgaaatattgtatatattttttcaaatgtatacattgttaataaattaagaaatgagaaacattcttatttatgtacatgttatgagagttctggaggaagtaatatgttgaaatagtaaaacattttagtttttgagtttaaaatgttattttttcctcttatatcttcatatcaggacagcagtaacctgaatttagattgtcacagtttacaagtttttgtttgttccttctttcctctctcttctcccactcacttttgtgtgttgtttgtttttgcctaatttacatgtttaaagttctacttaaaatttttcttcaagttttacatgtgatggctcattcttctgcagttcaagaattgcttatatttttagaagatactcattttctcttacaaataattaattttttgtaaactacagttaatagttcttctagcttgtaagtgtgtaaagtagaatatgaaaatgtggctatttagataactggccaaaaggtcatatgaccaccagttttagtattgagcataagatatttttacatattcatgtaagacaatgtaaattgtctttctgcaataaattttttggatgcaaatttagatttcaaaagctttttgatgttataaaggagttgaggaacaaaaagctctttgaaatagctcacctagacctgttaatgtaatatattctttctgaattaagcaaaattttttttgtcttttaagactagaactaatccctctagcttttttactggaactttggggaaaaagaacaaatacaaatatacaaatgatatgaacaatatggtaataatcttttgcaacttaatatgttacatagtcatatgacttggtcttggaagaaaaagaattgttttggtgctgaataaatattagaaatcaagtgacagagaagatgaaggtaaaattgtggcacagtttcagagaatgccgttaatgataacgtgttatttgtctcaaattcttagccctgggcttgcctcttcagagtggggttaccggcgagagggcaagcatgtaattaagagacactctagaggcatatggaatatagtttgtataaaacatacctgctgattagaaaaatggtaaaaatgaaaatacctttgtacatcatcttaagagagcttatatataaactaaatgggcaggctccatcgtctacctttctttttcttttcttcacatgtttatgtcttttttgttattagtcagacatttttagccctctgtatgctcattcttgtagttctatttctattgaaacttcctccaaaacttttctctgaattacccttgttgaaactgacctttcttccgtgtgaactcctacacttgcatctcctatttcaggatttggcatactttttctttaatgggctaagaaagtaaatatcttcagctttggggggcatatgatcccaatagcatcaacttaactctgctaactggaaggcaaaagtgtatcatcttactcgtctttataaactccacagcactctgcatagatatgaccatgtttataaggaactcaataaataattttgacacaaacatgaaattctagaagggcagacactgacaactagtaaggaagttgatcatgagtaactttgtattcagtgccaccttaacaagaattgtaaagaggataaacctttctaggaaggttgatgcgtgttgggtgaggaaggagcatctctcaggagggtaaacagtagctgtggttttgctgagagattttggctgtgagtgacaagcctatatcaaaaagaaaagtggcttatcaatctcagtttttattgctcaaagcaattctttactcctattttttccaaattccattgtttttactctttagagctctatcctcagagtgtagtctgcatatttctttattatcattgccatgtgacttctttggtgacaagttcagtgatatttcaagcatgatgttttgagtttgagaaatgtatttgtgaggacacatcactttaattaaaaaagtgtgagtactatggtcattaagttattcagagtgagatttctgagaggagaagagagaatgtagatggcagttattgagagtggggctataggacaaaaagaagaaaagtatggttaacattgccaaataaagggtcatacagccttgctttttgctggagttagcaaaaatcattctccatatgatagttttagatgttccccagctcatttgtattattgagttttcagctgggtatatattataataacagtcaacatgatgtaggggctcagtattacatggcagggctatactaattgcttcatatgccttatctcattattctgtgagatagaattgtctcctcattttttagttgaaataactgaagtttaaagcaattgaatcatctgcccaaggataagctgctggtgagagcagagttgggatttgaagtcgagttagaccccagtgatcacagtcttgacgattaaattcttccagctttcatttttcactgagataatggtagtgatagtactgacctctaatgtgtgcatttgtgggtatgtggtccattcagctttaatccccagaagacaaggcttattccttttcttatttttggtcatgttttatttttccattgcttttaacaggattaccaaaggcacactcagtagtcagtaaacacatttctaggaaaggtgttgtgtcatcatgccacatattcatactttccttgggttggaaaatagatcattcagtaaaaacatacaggaaaaatgaatcttgccaatgcaattgttaacctacaaccataatataccttaagtatatttttgcacataagtataacattgcgatttaaaacaataaaccagattgagattctaaggagcattttgtaagtaattactaatgtttattttagagagatcacacaacttcaaataaaaactgacatagattgaacaccttgagaataaactttagtgccaaatggaaaataattttttacaagtaaatttgaagaacaatgtgaactttctataattatatacagaaaatatactgatttgccaaaatgagtaattttgatatattaatatttcacttataagaatgcataccacctgatccaggatgggatccaggaacagaaaaagaacattaggtaaaaatgacagaaatctgaatatagtatagagtagctaaaaacaaaccaaaaaaaaaaaaaaaaaaaaaggaaaaacagaataagcctcagaagatagtgagcatcccacctgggtgaccacttagagaagctgaggtgggacccctgcatccgataagtggctgcactagaccacaggaaccagactccactgtaagaactagagtgggaatggacatgtcaaaacctcctgggaaccttattaaatgtgcacattcccaatccccactcctgagcagccaaatcaatctgcaggtgggccttgtgagttttcccaggggattccgatgcctgctagatttaaccagtagatgagatgttaagttatcctgtagtccagagattccacaggccagtgtcagggaacaggggccagggctgggaaggcataagaacagaagataaatttgaggctctgttacgctggtcatccaacccaaccaggtatctcttgttatatgctaacttcattttccctttcttgtccatagtgggaaaaaataatttttaactggctatgtagttaaaaaacctaacaaaaagcacttttctatataatgagtggtttatattaagaataggtacaatgtaaatactggtaagtgaaagttcattttgttcagtgctatgggctggtacattgcatttcaacactagttttttacttttatctaccctgagggtagataacccatattccaaaatacagtattattttcatttgctgtaacattttaagaaatatgtagtttctaaaacttcatatactttatatggaatatgaacaactttaatatgaataaatagtctagaaaaaaatttaggaaaaattgccatgaaatcatgagctaagtcaatggttattttaaaccacttaattttgagactagtatttcatacagaaaaagctaatactgatatcacacactaattgtgtataaaacactaggaatgtcaaaatagaacataagaaaatgagtctagtggacccactgcatagtgtaactttgggatgaatttaaaagaatatttaagtcacagtcaattttctgttggtctaattttaccaaataaccccctaaataagaagtctgatttatctaaaatagaagttaacatagcatcccagtattgccattctaaaactctggcatgtaaatgggagaaatggaaataagctcaaaatgggtagagtaacccatttctgcatgaaccatagaatttaactagaatttggctggctcatgcctgtaatgccagcactttgggaggccaaggcaggcagatcacttgagcccaggagtttgagaccagcccgggcaacatggtgaaactccatctcttcaaaaatatatatttgtgtgtgtgtgtgtgtgtatgtgcgtgcacaaaaattagctgagtgtggtggttcacacttgtaatcacagctacctgggaggctgaggcaggaggattgcttgagcctgggaggcagaggttgcagtgagctgagattgcaccattgcactgcagcctgggtaatagagcgagacaactctatctcaaaaaaaagaatttcactagaatttatatcttcagtgtttgcattagattgtcaccagcactatctgccttgtgactgtcaggactaatccttatatcatttatcttatgtcctttacctcagtttatgtctgtcaccacaagaaacccagacctccctaatcataccatatgccctggtcttacccacatacagctcggtacaactgcatttccccaaacctcagaactccttgggccatcactgtcagagacatttgaactagagcaactccatcttgagtagggactgggtataatgaagctgagacccactgggctgcattcccaggaagttaggcattcttagtcacaggatgagataggagattggctcaagataaggtcacaaagaccttgctgataaaacagtctgtggtaaagaagccagccaaaacccaccaaaaccaagacgggaatgaaagtgacctccggtcatcctcactgctcattatacgctagttataatgcattgacatgctaagagacactcccaccagcaccatgacagtttacaaatgccataacaacatcaggaagttaccctatatggtctaaaaaggggaggaaccctcagttctgagaatttccttgaaaattcatgaataatccaccccttgtttagcatatgatcaagaaataatcattaaaaaatagccaaccagcagctcatgctgctggtctgcctatggagtagccatcctttctttattaacctgctttcactttatggactcccctgaattcttctgcaggagatccaagaaccctctcttggagtcttaaccaggatccctttccagtaacttcagcaggatctgtgagtgccagtttccttctgtggtgcaaaactaggtgctaagtacactttttcccccctttcctctatttttaaaagaactttcagcccttttgaagtgggtacattgtctggagtacataccctggggttcattgttataggagaatttaggacacagacacacgaggagtttaggagcagaggtttaataggtagaagagaagggaaagagaaacagcttcctctatagatgtctgcactgacaccgtggctttaaggcatggcccatgatgtgtctccgagtggaaaagactggttggtggtgaatgcgccaaattttatagtccggtttgaggaggtggtttctgattggttgcatcatgtatgacgtttgcaaggtgcatgtggaaggctggtcgccccaccctaatcttatgcaaatgggctttccagttgattgggtccatcttgtgtaacacgtggctggcagagaagggaagatgaagccaccatcttgaaaatgtctagtccttagtttctgctggcattcacccatgcaagctgccagcttgtctatgtctgcagctcaactttacaggctgctctttgttagcaaatgatttggagcttcttttcattaaagaaaaaagccttaccgaggactcccatacccttgctttctgcttaagtgatttcttcttaactcctatgtcaattttatacagcatgaaataatgatgtatctataaatgagcctttgcaagattaccatttatcaaagaaaaccagtgatgtttagttaactgtttgtaaaaataaatggttagtagaatgtctaattcaataaatgtttcataaatgagtaaa

SEQ ID NO: 164969 - DNA, 533 bp, Homo sapiens
  Payload ID: 12492
  Gene Symbol: PIK3C3
  Gene Name: phosphatidylinositol 3-kinase, catalytic subunit type 3
  ENST ID: ENST00000585528
  CDS Start-End: 1-533
gggcctgttgggagtgagaggcagaaaaggaagcttggaagggaagagagaacaaaagagttataaagctgtcctggaagacccaatgttgaagttctcaggactatatcaagagacatgctctgatctttatgttacttgtcaagtttttgcagaagggaagcctttggccttgccagtgagaacatcctacaaagcatttagtacaagatggaactggaatgaatggctgaaactaccagtaaaataccctgacctgcccaggaatgcccaagtggccctcaccatatgggatgtgtatggtcccggaaaagcagtgcctgtaggaggaacaacggtttcgctctttggaaaatacggcatgtttcgccaagggatgcatgacttgaaagtctggcctaatgtagaagcagatggatcagaacccacaaaaactcctggcagaacaagtagcactctctcagaagatcagatgagccgtcttgccaaggtaaaaaaagtcatttggaacaggtgcaaagctctgactgatg

SEQ ID NO: 164970 - DNA, 1554 bp, Homo sapiens
  Payload ID: 12492
  Gene Symbol: PIK3C3
  Gene Name: phosphatidylinositol 3-kinase, catalytic subunit type 3
  ENST ID: ENST00000586545
  CDS Start-End: 37-642
gttcccgctgtaggtggtacctttgcagacggtgcgatgggggaagcagagaagtttcactacatctatagttgtgacctggatatcaacgtccagcttaagataggaagcttggaagggaagagagaacaaaagagttataaagctgtcctggaagacccaatgttgaagttctcaggactatatcaagagacatgctctgatctttatgttacttgtcaagtttttgcagaagggaagcctttggccttgccagtgagaacatcctacaaagcatttagtacaagatggaactggaatgaatggctgaaactaccagtaaaataccctgacctgcccaggaatgcccaagtggccctcaccatatgggatgtgtatggtcccggaaaagcagtgcctgtaggaggaacaacggtttcgctctttggaaaatacggcatgtttcgccaagggatgcatgacttgaaagtctggcctaatgtagaagcagatggatcagaacccacaaaaactcctggcagaacaagtagcactctctcagaagatcagatgagccgtcttgccaaggtaaaaaaagtcatttggaacaggtgcaaagctctgactgatgtctattgtagtatatataccttgacattatgaactctgtcagatttttaaaaaatctaaatcttaacttttaaataattgttttattgagatataattcacataccataaagttcacccttggaaagcatacagtctgatggtttagtaaatttacagacttgtataatcatcaccactatataattttagaattttttcatcacccctaaaagaaaccgcaccattaacagtcactcccattttctgctccctgcagttagttccaggcaagtactaatctacttactatctgtatggatttgcctgttctggaaatttcatataaatggaatcattcagtatgtgaccttatgtctggaaatctgtcaggtttgaaaatgtggagcgttggtgatattttcaagatgaccacccactttttctggtgacatagccttaaagttgttagtgtaacattctagagaagcttatgccacttggaagtgaagatgactcagacaattaactagtataaagtttctttgtaagcaaatgaagttattacctttttctttcaaaattgttttaatcaagtgttttcacttagaaatataaaaactaaattctattccgtgcattaattgcaacgctgtcatttattttgtgaacttcctttcacaaagcactgtgttagatactgtttaaggatccctttacagttatctgattaggacactttcttgtagttataatacatactttttttttgcaatcttattagtaggagtgcctctttaatgtctggaggaagttttgttgctaagcttttaacagcttgttgcctttacccacatatagaagaaatcttcaagaataagtacttgggttggctaggcttcatgcttcaacacagaatttttgtcaagttcattttgtcttttgtattgctcttttaaggaaaaa

SEQ ID NO: 164971 - DNA, 686 bp, Homo sapiens
  Payload ID: 12492
  Gene Symbol: PIK3C3
  Gene Name: phosphatidylinositol 3-kinase, catalytic subunit type 3
  ENST ID: ENST00000591011
  CDS Start-End: 1-403
ctcaggactatatcaagagacatgctctgatctttatgttacttgtcaagtttttgcagaagggaagcctttggccttgccagtgagaacatcctacaaagcatttagtacaagatggaactggaatgaatggctgaaactaccagtaaaataccctgacctgcccaggaatgcccaagtggccctcaccatatgggatgtgtatggtcccggaaaagcagtgcctgtaggaggaacaacggtttcgctctttggaaaatacggcatgtttcgccaagggatgcatgacttgaaagtctggcctaatgtagaagcagatggatcagaacccacaaaaactcctggcagaacaagtagcactctctcagaagatcagatgagccgtcttgccaagcagaagtgatgctgcgtctgttccaggcaagacagcgtgacagctttggtttcttcacatgttaggaacattaagccatcatgtaagaagtccagctattctgttggagtgaccaagttgaaaaaccacttggagagggagcagcactgagaatacgtggggaaagagaggccctaccaccctggtatcccggctaagcccaccctttatcaccaaggtgttagaaatctcaccaaagctcatcgacaaggacacatggtgaaagtagattggctggatagattgacattta

SEQ ID NO: 164972 - DNA, 2074 bp, Homo sapiens
  Payload ID: 12492
  Gene Symbol: PIK3C3
  Gene Name: phosphatidylinositol 3-kinase, catalytic subunit type 3
  ENST ID: ENST00000589056
  CDS Start-End: 63-377
ttatatttaagcatggagatgatttacgtcaagatcaacttattcttcaaatcatttcactcatggacaagctgttacggaaagaaaatctggacttgaaattgacaccttataaggtgttagccaccagtacaaaacatggcttcatgcagtttatccagtcagttcctgtggctgaagttcttgatacagagggaagcattcagaacttttttagaaaatatgcaccaagtgagaatgggccaaatgggattagtgctgaggtcatggacacttacgttaaaagctgtgctggatattgcgtgatcacctatatacttggagttggagacaggcacctggataaccttttgctaacaaaaacaggtaacaattaatgactaccagtagacatacattgtatatgcccatggtttttacccctgaatctatgtactaacaagataagttgcggcctggcgcggtggctcacgcccgtaatcccagcactttgggaggccaaggcgggtggatcacctgaggttgggagttcgagaccagcctgaccaacatggagaaaccccgtctctactaaacacacaaaatttgccgggcgtggtggtacatgcctgtaatcccaactactcaggaggctgaggcaggagaatcgcttgaacccgggaggcggaggttgcagtgagccgagattgcaccattgcactgcagactaggcaacaagatcaaaacgccatcttagaaaaaaaaaaaaaaaaagatgagttgcgtaattgaagataaatcagagagtcttaaaaattcctttaaatgttaccttggaagaacatttagggaaagtcctttcccttttaagaattgctttagtagtaatcctacagatggtcattttgcccacacttctgtactggaaaatgcctctttttatggaaagccaataatggatacaagtagcttagtctcttactgtatagctctagttagattgttaaaatgtcctttctcttacaaagtgtgcttaattcactttaatatctacctttaattatttgcttttccccttggagttctatgggataatcattctcagtcccctttgtcctgacaactctttagccctatgtatttatctttatgcagacagcttccagacttacagctttttacctcagtccatttcattaacttcaaattgaaatatcgaactgcttacttgaaattgtcattatatatggccagttgtaaaaggttgtcctttcctctactacctgcctaaaacctgtttctcacctcatttttccatttcaatagatagcaacatcacctacccagttgttcaagctctagacctcaaagtcattcttaacatgtctcttggcctcatctcatatactgaacctattagcaaatcttgtctactcctcaactccaaaatagatcatgaagttacccactgtcttcatttttactactttgaccccacttgaagcaaacaatatatgttgcctaaacaatttgaatgaaacctgaaccctttattggggccttgtggcttgtccaggcaggccatttgtctgaatgtcaaaccactcctgcctcagacaagagcctttgttgttttctctttctggaaagttatttattcagatctttgcagggctgactttagttattaagttgaagttctaatggcatctctttagagaagccctttctaactccttgatctgtaataacatatctgccctcttcctccaatgctctctacttattactgtattgtttatagcacttatcactagctgaagttaccttttttgtttaattcaacaactatttattgaacagctagtagatgctgggaataccaaagttaacagaagagacagaaatccttgctctcctagagcttgttgagttcttatcatcatcttctccccttcaggatgcaagttccatgagagcaggaacctttgtccattggggttacccccatgcctctggaccttgaacaccacctagctaaagtgttcaataaatcagtgttgaattaatgatgaataaatacttctgctcttcc

SEQ ID NO: 164973 - DNA, 618 bp, Homo sapiens
  Payload ID: 12492
  Gene Symbol: PIK3C3
  Gene Name: phosphatidylinositol 3-kinase, catalytic subunit type 3
  ENST ID: ENST00000597477
  CDS Start-End: 1-551
cattgcttggagataatgaaaagatgaatttgtcagatgtggaacttatcccgttgcctttagaaccccaagtgaaaattagaggaataattccggaaacagctacactgtttaaaagtgcccttatgcctgcacagttgttttttaagacggaagatggaggcaaatatccagttatatttaagcatggagatgatttacgtcaagatcaacttattcttcaaatcatttcactcatggacaagctgttacggaaagaaaatctggacttgaaattgacaccttataaggtgttagccaccagtacaaaacatggcttcatgcagtttatccagtcagttcctgtggctgaagttcttgatacagagggaagcattcagaacttttttagaaaatatgcaccaagtgagaatgggccaaatgggattagtgctgaggtcatggacacttacgttaaaagctgtgctggatattgcgtgatcacctatatacttggagttggagacaggcacctggataaccttttgctaacaaaaacaggtaacaattaatgactaccagtagacatacattgtatatgcccatggtttttacccctgaatctatgtactaacaaga

SEQ ID NO: 164974 - DNA, 452 bp, Homo sapiens
  Payload ID: 12492
  Gene Symbol: PIK3C3
  Gene Name: phosphatidylinositol 3-kinase, catalytic subunit type 3
  ENST ID: ENST00000587402
  CDS Start-End: 41-352
tttacgtcaagatcaacttattcttcaaatcatttcactcatggacaagctgttacggaaagaaaatctggacttgaaattgacaccttataaggtgttagccaccagtacaaaacatggcttcatgcagtttatccagtcagttcctgtggctgaagttcttgatacagagggaagcattcagaacttttttagaaaatatgcaccaagtgagaatgggccaaatgggattagtgctgaggtcatggacacttacgttaaaagctgtgctggatattgcgtgatcacctatatacttggagttggagacaggcacctggataaccttttgctaacaaaaacaggaggctgaggcaggagaatcgcttgaacccgggaggcggaggttgcagtgagccgagattgcaccattgcactgcagactaggcaacaagatcaaaacgccatcttag

SEQ ID NO: 164975 - DNA, 4189 bp, Homo sapiens
  Payload ID: 12493
  Gene Symbol: PI4K2A
  Gene Name: phosphatidylinositol 4-kinase type 2 alpha
  Uniprot ID: Q9BTU6
  ENST ID: ENST00000370631
  CDS Start-End: 58-1497
cggccgcgagcgcagtggtgtggagcgcgccgggtcccggagccggctgtctgagggatggacgagacgagcccactagtgtcccccgagcgggcccaacccccggactacaccttcccgtcgggctcgggcgctcactttccgcaggtgcccgggggcgcggtccgagtggcggcggcggccggctcgggcccctctccgccgggctcgccgggccacgaccgcgagcggcagccactgttggatcgggcccggggcgcggcggcccagggccagacccaaaccgtggcggcgcaggcccaggctctggccgctcaggccgcggcggcagcccacgccgctcaggcccaccgcgagcggaacgagttcccggaggatcctgagttcgaggcggtggtgcggcaggccgagctggccatcgagcgctgcatctttcccgagcgcatctaccagggctccagcggaagctacttcgtcaaggaccctcaggggaggatcattgctgtcttcaaacccaagaatgaagagccctatgggcatcttaatcctaagtggaccaagtggctgcagaagctgtgctgtccttgctgctttggccgtgactgccttgtccttaaccagggctatctctcagaagcaggggccagcctggtggaccaaaaactggaactcaacattgttccccgtacaaaggtagtatacctggccagtgagaccttcaactatagtgccattgaccgagtgaagtccaggggcaagcggcttgcactagagaaagtgccaaaagttggacagcggtttaaccgcatcgggctaccaccaaaggttggttcattccagctctttgttgaaggctacaaagatgcagactattggctgcggcgttttgaagcagaacctcttcctgagaacactaaccggcaactactgctccagtttgagcggttggtggtgctggattacatcatccgcaacactgatcgaggcaatgacaactggctgattaaatatgactgtccaatggatagttctagctctcgggacacagactgggtggtggtgaaggagcctgttatcaaggtggctgccatagacaatgggctggccttcccactgaagcatcctgactcctggagggcatatcctttttactgggcctggttgccccaggcgaaagtcccattttctcaggagatcaaagatctgatccttccaaagatatcggaccctaacttcgtcaaggacttggaagaggacctatatgaactcttcaagaaagatcctggtttcgacaggggccagttccataagcagattgctgtcatgcggggccagatcttaaatctgacccaggccttgaaagacaacaagagtcccctgcacctcgtccagatgccacctgtgattgtcgagacggcccgttcccaccagcggtcttctagcgagtcctacacacagagctttcagagccggaagcccttcttttcatggtggtagctccagaggcaggcagaggaaatattgtcagagactggtgggaggaagcctggggagtggggtgcaggaaaagccagagaagccggtggagagcagcacctttaagagccctctctctctgcttgccaccctgctcagagctttccacccacagggagaagcacaatcaggaacagtgagtgctcctcgcccttctgatgtgggggaggctggagctccatgcacgtagtccagatgcctgggaaggaacatctcccttccagcatctgctggtagcaggctgggacagtcccttccttccctgaaaccctgctctattgcaattccctattatattctgcatcagaaaaacaaacaaaacaaaaacaactttaaatgcttgtagcagaaccccgggtcatctcatgtcagaaacctttaatccaggcctaaatttgcatagacctgacattcagctgccttgcagttgcttcctcccatgagccaaggtggtgtcagagggcaactggatgactcgcagtaccacagcactgggacagacagaagccacacctttcttttgggtttttgccaagcctcctccatctcccatcagtgctgtgggctggctgcaagcctcgaaacagttctcctggaagggaggtttttgctttacccccgccagcacttccgcacacaatcatagagaacctctctgctctctgctggcctacagcttgtctgtttctcaagcagaggcaggaagagctagtcttagcatttatattttaataggaagttgactcccagcatgtaaaagtgatccacgcagccggagtgtatgccgggagctaagtggtctatgggtgaacatatcccaccttgcttcctgagtccttggtcccaatcttctcatttgttcctctcgttttaaattttttccccccaactcttttgatgtaagagttcagtttgtcttcgggagtgggtctctgcaagggctctgggatgagtcttggcttccaagaggacaggctattaggttcttggacttttttctgtgctaccgctgctgcttggtggaagtaacaggacgtggattctgcctcataagtggcagtttcccttttctctctgacttgtcctaggccgatttctctatggcttccctgagaaaggtgaggcccaaaggagagaggccttcaaactgtcccaggtcctgcgcagctcagtgcgtatcttcttgcttccatgtgtcttttcccctgctgcctcactccccacccccacttgccaggtgtttgagccatttctacaccaaagcaaagtacggcctcaggagggagtaaaaagggtgccatctgtgtctggaggggcagctgtgttcatgccctgtgctactggacatttcacaattctggcaccttgcgattggtcagtcaacctcagaaagtaactatcttgaaggtttgaaaaacaaccaaagaaagggagtgaggactatggctgcatgtcctctgcttgcccggctgcagagcagagatgtgcagccctctggtcagctggtccaggctggtccccgccggtccccttccagtccagccaccaagagtccacttgtcccgggcttccacctggctgacaggaagaatttctgagagctggatgtgcatgccctgtggacgaaggtacagctcgcctgcctgccccaatcccagccccgacaatcacatgcagctgactcggacactggccttgggaacaatgttcgagagaacacttgccccttgactgtaggagccagaaggggacccaggtgtgcatagctctctgtagacatttttacccaaacctgttggtaaagtgcccatctggtgctcaagagagcctgggggtctaacagggagcccggctgcctcacctggccacagcctccacaccagatctccacattgtcttgatccagaccagctctgtgatcagaaggaaattgggtccagtgtaggagagagctggtcctgggcctggcaggcaagagtgtgggcatcctttcctggcctttctccactctccctcaagcctgtgctcaggttgccttgaatgtggactctggaagagccaggggcccagaatgccgggggaggcttctgagtggcactcatggaacaccgtccctctgccagccataggccctgcctccagtgtcagggaatggaggctgggctgcgagagtgttgctgccccctgtgtcattcttctaatccaatgtagaaattgtacgtaatgtatttaaatcaacgcaaatgtatgaataacaaatacagttctgaccttttttgtccagtttctttgggggaaggaagacaaagaaggtaggaacggaattttgagggcaaagaaacctgtgtttccatggaattgctgagacgtggctcctggggctatttctccctaataaaggatgatccaggtcctcatttccaaagtcccaatgctctgaaaaccaaaagtattttcataacccatttgaaaccaaacctgacctgaacttacactgataggaagctatgggtaattatgatgtgttccttttagtgtgattctttgttgcagaaatgtcaatatattttatgacatggttccctactagggattatacagtatttgctgactacttcctaagagccaaaaataaaaaatctgaattccaaaa

SEQ ID NO: 164976 - DNA, 3540 bp, Homo sapiens
  Payload ID: 12494
  Gene Symbol: PI4K2B
  Gene Name: phosphatidylinositol 4-kinase type 2 beta
  Uniprot ID: Q8TCG2
  ENST ID: ENST00000264864
  CDS Start-End: 190-1635
ggaggcgcgaggtggggcgcggccggcggcgaggcgggacaaccgctgggcgggcgccaagcgtgcccgtgcgctggtgaggtggcgtccgttctacccggtcgctcccgttccgcgccatgcagagcccagtctctggcacctggctgctctgatctggtctcagcgcggagggagcagagggagtccatggaggatccctccgagcccgaccggttggcgtccgcggacggcgggagcccggaggaggaggaggatggggagcgggagccgctgctaccgcggatcgcctgggcccacccgcggagaggcgccccaggcagcgccgtgaggctgctggacgctgccggggaggagggcgaggccggcgacgaggagctgcccctcccgcccggggacgtgggggtctcccggagttcgtccgccgagctggaccggagccgccccgcggtttcagtaactattggtacttcagagatgaatgcattcttggatgacccagaatttgccgatattatgctgagagcagagcaagcaatagaagttggaatttttccagaaagaatctctcaaggttcaagtggaagttactttgtgaaggatcctaagaggaaaattattggtgtgtttaaacccaaatcagaagagccttatggtcaactcaatccaaaatggaccaaatatgtccataaggtctgctgcccttgctgctttggccgaggctgcctgattcctaatcaggggtacctttccgaagcgggtgcctatcttgtggacaacaagcttcatctgagcattgtacctaaaacaaaggtggtttggcttgtcagtgagacatttaactataatgcgattgaccgtgcaaaatcaagaggcaaaaagtatgctttagaaaaagtgccaaaagtgggtagaaagtttcataggataggactccctcctaagattggttcctttcagttatttgttgaaggttacaaggaggctgaatattggcttaggaaatttgaagctgaccctttgcctgagaatattagaaaacaatttcagtcacaatttgaaagattagttattttggattacatcatcagaaatacagacaggggcaatgataattggttagtcagatacgaaaagcagaaatgtgaaaaggaaattgaccataaggaatcaaaatggattgatgatgaagaattccttattaaaatagctgcaattgataatggtctagcatttccttttaaacatcctgatgaatggagagcatatccatttcactgggcttggcttcctcaagcaaaagttcccttttctgaagaaataagaaatttgattctaccatatatttctgacatgaactttgtgcaagatttatgtgaagatctctatgaactttttaagactgacaaaggatttgacaaagccacttttgaaagtcagatgtctgtgatgaggggtcagatcttaaaccttactcaggcattgagagacgggaagagtcctttccagctagtacagataccttgtgtgattgtggaacgcagtcaaggtggaagtcagggtcggattgtccacctgagcaattcctttacccagactgtcaattgcaggaagccatttttttcctcctggtagtaaatgtcagagtaagagaaacaaactgtttagaattatcatgtttttaaaacatcatagtaatataaatctgctgttaggagctccagttgctaaaacctcaatttaagtctttaaaaggttgtattttgaatgtaaccaaaagtttacagttttttgtccaaatattaaatttctatttcagggaagaagtgctatatctcctatattgtatttttgtagaaaatttgtattttatgttgttgttagtttaaaaggtaattttacacatgctggaatgactgtaattactctagaattccaagtagaatacaataacttttaatattgagaagaatgttcatgctaattcttcttacattacaaaaggcctttgaggatgcctacgtctgaaattgctcttacgaactttaataaaatagttagctaatagaaaaacaggtaagaataaagcaatgttgccttaatttcaaaagctgctattttagaatttgaataagtactcctaaagtgaccattattagggaccagaaaattatatcttggctaagtaatagaggaccattttggtttttgtacttgagaatatttttggtgaattactttgttgtagtgaggaaaaaacctaagaaatttcccctttttttaaaaaatggaaatattcaattgagacttgaggggaataatagaaaattaaggtagatccccaatattttggaataccaaaattgccttaaaaattcccttctgtttcttacatgggatcaaatacttgagattagtacttcagagtactggccttgttcaatttagtacttcaattagtattaaacttcactaaaaagtaaaccatactccaaattgtatattggattgcattttggggtcctaggtcatacgttcttcaaaattattatgattgtactattgtacttgaaattacagatgttattataattacagtcaaatgtagactatcaggccaaattaaaggggagcatggcagataaccataaagtcatttatatttgattttgaaatgtatttttgtactttattttgaatatcatccatatgtctgacattattggaatttgtaacattgttaatgcactaagtgatttaaattcaattgatgaagatgtgattttacagaagcagaagtttcattttcttgaggcttaaaaccaatgtcaccacttgggcttaactgggtaatttgtggtctaggccttttgttttctaagcttactatcttgtgtttgtttatttgcttttaatgaagtattttgtgtagaaggttaaattaggatgcaaaacagatctgccattcctttttcccttatatcttccttttggtcttcatggacgagatgaatgaggattctgctgccctgagggagttcattggaaacctgcgttctcctacctcttccaaccctccattagctcaattttgagataatggaaaattgactggaaattcaaaactcaaactactatctttagatataaacactagtaattaaaatgtgccttttgaagatgttttctaagagaaaggaaatacgttgcagtgatgtgggtactgctttcataaaacagttttttcagtattttgagaattgccatattaatttttataatggaaaacttaataaattgctactgttttatatcataaaattaaaataccatggtaatatttgcaaaaggtctggccataccagaaaagtacagttgagatagttaagatataaccacaagtcagagtacattggttgtattttgtaaactttcatgaactgaattcttatttaaatagtatggttttttttcaataagtatatttatagtgacaaatgtggtagactaaaggtaataaaaatcattgtcttaagatta

SEQ ID NO: 164977 - DNA, 6752 bp, Homo sapiens
  Payload ID: 12495
  Gene Symbol: PI4KA
  Gene Name: phosphatidylinositol 4-kinase, catalytic, alpha
  ENST ID: ENST00000255882
  CDS Start-End: 88-6396
cggatgcacctacgcctgcgccctgaggtcgggcgctcgcgggccaggagcggggagccggcgggcagcgccgcggctcgtgaggtgatggcggcggccccggcccggggaggcggaggcggaggcggaggcggcggcggctgctccggctccggctccagcgcctcgcggggcttctatttcaacacggtcctgtcactggcccgctccctggcggtgcagagaccagcatccttggagaaggtccaaaagcttctttgcatgtgtccagtggatttccatgggatcttccagttagatgaaagacggagagatgcagtgattgcattgggcatttttctgattgaatctgatcttcagcacaaagattgtgtggttccttaccttcttcgacttctcaaaggtcttccaaaagtgtattgggtagaagaaagcacagctcggaaaggcagaggtgccctcccggttgcagagagcttcagcttctgcttggtaactctgctgtctgatgtggcctatagggatccttcacttagggatgagattttagaggtgcttttgcaggttttgcatgtcctcttggggatgtgccaggccttggagattcaagacaaagaatacctttgcaagtatgctatcccatgcctgataggaatctcgcgagcatttgggcgttacagcaacatggaagagtctctcctctcaaagctctttcccaaaatccctcctcattccctccgtgtcctggaagagcttgaaggtgttcgaaggcgttcctttaatgacttccgctccatcctccccagcaatctgctgactgtctgtcaggagggtaccctgaagaggaaaaccagcagtgtgtccagcatctctcaggtcagccctgaacgcggcatgccccctcccagttcccctggaggatctgcctttcactactttgaagcctcctgcttgcccgatgggactgccctagagcctgagtactacttttcaaccatcagctccagcttctcagtctctccccttttcaacggtgtcacatataaggagtttaacattccattggaaatgcttcgggaactcttaaacctggtgaagaagatcgttgaggaggctgttctcaaatctttggatgccattgtagccagtgtgatggaggccaaccccagtgctgatctctactacacttccttcagtgaccctctctacctgaccatgttcaagatgctgcgtgacactctgtactacatgaaggacctcccgacctcttttgtgaaggagatccatgattttgtgctggagcagttcaacacgagccagggggagctccagaagattctacatgacgcagaccggatccacaatgagctgagccccctcaaactgcgctgtcaggcgaatgctgcctgtgtggacctcatggtgtgggctgtgaaggacgagcagggtgcagaaaacctttgcatcaagctatctgagaagctgcagtccaagacgtccagcaaagtcattattgctcacttgcccctgctgatctgctgtctgcagggtttgggccgcctgtgcgagaggttcccggtggtggtgcactctgtgacaccgtccttgcgagacttcctggtcatcccgtccccagttctggtgaagctctacaagtaccacagtcagtaccacacagttgctggcaatgatataaaaatcagtgtgaccaatgagcattccgagtcaaccctgaacgtcatgtcgggtaagaagagccagccctccatgtacgagcagctccgagacatcgctattgacaacatctgcaggtgcctgaaggctggattgacggtggacccagtgattgtggaggcgttcttggccagcctgtccaaccggctctacatctctcaggagagcgacaaggacgctcacttgattcccgaccacacaatccgagccttgggacacattgcggtggccttgagggacaccccgaaggtcatggagcccattctgcagatcctacagcagaaattctgccagccaccctcccccctcgatgtgctgattattgaccagctgggctgcctggttatcaccggaaatcaatacatctatcaggaagtgtggaacctcttccagcagatcagtgtgaaggccagctccgttgtatactcagccaccaaagattacaaggaccacggctataggcattgctccctggcagtgattaatgccctggccaacatcgcggccaacatccaagacgagcacctggtggatgagctgctcatgaacctgttggagttgtttgtgcagctggggctggaggggaagcgagccagcgagagggcaagcgagaagggccctgccctaaaggcttctagcagtgcagggaacttgggagtactcattcctgtaatagctgtgctcacccgacgactgccacccatcaaagaagctaagcctcggttacagaagctcttccgagacttctggctgtattccgttctgatgggattcgctgtggagggctcaggactctggccagaagaatggtacgagggggtctgtgaaatagccactaagtcccccttgctcacctttcccagcaaggagccactgcggtccgtcctccagtataactcagccatgaagaatgacacggtcacccccgctgagctgagtgagctccgcagcactatcatcaacctgctggacccccctcccgaggtgtccgcactcatcaacaagctggacttcgccatgtccacctacctcctctctgtgtaccggctggagtacatgagggtactgcgttcaacagatcctgatcgcttccaggtaatgttctgctactttgaggataaagctattcagaaagacaaatctgggatgatgcagtgtgtgattgcagtcgcggacaaagtattcgatgccttcctgaacatgatggcggataaagccaagaccaaggagaacgaggaggagctggagcggcacgctcagttcctgttggtgaacttcaaccacatccacaagaggataaggagggtggcagacaagtatctatctggtctggtggataagtttccccacttgctctggagcgggactgtgctgaagaccatgctggacatcctgcagaccctgtcactgtcactgagcgctgatattcacaaggatcagccttactatgacatccccgacgccccctaccggatcacggttcctgacacgtacgaagcccgtgagagcattgtgaaggacttcgctgcacgctgtgggatgatcctccaggaggccatgaagtgggcacctaccgtcaccaagtcccacctgcaggaatatctgaacaaacatcagaactgggtatcgggactgtcccagcacacggggctggccatggccactgagagcatccttcactttgctggctacaacaagcagaacacaactcttggggcaactcagctgagcgagcgcccggcctgtgtgaagaaagactactccaacttcatggcatccctgaatctgcgcaaccgctacgcgggcgaggtgtatggaatgattcggttctcaggcaccacaggccagatgtctgacctgaacaaaatgatggtccaggatctacattcagctttagaccgcagtcatcctcagcactacacgcaggccatgttcaagctgaccgcaatgctcattagcagtaaagattgtgacccgcagctccttcatcatctgtgctggggtcccctccggatgttcaatgagcatggcatggagacggccctggcctgctgggagtggctgctggctggcaaggatggagtggaagtgccgttcatgcgggagatggcaggggcctggcacatgacggtggagcagaaatttggcctgttttctgctgagataaaggaagcagaccccctggctgcctcggaagcaagtcaacccaaaccctgtccccccgaagtgaccccccactacatctggatcgacttcctggtgcagcggtttgagatcgccaagtactgcagctctgaccaagtggagatcttctccagcctgctgcagcgctccatgtccctgaacatcggcggggccaaggggagcatgaaccggcacgtggcggccatcgggccccgcttcaagctgctgaccctggggctgtccctcctgcatgccgatgtggttccaaatgcaaccatccgcaatgtgcttcgcgagaagatctactccactgcctttgactacttcagctgtcccccaaagttccctactcaaggagagaagcggctgcgtgaagacataagcatcatgattaaattttggaccgccatgttctcagataagaagtacctgaccgccagccagcttgttcccccagataatcaggacacccggagcaacctggacataactgtcggctctcggcaacaagccacccaaggctggatcaacacataccccctgtccagcggcatgtccaccatctccaagaaatcaggcatgtctaagaaaaccaaccggggctcccagctgcacaaatactacatgaagcgcaggacgctgctgctgtccctgctggccactgagatcgagcgtctcatcacatggtacaacccgctgtcagccccggaactggaactagaccaggccggagagaacagcgtggccaactggagatctaagtacatcagcctgagtgagaagcagtggaaggacaacgtgaacctcgcctggagcatctctccctacctagccgtgcagctgcctgccaggtttaagaacacagaagccattgggaacgaagtgacccgtctcgttcggttggacccgggagccgttagtgatgtgcctgaagcaatcaagttcctggtcacctggcacaccatcgacgccgatgctccagagctcagccatgtgctgtgctgggcgcccacggacccacccacaggcctctcctacttctccagcatgtacccgccgcaccctctcacggcgcagtacggggtgaaagtcctgcggtccttccctccggacgccatcctcttctacatcccccagattgtgcaggccctcaggtacgacaagatgggctatgtgcgggagtatattctgtgggcagcgtctaaatcccagcttctggcacaccagttcatctggaacatgaagactaacatttatctagatgaagagggccaccagaaagaccctgacatcggcgacctcctggatcagttggtagaggagatcacaggctccttgtccggcccagcgaaggacttttaccagcgggagtttgatttctttaacaagatcaccaacgtgtcggctatcatcaagccctaccctaaaggcgacgagagaaagaaggcttgtctgtcggccctgtctgaagtgaaggtgcagccgggctgctacctgcccagcaaccctgaggccattgtgctggacatcgactacaagtctgggaccccgatgcagagtgctgcaaaagccccatatctggccaagttcaaggtgaagcgatgtggagttagtgaacttgaaaaagaaggtctgcggtgccgctcagactccgaggatgagtgcagcacgcaggaggccgacggccagaagatctcctggcaggcagccatcttcaaggtgggagacgactgccggcaggacatgctggccctgcagatcatcgacctcttcaagaacatcttccagctggtcggcctggacctctttgtttttccctaccgcgtggtggccactgcccctgggtgcggggtgatcgagtgcatccccgactgcacctcccgggaccagctgggccgccagacagacttcggcatgtacgactacttcacacgccagtacggggatgagtccactctggccttccagcaggcccgctacaacttcatccgaagcatggccgcctacagcctcctgctgttcctgctgcagatcaaggacagacacaacggcaacattatgctggacaagaagggtcatatcatccacatcgactttggcttcatgtttgaaagctcgccgggcggcaatctcggctgggaacccgacatcaagctgacggatgagatggtgatgatcatggggggcaagatggaggccacacccttcaagtggttcatggagatgtgtgtccgaggctacctggctgtgcggccctacatggacgcggtcgtctccctggtcactctcatgttggacacgggcctgccctgttttcgcggccagacaatcaagctcttgaagcacaggtttagccccaacatgactgagcgcgaggctgcaaatttcatcatgaaggtcatccagagctgcttcctcagcaacaggagccggacctacgacatgatccagtactatcagaatgacatcccctactgaggaggggaccttcgagggcctctgccccatgtgccctcaaagctgtcccacaatcatggagccctgcgacctccctgccctgccgccacatgcagtggaggagaggcctgtggcccaaagaacctggtagcgcctcctggggcagcacgtgggtggcgcagccttggtaacgccatggactgcagcgacaatcaatggatggtgctgtctatgcacaggtgtgagtcctctgtttgcactggacatattccctacctgtcttatttcataggtacatgaagtattgtgtataaaaaaagagataagatttaaccaacatcaacaaaataaaaacccaaaatagtgctgtgttggaa

SEQ ID NO: 164978 - DNA, 1636 bp, Homo sapiens
  Payload ID: 12495
  Gene Symbol: PI4KA
  Gene Name: phosphatidylinositol 4-kinase, catalytic, alpha
  ENST ID: ENST00000399213
  CDS Start-End: 1-1308
atgggctatgtgcgggagtatattctgtgggcagcgtctaaatcccagcttctggcacaccagttcatctggaacatgaagactaacatttatctagatgaagagggccaccagaaagaccctgacatcggcgacctcctggatcagttggtagaggagatcacaggctccttgtccggcccagcgaaggacttttaccagcgggagtttgatttctttaacaagatcaccaacgtgtcggctatcatcaagccctaccctaaaggcgacgagagaaagaaggcttgtctgtcggccctgtctgaagtgaaggtgcagccgggctgctacctgcccagcaaccctgaggccattgtgctggacatcgactacaagtctgggaccccgatgcagagtgctgcaaaagccccatatctggccaagttcaaggtgaagcgatgtggagttagtgaacttgaaaaagaaggtctgcggtgccgctcagactccgaggatgagtgcagcacgcaggaggccgacggccagaagatctcctggcaggcagccatcttcaaggtgggagacgactgccggcaggacatgctggccctgcagatcatcgacctcttcaagaacatcttccagctggtcggcctggacctctttgtttttccctaccgcgtggtggccactgcccctgggtgcggggtgatcgagtgcatccccgactgcacctcccgggaccagctgggccgccagacagacttcggcatgtacgactacttcacacgccagtacggggatgaggcgctctctgcacaggcccgctacaacttcatccgaagcatggccgcctacagcctcctgctgttcctgctgcagatcaaggacagacacaacggcaacattatgctggacaagaagggtcatatcatccacatcgactttggcttcatgtttgaaagctcgccgggcggcaatctcggctgggaacccgacatcaagctgacggatgagatggtgatgatcatggggggcaagatggaggccacacccttcaagtggttcatggagatgtgtgtccgaggctacctggctgtgcggccctacatggacgcggtcgtctccctggtcactctcatgttggacacgggcctgccctgttttcgcggccagacaatcaagctcttgaagcacaggtttagccccaacatgactgagcgcgaggctgcaaatttcatcatgaaggtcatccagagctgcttcctcagcaacaggagccggacctacgacatgatccagtactatcagaatgacatcccctactgaggaggggaccttcgagggcctctgccccatgtgccctcaaagctgtcccacaatcatggagccctgcgacctccctgccctgccgccacatgcagtggaggagaggcctgtggcccaaagaacctggtagcgcctcctggggcagcacgtgggtggcgcagccttggtaacgccatggactgcagcgacaatcaatggatggtgctgtctatgcacaggtgtgagtcctctgtttgcactggacatattccctacctgtcttatttcataggtacatgaagtattgtgtataaaaaaagagataagatttaaccaacatcaacaaaat

SEQ ID NO: 164979 - DNA, 574 bp, Homo sapiens
  Payload ID: 12495
  Gene Symbol: PI4KA
  Gene Name: phosphatidylinositol 4-kinase, catalytic, alpha
  ENST ID: ENST00000449120
  CDS Start-End: 314-574
aaaacatttctcgtctccgtttgacagcacagagaccggcgagtccacaccagccctgccccaggctcacctcggaagaggcgaccccaaccttctcggactcgtacatgagggccagggacctgctggtgctggcggccgtggcctcagccctgcggaggacctcctgccgcaagtactgctgcctgtccgcgggcgcgtcgggcccgtcggggaggtctcgggcgtccctccaaggggccggccgggcgccttcgtcctccccgtcgtcgtcgaacggattgtagcttttagggtccaaaagcttctttgcatgtgtccagtggatttccatgggatcttccagttagatgaaagacggagagatgcagtgattgcattgggcatttttctgattgaatctgatcttcagcacaaagattgtgtggttccttaccttcttcgacttctcaaaggtcttccaaaagtgtattgggtagaagaaagcacagctcggaaaggcagaggtgccctcccggttgcagagagcttcagcttctgcttggtaactctgctgtctgatgtggcctatagg

SEQ ID NO: 164980 - DNA, 3331 bp, Homo sapiens
  Payload ID: 12496
  Gene Symbol: PI4KB
  Gene Name: phosphatidylinositol 4-kinase, catalytic, beta
  Uniprot ID: Q9UBF8
  ENST ID: ENST00000368872
  CDS Start-End: 553-2958
cgcagccggggcctggtgcagcctccgcggccgctgtcagggaagcgcaggcggccaatggaacccgggagcggtcgctgctgctgaggcggcagtgtcggcagtccaaccgcgactgcccgcaccccctccgcgggggtcccccagaggatcaactaaaccttgaactaagaagaaaaatgtgttgtgagcagggggagcctcagctgcctcaggccgttcaggacagaagggtgtttctgaaggccggagcaagttttgaagaagtccctatcagattacacttggttgactactccggagcagccactaagagggatgaacaggcctgcgtggaaattgaatgagattagttgagtccacgctccatgagaatgctgaacaccatccaaagcagcaaattgagattccttgatttggggaagaggtttgggaggaacccttcaataattggcatgggacaagaggggacccagtccaagtgtatttgggactcgcagtagggaggaacaattcagagagagcttggaagctcgaagtctggctgtggccatgggagatacagtagtggagcctgcccccttgaagccaacttctgagcccacttctggcccaccagggaataatggggggtccctgctaagtgtcatcacggagggggtcggggaactatcagtgattgaccctgaggtggcccagaaggcctgccaggaggtgttggagaaagtcaagcttttgcatggaggcgtggcagtctctagcagaggcaccccactggagttggtcaatggggatggtgtggacagtgagatccgttgcctagatgatccacctgcccagatcagggaggaggaagatgagatgggggccgctgtggcctcaggcacagccaaaggagcaagaagacggcggcagaacaactcagctaaacagtcttggctgctgaggctgtttgagtcaaaactgtttgacatctccatggccatttcatacctgtataactccaaggagcctggagtacaagcctacattggcaaccggctcttctgctttcgcaacgaggacgtggacttctatctgccccagttgcttaacatgtacatccacatggatgaggacgtgggtgatgccattaagccctacatagtccaccgttgccgccagagcattaacttttccctccagtgtgccctgttgcttggggcctattcttcagacatgcacatttccactcaacgacactcccgtgggaccaagctacggaagctgatcctctcagatgagctaaagccagctcacaggaagagggagctgccctccttgagcccggcccctgacacagggctgtctccctccaaaaggactcaccagcgctctaagtcagatgccactgccagcataagtctcagcagcaacctgaaacgaacagccagcaaccctaaagtggagaatgaggatgagcctgttcgactggctcctgagagagaattcatcaagtccctgatggcgatcggcaagcggctggccacgctccccaccaaagagcagaaaacacagaggctgatctcagagctctccctgctcaaccataagctccctgcccgagtctggctgcccactgctggctttgaccaccacgtggtccgtgtaccccacacacaggctgttgtcctcaactccaaggacaaggctccctacctgatttatgtggaagtccttgaatgtgaaaactttgacaccaccagtgtccctgcccggatccccgagaaccgaattcggagtacgaggtccgtagaaaacttgcccgaatgtggtattacccatgagcagcgagctggcagcttcagcactgtgcccaactatgacaacgatgatgaggcctggtcggtggatgacataggcgagctgcaagtggagctccccgaagtgcataccaacagctgtgacaacatctcccagttctctgtggacagcatcaccagccaggagagcaaggagcctgtgttcattgcagcaggggacatccgccggcgcctttcggaacagctggctcataccccgacagccttcaaacgagacccagaagatccttctgcagttgctctcaaagagccctggcaggagaaagtacggcggatcagagagggctccccctacggccatctccccaattggcggctcctgtcagtcattgtcaagtgtggggatgaccttcggcaagagcttctggcctttcaggtgttgaagcaactgcagtccatttgggaacaggagcgagtgcccctttggatcaagccatacaagattcttgtgatttcggctgatagtggcatgattgaaccagtggtcaatgctgtgtccatccatcaggtgaagaaacagtcacagctctccttgctcgattacttcctacaggagcacggcagttacaccactgaggcattcctcagtgcacagcgcaattttgtgcaaagttgtgctgggtactgcttggtctgctacctgctgcaagtcaaggacagacacaatgggaatatccttttggacgcagaaggccacatcatccacatcgactttggcttcatcctctccagctcaccccgaaatctgggctttgagacgtcagcctttaagctgaccacagagtttgtggatgtgatgggcggcctggatggcgacatgttcaactactataagatgctgatgctgcaagggctgattgccgctcggaaacacatggacaaggtggtgcagatcgtggagatcatgcagcaaggttctcagcttccttgcttccatggctccagcaccattcgaaacctcaaagagaggttccacatgagcatgactgaggagcagctgcagctgctggtggagcagatggtggatggcagtatgcggtctatcaccaccaaactctatgacggcttccagtacctcaccaacggcatcatgtgacacgctcctcagcccaggagtggtggggggtccagggcaccctccctagagggcccttgtctgagaaaccccaaaccaggaaaccccacctacccaaccatccacccaagggaaatggaaggcaagaaacacgaaggatcatgtggtaactgcgagagcttgctgaggggtgggagagccagctgtggggtccagacttgttggggcttccctgcccctcctggtctgtgtcagtattaccaccagactgactccaggactcactgccctccagaaaacagaggtgacaaatgtgagggacactggggcctttcttctccttgtaggggtctctcagaggttctttccacaggccatcctcttattccgttct

SEQ ID NO: 164981 - DNA, 3340 bp, Homo sapiens
  Payload ID: 12496
  Gene Symbol: PI4KB
  Gene Name: phosphatidylinositol 4-kinase, catalytic, beta
  Uniprot ID: Q9UBF8
  ENST ID: ENST00000368873
  CDS Start-End: 170-2620
gggcctggtgcagcctccgcggccgctgtcagggaagcgcaggcggccaatggaacccgggagcggtcgctgctgctgaggcggcagtgtcggcagtccaaccgcgactgcccgcaccccctccgcgggggtcccccagagcttggaagctcgaagtctggctgtggccatgggagatacagtagtggagcctgcccccttgaagccaacttctgagcccacttctggcccaccagggaataatggggggtccctgctaagtgtcatcacggagggggtcggggaactatcagtgattgaccctgaggtggcccagaaggcctgccaggaggtgttggagaaagtcaagcttttgcatggaggcgtggcagtctctagcagaggcaccccactggagttggtcaatggggatggtgtggacagtgagatccgttgcctagatgatccacctgcccagatcagggaggaggaagatgagatgggggccgctgtggcctcaggcacagccaaaggagcaagaagacggcggcagaacaactcagctaaacagtcttggctgctgaggctgtttgagtcaaaactgtttgacatctccatggccatttcatacctgtataactccaaggagcctggagtacaagcctacattggcaaccggctcttctgctttcgcaacgaggacgtggacttctatctgccccagttgcttaacatgtacatccacatggatgaggacgtgggtgatgccattaagccctacatagtccaccgttgccgccagagcattaacttttccctccagtgtgccctgttgcttggggcctattcttcagacatgcacatttccactcaacgacactcccgtgggaccaagctacggaagctgatcctctcagatgagctaaagccagctcacaggaagagggagctgccctccttgagcccggcccctgacacagggctgtctccctccaaaaggactcaccagcgctctaagtcagatgccactgccagcataagtctcagcagcaacctgaaacgaacagccagcaaccctaaagtggagaatgaggatgaggagctctcctccagcaccgagagtattgataattcattcagttcccctgttcgactggctcctgagagagaattcatcaagtccctgatggcgatcggcaagcggctggccacgctccccaccaaagagcagaaaacacagaggctgatctcagagctctccctgctcaaccataagctccctgcccgagtctggctgcccactgctggctttgaccaccacgtggtccgtgtaccccacacacaggctgttgtcctcaactccaaggacaaggctccctacctgatttatgtggaagtccttgaatgtgaaaactttgacaccaccagtgtccctgcccggatccccgagaaccgaattcggagtacgaggtccgtagaaaacttgcccgaatgtggtattacccatgagcagcgagctggcagcttcagcactgtgcccaactatgacaacgatgatgaggcctggtcggtggatgacataggcgagctgcaagtggagctccccgaagtgcataccaacagctgtgacaacatctcccagttctctgtggacagcatcaccagccaggagagcaaggagcctgtgttcattgcagcaggggacatccgccggcgcctttcggaacagctggctcataccccgacagccttcaaacgagacccagaagatccttctgcagttgctctcaaagagccctggcaggagaaagtacggcggatcagagagggctccccctacggccatctccccaattggcggctcctgtcagtcattgtcaagtgtggggatgaccttcggcaagagcttctggcctttcaggtgttgaagcaactgcagtccatttgggaacaggagcgagtgcccctttggatcaagccatacaagattcttgtgatttcggctgatagtggcatgattgaaccagtggtcaatgctgtgtccatccatcaggtgaagaaacagtcacagctctccttgctcgattacttcctacaggagcacggcagttacaccactgaggcattcctcagtgcacagcgcaattttgtgcaaagttgtgctgggtactgcttggtctgctacctgctgcaagtcaaggacagacacaatgggaatatccttttggacgcagaaggccacatcatccacatcgactttggcttcatcctctccagctcaccccgaaatctgggctttgagacgtcagcctttaagctgaccacagagtttgtggatgtgatgggcggcctggatggcgacatgttcaactactataagatgctgatgctgcaagggctgattgccgctcggaaacacatggacaaggtggtgcagatcgtggagatcatgcagcaaggttctcagcttccttgcttccatggctccagcaccattcgaaacctcaaagagaggttccacatgagcatgactgaggagcagctgcagctgctggtggagcagatggtggatggcagtatgcggtctatcaccaccaaactctatgacggcttccagtacctcaccaacggcatcatgtgacacgctcctcagcccaggagtggtggggggtccagggcaccctccctagagggcccttgtctgagaaaccccaaaccaggaaaccccacctacccaaccatccacccaagggaaatggaaggcaagaaacacgaaggatcatgtggtaactgcgagagcttgctgaggggtgggagagccagctgtggggtccagacttgttggggcttccctgcccctcctggtctgtgtcagtattaccaccagactgactccaggactcactgccctccagaaaacagaggtgacaaatgtgagggacactggggcctttcttctccttgtaggggtctctcagaggttctttccacaggccatcctcttattccgttctggggcccaggaagtggggaagagtaggttctcggtacttaggacttgatcctgtggttggccactggccatgctgctgcccagctctacccctcccagggacctacccctcccagggaccgacccctggcccaagctccccttgctggcgggcgctgcgtgggccctgcacttgctgaggttccccatcatgggcaaggaagggaattcccacagccctccagtgtactgagggtactggcctagccatgtggaattccctaccctgactccttccccaaacccagggaaaagagctctcaattttttatttttaatttttgtttgaaataaagtccttagttagcc

SEQ ID NO: 164982 - DNA, 3934 bp, Homo sapiens
  Payload ID: 12496
  Gene Symbol: PI4KB
  Gene Name: phosphatidylinositol 4-kinase, catalytic, beta
  Uniprot ID: Q9UBF8
  ENST ID: ENST00000368874
  CDS Start-End: 474-2879
ccccgcccccttttctatttctgaacaggcatgttccaggcagctcacccgactccttagattactatggaatcggtagggtcctgaccgctggggaagcaggaaagcgtatcctgggaagaaaggcttggcttggactccggagaagaatactacatcgagacctgctggggaattttattttattttattatttttttggtcttggttgtactgagggaggaagaagaggttgtgtggcccggtcgaacttgtggcagcctgaaggccccctcaggcggcgccgcgggcagccccgcagccggggcctggtgcagcctccgcggccgctgtcagggaagcgcaggcggccaatggaacccgggagcggtcgctgctgctgaggcggcagtgtcggcagtccaaccgcgactgcccgcaccccctccgcgggggtcccccagagcttggaagctcgaagtctggctgtggccatgggagatacagtagtggagcctgcccccttgaagccaacttctgagcccacttctggcccaccagggaataatggggggtccctgctaagtgtcatcacggagggggtcggggaactatcagtgattgaccctgaggtggcccagaaggcctgccaggaggtgttggagaaagtcaagcttttgcatggaggcgtggcagtctctagcagaggcaccccactggagttggtcaatggggatggtgtggacagtgagatccgttgcctagatgatccacctgcccagatcagggaggaggaagatgagatgggggccgctgtggcctcaggcacagccaaaggagcaagaagacggcggcagaacaactcagctaaacagtcttggctgctgaggctgtttgagtcaaaactgtttgacatctccatggccatttcatacctgtataactccaaggagcctggagtacaagcctacattggcaaccggctcttctgctttcgcaacgaggacgtggacttctatctgccccagttgcttaacatgtacatccacatggatgaggacgtgggtgatgccattaagccctacatagtccaccgttgccgccagagcattaacttttccctccagtgtgccctgttgcttggggcctattcttcagacatgcacatttccactcaacgacactcccgtgggaccaagctacggaagctgatcctctcagatgagctaaagccagctcacaggaagagggagctgccctccttgagcccggcccctgacacagggctgtctccctccaaaaggactcaccagcgctctaagtcagatgccactgccagcataagtctcagcagcaacctgaaacgaacagccagcaaccctaaagtggagaatgaggatgagcctgttcgactggctcctgagagagaattcatcaagtccctgatggcgatcggcaagcggctggccacgctccccaccaaagagcagaaaacacagaggctgatctcagagctctccctgctcaaccataagctccctgcccgagtctggctgcccactgctggctttgaccaccacgtggtccgtgtaccccacacacaggctgttgtcctcaactccaaggacaaggctccctacctgatttatgtggaagtccttgaatgtgaaaactttgacaccaccagtgtccctgcccggatccccgagaaccgaattcggagtacgaggtccgtagaaaacttgcccgaatgtggtattacccatgagcagcgagctggcagcttcagcactgtgcccaactatgacaacgatgatgaggcctggtcggtggatgacataggcgagctgcaagtggagctccccgaagtgcataccaacagctgtgacaacatctcccagttctctgtggacagcatcaccagccaggagagcaaggagcctgtgttcattgcagcaggggacatccgccggcgcctttcggaacagctggctcataccccgacagccttcaaacgagacccagaagatccttctgcagttgctctcaaagagccctggcaggagaaagtacggcggatcagagagggctccccctacggccatctccccaattggcggctcctgtcagtcattgtcaagtgtggggatgaccttcggcaagagcttctggcctttcaggtgttgaagcaactgcagtccatttgggaacaggagcgagtgcccctttggatcaagccatacaagattcttgtgatttcggctgatagtggcatgattgaaccagtggtcaatgctgtgtccatccatcaggtgaagaaacagtcacagctctccttgctcgattacttcctacaggagcacggcagttacaccactgaggcattcctcagtgcacagcgcaattttgtgcaaagttgtgctgggtactgcttggtctgctacctgctgcaagtcaaggacagacacaatgggaatatccttttggacgcagaaggccacatcatccacatcgactttggcttcatcctctccagctcaccccgaaatctgggctttgagacgtcagcctttaagctgaccacagagtttgtggatgtgatgggcggcctggatggcgacatgttcaactactataagatgctgatgctgcaagggctgattgccgctcggaaacacatggacaaggtggtgcagatcgtggagatcatgcagcaaggttctcagcttccttgcttccatggctccagcaccattcgaaacctcaaagagaggttccacatgagcatgactgaggagcagctgcagctgctggtggagcagatggtggatggcagtatgcggtctatcaccaccaaactctatgacggcttccagtacctcaccaacggcatcatgtgacacgctcctcagcccaggagtggtggggggtccagggcaccctccctagagggcccttgtctgagaaaccccaaaccaggaaaccccacctacccaaccatccacccaagggaaatggaaggcaagaaacacgaaggatcatgtggtaactgcgagagcttgctgaggggtgggagagccagctgtggggtccagacttgttggggcttccctgcccctcctggtctgtgtcagtattaccaccagactgactccaggactcactgccctccagaaaacagaggtgacaaatgtgagggacactggggcctttcttctccttgtaggggtctctcagaggttctttccacaggccatcctcttattccgttctggggcccaggaagtggggaagagtaggttctcggtacttaggacttgatcctgtggttggccactggccatgctgctgcccagctctacccctcccagggacctacccctcccagggaccgacccctggcccaagctccccttgctggcgggcgctgcgtgggccctgcacttgctgaggttccccatcatgggcaaggaagggaattcccacagccctccagtgtactgagggtactggcctagccatgtggaattccctaccctgactccttccccaaacccagggaaaagagctctcaattttttatttttaatttttgtttgaaataaagtccttagttagccacttgtgtcatttccaggttttctgggggagtgcagggggagatgggtgatgaggtatgaacggatgcctcagtgtccaagatacaaaaggcactacatagaagtttgctttttccctgcctgtcttggtcactaccacctcttccctgagaagggcgggccttccatgttctctcacccgcttcaactccacattgtccaagtcacagaaaaagagaggcctgaatggagattcgaccacaaacagttttaatggtctggttttctccctagttccccaactgtttgttagtattattattactacaagaataaaggattcctgagagcctgtc

SEQ ID NO: 164983 - DNA, 3983 bp, Homo sapiens
  Payload ID: 12496
  Gene Symbol: PI4KB
  Gene Name: phosphatidylinositol 4-kinase, catalytic, beta
  ENST ID: ENST00000368875
  CDS Start-End: 582-3068
agattactatggaatcggtagggtcctgaccgctggggaagcaggaaagcgtatcctgggaagaaaggcttggcttggactccggagaagaatactacatcgagacctgctggggaattttattttattttattatttttttggtcttggttgtactgagggaggaagaagaggttgtgtggcccggtcgaacttgtggcagcctgaaggccccctcaggcggcgccgcgggcagccccgcagccggggcctggtgcagcctccgcggccgctgtcagggaagcgcaggcggccaatggaacccgggagcggtcgctgctgctgaggcggcagtgtcggcagtccaaccgcgactgcccgcaccccctccgcgggggtcccccagaggatcaactaaaccttgaactaagaagaaaaatgtgttgtgagcagggggagcctcagctgcctcaggccgttcaggacagaagggtgtttctgaaggccggagcaagttttgaagaagtccctatcagattacacttggttgactactccggagcagccactaagagggatgaacaggcctgcgtggaaattgaatgagattcttggaagctcgaagtctggctgtggccatgggagatacagtagtggagcctgcccccttgaagccaacttctgagcccacttctggcccaccagggaataatggggggtccctgctaagtgtcatcacggagggggtcggggaactatcagtgattgaccctgaggtggcccagaaggcctgccaggaggtgttggagaaagtcaagcttttgcatggaggcgtggcagtctctagcagaggcaccccactggagttggtcaatggggatggtgtggacagtgagatccgttgcctagatgatccacctgcccagatcagggaggaggaagatgagatgggggccgctgtggcctcaggcacagccaaaggagcaagaagacggcggcagaacaactcagctaaacagtcttggctgctgaggctgtttgagtcaaaactgtttgacatctccatggccatttcatacctgtataactccaaggagcctggagtacaagcctacattggcaaccggctcttctgctttcgcaacgaggacgtggacttctatctgccccagttgcttaacatgtacatccacatggatgaggacgtgggtgatgccattaagccctacatagtccaccgttgccgccagagcattaacttttccctccagtgtgccctgttgcttggggcctattcttcagacatgcacatttccactcaacgacactcccgtgggaccaagctacggaagctgatcctctcagatgagctaaagccagctcacaggaagagggagctgccctccttgagcccggcccctgacacagggctgtctccctccaaaaggactcaccagcgctctaagtcagatgccactgccagcataagtctcagcagcaacctgaaacgaacagccagcaaccctaaagtggagaatgaggatgaggagctctcctccagcaccgagagtattgataattcattcagttcccctgttcgactggctcctgagagagaattcatcaagtccctgatggcgatcggcaagcggctggccacgctccccaccaaagagcagaaaacacagaggctgatctcagagctctccctgctcaaccataagctccctgcccgagtctggctgcccactgctggctttgaccaccacgtggtccgtgtaccccacacacaggctgttgtcctcaactccaaggacaaggctccctacctgatttatgtggaagtccttgaatgtgaaaactttgacaccaccagtgtccctgcccggatccccgagaaccgaattcggagtacgaggtccgtagaaaacttgcccgaatgtggtattacccatgagcagcgagctggcagcttcagcactgtgcccaactatgacaacgatgatgaggcctggtcggtggatgacataggcgagctgcaagtggagctccccgaagtgcataccaacagctgtgacaacatctcccagttctctgtggacagcatcaccagccaggagagcaaggagcctgtgttcattgcagcaggggacatccgccggcgcctttcggaacagctggctcataccccgacagccttcaaacgagacccagaagatccttctgcagttgctctcaaagagccctggcaggagaaagtacggcggatcagagagggctccccctacggccatctccccaattggcggctcctgtcagtcattgtcaagtgtggggatgaccttcggcaagagcttctggcctttcaggtgttgaagcaactgcagtccatttgggaacaggagcgagtgcccctttggatcaagccatacaagattcttgtgatttcggctgatagtggcatgattgaaccagtggtcaatgctgtgtccatccatcaggtgaagaaacagtcacagctctccttgctcgattacttcctacaggagcacggcagttacaccactgaggcattcctcagtgcacagcgcaattttgtgcaaagttgtgctgggtactgcttggtctgctacctgctgcaagtcaaggacagacacaatgggaatatccttttggacgcagaaggccacatcatccacatcgactttggcttcatcctctccagctcaccccgaaatctgggctttgagacgtcagcctttaagctgaccacagagtttgtggatgtgatgggcggcctggatggcgacatgttcaactactataagatgctgatgctgcaagggctgattgccgctcggaaacacatggacaaggtggtgcagatcgtggagatcatgcagcaaggttctcagcttccttgcttccatggctccagcaccattcgaaacctcaaagagaggttccacatgagcatgactgaggagcagctgcagctgctggtggagcagatggtggatggcagtatgcggtctatcaccaccaaactctatgacggcttccagtacctcaccaacggcatcatgtgacacgctcctcagcccaggagtggtggggggtccagggcaccctccctagagggcccttgtctgagaaaccccaaaccaggaaaccccacctacccaaccatccacccaagggaaatggaaggcaagaaacacgaaggatcatgtggtaactgcgagagcttgctgaggggtgggagagccagctgtggggtccagacttgttggggcttccctgcccctcctggtctgtgtcagtattaccaccagactgactccaggactcactgccctccagaaaacagaggtgacaaatgtgagggacactggggcctttcttctccttgtaggggtctctcagaggttctttccacaggccatcctcttattccgttctggggcccaggaagtggggaagagtaggttctcggtacttaggacttgatcctgtggttggccactggccatgctgctgcccagctctacccctcccagggacctacccctcccagggaccgacccctggcccaagctccccttgctggcgggcgctgcgtgggccctgcacttgctgaggttccccatcatgggcaaggaagggaattcccacagccctccagtgtactgagggtactggcctagccatgtggaattccctaccctgactccttccccaaacccagggaaaagagctctcaattttttatttttaatttttgtttgaaataaagtccttagttagccacttgtgtcatttccaggttttctgggggagtgcagggggagatgggtgatgaggtatgaacggatgcctcagtgtccaagatacaaaaggcactacatagaagtttgctttttccctgcctgtcttggtcactaccacctcttccctgagaagggcgggccttccatgttctctcacccgcttcaactccacat

SEQ ID NO: 164984 - DNA, 566 bp, Homo sapiens
  Payload ID: 12496
  Gene Symbol: PI4KB
  Gene Name: phosphatidylinositol 4-kinase, catalytic, beta
  ENST ID: ENST00000446339
  CDS Start-End: 1-221
ccagctcaccccgaaatctgggctttgagacgtcagcctttaagctgaccacagagtttgtggatgtgatgggcggcctggatggcgacatgttcaactactataagatgctgatgctgcaagggctgattgccgctcggaaacacatggacaaggttctcagcttccttgcttccatggctccagcaccattcgaaacctcaaagagaggttccacatgagcatgactgaggagcagctgcagctgctggtggagcagatggtggatggcagtatgcggtctatcaccaccaaactctatgacggcttccagtacctcaccaacggcatcatgtgacacgctcctcagcccaggagtggtggggggtccagggcaccctccctagagggcccttgtctgagaaaccccaaaccaggaaaccccacctacccaaccatccacccaagggaaatggaaggcaagaaacacgaaggatcatgtggtaactgcgagagcttgctgaggggtgggagagccagctgtggggtccagacttgttggggcttccctgcccctcctggtctgt

SEQ ID NO: 164985 - DNA, 1150 bp, Homo sapiens
  Payload ID: 12496
  Gene Symbol: PI4KB
  Gene Name: phosphatidylinositol 4-kinase, catalytic, beta
  ENST ID: ENST00000438243
  CDS Start-End: 309-1150
aagcgcaggcggccaatggaacccgggagcggtcgctgctgctgaggcggcagtgtcggcagtccaaccgcgactgcccgcaccccctccgcgggggtcccccagagagttgagtccacgctccatgagaatgctgaacaccatccaaagcagcaaattgagattccttgatttggggaagaggtttgggaggaacccttcaataattggcatgggacaagaggggacccagtccaagtgtatttgggactcgcagtagggaggaacaattcagagagagcttggaagctcgaagtctggctgtggccatgggagatacagtagtggagcctgcccccttgaagccaacttctgagcccacttctggcccaccagggaataatggggggtccctgctaagtgtcatcacggagggggtcggggaactatcagtgattgaccctgaggtggcccagaaggcctgccaggaggtgttggagaaagtcaagcttttgcatggaggcgtggcagtctctagcagaggcaccccactggagttggtcaatggggatggtgtggacagtgagatccgttgcctagatgatccacctgcccagatcagggaggaggaagatgagatgggggccgctgtggcctcaggcacagccaaaggagcaagaagacggcggcagaacaactcagctaaacagtcttggctgctgaggctgtttgagtcaaaactgtttgacatctccatggccatttcatacctgtataactccaaggagcctggagtacaagcctacattggcaaccggctcttctgctttcgcaacgaggacgtggacttctatctgccccagttgcttaacatgtacatccacatggatgaggacgtgggtgatgccattaagccctacatagtccaccgttgccgccagagcattaacttttccctccagtgtgccctgttgcttggggcctattcttcagacatgcacatttccactcaacgacactcccgtgggaccaagctacggaagctgatcctctcagatgagctaaagccagctcacaggaagagggagctgccctccttgagcccggcccctgacacagggctgtctccctccaaaaggactcaccagcgctctaagtcagatgccactgc

SEQ ID NO: 164986 - DNA, 934 bp, Homo sapiens
  Payload ID: 12496
  Gene Symbol: PI4KB
  Gene Name: phosphatidylinositol 4-kinase, catalytic, beta
  ENST ID: ENST00000455060
  CDS Start-End: 1-684
gaaccagtggtcaatgctgtgtccatccatcaggtgaagaaacagtcacagctctccttgctcgattacttcctacaggagcacggcagttacaccactgaggcattcctcagtgcacagcgcaattttgtgcaaagttgtgctgggtactgcttggtctgctacctgctgcaagtcaaggacagacacaatgggaatatccttttggacgcagaaggccacatcatccacatcgactttggcttcatcctctccagctcaccccgaaatctgggctttgagacgtcagcctttaagctgaccacagagtttgtggatgtgatgggcggcctggatggcgacatgttcaactactataagatgctgatgctgcaagggctgattgccgctcggaaacacatggacaaggtggtgcagatcgtggagatcatgcagcaaggttgtcgccgttgctcaggatcatccccatctggccccatgatgacggtggcccaggtcatctgttctcagcttccttgcttccatggctccagcaccattcgaaacctcaaagagaggttccacatgagcatgactgaggagcagctgcagctgctggtggagcagatggtggatggcagtatgcggtctatcaccaccaaactctatgacggcttccagtacctcaccaacggcatcatgtgacacgctcctcagcccaggagtggtggggggtccagggcaccctccctagagggcccttgtctgagaaaccccaaaccaggaaaccccacctacccaaccatccacccaagggaaatggaaggcaagaaacacgaaggatcatgtggtaactgcgagagcttgctgaggggtgggagagccagctgtggggtccagacttgttggggcttccctgcccctcctggtctgtgtcagtattaccaccagactg

SEQ ID NO: 164987 - DNA, 965 bp, Homo sapiens
  Payload ID: 12496
  Gene Symbol: PI4KB
  Gene Name: phosphatidylinositol 4-kinase, catalytic, beta
  ENST ID: ENST00000430800
  CDS Start-End: 391-965
agccggggcctggtgcagcctccgcggccgctgtcagggaagcgcaggcggccaatggaacccgggagcggtcgctgctgctgaggcggcagtgtcggcagtccaaccgcgactgcccgcaccccctccgcgggggtcccccagaggatcaactaaaccttgaactaagaagaaaaatgtgttgtgagcagggggagcctcagctgcctcaggccgttcaggacagaagggtgtttctgaaggccggagcaagttttgaagaagtccctatcagattacacttggttgactactccggagcagccactaagagggatgaacaggcctgcgtggaaattgaatgagattcctgttcgactggctcctgagagagaattcatcaagtccctgatggcgatcggcaagcggctggccacgctccccaccaaagagcagaaaacacagaggctgatctcagagctctccctgctcaaccataagctccctgcccgagtctggctgcccactgctggctttgaccaccacgtggtccgtgtaccccacacacaggctgttgtcctcaactccaaggacaaggctccctacctgatttatgtggaagtccttgaatgtgaaaactttgacaccaccagtgtccctgcccggatccccgagaaccgaattcggagtacgaggtccgtagaaaacttgcccgaatgtggtattacccatgagcagcgagctggcagcttcagcactgtgcccaactatgacaacgatgatgaggcctggtcggtggatgacataggcgagctgcaagtggagctccccgaagtgcataccaacagctgtgacaacatctcccagttctctgtggacagcatcaccagccaggagagcaaggagcctgtgttcattgcagcaggggacatccgccggcgcctttcggaacagctggctcataccccgacagccttcaaacgaga

SEQ ID NO: 164988 - DNA, 558 bp, Homo sapiens
  Payload ID: 12496
  Gene Symbol: PI4KB
  Gene Name: phosphatidylinositol 4-kinase, catalytic, beta
  ENST ID: ENST00000489223
  CDS Start-End: 273-558
agcctccgcggccgctgtcagggaagcgcaggcggccaatggaacccgggagcggtcgctgctgctgaggcggcagtgtcggcagtccaaccgcgactgcccgcaccccctccgcgggggtcccccagaggactcaccagcgctctaagtcagatgccactgccagcataagtctcagcagcaacctgaaacgaacagccagcaaccctaaagtggagaatgaggatgagcctgttcgactggctcctgagagagaattcatcaagtccctgatggcgatcggcaagcggctggccacgctccccaccaaagagcagaaaacacagaggctgatctcagagctctccctgctcaaccataagctccctgcccgagtctggctgcccactgctggctttgaccaccacgtggtccgtgtaccccacacacaggctgttgtcctcaactccaaggacaaggctccctacctgatttatgtggaagtccttgaatgtgaaaactttgacaccaccagtgtccctgcccggatccccgagaaccgaattcggagtacgaggt

SEQ ID NO: 164989 - DNA, 880 bp, Homo sapiens
  Payload ID: 12496
  Gene Symbol: PI4KB
  Gene Name: phosphatidylinositol 4-kinase, catalytic, beta
  ENST ID: ENST00000489889
  CDS Start-End: 1-552
ccatacaagattcttgtgatttcggctgatagtggcatgattgaaccagtggtcaatgctgtgtccatccatcaggtgaagaaacagtcacagctctccttgctcgattacttcctacaggagcacggcagttacaccactgaggcattcctcagtgcacagcgcaattttgtgcaaagttgtgctgggtactgcttggtctgctacctgctgcaagtcaaggacagacacaatgggaatatccttttggacgcagaaggccacatcatccacatcgactttggcttcatcctctccagctcaccccgaaatctgggctttgagacgtcagcctttaagctgaccacagagtttgtggatgtgatgggcggcctggatggcgacatgttcaactactataagatgctgatgctgcaagggctgattgccgctcggaaacacatggacaaggtggtgcagatcgtggagatcatgcagcaaggtggggctggggtgaggtcaggtgctatagtgcctcaggcttcccctttaagtcggagccctggagcataagaaagctgatcccacgagactcggttgagggaggggggttcccagagagtttctagctctggtccagtgccttgtttctcctttaggacattcctcctgaccctggtaaggctaagtccagaaggctggggaaggggatagcagcacctgcctccttggcatctttagggagaaaacaggcccatttacagcctcctggtcccttctcacctccccacccctgtccagctctgagtttctcagtctccttccatctgtcttctccattccactatgacctctgattgccctgtcctctgccacccttcagctctgagaagtatttccc

SEQ ID NO: 164990 - DNA, 2603 bp, Homo sapiens
  Payload ID: 12496
  Gene Symbol: PI4KB
  Gene Name: phosphatidylinositol 4-kinase, catalytic, beta
  Uniprot ID: Q9UBF8
  ENST ID: ENST00000529142
  CDS Start-End: 430-1884
agattactatggaatcggtagggtcctgaccgctggggaagcaggaaagcgtatcctgggaagaaaggcttggcttggactccggagaagaatactacatcgagacctgctggggaattttattttattttattatttttttggtcttggttgtactgagggaggaagaagaggttgtgtggcccggtcgaacttgtggcagcctgaaggccccctcaggcggcgccgcgggcagccccgcagccggggcctggtgcagcctccgcggccgctgtcagggaagcgcaggcggccaatggaacccgggagcggtcgctgctgctgaggcggcagtgtcggcagtccaaccgcgactgcccgcaccccctccgcgggggtcccccagagcctgttcgactggctcctgagagagaattcatcaagtccctgatggcgatcggcaagcggctggccacgctccccaccaaagagcagaaaacacagaggctgatctcagagctctccctgctcaaccataagctccctgcccgagtctggctgcccactgctggctttgaccaccacgtggtccgtgtaccccacacacaggctgttgtcctcaactccaaggacaaggctccctacctgatttatgtggaagtccttgaatgtgaaaactttgacaccaccagtgtccctgcccggatccccgagaaccgaattcggagtacgaggtccgtagaaaacttgcccgaatgtggtattacccatgagcagcgagctggcagcttcagcactgtgcccaactatgacaacgatgatgaggcctggtcggtggatgacataggcgagctgcaagtggagctccccgaagtgcataccaacagctgtgacaacatctcccagttctctgtggacagcatcaccagccaggagagcaaggagcctgtgttcattgcagcaggggacatccgccggcgcctttcggaacagctggctcataccccgacagccttcaaacgagacccagaagatccttctgcagttgctctcaaagagccctggcaggagaaagtacggcggatcagagagggctccccctacggccatctccccaattggcggctcctgtcagtcattgtcaagtgtggggatgaccttcggcaagagcttctggcctttcaggtgttgaagcaactgcagtccatttgggaacaggagcgagtgcccctttggatcaagccatacaagattcttgtgatttcggctgatagtggcatgattgaaccagtggtcaatgctgtgtccatccatcaggtgaagaaacagtcacagctctccttgctcgattacttcctacaggagcacggcagttacaccactgaggcattcctcagtgcacagcgcaattttgtgcaaagttgtgctgggtactgcttggtctgctacctgctgcaagtcaaggacagacacaatgggaatatccttttggacgcagaaggccacatcatccacatcgactttggcttcatcctctccagctcaccccgaaatctgggctttgagacgtcagcctttaagctgaccacagagtttgtggatgtgatgggcggcctggatggcgacatgttcaactactataagatgctgatgctgcaagggctgattgccgctcggaaacacatggacaaggtggtgcagatcgtggagatcatgcagcaaggttctcagcttccttgcttccatggctccagcaccattcgaaacctcaaagagaggttccacatgagcatgactgaggagcagctgcagctgctggtggagcagatggtggatggcagtatgcggtctatcaccaccaaactctatgacggcttccagtacctcaccaacggcatcatgtgacacgctcctcagcccaggagtggtggggggtccagggcaccctccctagagggcccttgtctgagaaaccccaaaccaggaaaccccacctacccaaccatccacccaagggaaatggaaggcaagaaacacgaaggatcatgtggtaactgcgagagcttgctgaggggtgggagagccagctgtggggtccagacttgttggggcttccctgcccctcctggtctgtgtcagtattaccaccagactgactccaggactcactgccctccagaaaacagaggtgacaaatgtgagggacactggggcctttcttctccttgtaggggtctctcagaggttctttccacaggccatcctcttattccgttctggggcccaggaagtggggaagagtaggttctcggtacttaggacttgatcctgtggttggccactggccatgctgctgcccagctctacccctcccagggacctacccctcccagggaccgacccctggcccaagctccccttgctggcgggcgctgcgtgggccctgcacttgctgaggttccccatcatgggcaaggaagggaattcccacagccctccagtgtactgagggtactggcctagccatgtggaattccctaccctgactccttccccaaacccagggaaaagagctctcaattttttatttttaatttttgtttgaaataaagtccttagttagc

SEQ ID NO: 164991 - DNA, 1958 bp, Homo sapiens
  Payload ID: 12497
  Gene Symbol: PICALM
  Gene Name: phosphatidylinositol binding clathrin assembly protein
  Uniprot ID: Q13492
  ENST ID: ENST00000356360
  CDS Start-End: 1-1899
atgtccggccagagcctgacggaccgaatcactgccgcccagcacagtgtcaccggctctgccgtatccaagacagtatgcaaggccacgacccacgagatcatggggcccaagaaaaagcacctggactacttaattcagtgcacaaatgagatgaatgtgaacatcccacagttggcagacagtttatttgaaagaactactaatagtagttgggtggtggtcttcaaatctctcattacaactcatcatttgatggtgtatggaaatgagcgttttattcagtatttggcttcaagaaacacgttgtttaacttaagcaattttttggataaaagtggattgcaaggatatgacatgtctacatttattaggcggtatagtagatatttaaatgagaaagcagtttcatacagacaagttgcatttgatttcacaaaagtgaagagaggggctgatggagttatgagaacaatgaacacagaaaaactcctaaaaactgtaccaattattcagaatcagatggatgcacttcttgattttaatgttaatagcaatgaacttacaaatggggtaataaatgctgccttcatgctcctgttcaaagatgccattagactgtttgcagcatacaatgaaggaattattaatttgttggaaaaatattttgatatgaaaaagaaccaatgcaaagaaggtcttgacatctataagaagttcctaactaggatgacaagaatctcagagttcctcaaagttgcagagcaagttggaattgacagaggtgatataccagacctttcacaggcccctagcagtcttcttgatgctttggaacaacatttagcttccttggaaggaaagaaaatcaaagattctacagctgcaagcagggcaactacactttccaatgcagtgtcttccctggcaagcactggtctatctctgaccaaagtggatgaaagggaaaagcaggcagcattagaggaagaacaggcacgtttgaaagctttaaaggaacagcgcctaaaagaacttgcaaagaaacctcatacctctttaacaactgcagcctctcctgtatccacctcagcaggagggataatgactgcaccagccattgacatattttctacccctagttcttctaacagcacatcaaagctgcccaatgatctgcttgatttgcagcagccaacttttcacccatctgtacatcctatgtcaactgcttctcaggtagcaagtacatggggagatcctttctctgctactgtagatgctgttgatgatgccattccaagcttaaatcctttcctcacaaaaagtagtggtgatgttcacctttccatttcttcagatgtatctacttttactactaggacacctactcatgaaatgtttgttggattcactccttctccagttgcacagccacacccttcagctggccttaatgttgactttgaatctgtgtttggaaataaatctacaaatgttattgtagattctgggggctttgatgaactaggtggacttctcaaaccaacagtggcctctcagaaccagaaccttcctgttgccaaactcccacctagcaagttagtatctgatgacttggattcatctttagccaaccttgtgggcaatcttggcatcggaaatggaaccactaagaatgatgtaaattggagtcaaccaggtgaaaagaagttaactgggggatctaactggcaaccaaaggttgcaccaacaaccgcttggaatgctgcaacaatgcctccacaaatgggaagtgttcctgtaatgacgcaaccaaccttaatatacagccagcctgtcatgagacctccaaacccctttggccctgtatcaggagcacagatacagtttatgtaacttgatggaagaaaatggaattactccaaaaagacaagtgctcaagcagcaaaatcctt

SEQ ID NO: 164992 - DNA, 2340 bp, Homo sapiens
  Payload ID: 12497
  Gene Symbol: PICALM
  Gene Name: phosphatidylinositol binding clathrin assembly protein
  Uniprot ID: Q13492
  ENST ID: ENST00000393346
  CDS Start-End: 150-2108
gcgcggccccgaaccgcgccccaggccggcaggcggggaaggagccggtgggggtagggggtgcggtggggggtggggaccctccggctcttgggggtcccagtccccgccggctgctgagcgggtggggtggtggaggagctgcagagatgtccggccagagcctgacggaccgaatcactgccgcccagcacagtgtcaccggctctgccgtatccaagacagtatgcaaggccacgacccacgagatcatggggcccaagaaaaagcacctggactacttaattcagtgcacaaatgagatgaatgtgaacatcccacagttggcagacagtttatttgaaagaactactaatagtagttgggtggtggtcttcaaatctctcattacaactcatcatttgatggtgtatggaaatgagcgttttattcagtatttggcttcaagaaacacgttgtttaacttaagcaattttttggataaaagtggattgcaaggatatgacatgtctacatttattaggcggtatagtagatatttaaatgagaaagcagtttcatacagacaagttgcatttgatttcacaaaagtgaagagaggggctgatggagttatgagaacaatgaacacagaaaaactcctaaaaactgtaccaattattcagaatcagatggatgcacttcttgattttaatgttaatagcaatgaacttacaaatggggtaataaatgctgccttcatgctcctgttcaaagatgccattagactgtttgcagcatacaatgaaggaattattaatttgttggaaaaatattttgatatgaaaaagaaccaatgcaaagaaggtcttgacatctataagaagttcctaactaggatgacaagaatctcagagttcctcaaagttgcagagcaagttggaattgacagaggtgatataccagacctttcacaggcccctagcagtcttcttgatgctttggaacaacatttagcttccttggaaggaaagaaaatcaaagattctacagctgcaagcagggcaactacactttccaatgcagtgtcttccctggcaagcactggtctatctctgaccaaagtggatgaaagggaaaagcaggcagcattagaggaagaacaggcacgtttgaaagctttaaaggaacagcgcctaaaagaacttgcaaagaaacctcatacctctttaacaactgcagcctctcctgtatccacctcagcaggagggataatgactgcaccagccattgacatattttctacccctagttcttctaacagcacatcaaagctgcccaatgatctgcttgatttgcagcagccaacttttcacccatctgtacatcctatgtcaactgcttctcaggtagcaagtacatggggagatcctttctctgctactgtagatgctgttgatgatgccattccaagcttaaatcctttcctcacaaaaagtagtggtgatgttcacctttccatttcttcagatgtatctacttttactactaggacacctactcatgaaatgtttgttggattcactccttctccagttgcacagccacacccttcagctggccttaatgttgactttgaatctgtgtttggaaataaatctacaaatgttattgtagattctgggggctttgatgaactaggtggacttctcaaaccaacagtggcctctcagaaccagaaccttcctgttgccaaactcccacctagcaagttagtatctgatgacttggattcatctttagccaaccttgtgggcaatcttggcatcggaaatggaaccactaagaatgatgtaaattggagtcaaccaggtgaaaagaagttaactgggggatctaactggcaaccaaaggttgcaccaacaaccgcttggaatgctgcaacaatggcaccccctgtaatggcctatcctgctactacaccaacaggcatgataggatatggaattcctccacaaatgggaagtgttcctgtaatgacgcaaccaaccttaatatacagccagcctgtcatgagacctccaaacccctttggccctgtatcaggagcacagatacagtttatgtaacttgatggaagaaaatggaattactccaaaaagacaagtgctcaagcagcaaaatccttacttccagcaaaatccaaactgctgtctcttaaatctcttaaactctcttcttccattagaatgctacaagtaactcagtgaaggcccatgaaggaaattgggactagtttataggagaacgtatcaatacagtttataaagccaagaattgctatgatttaagactaagatc

SEQ ID NO: 164993 - DNA, 563 bp, Homo sapiens
  Payload ID: 12497
  Gene Symbol: PICALM
  Gene Name: phosphatidylinositol binding clathrin assembly protein
  ENST ID: ENST00000528256
  CDS Start-End: 120-563
attttcctgcagctgcctgttcctcttaccctgcccggctccagctgacccgggaagggcacagtgtcaccggctctgccgtatccaagacagtatgcaaggccacgacccacgagatcatggggcccaagaaaaagcacctggactacttaattcagtgcacaaatgagatgaatgtgaacatcccacagttggcagacagtttatttgaaagaactactaatagtagttgggtggtggtcttcaaatctctcattacaactcatcatttgatggtgtatggaaatgagcgttttattcagtatttggcttcaagaaacacgttgtttaacttaagcaattttttggataaaagtggattgcaaggatatgacatgtctacatttattaggcggtatagtagatatttaaatgagaaagcagtttcatacagacaagttgcatttgatttcacaaaagtgaagagaggggctgatggagttatgagaacaatgaacacagaaaaactcctaaaaactgtaccaattattcagaatcagatggatgcacttcttgattttaat

SEQ ID NO: 164994 - DNA, 699 bp, Homo sapiens
  Payload ID: 12497
  Gene Symbol: PICALM
  Gene Name: phosphatidylinositol binding clathrin assembly protein
  ENST ID: ENST00000532041
  CDS Start-End: 166-483
ctggactggtggcagcgcgcggccccgaaccgcgccccaggccggcaggcggggaaggagccggtgggggtagggggtgcggtggggggtggggaccctccggctcttgggggtcccagtccccgccggctgctgagcgggtggggtggtggaggagctgcagagatgtccggccagagcctgacggaccgaatcactgccgcccagcacagtgtcaccggctctgccgtatccaagacagtatgcaaggccacgacccacgagatcatggggcccaagaaaaagcacctggactacttaattcagtgcacaaatgagatgaatgtgaacatcccacagttggcagacagtttatttgaaagaactactaatagtagttgggtggtggtcttcaaatctctcattacaactcatcatttgatggtgtatggaaatgaggatatgacatgtctacatttattaggcggtatagtagatatttaaatgagaaagcagtttcatacagacaagttgcatttgatttcacaaaagtgaagagaggggctgatggagttatgagaacaatgaacacagaaaaactcctaaaaactgtaccaattattcagaatcagatggatgcacttcttgattttaatgttaatagcaatgaacttacaaatggggtaataaatgctgccttcatgctcctgttcaaagatg

SEQ ID NO: 164995 - DNA, 757 bp, Homo sapiens
  Payload ID: 12497
  Gene Symbol: PICALM
  Gene Name: phosphatidylinositol binding clathrin assembly protein
  ENST ID: ENST00000529016
  CDS Start-End: 1-734
atgcagtgtcttccctggcaagcactggtctatctctgaccaaagtggatgaaagggaaaagcaggcagcattagaggaagaacaggcacgtttgaaagctttaaaggaacagcgcctaaaagaacttgcaaagaaacctcatacctctttaacaactgcagcctctcctgtatccacctcagcaggagggataatgactgcaccagccattgacatattttctacccctagttcttctaacagcacatcaaagctgcccaatgatctgcttgatttgcagcagccaacttttcacccatctgtacatcctatgtcaactgcttctcaggtagcaagtacatggggaggattcactccttctccagttgcacagccacacccttcagctggccttaatgttgactttgaatctgtgtttggaaataaatctacaaatgttattgtagattctgggggctttgatgaactaggtggacttctcaaaccaacagtggcctctcagaaccagaaccttcctgttgccaaactcccacctagcaagttagtatctgatgacttggattcatctttagccaaccttgtgggcaatcttggcatcggaaatggaaccactaagaatgatgtaaattggagtcaaccaggtgaaaagaagttaactgggggatctaactggcaaccaaaggttgcaccaacaaccgcttggaatgctgcaacaatgatacagtttatgtaacttgatggaagaaaatggaatta

SEQ ID NO: 164996 - DNA, 802 bp, Homo sapiens
  Payload ID: 12497
  Gene Symbol: PICALM
  Gene Name: phosphatidylinositol binding clathrin assembly protein
  ENST ID: ENST00000526961
  CDS Start-End: 1-793
cacatcaaagctgcccaatgatctgcttgatttgcagcagccaacttttcacccatctgtacatcctatgtcaactgcttctcaggtagcaagtacatggggagatgctgttgatgatgccattccaagcttaaatcctttcctcacaaaaagtagtggtgatgttcacctttccatttcttcagatgtatctacttttactactaggacacctactcatgaaatgtttgttggattcactccttctccagttgcacagccacacccttcagctggccttaatgttgactttgaatctgtgtttggaaataaatctacaaatgttattgtagattctgggggtggacttctcaaaccaacagtggcctctcagaaccagaaccttcctgttgccaaactcccacctagcaagttagtatctgatgacttggattcatctttagccaaccttgtgggcaatcttggcatcggaaatggaaccactaagaatgatgtaaattggagtcaaccaggtgaaaagaagttaactgggggatctaactggcaaccaaaggttgcaccaacaaccgcttggaatgctgcaacaatgaatggcatgcattttccacaatacgcaccccctgtaatggcctatcctgctactacaccaacaggcatgataggatatggaattcctccacaaatgggaagtgttcctgtaatgacgcaaccaaccttaatatacagccagcctgtcatgagacctccaaacccctttggccctgtatcaggagcacagatacagtttatgtaacttgatgga

SEQ ID NO: 164997 - DNA, 565 bp, Homo sapiens
  Payload ID: 12497
  Gene Symbol: PICALM
  Gene Name: phosphatidylinositol binding clathrin assembly protein
  ENST ID: ENST00000531558
  CDS Start-End: 205-351
atcttgtccgactccgcgggtgacacgagccggttctctctggactggtggcagcgcgcggccccgaaccgcgccccaggccggcaggcggggaaggagccggtgggggtagggggtgcggtggggggtggggaccctccggctcttgggggtcccagtccccgccggctgctgagcgggtggggtggtggaggagctgcagagatgtccggccagagcctgacggaccgaatcactgccgcccagcacagtgtcaccggctctgccgtatccaagacagtatgcaaggccacgacccacgagatcatggggcccaagaaaaagcacctggactggctgatggagttatgagaacaatgaacacagaaaaactcctaaaaactgtaccaattattcagaatcagatggatgcacttcttgattttaatgttaatagcaatgaacttacaaatggggtaataaatgctgccttcatgctcctgttcaaagatgccattagactgtttgcagcatacaatgaaggaattattaatttgttggaaaaatattttgatatgaaaaagaa

SEQ ID NO: 164998 - DNA, 703 bp, Homo sapiens
  Payload ID: 12497
  Gene Symbol: PICALM
  Gene Name: phosphatidylinositol binding clathrin assembly protein
  ENST ID: ENST00000531930
  CDS Start-End: 148-703
cagcaacgtgtcgggttttcggagtagagataaacaaaaccaggtgacatttccaagcctctcaaggaaaggggggaaaaaacctttctgggtgtcaccggctctgccgtatccaagacagtatgcaaggccacgacccacgagatcatggggcccaagaaaaagcacctggactacttaattcagtgcacaaatgagatgaatgtgaacatcccacagttggcagacagtttatttgaaagaactactaatagtagttgggtggtggtcttcaaatctctcattacaactcatcatttgatggtgtatggaaatgagcgttttattcagtatttggcttcaagaaacacgttgtttaacttaagcaattttttggataaaagtggattgcaaggatatgacatgtctacatttattaggcggtatagtagatatttaaatgagaaagcagtttcatacagacaagttgcatttgatttcacaaaagtgaagagaggggctgatggagttatgagaacaatgaacacagaaaaactcctaaaaactgtaccaattattcagaatcagatggatgcacttcttgattttaatgttaatagcaatgaacttacaaatggggtaataaatgctgccttcatgctcctgttcaaagatgccattagactgtttgcagcatacaatgaaggaattattaatttgttgg

SEQ ID NO: 164999 - DNA, 3613 bp, Homo sapiens
  Payload ID: 12497
  Gene Symbol: PICALM
  Gene Name: phosphatidylinositol binding clathrin assembly protein
  Uniprot ID: Q13492
  ENST ID: ENST00000526033
  CDS Start-End: 318-2255
ggagcctggcgccgccattttcctgcagctgcctgttcctcttaccctgcccggctccagctgacccgggaaggggtgggctgaactgaggcgggggcaagggagtgcccgacatcttgtccgactccgcgggtgacacgagccggttctctctggactggtggcagcgcgcggccccgaaccgcgccccaggccggcaggcggggaaggagccggtgggggtagggggtgcggtggggggtggggaccctccggctcttgggggtcccagtccccgccggctgctgagcgggtggggtggtggaggagctgcagagatgtccggccagagcctgacggaccgaatcactgccgcccagcacagtgtcaccggctctgccgtatccaagacagtatgcaaggccacgacccacgagatcatggggcccaagaaaaagcacctggactacttaattcagtgcacaaatgagatgaatgtgaacatcccacagttggcagacagtttatttgaaagaactactaatagtagttgggtggtggtcttcaaatctctcattacaactcatcatttgatggtgtatggaaatgagcgttttattcagtatttggcttcaagaaacacgttgtttaacttaagcaattttttggataaaagtggattgcaaggatatgacatgtctacatttattaggcggtatagtagatatttaaatgagaaagcagtttcatacagacaagttgcatttgatttcacaaaagtgaagagaggggctgatggagttatgagaacaatgaacacagaaaaactcctaaaaactgtaccaattattcagaatcagatggatgcacttcttgattttaatgttaatagcaatgaacttacaaatggggtaataaatgctgccttcatgctcctgttcaaagatgccattagactgtttgcagcatacaatgaaggaattattaatttgttggaaaaatattttgatatgaaaaagaaccaatgcaaagaaggtcttgacatctataagaagttcctaactaggatgacaagaatctcagagttcctcaaagttgcagagcaagttggaattgacagaggtgatataccagacctttcacaggcccctagcagtcttcttgatgctttggaacaacatttagcttccttggaaggaaagaaaatcaaagattctacagctgcaagcagggcaactacactttccaatgcagtgtcttccctggcaagcactggtctatctctgaccaaagtggatgaaagggaaaagcaggcagcattagaggaagaacaggcacgtttgaaagctttaaaggaacagcgcctaaaagaacttgcaaagaaacctcatacctctttaacaactgcagcctctcctgtatccacctcagcaggagggataatgactgcaccagccattgacatattttctacccctagttcttctaacagcacatcaaagctgcccaatgatctgcttgatttgcagcagccaacttttcacccatctgtacatcctatgtcaactgcttctcaggtagcaagtacatggggagatgctgttgatgatgccattccaagcttaaatcctttcctcacaaaaagtagtggtgatgttcacctttccatttcttcagatgtatctacttttactactaggacacctactcatgaaatgtttgttggattcactccttctccagttgcacagccacacccttcagctggccttaatgttgactttgaatctgtgtttggaaataaatctacaaatgttattgtagattctgggggctttgatgaactaggtggacttctcaaaccaacagtggcctctcagaaccagaaccttcctgttgccaaactcccacctagcaagttagtatctgatgacttggattcatctttagccaaccttgtgggcaatcttggcatcggaaatggaaccactaagaatgatgtaaattggagtcaaccaggtgaaaagaagttaactgggggatctaactggcaaccaaaggttgcaccaacaaccgcttggaatgctgcaacaatggcaccccctgtaatggcctatcctgctactacaccaacaggcatgataggatatggaattcctccacaaatgggaagtgttcctgtaatgacgcaaccaaccttaatatacagccagcctgtcatgagacctccaaacccctttggccctgtatcaggagcacagatacagtttatgtaacttgatggaagaaaatggaattactccaaaaagacaagtgctcaagcagcaaaatccttacttccagcaaaatccaaactgctgtctcttaaatctcttaaactctcttcttccattagaatgctacaagtaactcagtgaaggcccatgaaggaaattgggactagtttataggagaacgtatcaatacagtttataaagccaagaattgctatgatttaagactaagatctgtctttttggtgactaacccttcaattctttcaactcctgttaatacccataatcagtaacctatcaagaaaagcccttatttggaaagtgtgaaatttgtatttggaaaagctgcctggagagaagaactgtgtcctttactgtatttcaacaggactcttttgggggatcaaaattaaaattcctaattatgcattatctttcttttctccagtcctcacaaatacagaaacaataactgaaattaacttttctttttttaaaaaaaattatattcagtttgcagtagacattccttaagtatttgtatttatttatgattatcaattttacataacattaatattgtatcagacctccttatgaaaatgagtatggatgtgcacagtatgtttgatttttatccacaagaatgaatctgattcagaatgcttttctcagctgacatacagagcactaaatattttaaggcaagtccataggtctgaatctcttaagaattctcggcctctgtgggatttagggaagcattataaatgcattaatccttatagtcaattctgtgcctaggattttgccagggaacagttcactgactaggaaaagcactacattttaaattcagcattagtgcattgggaaggatctttactgctttgtgcttggcatgtcattattttccatttgacattagggcctttccaaaatgaatgtgaggaattgctttcacttcaagactttccttcttttcactaaaactctagaaggtgttacaagggggagggaaggggggcaaagtccttgaacattttctttggctcgtgccatgttatgatcatataccttttaaataaggggaaatagtatctttaaagttaatgtctagccaagagtttagtaaacgaagaattaaactgcactgttgatcggtgctttgtgtaaatacatctttaacatttgggtggagaggggccttaagaaggacagttcattgtaggaaagcaattctgtacatgagtttaagcattcttgttgcattgtctctgcagattctatttttgtttacaatattaaaatgtatgttagcaaaatgggtggattttcaaataaaatgcagcttccac

SEQ ID NO: 165000 - DNA, 2049 bp, Homo sapiens
  Payload ID: 12497
  Gene Symbol: PICALM
  Gene Name: phosphatidylinositol binding clathrin assembly protein
  Uniprot ID: Q13492
  ENST ID: ENST00000528398
  CDS Start-End: 187-1842
tatgtgtttcctgtcctattccacaccctagagaatgaataccggccagctagtatctaaatttagaatggcagcaacgtgtcgggttttcggagtagagataaacaaaaccaggtgacatttccaagcctctcaaggaaaggggggaaaaaacctttctgggacttaattcagtgcacaaatgagatgaatgtgaacatcccacagttggcagacagtttatttgaaagaactactaatagtagttgggtggtggtcttcaaatctctcattacaactcatcatttgatggtgtatggaaatgagcgttttattcagtatttggcttcaagaaacacgttgtttaacttaagcaattttttggataaaagtggattgcaaggatatgacatgtctacatttattaggcggtatagtagatatttaaatgagaaagcagtttcatacagacaagttgcatttgatttcacaaaagtgaagagaggggctgatggagttatgagaacaatgaacacagaaaaactcctaaaaactgtaccaattattcagaatcagatggatgcacttcttgattttaatgttaatagcaatgaacttacaaatggggtaataaatgctgccttcatgctcctgttcaaagatgccattagactgtttgcagcatacaatgaaggaattattaatttgttggaaaaatattttgatatgaaaaagaaccaatgcaaagaaggtcttgacatctataagaagttcctaactaggatgacaagaatctcagagttcctcaaagttgcagagcaagttggaattgacagaggtgatataccagacctttcacaggcccctagcagtcttcttgatgctttggaacaacatttagcttccttggaaggaaagaaaatcaaagattctacagctgcaagcagggcaactacactttccaatgcagtgtcttccctggcaagcactggtctatctctgaccaaagtggatgaaagggaaaagcaggcagcattagaggaagaacaggcacgtttgaaagctttaaaggaacagcgcctaaaagaacttgcaaagaaacctcatacctctttaacaactgcagcctctcctgtatccacctcagcaggagggataatgactgcaccagccattgacatattttctacccctagttcttctaacagcacatcaaagctgcccaatgatctgcttgatttgcagcagccaacttttcacccatctgtacatcctatgtcaactgcttctcaggtagcaagtacatggggaggattcactccttctccagttgcacagccacacccttcagctggccttaatgttgactttgaatctgtgtttggaaataaatctacaaatgttattgtagattctgggggctttgatgaactaggtggacttctcaaaccaacagtggcctctcagaaccagaaccttcctgttgccaaactcccacctagcaagttagtatctgatgacttggattcatctttagccaaccttgtgggcaatcttggcatcggaaatggaaccactaagaatgatgtaaattggagtcaaccaggtgaaaagaagttaactgggggatctaactggcaaccaaaggttgcaccaacaaccgcttggaatgctgcaacaatggcaccccctgtaatggcctatcctgctactacaccaacaggcatgataggatatggaattcctccacaaatgggaagtgttcctgtaatgacgcaaccaaccttaatatacagccagcctgtcatgagacctccaaacccctttggccctgtatcaggagcacagatacagtttatgtaacttgatggaagaaaatggaattactccaaaaagacaagtgctcaagcagcaaaatccttacttccagcaaaatccaaactgctgtctcttaaatctcttaaactctcttcttccattagaatgctacaagtaactcagtgaaggcccatgaaggaaattgggactagtttataggagaacgtatcaatacagtttataaagccaaga

SEQ ID NO: 165001 - DNA, 566 bp, Homo sapiens
  Payload ID: 12497
  Gene Symbol: PICALM
  Gene Name: phosphatidylinositol binding clathrin assembly protein
  ENST ID: ENST00000532603
  CDS Start-End: 1-403
aaataaatctacaaatgttattgtagattctgggggtggacttctcaaaccaacagtggcctctcagaaccagaaccttcctgttgccaaactcccacctagcaagttagtatctgatgacttggattcatctttagccaaccttgtgggcaatcttggcatcggaaatggaaccactaagaatgatgtaaattggagtcaaccaggtgaaaagaagttaactgggggatctaactggcaaccaaaggttgcaccaacaaccgcttggaatgctgcaacaatgcctccacaaatgggaagtgttcctgtaatgacgcaaccaaccttaatatacagccagcctgtcatgagacctccaaacccctttggccctgtatcaggagcacagatacagtttatgtaacttgatggaagaaaatggaattactccaaaaagacaagtgctcaagcagcaaaatccttacttccagcaaaatccaaactgctgtctcttaaatctcttaaactctcttcttccattagaatgctacaagtaactcagtgaaggcccatgaaggaaattggga

SEQ ID NO: 165002 - DNA, 811 bp, Homo sapiens
  Payload ID: 12497
  Gene Symbol: PICALM
  Gene Name: phosphatidylinositol binding clathrin assembly protein
  ENST ID: ENST00000534412
  CDS Start-End: 18-164
gtggaggagctgcagagatgtccggccagagcctgacggaccgaatcactgccgcccagcacagtgtcaccggctctgccgtatccaagacagtatgcaaggccacgacccacgagatcatggggcccaagaaaaagcacctggactggctgatggagttatgagaacaatgaacacagaaaaactcctaaaaactgtaccaattattcagaatcagatggatgcacttcttgattttaatgttaatagcaatgaacttacaaatggggtaataaatgctgccttcatgctcctgttcaaagatgccattagactgtttgcagcatacaatgaaggaattattaatttgttggaaaaatattttgatatgaaaaagaaccaatgcaaagaaggtcttgacatctataagaagttcctaactaggatgacaagaatctcagagttcctcaaagttgcagagcaagttggaattgacagaggtgatataccagacctttcacaggcccctagcagtcttcttgatgctttggaacaacatttagcttccttggaaggaaagaaaatcaaagattctacagctgcaagcagggcaactacactttccaatgcagtgtcttccctggcaagcactggtctatctctgaccaaagtggatgaaagggaaaagcaggcagcattagaggaagaacaggcacgtttgaaagctttaaaggaacagcgcctaaaagaacttgcaaagaaacctcatacctctttaacaactgcagcctctcctgtatccacctcagcaggagggataatgactgcacca

SEQ ID NO: 165003 - DNA, 905 bp, Homo sapiens
  Payload ID: 12497
  Gene Symbol: PICALM
  Gene Name: phosphatidylinositol binding clathrin assembly protein
  ENST ID: ENST00000530542
  CDS Start-End: 1-905
ggcaactacactttccaatgcagtgtcttccctggcaagcactggtctatctctgaccaaagtggatgaaagggaaaagcaggcagcattagaggaagaacaggcacgtttgaaagctttaaaggaacagcgcctaaaagaacttgcaaagaaacctcatacctctttaacaactgcagcctctcctgtatccacctcagcaggagggataatgactgcaccagccattgacatattttctacccctagttcttctaacagcacatcaaagctgcccaatgatctgcttgatttgcagcagccaacttttcacccatctgtacatcctatgtcaactgcttctcaggtagcaagtacatggggagatcctttctctgctactgtagatgctgttgatgatgccattccaagcttaaatcctttcctcacaaaaagtagtggtgatgttcacctttccatttcttcagatgtatctacttttactactaggacacctactcatgaaatgtttgttggattcactccttctccagttgcacagccacacccttcagctggccttaatgttgactttgaatctgtgtttggaaataaatctacaaatgttattgtagattctgggggtggacttctcaaaccaacagtggcctctcagaaccagaaccttcctgttgccaaactcccacctagcaagttagtatctgatgacttggattcatctttagccaaccttgtgggcaatcttggcatcggaaatggaaccactaagaatgatgtaaattggagtcaaccaggtgaaaagaagttaactgggggatctaactggcaaccaaaggttgcaccaacaaccgcttggaatgctgcaacaatggcaccccctgtaatggcctatcctgctactacac

SEQ ID NO: 165004 - DNA, 1153 bp, Homo sapiens
  Payload ID: 12497
  Gene Symbol: PICALM
  Gene Name: phosphatidylinositol binding clathrin assembly protein
  ENST ID: ENST00000529760
  CDS Start-End: 1-925
ggcaactacactttccaatgcagtgtcttccctggcaagcactggtctatctctgaccaaagtggatgaaagggaaaagcaggcagcattagaggaagaacaggcacgtttgaaagctttaaaggaacagcgcctaaaagaacttgcaaagaaacctcatacctctttaacaactgcagcctctcctgtatccacctcagcaggagggataatgactgcaccagccattgacatattttctacccctagttcttctaacagcacatcaaagctgcccaatgatctgcttgatttgcagcagccaacttttcacccatctgtacatcctatgtcaactgcttctcaggtagcaagtacatggggaggattcactccttctccagttgcacagccacacccttcagctggccttaatgttgactttgaatctgtgtttggaaataaatctacaaatgttattgtagattctgggggtggacttctcaaaccaacagtggcctctcagaaccagaaccttcctgttgccaaactcccacctagcaagttagtatctgatgacttggattcatctttagccaaccttgtgggcaatcttggcatcggaaatggaaccactaagaatgatgtaaattggagtcaaccaggtgaaaagaagttaactgggggatctaactggcaaccaaaggttgcaccaacaaccgcttggaatgctgcaacaatgaatggcatgcattttccacaatacgcaccccctgtaatggcctatcctgctactacaccaacaggcatgataggatatggaattcctccacaaatgggaagtgttcctgtaatgacgcaaccaaccttaatatacagccagcctgtcatgagacctccaaacccctttggccctgtatcaggagcacagatacagtttatgtaacttgatggaagaaaatggaattactccaaaaagacaagtgctcaagcagcaaaatccttacttccagcaaaatccaaactgctgtctcttaaatctcttaaactctcttcttccattagaatgctacaagtaactcagtgaaggcccatgaaggaaattgggactagtttataggagaacgtatcaatacagtttataaagccaagaattgctatgatttaagactaa

SEQ ID NO: 165005 - DNA, 548 bp, Homo sapiens
  Payload ID: 12497
  Gene Symbol: PICALM
  Gene Name: phosphatidylinositol binding clathrin assembly protein
  ENST ID: ENST00000525162
  CDS Start-End: 106-548
acttcaggggaagctgtgaaggcagctgcacctcctttgtcaagctgttggtttcaaccacagacacgaggacacacttgagacttaattcagtgcacaaatgagatgaatgtgaacatcccacagttggcagacagtttatttgaaagaactactaatagtagttgggtggtggtcttcaaatctctcattacaactcatcatttgatggtgtatggaaatgagcgttttattcagtatttggcttcaagaaacacgttgtttaacttaagcaattttttggataaaagtggattgcaaggatatgacatgtctacatttattaggcggtatagtagatatttaaatgagaaagcagtttcatacagacaagttgcatttgatttcacaaaagtgaagagaggggctgatggagttatgagaacaatgaacacagaaaaactcctaaaaactgtaccaattattcagaatcagatggatgcacttcttgattttaatgttaatagcaatgaacttacaaatggggtaataaatgctgccttcatgct

SEQ ID NO: 165006 - DNA, 963 bp, Homo sapiens
  Payload ID: 12497
  Gene Symbol: PICALM
  Gene Name: phosphatidylinositol binding clathrin assembly protein
  ENST ID: ENST00000530692
  CDS Start-End: 1-647
tgtttgttggattcactccttctccagttgcacagccacacccttcagctggccttaatgttgactttgaatctgtgtttggaaataaatctacaaatgttattgtagattctgggggtggacttctcaaaccaacagtggcctctcagaaccagaaccttcctgttgccaaactcccacctagcaagttagtatctgatgacttggattcatctttagccaaccttgtgggcaatcttggcatcggaaatggaaccactaagaatgatgtaaattggagtcaaccaggtgaaaagaagttaactgggggatctaactggcaaccaaaggttgcaccaacaaccgcttggaatgctgcaacaatgaatggcatgcattttccacaatacgcaccccctgtaatggcctatcctgctactacaccaacaggcatgataggatatggaattcctccacaaatgggaagtgttcctgtaatgacgcaaccaaccttaatatacagccagcctgtcatgagacctccaaacccctttggccctgtatcaggagcacagctgtcggcagcatccagcccctccagtcacagtcctcacagagcttcaggaaaggacccctttgcagagctctctttggaggatttcttataaatcactttagatacagtttatgtaacttgatggaagaaaatggaattactccaaaaagacaagtgctcaagcagcaaaatccttacttccagcaaaatccaaactgctgtctcttaaatctcttaaactctcttcttccattagaatgctacaagtaactcagtgaaggcccatgaaggaaattgggactagtttataggagaacgtatcaatacagtttataaagccaagaattgctatgatttaagactaagatctgtctttttggtgactaacccttcaattctttcaactcctgttaatacccataatcagt

SEQ ID NO: 165007 - DNA, 3474 bp, Homo sapiens
  Payload ID: 12497
  Gene Symbol: PICALM
  Gene Name: phosphatidylinositol binding clathrin assembly protein
  Uniprot ID: Q13492
  ENST ID: ENST00000532317
  CDS Start-End: 280-2112
ctcttaccctgcccggctccagctgacccgggaaggggtgggctgaactgaggcgggggcaagggagtgcccgacatcttgtccgactccgcgggtgacacgagccggttctctctggactggtggcagcgcgcggccccgaaccgcgccccaggccggcaggcggggaaggagccggtgggggtagggggtgcggtggggggtggggaccctccggctcttgggggtcccagtccccgccggctgctgagcgggtggggtggtggaggagctgcagagatgtccggccagagcctgacggaccgaatcactgccgcccagcacagtgtcaccggctctgccgtatccaagacagtatgcaaggccacgacccacgagatcatggggcccaagaaaaagcacctggactacttaattcagtgcacaaatgagatgaatgtgaacatcccacagttggcagacagtttatttgaaagaactactaatagtagttgggtggtggtcttcaaatctctcattacaactcatcatttgatggtgtatggaaatgagcgttttattcagtatttggcttcaagaaacacgttgtttaacttaagcaattttttggataaaagtggattgcaaggatatgacatgtctacatttattaggcggtatagtagatatttaaatgagaaagcagtttcatacagacaagttgcatttgatttcacaaaagtgaagagaggggctgatggagttatgagaacaatgaacacagaaaaactcctaaaaactgtaccaattattcagaatcagatggatgcacttcttgattttaatgttaatagcaatgaacttacaaatggggtaataaatgctgccttcatgctcctgttcaaagatgccattagactgtttgcagcatacaatgaaggaattattaatttgttggaaaaatattttgatatgaaaaagaaccaatgcaaagaaggtcttgacatctataagaagttcctaactaggatgacaagaatctcagagttcctcaaagttgcagagcaagttggaattgacagaggtgatataccagacctttcacaggcccctagcagtcttcttgatgctttggaacaacatttagcttccttggaaggaaagaaaatcaaagattctacagctgcaagcagggcaactacactttccaatgcagtgtcttccctggcaagcactggtctatctctgaccaaagtggatgaaagggaaaagcaggcagcattagaggaagaacaggcacgtttgaaagctttaaaggaacagcgcctaaaagaacttgcaaagaaacctcatacctctttaacaactgcagcctctcctgtatccacctcagcaggagggataatgactgcaccagccattgacatattttctacccctagttcttctaacagcacatcaaagctgcccaatgatctgcttgatttgcagcagccaacttttcacccatctgtacatcctatgtcaactgcttctcaggtagcaagtacatggggaggattcactccttctccagttgcacagccacacccttcagctggccttaatgttgactttgaatctgtgtttggaaataaatctacaaatgttattgtagattctgggggctttgatgaactaggtggacttctcaaaccaacagtggcctctcagaaccagaaccttcctgttgccaaactcccacctagcaagttagtatctgatgacttggattcatctttagccaaccttgtgggcaatcttggcatcggaaatggaaccactaagaatgatgtaaattggagtcaaccaggtgaaaagaagttaactgggggatctaactggcaaccaaaggttgcaccaacaaccgcttggaatgctgcaacaatgaatggcatgcattttccacaatacgcaccccctgtaatggcctatcctgctactacaccaacaggcatgataggatatggaattcctccacaaatgggaagtgttcctgtaatgacgcaaccaaccttaatatacagccagcctgtcatgagacctccaaacccctttggccctgtatcaggagcacagatacagtttatgtaacttgatggaagaaaatggaattactccaaaaagacaagtgctcaagcagcaaaatccttacttccagcaaaatccaaactgctgtctcttaaatctcttaaactctcttcttccattagaatgctacaagtaactcagtgaaggcccatgaaggaaattgggactagtttataggagaacgtatcaatacagtttataaagccaagaattgctatgatttaagactaagatctgtctttttggtgactaacccttcaattctttcaactcctgttaatacccataatcagtaacctatcaagaaaagcccttatttggaaagtgtgaaatttgtatttggaaaagctgcctggagagaagaactgtgtcctttactgtatttcaacaggactcttttgggggatcaaaattaaaattcctaattatgcattatctttcttttctccagtcctcacaaatacagaaacaataactgaaattaacttttctttttttaaaaaaaattatattcagtttgcagtagacattccttaagtatttgtatttatttatgattatcaattttacataacattaatattgtatcagacctccttatgaaaatgagtatggatgtgcacagtatgtttgatttttatccacaagaatgaatctgattcagaatgcttttctcagctgacatacagagcactaaatattttaaggcaagtccataggtctgaatctcttaagaattctcggcctctgtgggatttagggaagcattataaatgcattaatccttatagtcaattctgtgcctaggattttgccagggaacagttcactgactaggaaaagcactacattttaaattcagcattagtgcattgggaaggatctttactgctttgtgcttggcatgtcattattttccatttgacattagggcctttccaaaatgaatgtgaggaattgctttcacttcaagactttccttcttttcactaaaactctagaaggtgttacaagggggagggaaggggggcaaagtccttgaacattttctttggctcgtgccatgttatgatcatataccttttaaataaggggaaatagtatctttaaagttaatgtctagccaagagtttagtaaacgaagaattaaactgcactgttgatcggtgctttgtgtaaatacatctttaacatttgggtggagaggggccttaagaaggacagttcattgtaggaaagcaattctgtacatgagtttaagcattcttgttgcattgtctctgcagattctatttttgtttacaatattaaaatgtatgttagcaaaatgggtggattttcaaataaaatgcagcttccacaaaa

SEQ ID NO: 165008 - DNA, 2261 bp, Homo sapiens
  Payload ID: 12497
  Gene Symbol: PICALM
  Gene Name: phosphatidylinositol binding clathrin assembly protein
  ENST ID: ENST00000630913
  CDS Start-End: 150-467
gcgcggccccgaaccgcgccccaggccggcaggcggggaaggagccggtgggggtagggggtgcggtggggggtggggaccctccggctcttgggggtcccagtccccgccggctgctgagcgggtggggtggtggaggagctgcagagatgtccggccagagcctgacggaccgaatcactgccgcccagcacagtgtcaccggctctgccgtatccaagacagtatgcaaggccacgacccacgagatcatggggcccaagaaaaagcacctggactacttaattcagtgcacaaatgagatgaatgtgaacatcccacagttggcagacagtttatttgaaagaactactaatagtagttgggtggtggtcttcaaatctctcattacaactcatcatttgatggtgtatggaaatgaggatatgacatgtctacatttattaggcggtatagtagatatttaaatgagaaagcagtttcatacagacaagttgcatttgatttcacaaaagtgaagagaggggctgatggagttatgagaacaatgaacacagaaaaactcctaaaaactgtaccaattattcagaatcagatggatgcacttcttgattttaatgttaatagcaatgaacttacaaatggggtaataaatgctgccttcatgctcctgttcaaagatgccattagactgtttgcagcatacaatgaaggaattattaatttgttggaaaaatattttgatatgaaaaagaaccaatgcaaagaaggtcttgacatctataagaagttcctaactaggatgacaagaatctcagagttcctcaaagttgcagagcaagttggaattgacagaggtgatataccagacctttcacaggcccctagcagtcttcttgatgctttggaacaacatttagcttccttggaaggaaagaaaatcaaagattctacagctgcaagcagggcaactacactttccaatgcagtgtcttccctggcaagcactggtctatctctgaccaaagtggatgaaagggaaaagcaggcagcattagaggaagaacaggcacgtttgaaagctttaaaggaacagcgcctaaaagaacttgcaaagaaacctcatacctctttaacaactgcagcctctcctgtatccacctcagcaggagggataatgactgcaccagccattgacatattttctacccctagttcttctaacagcacatcaaagctgcccaatgatctgcttgatttgcagcagccaacttttcacccatctgtacatcctatgtcaactgcttctcaggtagcaagtacatggggagatcctttctctgctactgtagatgctgttgatgatgccattccaagcttaaatcctttcctcacaaaaagtagtggtgatgttcacctttccatttcttcagatgtatctacttttactactaggacacctactcatgaaatgtttgttggattcactccttctccagttgcacagccacacccttcagctggccttaatgttgactttgaatctgtgtttggaaataaatctacaaatgttattgtagattctgggggctttgatgaactaggtggacttctcaaaccaacagtggcctctcagaaccagaaccttcctgttgccaaactcccacctagcaagttagtatctgatgacttggattcatctttagccaaccttgtgggcaatcttggcatcggaaatggaaccactaagaatgatgtaaattggagtcaaccaggtgaaaagaagttaactgggggatctaactggcaaccaaaggttgcaccaacaaccgcttggaatgctgcaacaatggcaccccctgtaatggcctatcctgctactacaccaacaggcatgataggatatggaattcctccacaaatgggaagtgttcctgtaatgacgcaaccaaccttaatatacagccagcctgtcatgagacctccaaacccctttggccctgtatcaggagcacagatacagtttatgtaacttgatggaagaaaatggaattactccaaaaagacaagtgctcaagcagcaaaatccttacttccagcaaaatccaaactgctgtctcttaaatctcttaaactctcttcttccattagaatgctacaagtaactcagtgaaggcccatgaaggaaattgggactagtttataggagaacgtatcaatacagtttataaagccaagaattgctatgatttaagactaag

SEQ ID NO: 165009 - DNA, 3652 bp, Homo sapiens
  Payload ID: 12498
  Gene Symbol: PIGA
  Gene Name: phosphatidylinositol glycan anchor biosynthesis, class A
  Uniprot ID: P37287
  ENST ID: ENST00000333590
  CDS Start-End: 143-1597
attggtgctgcggaacagcagggagggactccggctgcagccgcgggaggtccggacactggcggccatggaactcaccggtaatagaggacacatctcttaactgggttgctctaagaactgatgtctaaaccgtctcagcatggcctgtagaggaggagctgggaatggccaccgtgcctcagctacactctctcgggttagccctggaagtctttacacatgtagaacccgtacccataatatatgcatggtatctgactttttctacccaaatatgggaggcgtggaaagccacatttaccagctctctcagtgcctgattgaaagagggcataaggttataattgtcacccatgcttatggaaatcgaaaaggcatccgttacctcaccagtggcctcaaagtctattacttgcctctgaaagtcatgtacaaccagtctacagccacgaccctctttcacagtctgccattgctcaggtacatatttgttcgggagagagtcacgataatccattcacatagttctttttctgctatggcccatgatgctctcttccacgccaagacaatggggcttcagacagtcttcacggaccattccctttttggatttgctgatgtcagctcggtgcttacaaacaagcttctaaccgtgtctctttgtgatacaaaccacatcatttgtgtgtcttatactagtaaggaaaatactgtactaagagcagcactgaatcctgaaatagtgtccgtcattcctaatgctgtagatcctactgacttcactccagacccatttagaaggcatgatagtataactattgttgttgtcagcagacttgtttacagaaaagggatcgatttgcttagtggtataatacctgaactctgtcagaaatatccagatttaaatttcataattggaggagagggaccaaagagaatcattttggaagaagttcgggaaagataccagctgcatgacagggtgcgtcttttgggagctttagaacacaaggatgttagaaatgtcttagttcaaggacatatttttctgaatacctcccttactgaagcattctgcatggcgatcgtggaagcagccagttgtggtttacaggttgtaagtaccagagttggtggaattcctgaggtgcttccagaaaaccttattattttatgtgagccttcagtaaaatctttgtgtgaaggattggaaaaggctattttccaactgaagtcagggacattgccagctccagaaaacatccataacatagtaaagactttctacacctggaggaatgttgcagaaagaactgaaaaggtatatgaccgggtatcagtggaagctgtgttgccaatggacaaacgactggacagacttatttctcactgcggcccagtaacaggctacatctttgctttgttggcagttttcaacttcctcttcctcattttcttgagatggatgactccagattctatcattgatgttgcaatagatgccactgggccacggggtgcctggactaataactattctcacagtaaaagagggggtgagaataatgagatatctgaaaccaggtagaaggaagcctagattgtaagattttaaacatttgtaatagttctataaagactatggaaaataaccttgcttttggggggtttttgtttttttagagttaatttagtaagttatgctacctctatatcattcaatattttctgttgaggaaagataaaaatgtatgcaattcctgagtgtagaaacttcttgcacttatttaaaatttaggagagaacatttaagccactcaggtatgcaatttttcagactactgaaatccctgtagcagagatgttttaacattatattttgagagctttgggtgctgaagggccaaacgttttctgggcattttttggccagtttttaatgtaacaccattagacactcaccagatgtttacaagttttctttaggggaactacaacaattatatgaactgttttatatcatgttcatatacatttattaggaatctaaatcatgtctttgaacatttattaggttcactcagtaggtgttacatgtaattaacaggttccttgagtaagatagtccatcagttaccagcacattttgaacccctgctctgtgtagaatgttgaactagatgcttcccgccattaaggaccaggggtgcattcactctttgtttaccattcaaatggcttacttcatcataattgtggttgatatgagatcaatatccaacatgccaaaaatgctcatgccagttaatgccaggaaaaaaatcaccgacacactactagtactttgttcctgttgtatgcattctcctaggtagagcctccatcttcagttgtgtttgtgaaggtattttttgctttttaaatactggggaccgatatcactgttgatagtgcagagaaaccctccacatttttcagtgcataattgagttttctataaatgccttcgtgttttctgagcagaatgtacgaggtgtgccatcccaaaaccagctgctaccctgtccttttaatgtaagtcactccccttcactgtggcctcgctgatgtctgataagtattgtcagtgtgcaaaaggctttacttcagaatggtttatttatagcaaactaagttgaaaattttagaaacagtctttgtgggtggatgttattaactgtcattgttgttgcccagagccatgggttttttaaccccaaattatccacatggtgtgtattatgaattctttgaactcttaaggtttttgtgagaaaaggactgtgaattcaaaacaataaggcacttgtgggtgcactacatagattctgacagtgttgtgattctgtataggatttttaaaaatgacaacattcacaaaatttattactttttaaaaaataacatgcctattaactggttgcactgatataaaagaaatatatttgtgttttgtttgtactaaaatgcaaaagcaagagtgcaatttttaaaatctagaagttaggggttttgttggagaaaaatggactgatctttaaactattcagtcttactgggatttttatgcatagaaactcacatataaacatgaaataaacagtgccagtattcataggaaagtgagaaactgtaatatttggccattattctattcaacaggttttagaggcatgccaccattttttccttatatttttgcttaatttttttaaattgtcatttaattcttaaactgtcatttatttgagatggaaataagatctaaagttagttgcctttgcctgtaaaacatgtgatttgcaaattattatttttcttttttttaacaaatggaagtaaatttgtttcacgtaaatcttaattttcaacctttctggataccttaattgtaactgtcagtttgcactggtcggtatatggaaacacattgctctaccctgctacttagttgattttaaagtgaatttacagtgatgagaaatttgtgaaaaatatattgtatttcttttgatgtttcaaaaggttgcctatgaaaaactgatttgttaaaacatgctacatgtccaaaaataaagaccagaatgacattttgataattttc

SEQ ID NO: 165010 - DNA, 3626 bp, Homo sapiens
  Payload ID: 12498
  Gene Symbol: PIGA
  Gene Name: phosphatidylinositol glycan anchor biosynthesis, class A
  Uniprot ID: P37287
  ENST ID: ENST00000542278
  CDS Start-End: 121-1575
ggatcgtggcgggtggtggagggggtgaaaccgacccggttcgaagcccggaagttgggtaatagaggacacatctcttaactgggttgctctaagaactgatgtctaaaccgtctcagcatggcctgtagaggaggagctgggaatggccaccgtgcctcagctacactctctcgggttagccctggaagtctttacacatgtagaacccgtacccataatatatgcatggtatctgactttttctacccaaatatgggaggcgtggaaagccacatttaccagctctctcagtgcctgattgaaagagggcataaggttataattgtcacccatgcttatggaaatcgaaaaggcatccgttacctcaccagtggcctcaaagtctattacttgcctctgaaagtcatgtacaaccagtctacagccacgaccctctttcacagtctgccattgctcaggtacatatttgttcgggagagagtcacgataatccattcacatagttctttttctgctatggcccatgatgctctcttccacgccaagacaatggggcttcagacagtcttcacggaccattccctttttggatttgctgatgtcagctcggtgcttacaaacaagcttctaaccgtgtctctttgtgatacaaaccacatcatttgtgtgtcttatactagtaaggaaaatactgtactaagagcagcactgaatcctgaaatagtgtccgtcattcctaatgctgtagatcctactgacttcactccagacccatttagaaggcatgatagtataactattgttgttgtcagcagacttgtttacagaaaagggatcgatttgcttagtggtataatacctgaactctgtcagaaatatccagatttaaatttcataattggaggagagggaccaaagagaatcattttggaagaagttcgggaaagataccagctgcatgacagggtgcgtcttttgggagctttagaacacaaggatgttagaaatgtcttagttcaaggacatatttttctgaatacctcccttactgaagcattctgcatggcgatcgtggaagcagccagttgtggtttacaggttgtaagtaccagagttggtggaattcctgaggtgcttccagaaaaccttattattttatgtgagccttcagtaaaatctttgtgtgaaggattggaaaaggctattttccaactgaagtcagggacattgccagctccagaaaacatccataacatagtaaagactttctacacctggaggaatgttgcagaaagaactgaaaaggtatatgaccgggtatcagtggaagctgtgttgccaatggacaaacgactggacagacttatttctcactgcggcccagtaacaggctacatctttgctttgttggcagttttcaacttcctcttcctcattttcttgagatggatgactccagattctatcattgatgttgcaatagatgccactgggccacggggtgcctggactaataactattctcacagtaaaagagggggtgagaataatgagatatctgaaaccaggtagaaggaagcctagattgtaagattttaaacatttgtaatagttctataaagactatggaaaataaccttgcttttggggggtttttgtttttttagagttaatttagtaagttatgctacctctatatcattcaatattttctgttgaggaaagataaaaatgtatgcaattcctgagtgtagaaacttcttgcacttatttaaaatttaggagagaacatttaagccactcaggtatgcaatttttcagactactgaaatccctgtagcagagatgttttaacattatattttgagagctttgggtgctgaagggccaaacgttttctgggcattttttggccagtttttaatgtaacaccattagacactcaccagatgtttacaagttttctttaggggaactacaacaattatatgaactgttttatatcatgttcatatacatttattaggaatctaaatcatgtctttgaacatttattaggttcactcagtaggtgttacatgtaattaacaggttccttgagtaagatagtccatcagttaccagcacattttgaacccctgctctgtgtagaatgttgaactagatgcttcccgccattaaggaccaggggtgcattcactctttgtttaccattcaaatggcttacttcatcataattgtggttgatatgagatcaatatccaacatgccaaaaatgctcatgccagttaatgccaggaaaaaaatcaccgacacactactagtactttgttcctgttgtatgcattctcctaggtagagcctccatcttcagttgtgtttgtgaaggtattttttgctttttaaatactggggaccgatatcactgttgatagtgcagagaaaccctccacatttttcagtgcataattgagttttctataaatgccttcgtgttttctgagcagaatgtacgaggtgtgccatcccaaaaccagctgctaccctgtccttttaatgtaagtcactccccttcactgtggcctcgctgatgtctgataagtattgtcagtgtgcaaaaggctttacttcagaatggtttatttatagcaaactaagttgaaaattttagaaacagtctttgtgggtggatgttattaactgtcattgttgttgcccagagccatgggttttttaaccccaaattatccacatggtgtgtattatgaattctttgaactcttaaggtttttgtgagaaaaggactgtgaattcaaaacaataaggcacttgtgggtgcactacatagattctgacagtgttgtgattctgtataggatttttaaaaatgacaacattcacaaaatttattactttttaaaaaataacatgcctattaactggttgcactgatataaaagaaatatatttgtgttttgtttgtactaaaatgcaaaagcaagagtgcaatttttaaaatctagaagttaggggttttgttggagaaaaatggactgatctttaaactattcagtcttactgggatttttatgcatagaaactcacatataaacatgaaataaacagtgccagtattcataggaaagtgagaaactgtaatatttggccattattctattcaacaggttttagaggcatgccaccattttttccttatatttttgcttaatttttttaaattgtcatttaattcttaaactgtcatttatttgagatggaaataagatctaaagttagttgcctttgcctgtaaaacatgtgatttgcaaattattatttttcttttttttaacaaatggaagtaaatttgtttcacgtaaatcttaattttcaacctttctggataccttaattgtaactgtcagtttgcactggtcggtatatggaaacacattgctctaccctgctacttagttgattttaaagtgaatttacagtgatgagaaatttgtgaaaaatatattgtatttcttttgatgtttcaaaaggttgcctatgaaaaactgatttgttaaaacatgctacatgtccaaaaataaagaccagaatgacattttgataat

SEQ ID NO: 165011 - DNA, 153 bp, Homo sapiens
  Payload ID: 12498
  Gene Symbol: PIGA
  Gene Name: phosphatidylinositol glycan anchor biosynthesis, class A
  ENST ID: ENST00000475746
  CDS Start-End: 1-153
caaggacatatttttctgaatacctcccttactgaagcattctgcatggcgatcgtggaagcagccagttgtggtttacaggtatatgaccgggtatcagtggaagctgtgttgccaatggacaaacgactggacagacttatttctcactgc

SEQ ID NO: 165012 - DNA, 854 bp, Homo sapiens
  Payload ID: 12498
  Gene Symbol: PIGA
  Gene Name: phosphatidylinositol glycan anchor biosynthesis, class A
  ENST ID: ENST00000634640
  CDS Start-End: 404-854
gactccggctgcagccgcgggaggtccggacactggcggccatggaactcaccggtaatagaggacacatctcttaactgggttgctctaagaactgatgtctaaaccgtctcagcatggcctgtagaggaggagctgggaatggccaccgtgcctcagctacactctctcggggatcgatttgcttagtggtataatacctgaactctgtcagaaatatccagatttaaatttcataattggaggagagggaccaaagagaatcattttggaagaagttcgggaaagataccagctgcatgacagggtgcgtcttttgggagctttagaacacaaggatgttagaaatgtcttagttcaaggacatatttttctgaatacctcccttactgaagcattctgcatggcgatcgtggaagcagccagttgtggtttacaggttgtaagtaccagagttggtggaattcctgaggtgcttccagaaaaccttattattttatgtgagccttcagtaaaatctttgtgtgaaggattggaaaaggctattttccaactgaagtcagggacattgccagctccagaaaacatccataacatagtaaagactttctacacctggaggaatgttgcagaaagaactgaaaaggtatatgaccgggtatcagtggaagctgtgttgccaatggacaaacgactggacagacttatttctcactgcggcccagtaacaggctacatctttgctttgttggcagttttcaacttcctcttcctcattttcttgagatggatgactccagattctatcattgatgttgcaatagatgccactgggccacggggtgcctggacta

SEQ ID NO: 165013 - DNA, 572 bp, Homo sapiens
  Payload ID: 12498
  Gene Symbol: PIGA
  Gene Name: phosphatidylinositol glycan anchor biosynthesis, class A
  ENST ID: ENST00000635543
  CDS Start-End: 116-572
gggtgaaaccgacccggttcgaagcccggaagttgggtcggagggtctccagagtaatagaggacacatctcttaactgggttgctctaagaactgatgtctaaaccgtctcagcatggcctgtagaggaggagctgggaatggccaccgtgcctcagctacactctctcgggttagccctggaagtctttacacatgtagaacccgtacccataatatatgcatggtatctgactttttctacccaaatatgggaggcgtggaaagccacatttaccagctctctcagtgcctgattgaaagagggcataaggttataattgtcacccatgcttatggaaatcgaaaaggcatccgttacctcaccagtggcctcaaagtctattacttgcctctgaaagtcatgtacaaccagtctacagccacgaccctctttcacagtctgccattgctcaggtacatatttgttcgggagagagtcacgataatccattcacatagttctttttctgctatggcccatgatgctctcttccacgccaagacaatggggcttcagacagtcttcacgg

SEQ ID NO: 165014 - DNA, 3246 bp, Homo sapiens
  Payload ID: 12498
  Gene Symbol: PIGA
  Gene Name: phosphatidylinositol glycan anchor biosynthesis, class A
  ENST ID: ENST00000635598
  CDS Start-End: 117-473
gactccggctgcagccgcgggaggtccggacactggcggccatggaactcaccggtaatagaggacacatctcttaactgggttgctctaagaactgatgtctaaaccgtctcagcatggcctgtagaggaggagctgggaatggccaccgtgcctcagctacactctctcgggttagccctggaagtctttacacatgtagaacccgtacccataatatatgcatggtatctgactttttctacccaaatatgggaggcgtggaaagccacatttaccagctctctcagtgcctgattgaaagagggcataaggttataattgtcacccatgcttatggaaatcgaaaaggcatccgttacctcaccagtggcctcaaagtctattacttgcctctgaaagtcatgtacaaccagtctacagccacgaccctctttcacagtctgccattgctcagggatcgatttgcttagtggtataatacctgaactctgtcagaaatatccagatttaaatttcataattggaggagagggaccaaagagaatcattttggaagaagttcgggaaagataccagctgcatgacagggtgcgtcttttgggagctttagaacacaaggatgttagaaatgtcttagttcaaggacatatttttctgaatacctcccttactgaagcattctgcatggcgatcgtggaagcagccagttgtggtttacaggttgtaagtaccagagttggtggaattcctgaggtgcttccagaaaaccttattattttatgtgagccttcagtaaaatctttgtgtgaaggattggaaaaggctattttccaactgaagtcagggacattgccagctccagaaaacatccataacatagtaaagactttctacacctggaggaatgttgcagaaagaactgaaaaggtatatgaccgggtatcagtggaagctgtgttgccaatggacaaacgactggacagacttatttctcactgcggcccagtaacaggctacatctttgctttgttggcagttttcaacttcctcttcctcattttcttgagatggatgactccagattctatcattgatgttgcaatagatgccactgggccacggggtgcctggactaataactattctcacagtaaaagagggggtgagaataatgagatatctgaaaccaggtagaaggaagcctagattgtaagattttaaacatttgtaatagttctataaagactatggaaaataaccttgcttttggggggtttttgtttttttagagttaatttagtaagttatgctacctctatatcattcaatattttctgttgaggaaagataaaaatgtatgcaattcctgagtgtagaaacttcttgcacttatttaaaatttaggagagaacatttaagccactcaggtatgcaatttttcagactactgaaatccctgtagcagagatgttttaacattatattttgagagctttgggtgctgaagggccaaacgttttctgggcattttttggccagtttttaatgtaacaccattagacactcaccagatgtttacaagttttctttaggggaactacaacaattatatgaactgttttatatcatgttcatatacatttattaggaatctaaatcatgtctttgaacatttattaggttcactcagtaggtgttacatgtaattaacaggttccttgagtaagatagtccatcagttaccagcacattttgaacccctgctctgtgtagaatgttgaactagatgcttcccgccattaaggaccaggggtgcattcactctttgtttaccattcaaatggcttacttcatcataattgtggttgatatgagatcaatatccaacatgccaaaaatgctcatgccagttaatgccaggaaaaaaatcaccgacacactactagtactttgttcctgttgtatgcattctcctaggtagagcctccatcttcagttgtgtttgtgaaggtattttttgctttttaaatactggggaccgatatcactgttgatagtgcagagaaaccctccacatttttcagtgcataattgagttttctataaatgccttcgtgttttctgagcagaatgtacgaggtgtgccatcccaaaaccagctgctaccctgtccttttaatgtaagtcactccccttcactgtggcctcgctgatgtctgataagtattgtcagtgtgcaaaaggctttacttcagaatggtttatttatagcaaactaagttgaaaattttagaaacagtctttgtgggtggatgttattaactgtcattgttgttgcccagagccatgggttttttaaccccaaattatccacatggtgtgtattatgaattctttgaactcttaaggtttttgtgagaaaaggactgtgaattcaaaacaataaggcacttgtgggtgcactacatagattctgacagtgttgtgattctgtataggatttttaaaaatgacaacattcacaaaatttattactttttaaaaaataacatgcctattaactggttgcactgatataaaagaaatatatttgtgttttgtttgtactaaaatgcaaaagcaagagtgcaatttttaaaatctagaagttaggggttttgttggagaaaaatggactgatctttaaactattcagtcttactgggatttttatgcatagaaactcacatataaacatgaaataaacagtgccagtattcataggaaagtgagaaactgtaatatttggccattattctattcaacaggttttagaggcatgccaccattttttccttatatttttgcttaatttttttaaattgtcatttaattcttaaactgtcatttatttgagatggaaataagatctaaagttagttgcctttgcctgtaaaacatgtgatttgcaaattattatttttcttttttttaacaaatggaagtaaatttgtttcacgtaaatcttaattttcaacctttctggataccttaattgtaactgtcagtttgcactggtcggtatatggaaacacattgctctaccctgctacttagttgattttaaagtgaatttacagtgatgagaaatttgtgaaaaatatattgtatttcttttgatgtttcaaaaggttgcctatgaaaaactgatttgttaaaacatgctacatgtccaaaaataaagaccagaatgacattttgata

SEQ ID NO: 165015 - DNA, 680 bp, Homo sapiens
  Payload ID: 12498
  Gene Symbol: PIGA
  Gene Name: phosphatidylinositol glycan anchor biosynthesis, class A
  ENST ID: ENST00000634286
  CDS Start-End: 1-300
gtcacccatgcttatggaaatcgaaaaggcatccgttacctcaccagtggcctcaaagtctattacttgcctctgaaagtcatgtacaaccagtctacagccacgaccctctttcacagtctgccattgctcaggagtttattggaccagatatcaaagtcccactggaatgtcttaagtgagagagaggataaatcaaagttttccttatccaggctttttggatgtctttttcctgagcctcctcttccaagcctgttttgctctcagtcaggatttaccagcactctgcatgtgtaggcacgctcacctgcttccttctgtagtgggatcgatttgcttagtggtataatacctgaactctgtcagaaatatccagatttaaatttcataattggaggagagggaccaaagagaatcattttggaagaagttcgggaaagataccagctgcatgacagggtgcgtcttttgggagctttagaacacaaggatgttagaaatgtcttagttcaaggacatatttttctgaatacctcccttactgaagcattctgcatggcgatcgtggaagcagccagttgtggtttacaggttgtaagtaccagagttggtggaattcctgaggtgcttccagaaaaccttattattttatgtgagccttcagtaaaatctttgtg

SEQ ID NO: 165016 - DNA, 1092 bp, Homo sapiens
  Payload ID: 12498
  Gene Symbol: PIGA
  Gene Name: phosphatidylinositol glycan anchor biosynthesis, class A
  ENST ID: ENST00000482148
  CDS Start-End: 66-1013
ccggtaatagaggacacatctcttaactgggttgctctaagaactgatgtctaaaccgtctcagcatggcctgtagaggaggagctgggaatggccaccgtgcctcagctacactctctcgggttagccctggaagtctttacacatgtagaacccgtacccataatatatgcatggtatctgactttttctacccaaatatgggaggcgtggaaagccacatttaccagctctctcagtgcctgattgaaagagggcataaggttataattgtcacccatgcttatggaaatcgaaaaggcatccgttacctcaccagtggcctcaaagtctattacttgcctctgaaagtcatgtacaaccagtctacagccacgaccctctttcacagtctgccattgctcagggtgcgtcttttgggagctttagaacacaaggatgttagaaatgtcttagttcaaggacatatttttctgaatacctcccttactgaagcattctgcatggcgatcgtggaagcagccagttgtggtttacaggttgtaagtaccagagttggtggaattcctgaggtgcttccagaaaaccttattattttatgtgagccttcagtaaaatctttgtgtgaaggattggaaaaggctattttccaactgaagtcagggacattgccagctccagaaaacatccataacatagtaaagactttctacacctggaggaatgttgcagaaagaactgaaaaggtatatgaccgggtatcagtggaagctgtgttgccaatggacaaacgactggacagacttatttctcactgcggcccagtaacaggctacatctttgctttgttggcagttttcaacttcctcttcctcattttcttgagatggatgactccagattctatcattgatgttgcaatagatgccactgggccacggggtgcctggactaataactattctcacagtaaaagagggggtgagaataatgagatatctgaaaccaggtagaaggaagcctagattgtaagattttaaacatttgtaatagttctataaagactatggaaaataaccttgcttttggggg

SEQ ID NO: 165017 - DNA, 965 bp, Homo sapiens
  Payload ID: 12498
  Gene Symbol: PIGA
  Gene Name: phosphatidylinositol glycan anchor biosynthesis, class A
  ENST ID: ENST00000634582
  CDS Start-End: 32-784
gcagccgcgggaggtccggacactggcggccatggaactcaccgggatcgatttgcttagtggtataatacctgaactctgtcagaaatatccagatttaaatttcataattggaggagagggaccaaagagaatcattttggaagaagttcgggaaagataccagctgcatgacagggtgcgtcttttgggagctttagaacacaaggatgttagaaatgtcttagttcaaggacatatttttctgaatacctcccttactgaagcattctgcatggcgatcgtggaagcagccagttgtggtttacaggttgtaagtaccagagttggtggaattcctgaggtgcttccagaaaaccttattattttatgtgagccttcagtaaaatctttgtgtgaaggattggaaaaggctattttccaactgaagtcagggacattgccagctccagaaaacatccataacatagtaaagactttctacacctggaggaatgttgcagaaagaactgaaaaggtatatgaccgggtatcagtggaagctgtgttgccaatggacaaacgactggacagacttatttctcactgcggcccagtaacaggctacatctttgctttgttggcagttttcaacttcctcttcctcattttcttgagatggatgactccagattctatcattgatgttgcaatagatgccactgggccacggggtgcctggactaataactattctcacagtaaaagagggggtgagaataatgagatatctgaaaccaggtagaaggaagcctagattgtaagattttaaacatttgtaatagttctataaagactatggaaaataaccttgcttttggggggtttttgtttttttagagttaatttagtaagttatgctacctctatatcattcaatattttctgttgaggaaagataaaaatgtatgcaattcctgagtgta

SEQ ID NO: 165018 - DNA, 2172 bp, Homo sapiens
  Payload ID: 12499
  Gene Symbol: PIGB
  Gene Name: phosphatidylinositol glycan anchor biosynthesis, class B
  Uniprot ID: Q92521
  ENST ID: ENST00000164305
  CDS Start-End: 292-1956
actaaactcgctaccgcctgctcccctccagagaccgggggccttccagcagttttcggacccccgagcacagagaccgccaagccaaaggcgagtagcaatccctcggttcggaaacggcgaaaggaaaccgcaaggaggccaccacgtcgggtgggagctacgaagttgcccgttcccggttacttccgggcttgcgagcgacgactgctctcaaaggccaaacttaatggatggacgagcagcgcgctactgcagctttcttccgccttaggaaggtggcggccagggatgaggaggcccctaagcaagtgcggaatggagccggggggcggagatgccagcctcactttgcatggtctccagaaccgctcccacggcaagataaagctgcgaaagagaaagtctaccttgtacttcaacacccaggagaagagcgccaggcgccgcggggatcttcttggagaaaatatttatctgctcttgtttaccatagctttacgaatattaaactgctttttagtgcagacaagttttgttccagatgaatactggcagtctcttgaagtttcacatcacatggttttcaattatggttatttgacttgggaatggacagagagactgaggagttacacttatcccttaatctttgcaagcatttacaagattcttcatcttttagggaaagatagtgttcagttgctgatttggattcctagacttgcccaagcacttctgtctgctgtagcagatgtgagactttactcattaatgaagcaactagaaaatcaggaagtggcaagatgggtgtttttttgccagttgtgctcctggttcacatggtattgctgtaccagaacccttacaaacaccatggaaactgttctcactataattgctcttttctactatcctttggaaggttcaaagtctatgaacagtgtcaaatactcatccctggtggcacttgccttcataattcgtcccacagctgtcattctgtggacacctttgctcttcagacatttctgtcaagaaccaagaaagcttgatcttattctacatcattttttacctgtaggctttgttactttgagtttgtctctgatgattgatcgtattttttttggccaatggactctggttcaatttaattttttgaaatttaacgtgctgcagaactggggaacattttatggttctcatccatggcactggtacttcagtcaaggatttccagttatcttgggtactcacttacccttctttattcatggctgctatctagcaccaaagagataccggatacttttggtgactgtgctgtggacactgcttgtttatagcatgttgagccacaaagaattcaggtttatttatccagttttaccattctgtatggtgttctgtggatactcattaacccacctgaaaacatggaagaaaccagctctaagtttcctgtttttatcaaatttgttcctcgccctttatactggtttagttcatcaacgaggtactcttgatgtcatgagtcatattcaaaaagtttgttacaacaatcccaataaatcttcagcttcaatatttataatgatgccttgccactctactccttattacagccatgttcactgcccacttcccatgagatttctccagtgcccgccagacctgactggaaaaagtcattatcttgatgaagcagatgtattttacctaaatcccttaaactggttacatagagagtttcatgatgatgcatcattgcctactcacttgatcaccttcagcattttggaagaggaaataagcgctttcctaatttcaagcaattataaaagaactgctgttttcttccacactcacttgccagagggtcgaattggaagtcacatatatgtctatgaacggaagttaaaagggaaattcaacatgaagatgaaattctgaactttcctagataaattaacattgctgggtggaaatattcagatgctgcttaaatacttcggtaaacactgggtaagattcatggaacttagaaaaaagctgtatgaactgctttaccaaatatcactactgaggaaatgtataaaataccacatagtataaaattacatgttaatacaatgccagattttaaataaagacctttagttttcctca

SEQ ID NO: 165019 - DNA, 1668 bp, Homo sapiens
  Payload ID: 12499
  Gene Symbol: PIGB
  Gene Name: phosphatidylinositol glycan anchor biosynthesis, class B
  ENST ID: ENST00000539642
  CDS Start-End: 1-1668
atgaggaggcccctaagcaagtgcggaatggagccggggggcggagatgccagcctcactttgcatggtctccagaaccgctcccacggcaagataaagctgcgaaagagaaagtctaccttgtacttcaacacccaggagaagagcgccaggcgccgcggggatcttcttggagaaaatatttatctgctcttgtttaccatagctttacgaatattaaactgctttttagtgcagacaagttttgttccagatgaatactggcagtctcttgaagtttcacatcacatggttttcaataattatggttatttgacttgggaatggacagagagactgaggagttacacttatcccttaatctttgcaagcatttacaagattcttcatcttttagggaaagatagtgttcagttgctgatttggattcctagacttgcccaagcacttctgtctgctgtagcagatgtgagactttactcattaatgaagcaactagaaaatcaggaagtggcaagatgggtgtttttttgccagttgtgctcctggttcacatggtattgctgtaccagaacccttacaaacaccatggaaactgttctcactataattgctcttttctactatcctttggaaggttcaaagtctatgaacagtgtcaaatactcatccctggtggcacttgccttcataattcgtcccacagctgtcattctgtggacacctttgctcttcagacatttctgtcaagaaccaagaaagcttgatcttattctacatcattttttacctgtaggctttgttactttgagtttgtctctgatgattgatcgtattttttttggccaatggactctggttcaatttaattttttgaaatttaacgtgctgcagaactggggaacattttatggttctcatccatggcactggtacttcagtcaaggatttccagttatcttgggtactcacttacccttctttattcatggctgctatctagcaccaaagagataccggatacttttggtgactgtgctgtggacactgcttgtttatagcatgttgagccacaaagaattcaggtttatttatccagttttaccattctgtatggtgttctgtggatactcattaacccacctgaaaacatggaagaaaccagctctaagtttcctgtttttatcaaatttgttcctcgccctttatactggtttagttcatcaacgaggtactcttgatgtcatgagtcatattcaaaaagtttgttacaacaatcccaataaatcttcagcttcaatatttataatgatgccttgccactctactccttattacagccatgttcactgcccacttcccatgagatttctccagtgcccgccagacctgactggaaaaagtcattatcttgatgaagcagatgtattttacctaaatcccttaaactggttacatagagagtttcatgatgatgcatcattgcctactcacttgatcaccttcagcattttggaagaggaaataagcgctttcctaatttcaagcaattataaaagaactgctgttttcttccacactcacttgccagagggtcgaattggaagtcacatatatgtctatgaacggaagttaaaagggaaattcaacatgaagatgaaattctga

SEQ ID NO: 165020 - DNA, 781 bp, Homo sapiens
  Payload ID: 12499
  Gene Symbol: PIGB
  Gene Name: phosphatidylinositol glycan anchor biosynthesis, class B
  ENST ID: ENST00000565502
  CDS Start-End: 1-267
ggctgctatctagcaccaaagagataccggatacttttggtgactgtgctgtggacactgcttgtttatagcatgttgagccacaaagaattcaggtttatttatccagttttaccattctgtatggtgttctgtggatactcattaacccacctgaaaacatggaagaaaccagctctaagtttcctgtttttatcaaatttgttcctcgccctttatactggtttagttcatcaacgagccatgttcactgcccacttcccatgagatttctccagtgcccgccagacctgactggaaaaagtcattatcttgatgaagcagatgtattttacctaaatcccttaaactggttacatagagagtttcatgatgatgcatcattgcctactcacttgatcaccttcagcattttggaagaggaaataagcgctttcctaatttcaagcaattataaaagaactgctgttttcttccacactcacttgccagagggtcgaattggaagtcacatatatgtctatgaacggaagttaaaagggaaattcaacatgaagatgaaattctgaactttcctagataaattaacattgctgggtggaaatattcagatgctgcttaaatacttcggtaaacactgggtaagattcatggaacttagaaaaaagctgtatgaactgctttaccaaatatcactactgaggaaatgtataaaataccacatagtataaaattacatgttaatacaatgccagattttaaataaagacctttagttttc

SEQ ID NO: 165021 - DNA, 1812 bp, Homo sapiens
  Payload ID: 12499
  Gene Symbol: PIGB
  Gene Name: phosphatidylinositol glycan anchor biosynthesis, class B
  ENST ID: ENST00000565367
  CDS Start-End: 292-696
actaaactcgctaccgcctgctcccctccagagaccgggggccttccagcagttttcggacccccgagcacagagaccgccaagccaaaggcgagtagcaatccctcggttcggaaacggcgaaaggaaaccgcaaggaggccaccacgtcgggtgggagctacgaagttgcccgttcccggttacttccgggcttgcgagcgacgactgctctcaaaggccaaacttaatggatggacgagcagcgcgctactgcagctttcttccgccttaggaaggtggcggccagggatgaggaggcccctaagcaagtgcggaatggagccggggggcggagatgccagcctcactttgcatggtctccagaaccgctcccacggcaagataaagctgcgaaagagaaagtctaccttgtacttcaacacccaggagaagagcgccaggcgccgcggggtttttttgccagttgtgctcctggttcacatggtattgctgtaccagaacccttacaaacaccatggaaactgttctcactataattgctcttttctactatcctttggaaggttcaaagtctatgaacagtgtcaaatactcatccctggtggcacttgccttcataattcgtcccacagctgtcattctgtggacacctttgctcttcagacatttctgtcaagaaccaagaaagcttgatcttattctacatcattttttacctgtaggctttgttactttgagtttgtctctgatgattgatcgtattttttttggccaatggactctggttcaatttaattttttgaaatttaacgtgctgcagaactggggaacattttatggttctcatccatggcactggtacttcagtcaaggatttccagttatcttgggtactcacttacccttctttattcatggctgctatctagcaccaaagagataccggatacttttggtgactgtgctgtggacactgcttgtttatagcatgttgagccacaaagaattcaggtttatttatccagttttaccattctgtatggtgttctgtggatactcattaacccacctgaaaacatggaagaaaccagctctaagtttcctgtttttatcaaatttgttcctcgccctttatactggtttagttcatcaacgaggtactcttgatgtcatgagtcatattcaaaaagtttgttacaacaatcccaataaatcttcagcttcaatatttataatgatgccttgccactctactccttattacagccatgttcactgcccacttcccatgagatttctccagtgcccgccagacctgactggaaaaagtcattatcttgatgaagcagatgtattttacctaaatcccttaaactggttacatagagagtttcatgatgatgcatcattgcctactcacttgatcaccttcagcattttggaagaggaaataagcgctttcctaatttcaagcaattataaaagaactgctgttttcttccacactcacttgccagagggtcgaattggaagtcacatatatgtctatgaacggaagttaaaagggaaattcaacatgaagatgaaattctgaactttcctagataaattaacattgctgggtggaaatattcagatgctgcttaaatacttcggtaaacactgggtaagattcatggaacttagaaaaaagctgtatgaactgctttaccaaatatcactactgaggaaatgtataaaataccacatagtataaaattacatgttaatacaatgccagattttaaataaagacctttagttttcctc

SEQ ID NO: 165022 - DNA, 582 bp, Homo sapiens
  Payload ID: 12499
  Gene Symbol: PIGB
  Gene Name: phosphatidylinositol glycan anchor biosynthesis, class B
  ENST ID: ENST00000570059
  CDS Start-End: 20-196
aggaaggtggcggccagggatgaggaggcccctaagcaagtgcggaatggagccggggggcggagatgccagcctcactttgcatggtctccagaaccgctcccacggcaagataaagctgcgaaagagaaagtctaccttgtacttcaacacccaggagaagagcgccaggcgccgcggggatttggattcctagacttgcccaagcacttctgtctgctgtagcagatgtgagactttactcattaatgaagcaactagaaaatcaggaagtggcaagatgggtgtttttttgccagttgtgctcctggttcacatggtattgctgtaccagaacccttacaaacaccatggaaactgttctcactataattgctcttttctactatcctttggaaggttcaaagtctatgaacagtgtcaaatactcatccctggtggcacttgccttcataattcgtcccacagctgtcattctgtggacacctttgctcttcagacatttctgtcaagaaccaagaaagcttgatcttattctacatcattttttacctgtaggctttgttactttgagtttgtctc

SEQ ID NO: 165023 - DNA, 773 bp, Homo sapiens
  Payload ID: 12499
  Gene Symbol: PIGB
  Gene Name: phosphatidylinositol glycan anchor biosynthesis, class B
  ENST ID: ENST00000566999
  CDS Start-End: 7-773
ccagggatgaggaggcccctaagcaagtgcggaatggagccggggggcggagatgccagcctcactttgcatggtctccagaaccgctcccacggcaagataaagctgcgaaagagaaagtctaccttgtacttcaacacccaggagaagagcgccaggcgccgcggggatcttcttggagaaaatatttatctgctcttgtttaccatagctttacgaatattaaactgctttttagtgcagacaagttttgttccagatgaatactggcagtctcttgaagtttcacatcacatggttttcaaagagagactgaggagttacacttatcccttaatctttgcaagcatttacaagattcttcatcttttagggaaagatagtgttcagttgctgatttggattcctagacttgcccaagcacttctgtctgctgtagcagatgtgagactttactcattaatgaagcaactagaaaatcaggaagtggcaagatgggtgtttttttgccagttgtgctcctggttcacatggtattgctgtaccagaacccttacaaacaccatggaaactgttctcactataattgctcttttctactatcctttggaaggttcaaagtctatgaacagtgtcaaatactcatccctggtggcacttgccttcataattcgtcccacagctgtcattctgtggacacctttgctcttcagacatttctgtcaagaaccaagaaagcttgatcttattctacatcattttttacctgtagg

SEQ ID NO: 165024 - DNA, 1447 bp, Homo sapiens
  Payload ID: 12500
  Gene Symbol: PIGC
  Gene Name: phosphatidylinositol glycan anchor biosynthesis, class C
  Uniprot ID: Q92535
  ENST ID: ENST00000344529
  CDS Start-End: 282-1175
gccccggcgccccgaagcgggaaaaaggctgggtgccgccgtcccccagctgcgcaaccctaggaactctcgggaacttggctgtgttgtcctgcctcagagacaaattcatctattgtaggcctagcccctgcctttgaaaacaaggaaaggttggtagaacatcaacacagcatggaatttccagggaggtctcatttcaaaacttcataaagaacaagaaccacctggacttctgtgagggcgatgattaaactggcctgagtttgaatgaaaggataatgtatgctcaacctgtgactaacaccaaggaggtcaagtggcagaaggtcttgtatgagcgacagccctttcctgataactatgtggaccggcgattcctggaagagctccggaaaaacatccatgctcggaaataccaatattgggctgtggtatttgagtccagtgtggtgatccagcagctgtgcagtgtttgtgtttttgtggttatctggtggtatatggatgagggtcttctggccccccattggcttttagggactggtctggcttcttcactgattgggtatgttttgtttgatctcattgatggaggtgaagggcggaagaagagtgggcagacccggtgggctgacctgaagagtgccctagtcttcattactttcacttatgggttttcaccagtgctgaagacccttacagagtctgtcagcactgacaccatctatgccatgtcagtcttcatgctgttaggccatctcatcttttttgactatggtgccaatgctgccattgtatccagcacactatccttgaacatggccatctttgcttctgtatgcttggcatcacgtcttccccggtccctgcatgccttcatcatggtgacatttgccattcagatttttgccctgtggcccatgttgcagaagaaactaaaggcatgtactccccggagctatgtgggggtcacactgctttttgcattttcagccgtgggaggcctactgtccattagtgctgtgggagccgtactctttgcccttctgctgatgtctatctcatgtctgtgtccattctacctcattcgcttgcagctttttaaagaaaacattcatgggccttgggatgaagctgaaatcaaggaagacttgtccaggttcctcagttaaattaggacatccattacattattaaagcaagctgatagattagcctcctaactagtatagaacttaaagacagagttccattctggaagcagcatgtcattgtggtaagagaatagagatcaaaaccaaaaaaaatgaaccaaaggcttgggtggtgagggtgcttatcctttctgttattttgtagatgaaaaaactttctggggacctcttgaattacatgctgtaacatatgaagtgatgtggtttctattaaaaaaataacacatcca

SEQ ID NO: 165025 - DNA, 2630 bp, Homo sapiens
  Payload ID: 12500
  Gene Symbol: PIGC
  Gene Name: phosphatidylinositol glycan anchor biosynthesis, class C
  Uniprot ID: Q92535
  ENST ID: ENST00000367728
  CDS Start-End: 1465-2358
cccggaagtgcttggccacagtcgcagccccggcgccccgaagcgggaaaaaggctgggtgccgccgtcccccagctgcgcaaccctaggaactctcgggtaggtgggttccgtgtaacggtcagtgtttccggggctccttttcctctgctgcctcccgcagacccaaggctgagtgaggggcggcggcggaagtgggaggcccacccaaaaagccaaatggggtgccagaagagtgaaggcgcaccctggggtcaccctaccctaccccgtcccctcccagccccactctgcgggcgggcgctgcccttttgggcgtcgcagaccctccaaccccggcggcggccttaagattcccgggctgggatccctgctgcagagggggtaacggtgtctggcttgccaagcaatatttgttgtggtctatcatggaagaaataaagtcgggcaatatgaattttttttttctcaaatttgccggatggctgtggtgtttctgactcttagttttctcattgtgaaaaaggaatgattatcttcttcgatcctctcaagagtttccttgttttgagtagattgatagctctttaaaggatgctaagctcagctaatggaagaagagtctagtttctttgaggctttgattttggttaaactatagagctcatacctttctgtatggtgcagcttactattgtctttggattggtaacttaaaaaatacaaataacatgcctttgagaaccaataaaaactatggatattatccctataaatttacacaaatccagatataagcatgcaatgtgatatacctaagggatatgtgaaccactgagttaagaactgctttagagggagatacaatgtgagacacaggctttgggataagactttggtttgaatcctggctctgctctgttaccttagggcaaagttacttaagcatcttgaatctcagcttttttaccaaagcaggactaatactaacttacaaggtggtgaggattaagtgaaagaagatacataaggcacttagcacatagtaggtactcaataagcgatagctaacagatgtctattattattcaaggaattataattttcaaatctgaaatgcagttttaatgtcccataaggtgactaccacatacatttttctcagacttttagtaaactgagttgatttgactttatctcagtactactcttgacctttcacaactttcgtaggttcacagtctctctttttctaggaacttggctgtgttgtcctgcctcagagacaaattcatctattgtaggcctagcccctgcctttgaaaacaaggaaaggttggtagaacatcaacacagcatggaatttccagggaggtctcatttcaaaacttcataaagaacaagaaccacctggacttctgtgagggcgatgattaaactggcctgagtttgaatgaaaggataatgtatgctcaacctgtgactaacaccaaggaggtcaagtggcagaaggtcttgtatgagcgacagccctttcctgataactatgtggaccggcgattcctggaagagctccggaaaaacatccatgctcggaaataccaatattgggctgtggtatttgagtccagtgtggtgatccagcagctgtgcagtgtttgtgtttttgtggttatctggtggtatatggatgagggtcttctggccccccattggcttttagggactggtctggcttcttcactgattgggtatgttttgtttgatctcattgatggaggtgaagggcggaagaagagtgggcagacccggtgggctgacctgaagagtgccctagtcttcattactttcacttatgggttttcaccagtgctgaagacccttacagagtctgtcagcactgacaccatctatgccatgtcagtcttcatgctgttaggccatctcatcttttttgactatggtgccaatgctgccattgtatccagcacactatccttgaacatggccatctttgcttctgtatgcttggcatcacgtcttccccggtccctgcatgccttcatcatggtgacatttgccattcagatttttgccctgtggcccatgttgcagaagaaactaaaggcatgtactccccggagctatgtgggggtcacactgctttttgcattttcagccgtgggaggcctactgtccattagtgctgtgggagccgtactctttgcccttctgctgatgtctatctcatgtctgtgtccattctacctcattcgcttgcagctttttaaagaaaacattcatgggccttgggatgaagctgaaatcaaggaagacttgtccaggttcctcagttaaattaggacatccattacattattaaagcaagctgatagattagcctcctaactagtatagaacttaaagacagagttccattctggaagcagcatgtcattgtggtaagagaatagagatcaaaaccaaaaaaaatgaaccaaaggcttgggtggtgagggtgcttatcctttctgttattttgtagatgaaaaaactttctggggacctcttgaattacatgctgtaacatatgaagtgatgtggtttctattaaaaaaataacacatcca

SEQ ID NO: 165026 - DNA, 1372 bp, Homo sapiens
  Payload ID: 12501
  Gene Symbol: PIGF
  Gene Name: phosphatidylinositol glycan anchor biosynthesis, class F
  Uniprot ID: Q07326
  ENST ID: ENST00000281382
  CDS Start-End: 172-831
ttttgcccgcccctccctttctgcgactggctgttaggcgtgggtctccgccccacagccctgcgcctgcgcgtgggcctgggccgcccgtcgtacctgatggtaggaggcagtagttccccgcttcccttccgcgggagggagagttagctagccatccaagaaaacaccatgaaagataacgatatcaagagactactgtatacccatcttttatgcatattttcaattatcctaagtgtcttcattccatcactcttcttggagaacttctcaatattggaaacacacttgacatggttgtgcatctgttctggttttgtaactgctgtcaatctagtactatatttagtagtgaaaccaaatacatcctctaaaagaagttcattatcacacaaggtaactggatttttgaaatgctgtatctactttcttatgtcttgtttctcctttcatgtaatttttgttctgtatggagcaccactgatagagttggcattggaaacatttttatttgcagttattttgtctacttttactactgtgccttgcttatgtttgttaggaccaaacctcaaagcatggctaagagtgttcagtagaaatggagttacatccatatgggagaatagtctccagatcactacaatttctagctttgtaggagcatggcttggagcacttcctattccactggattgggaaagaccatggcaggtatggcccatctcctgtacgcttggagcgacctttggctacgtggctggccttgttatttcaccactctggatatactggaatagaaagcaacttacatacaagaacaattaactggagcaaagggagatatttctttgtgcagattctgtaagggctgggcagaaatgtgtatggtcaaagccaagcagttccatttacagctctgttttttacgtagttacaacatgatgtgattgtagctttttaaactatgaaacccctgagagattgtaccttctagttgaaataaagtatttataatagattgtggcttcagatgctgcttactgcttcttaaacctttaaggaacattcttaatacactttatagaattctgaggacaggttttgttttctttcaagttttgaactgcttcattacctataaaaggtctgggtatagctgtagcatttcatttgctttctgagagaaatggacagtttccttggccactgaagatgtttctcacgtaattaaacaacagtttatacatcttgatcctattcttttttttacagtgtgtttctttggagttaaaatggctatgatagcctcatcaaaaacagtcttcaatcccttctgggttaaagctgaacattccacatagcagca

SEQ ID NO: 165027 - DNA, 1061 bp, Homo sapiens
  Payload ID: 12501
  Gene Symbol: PIGF
  Gene Name: phosphatidylinositol glycan anchor biosynthesis, class F
  Uniprot ID: Q07326
  ENST ID: ENST00000306465
  CDS Start-End: 104-724
gcgcgtgggcctgggccgcccgtcgtacctgatggtaggaggcagtagttccccgcttcccttccgcgggagggagagttagctagccatccaagaaaacaccatgaaagataacgatatcaagagactactgtatacccatcttttatgcatattttcaattatcctaagtgtcttcattccatcactcttcttggagaacttctcaatattggaaacacacttgacatggttgtgcatctgttctggttttgtaactgctgtcaatctagtactatatttagtagtgaaaccaaatacatcctctaaaagaagttcattatcacacaaggtaactggatttttgaaatgctgtatctactttcttatgtcttgtttctcctttcatgtaatttttgttctgtatggagcaccactgatagagttggcattggaaacatttttatttgcagttattttgtctacttttactactgtgccttgcttatgtttgttaggaccaaacctcaaagcatggctaagagtgttcagtagaaatggagttacatccatatgggagaatagtctccagatcactacaatttctagctttgtaggagcatggcttggagcacttcctattccactggattgggaaagaccatggcagatgacagtagaaagaaaacgtagcacttatagatctctccatgtaccctgcagggggcttggtactgtgaaatgagtaacttaatcctgacaaccgtagtgcaaggtatggcccatctcctgtacgcttggagcgacctttggctacgtggctggccttgttatttcaccactctggatatactggaatagaaagcaacttacatacaagaacaattaactggagcaaagggagatatttctttgtgcagattctgtaagggctgggcagaaatgtgtatggtcaaagccaagcagttccatttacagctctgttttttacgtagttacaacatgatgtgattgtagctttttaaactatgaaacccctgagagattgtaccttctagttgaaataaagtatttataataga

SEQ ID NO: 165028 - DNA, 586 bp, Homo sapiens
  Payload ID: 12501
  Gene Symbol: PIGF
  Gene Name: phosphatidylinositol glycan anchor biosynthesis, class F
  ENST ID: ENST00000420164
  CDS Start-End: 1-174
ttaggaccaaacctcaaagcatggctaagagtgttcagtagaaatggagttacatccatatgggagaatagtctccagatcactacaatttctagctttgtaggagcatggcttggagcacttcctattccactggattgggaaagaccatggcagaagcagatagcaaggtaatttttgcagcagcggcctgtgttatcaagaaagctcacaaacatcagatttttcgtcttgtatcacaataagataaagctgatatgctaggtaaagcactgtgaggtatggcccatctcctgtacgcttggagcgacctttggctacgtggctggccttgttatttcaccactctggatatactggaatagaaagcaacttacatacaagaacaattaactggagcaaagggagatatttctttgtgcagattctgtaagggctgggcagaaatgtgtatggtcaaagccaagcagttccatttacagctctgttttttacgtagttacaacatgatgtgattgtagctttttaaactatgaaacccctgagagattgtaccttctagttgaaataaagtatttataataga

SEQ ID NO: 165029 - DNA, 737 bp, Homo sapiens
  Payload ID: 12501
  Gene Symbol: PIGF
  Gene Name: phosphatidylinositol glycan anchor biosynthesis, class F
  ENST ID: ENST00000412717
  CDS Start-End: 108-446
gcctgcgcgtgggcctgggccgcccgtcgtacctgatggtaggaggcagtagttccccgcttcccttccgcgggagggagagttagctagccatccaagaaaacaccatgaaagataacgatatcaagagactactgtatacccatcttttatgcatattttcaattatcctaagtgtcttcattccatcactcttcttggagaacttctcaatattggaaacacacttgacatggttgtgcatctgttctggttttgtaactgctgtcaatctagtactatatttagtagtgaaaccaaatacatcctctaaaagaagttcattatcacacaaggttggcattggaaacatttttatttgcagttattttgtctacttttactactgtgccttgcttatgtttgttaggaccaaacctcaaagcatggctaagagtgttcagtagaaatggagttacatccatatgggagaatagtctccagatcactacaatttctagctttgtaggagcatggcttggagcacttcctattccactggattgggaaagaccatggcaggtatggcccatctcctgtacgcttggagcgacctttggctacgtggctggccttgttatttcaccactctggatatactggaatagaaagcaacttacatacaagaacaattaactggagcaaagggagatatttctttgtgcagattctgtaagggctgggcagaaatgtgtatg

SEQ ID NO: 165030 - DNA, 619 bp, Homo sapiens
  Payload ID: 12501
  Gene Symbol: PIGF
  Gene Name: phosphatidylinositol glycan anchor biosynthesis, class F
  ENST ID: ENST00000474980
  CDS Start-End: 473-619
gccgcccgtcgtacctgatggtaggaggcagtagttccccgcttcccttccgcgggagggagagttaggtaagccccgctggacgccctcggcgtctcgcctcacgaggtgcaagctacccccgcgaattgccgaagcagccctgagccttggcgccccgacccgccggcgctcgccgtcagctcagcgccactcttccggcgtgccctgatggacagaccccctttcggatccgagttttcgcctctgtcccccagttttcccttgtcttcaactcccatgctctttgatcctgcctctcagctggttcctcgctgcccacgcttgcgccggcgtaggctcgggcagaatcccgagggacccgggttggggtggggctgccggtgaaggtgcggcgatgcccgcgaaggctcctctgggtgccgctcggaagagccttctctccgctgcgctagccatccaagaaaacaccatgaaagataacgatatcaagagactactgtatacccatcttttatgcatattttcaattatcctaagtgtcttcattccatcactcttcttggagaacttctcaatattggaaacacacttgacatggttgtgcatctgttctggt

SEQ ID NO: 165031 - DNA, 3203 bp, Homo sapiens
  Payload ID: 12502
  Gene Symbol: PIGG
  Gene Name: phosphatidylinositol glycan anchor biosynthesis, class G
  Uniprot ID: Q5H8A4
  ENST ID: ENST00000310340
  CDS Start-End: 116-3043
gacgataaggcctggcgttattgcttagaggcggctacctggagccggaagcgcggctgcagcagggcgaggctccaggtggggtcggttccgcatccagcctagcgtgtccacgatgcggctgggctccgggactttcgctacctgttgcgtagcgatcgaggtgctagggatcgcggtcttccttcggggattcttcccggctcccgttcgttcctctgccagagcggaacacggagcggagcccccagcgcccgaaccctcggctggagccagttctaactggaccacgctgccaccacctctcttcagtaaagttgttattgttctgatagatgccttgagagatgattttgtgtttgggtcaaagggtgtgaaatttatgccctacacaacttaccttgtggaaaaaggagcatctcacagttttgtggctgaagcaaagccacctacagttactatgcctcgaatcaaggcattgatgacggggagccttcctggctttgtcgacgtcatcaggaacctcaattctcctgcactgctggaagacagtgtgataagacaagcaaaagcagctggaaaaagaatagtcttttatggagatgaaacctgggttaaattattcccaaagcattttgtggaatatgatggaacaacctcatttttcgtgtcagattacacagaggtggataataatgtcacgaggcatttggataaagtattaaaaagaggagattgggacatattaatcctccactacctggggctggaccacattggccacatttcagggcccaacagccccctgattgggcagaagctgagcgagatggacagcgtgctgatgaagatccacacctcactgcagtcgaaggagagagagacgcctttacccaatttgctggttctttgtggtgaccatggcatgtctgaaacaggaagtcacggggcctcctccaccgaggaggtgaatacacctctgattttaatcagttctgcgtttgaaaggaaacccggtgatatccgacatccaaagcacgtccaacagacggatgtggctgcgacactggcgatagcacttggcttaccgattccaaaagacagtgtagggagcctcctattcccagttgtggaaggaagaccaatgagagagcagttgagatttttacatttgaatacagtgcagcttagtaaactgttgcaagagaatgtgccgtcatatgaaaaagatcctgggtttgagcagtttaaaatgtcagaaagattgcatgggaactggatcagactgtacttggaggaaaagcattcagaagtcctattcaacctgggctccaaggttctcaggcagtacctggatgctctgaagacgctgagcttgtccctgagtgcacaagtggcccagtacgacatctattcgatgatggttctcaccctgctcctgctcagcgtcccacaggcactgcgcagaaaggctgagctggaagtcccactgtcatctcctgggttttctctgctcttttatttggtgatcctggttctttcggccgttcacgtcattgtgtgcacctcagctgaaagttcgtgctacttctgtggcctctcgtggctggcggcaggtggggtgatggtgctggcctcggcgctgctgtgtgtgattgtgtctgttctgaccaacgtgctcgtgggtggaaacaccccaaggaagaaccccatgcatcccagctcaaggtggtcagagctagaccttcttattctgttggggacggcgggccacgtcttgagcctgggcgccagcagcttcgtggaggaggagcaccagacctggtacttccttgtgaacaccctgtgtctagctctgagccaagaaacctacagaaactactttctgggagatgacggtgagcctccgtgtggcctctgtgtggaacaagggcatgacggggccacagcagcgtggcaggacgggcctggctgtgatgtcctggagcgagacaaaggccacggaagcccctctacctccgaagtgctcagaggccgcgagaagtggatggtgctggccagtccgtggctaatactggcctgctgccggctgctgcgctccctaaaccagacaggtgtgcagtgggctcaccggcctgacctcggccactggctcaccagctctgaccacaaagccgagctctctgtcctggctgccctctccctcctcgtagtttttgtgctggtgcagagggggtgctcccctgtgtccaaggctgccctggcgctggggctgctgggcgtctactgctaccgggcggccatcgggagtgtccggttcccgtggcggccggacagcaaggacatttccaagggtattattgaagctcgttttgtttatgtctttgtccttggcattctgttcacgggcaccaaagacttacttaaatctcaagtcattgctgcagacttcaaactcaagactgtaggtttatgggagatatatagtggattagttcttctggcagccttgctctttagaccacataatcttccggtcttagcatttagcctcttgattcagactctaatgactaaattcatctggaagcccctgagacacgatgcagctgagattactgtgatgcattattggtttggtcaagcattcttctattttcagggcaactccaacaacattgccaccgtggacatctccgcaggcttcgtgggcttagacacctacgtggaaatcccagccgtgctcctgacagcgtttgggacgtacgcagggcctgtgctgtgggccagccacttagtgcacttcctgagctcagaaacacgcagtggttcagcactgagtcatgcttgcttctgctacgcactgatttgttctattccagttttcacgtacatcgttttggtgacatctctgcgttatcatttatttatatggagtgtattttctccaaaacttctctacgagggaatgcacctgctcattacagctgctgtctgtgtattcttcacggcaatggatcaaaccagactcacacagtcttagactaagctgaacactggaaaaataatacatgcttaaagtctgctgttattctaaaatgaaagatatgaattcaacaaagttgatggataactttctttgactgctctacctgaatttagactaagcagtaaatagtttaataaaagatcactttaatata

SEQ ID NO: 165032 - DNA, 2787 bp, Homo sapiens
  Payload ID: 12502
  Gene Symbol: PIGG
  Gene Name: phosphatidylinositol glycan anchor biosynthesis, class G
  Uniprot ID: Q5H8A4
  ENST ID: ENST00000383028
  CDS Start-End: 79-2631
cctggagccggaagcgcggctgcagcagggcgaggctccaggtggggtcggttccgcatccagcctagcgtgtccacgatgcggctgggctccgggactttcgctacctgttgcgtagcgatcgaggtgctagggatcgcggtcttccttcggggattcttcccggctcccgttcgttcctctgccagagcggaacacggagcggagcccccagcgcccgaaccctcggctggagccagttctaactggaccacgctgccaccacctctcttcagtaaagttgttattgttctgatagatgccttgagagatgattttgtgtttgggtcaaagggtgtgaaatttatgccctacacaacttaccttgtggaaaaaggagcatctcacagttttgtggctgaagcaaagccacctacagttactatgcctcgaatcaaggagagagagacgcctttacccaatttgctggttctttgtggtgaccatggcatgtctgaaacaggaagtcacggggcctcctccaccgaggaggtgaatacacctctgattttaatcagttctgcgtttgaaaggaaacccggtgatatccgacatccaaagcacgtccaacagacggatgtggctgcgacactggcgatagcacttggcttaccgattccaaaagacagtgtagggagcctcctattcccagttgtggaaggaagaccaatgagagagcagttgagatttttacatttgaatacagtgcagcttagtaaactgttgcaagagaatgtgccgtcatatgaaaaagatcctgggtttgagcagtttaaaatgtcagaaagattgcatgggaactggatcagactgtacttggaggaaaagcattcagaagtcctattcaacctgggctccaaggttctcaggcagtacctggatgctctgaagacgctgagcttgtccctgagtgcacaagtggcccagtacgacatctattcgatgatggtggggactgtcgtggttttggaggttctcaccctgctcctgctcagcgtcccacaggcactgcgcagaaaggctgagctggaagtcccactgtcatctcctgggttttctctgctcttttatttggtgatcctggttctttcggccgttcacgtcattgtgtgcacctcagctgaaagttcgtgctacttctgtggcctctcgtggctggcggcaggtggggtgatggtgctggcctcggcgctgctgtgtgtgattgtgtctgttctgaccaacgtgctcgtgggtggaaacaccccaaggaagaaccccatgcatcccagctcaaggtggtcagagctagaccttcttattctgttggggacggcgggccacgtcttgagcctgggcgccagcagcttcgtggaggaggagcaccagacctggtacttccttgtgaacaccctgtgtctagctctgagccaagaaacctacagaaactactttctgggagatgacggtgagcctccgtgtggcctctgtgtggaacaagggcatgacggggccacagcagcgtggcaggacgggcctggctgtgatgtcctggagcgagacaaaggccacggaagcccctctacctccgaagtgctcagaggccgcgagaagtggatggtgctggccagtccgtggctaatactggcctgctgccggctgctgcgctccctaaaccagacaggtgtgcagtgggctcaccggcctgacctcggccactggctcaccagctctgaccacaaagccgagctctctgtcctggctgccctctccctcctcgtagtttttgtgctggtgcagagggggtgctcccctgtgtccaaggctgccctggcgctggggctgctgggcgtctactgctaccgggcggccatcgggagtgtccggttcccgtggcggccggacagcaaggacatttccaagggtattattgaagctcgttttgtttatgtctttgtccttggcattctgttcacgggcaccaaagacttacttaaatctcaagtcattgctgcagacttcaaactcaagactgtaggtttatgggagatatatagtggattagttcttctggcagccttgctctttagaccacataatcttccggtcttagcatttagcctcttgattcagactctaatgactaaattcatctggaagcccctgagacacgatgcagctgagattactgtgatgcattattggtttggtcaagcattcttctattttcagggcaactccaacaacattgccaccgtggacatctccgcaggcttcgtgggcttagacacctacgtggaaatcccagccgtgctcctgacagcgtttgggacgtacgcagggcctgtgctgtgggccagccacttagtgcacttcctgagctcagaaacacgcagtggttcagcactgagtcatgcttgcttctgctacgcactgatttgttctattccagttttcacgtacatcgttttggtgacatctctgcgttatcatttatttatatggagtgtattttctccaaaacttctctacgagggaatgcacctgctcattacagctgctgtctgtgtattcttcacggcaatggatcaaaccagactcacacagtcttagactaagctgaacactggaaaaataatacatgcttaaagtctgctgttattctaaaatgaaagatatgaattcaacaaagttgatggataactttctttgactgctctacctgaatttagactaagcagtaaatagtttaataaaagatcactttaa

SEQ ID NO: 165033 - DNA, 3218 bp, Homo sapiens
  Payload ID: 12502
  Gene Symbol: PIGG
  Gene Name: phosphatidylinositol glycan anchor biosynthesis, class G
  Uniprot ID: Q5H8A4
  ENST ID: ENST00000453061
  CDS Start-End: 107-3058
gcctggcgttattgcttagaggcggctacctggagccggaagcgcggctgcagcagggcgaggctccaggtggggtcggttccgcatccagcctagcgtgtccacgatgcggctgggctccgggactttcgctacctgttgcgtagcgatcgaggtgctagggatcgcggtcttccttcggggattcttcccggctcccgttcgttcctctgccagagcggaacacggagcggagcccccagcgcccgaaccctcggctggagccagttctaactggaccacgctgccaccacctctcttcagtaaagttgttattgttctgatagatgccttgagagatgattttgtgtttgggtcaaagggtgtgaaatttatgccctacacaacttaccttgtggaaaaaggagcatctcacagttttgtggctgaagcaaagccacctacagttactatgcctcgaatcaaggcattgatgacggggagccttcctggctttgtcgacgtcatcaggaacctcaattctcctgcactgctggaagacagtgtgataagacaagcaaaagcagctggaaaaagaatagtcttttatggagatgaaacctgggttaaattattcccaaagcattttgtggaatatgatggaacaacctcatttttcgtgtcagattacacagaggtggataataatgtcacgaggcatttggataaagtattaaaaagaggagattgggacatattaatcctccactacctggggctggaccacattggccacatttcagggcccaacagccccctgattgggcagaagctgagcgagatggacagcgtgctgatgaagatccacacctcactgcagtcgaaggagagagagacgcctttacccaatttgctggttctttgtggtgaccatggcatgtctgaaacaggaagtcacggggcctcctccaccgaggaggtgaatacacctctgattttaatcagttctgcgtttgaaaggaaacccggtgatatccgacatccaaagcacgtccaacagacggatgtggctgcgacactggcgatagcacttggcttaccgattccaaaagacagtgtagggagcctcctattcccagttgtggaaggaagaccaatgagagagcagttgagatttttacatttgaatacagtgcagcttagtaaactgttgcaagagaatgtgccgtcatatgaaaaagatcctgggtttgagcagtttaaaatgtcagaaagattgcatgggaactggatcagactgtacttggaggaaaagcattcagaagtcctattcaacctgggctccaaggttctcaggcagtacctggatgctctgaagacgctgagcttgtccctgagtgcacaagtggcccagtacgacatctattcgatgatggtggggactgtcgtggttttggaggttctcaccctgctcctgctcagcgtcccacaggcactgcgcagaaaggctgagctggaagtcccactgtcatctcctgggttttctctgctcttttatttggtgatcctggttctttcggccgttcacgtcattgtgtgcacctcagctgaaagttcgtgctacttctgtggcctctcgtggctggcggcaggtggggtgatggtgctggcctcggcgctgctgtgtgtgattgtgtctgttctgaccaacgtgctcgtgggtggaaacaccccaaggaagaaccccatgcatcccagctcaaggtggtcagagctagaccttcttattctgttggggacggcgggccacgtcttgagcctgggcgccagcagcttcgtggaggaggagcaccagacctggtacttccttgtgaacaccctgtgtctagctctgagccaagaaacctacagaaactactttctgggagatgacggtgagcctccgtgtggcctctgtgtggaacaagggcatgacggggccacagcagcgtggcaggacgggcctggctgtgatgtcctggagcgagacaaaggccacggaagcccctctacctccgaagtgctcagaggccgcgagaagtggatggtgctggccagtccgtggctaatactggcctgctgccggctgctgcgctccctaaaccagacaggtgtgcagtgggctcaccggcctgacctcggccactggctcaccagctctgaccacaaagccgagctctctgtcctggctgccctctccctcctcgtagtttttgtgctggtgcagagggggtgctcccctgtgtccaaggctgccctggcgctggggctgctgggcgtctactgctaccgggcggccatcgggagtgtccggttcccgtggcggccggacagcaaggacatttccaagggtattattgaagctcgttttgtttatgtctttgtccttggcattctgttcacgggcaccaaagacttacttaaatctcaagtcattgctgcagacttcaaactcaagactgtaggtttatgggagatatatagtggattagttcttctggcagccttgctctttagaccacataatcttccggtcttagcatttagcctcttgattcagactctaatgactaaattcatctggaagcccctgagacacgatgcagctgagattactgtgatgcattattggtttggtcaagcattcttctattttcagggcaactccaacaacattgccaccgtggacatctccgcaggcttcgtgggcttagacacctacgtggaaatcccagccgtgctcctgacagcgtttgggacgtacgcagggcctgtgctgtgggccagccacttagtgcacttcctgagctcagaaacacgcagtggttcagcactgagtcatgcttgcttctgctacgcactgatttgttctattccagttttcacgtacatcgttttggtgacatctctgcgttatcatttatttatatggagtgtattttctccaaaacttctctacgagggaatgcacctgctcattacagctgctgtctgtgtattcttcacggcaatggatcaaaccagactcacacagtcttagactaagctgaacactggaaaaataatacatgcttaaagtctgctgttattctaaaatgaaagatatgaattcaacaaagttgatggataactttctttgactgctctacctgaatttagactaagcagtaaatagtttaataaaagatcactttaatata

SEQ ID NO: 165034 - DNA, 3121 bp, Homo sapiens
  Payload ID: 12502
  Gene Symbol: PIGG
  Gene Name: phosphatidylinositol glycan anchor biosynthesis, class G
  ENST ID: ENST00000509768
  CDS Start-End: 873-2315
gaggctccaggtggggtcggttccgcatccagcctagcgtgtccacgatgcggctgggctccgggactttcgctacctgttgcgtagcgatcgaggtgctagggatcgcggtcttccttcggggattcttcccggctcccgttcgttcctctgccagagcggaacacggagcggagcccccagcgcccgaaccctcggctggtacggacccctccccggcgtctccgctcccctgaccccacatcccctagaagaccttttttctgagcctcgctgctcggatttcttctcggcgctccccggtggtctcttccattatggtccccacctcagaaattttttttaaccgctccagcgtctcttttctgtattcttacaactttgtggcaaccacctctactggccccacttcgaccttccttcctgatcaccacaaagtaagctgtgtccatacctgggatccagcctctccacttctactcgtccagagctcccgcccctttcctgagcagcctttgggtcactccccgttataggcgccctttttgccccctagcacacaacagataagacccctgccgatcccctcgcgttttggtctcttatattcctccaagatgttttccctgcctaggggctaaggcctctctgcgttaggcctcttcctaggcttcacctacccagccatatacagcaagtaaaggcgccctggttctggaccacttgcacacatcgccagccgctgaccatgtaaacgcagagccagttctaactggaccacgctgccaccacctctcttcagtaaagttgttattgttctgatagatgccttgagagatgattttgtgtttgggtcaaagggtgtgaaatttatgccctacacaacttaccttgtggaaaaaggagcatctcacagttttgtggctgaagcaaagccacctacagttactatgcctcgaatcaaggcattgatgacggggagccttcctggctttgtcgacgtcatcaggaacctcaattctcctgcactgctggaagacagtgtgataagacaagcaaaagcagctggaaaaagaatagtcttttatggagatgaaacctgggttaaattattcccaaagcattttgtggaatatgatggaacaacctcatttttcgtgtcagattacacagaggtggataataatgtcacgaggcatttggataaagtattaaaaagaggagattgggacatattaatcctccactacctggggctggaccacattggccacatttcagggcccaacagccccctgattgggcagaagctgagcgagatggacagcgtgctgatgaagatccacacctcactgcagtcgaaggagagagagacgcctttacccaatttgctggttctttgtggtgaccatggcatgtctgaaacaggaagtcacggggcctcctccaccgaggaggtgaatacacctctgattttaatcagttctgcgtttgaaaggaaacccggtgatatccgacatccaaagcacgtccaacagacggatgtggctgcgacactggcgatagcacttggcttaccgattccaaaagacagtgtagggagcctcctattcccagttgtggaaggaagaccaatgagagagcagttgagatttttacatttgaatacagtgcagcttagtaaactgttgcaagagaatgtgccgtcatatgaaaaagatcctgggtttgagcagtttaaaatgtcagaaagattgcatgggaactggatcagactgtacttggaggaaaagcattcagaagtcctattcaacctgggctccaaggttctcaggcagtacctggatgctctgaagacgctgagcttgtccctgagtgcacaagtggcccagtacgacatctattcgatgatggtggggactgtcgtggttttggaggttctcaccctgctcctgctcagcgtcccacaggcactgcgcagaaaggctgagctggaagtcccactgtcatctcctgggttttctctgctcttttatttggtgatcctggttctttcggccgttcacgtcattgtgtgcacctcagctgaaagttcgtgctacttctgtggcctctcgtggctggcggcaggtggggtgatggtgctggcctcggcgctgctgtgtgtgattgtgtctgttctgaccaacgtgctcgtgggtggaaacaccccaaggaaggtacgtacggctggttcctgggagtgtgacgtagtccttctgctcaggttgttcttgttatttcaggctgcctttcgtttaccagactctggttgaacacctggtgtgtgccacgtgctggcagtgccctggacagggggcctcagggaaggacgtggagcagccttatcccaggcctctgggtgtcccgacacaggtgttcacatctgtgctgtcaggtcagatgcctcagttcttggaaagctaggttcctgcgactgttaccaaggtgattgtaaagagctggcggtcacagaggaacaagcccccccgctgagggggtgtgtgaatcggacagcctcccagcagaggtgtgggagctgcagctgagggaagaagagacaatcggcctggacactcaggagggtcaaaaggagacttggtcgcaccactcatcctgccacccccagaatgcatcctgcctcatcaggtccagatttctttccaaggcggacgttttctgttggaattcttagtccttggcctcggacaccttcattcgttagctggggagtggtggtgaggcagtgaggaagaggcggatggtcacactcagatccacagagcccaggatcaagggacccactgcagtggcagcaggactgttgggcccccaccccaaccctgcgcagccctcatcccctcttggcttgagccgtcagaggccctgtgctgagtgtctgaccgagacactcacagctttgtcatcagggcacaggcttcctcggagccaggatgatctgtgccacgcttgcacctcgggcccatctgggctcatgctctctctcctgctattgaattagtacctagctgcacgcagtatgtagttaccaaaagaataaacggcaataattgagtcctca

SEQ ID NO: 165035 - DNA, 752 bp, Homo sapiens
  Payload ID: 12502
  Gene Symbol: PIGG
  Gene Name: phosphatidylinositol glycan anchor biosynthesis, class G
  ENST ID: ENST00000510235
  CDS Start-End: 680-752
cagtcttggtgagcacgtgaggattcctggggccacgttagtggcacagttcttttggaagatacttgtaagtttacatcagaagctgcgaaattacagattcttctgattaagtaattcttgtgggaggctaagcattaactaaattacgaaaacctcggttagccaagtcatcgcagatgggtccttctatctgcctgctgtgtgcctgcacgtttcctttccagagaagccccggagaggggactttggttggtccccactccagagctctgaccacaaagccgagctctctgtcctggctgccctctccctcctcgtagtttttgtgctggtgcagagggggtgctcccctgtgtccaaggctgccctggcgctggggctgctgggcgtctactgctaccgggcggccatcgggagtgtccggttcccgtggcggccggacagcaaggacatttccaagggtattattgaagctcgttttgtttatgtctttgtccttggcattctgttcacgggcaccaaagacttacttaaatctcaagtcattgctgcagacttcaaactcaagactgtaggtttatgggagatatatagtggattagttcttctggcagccttgctctttagaccacataatcttccggtcttagcatttagcctcttgattcagactctaatgactaaattcatctggaagcccctgagacacgatgcagctgagattactgtgatgcattattggtttggtc

SEQ ID NO: 165036 - DNA, 903 bp, Homo sapiens
  Payload ID: 12502
  Gene Symbol: PIGG
  Gene Name: phosphatidylinositol glycan anchor biosynthesis, class G
  ENST ID: ENST00000511448
  CDS Start-End: 94-675
gcttagaggcggctacctggagccggaagcgcggctgcagcagggcgaggctccaggtggggtcggttccgcatccagcctagcgtgtccacgatgcggctgggctccgggactttcgctacctgttgcgtagcgatcgaggtgctagggatcgcggtcttccttcggggattcttcccggctcccgttcgttcctctgccagagcggaacacggagcggagcccccagcgcccgaaccctcggctggagccagttctaactggaccacgctgccaccacctctcttcagtaaagttgttattgttctgatagatgccttgagagatgattttgtgtttgggtcaaagggtgtgaaatttatgccctacacaacttaccttgtggaaaaaggagcatctcacagttttgtggctgaagcaaagccacctacagttactatgcctcgaatcaaggcattgatgacggggagccttcctggctttgtcgacgtcatcaggaacctcaattctcctgcactgctggaagacagtgtgataagacaagcaaaagcagctggaaaaagaatagtcttttatggagatgaaacctgggttaaattattcccaaagcattttgtggaatatgatggaacaacctcatttttcgtgtcagattacacagagaaatcaatgtgatcattgagtgctgtgtctttttcagaacagccttcttgtaggacacatgtagatgccctcagcttcatcatcctgctggttactttaacgctgggtggataataatgtcacgaggcatttggataaagtattaaaaagaggagattgggacatattaatcctccactacctggggctggaccacattggccacatttcagggcccaacagccccctgattgggcagaa

SEQ ID NO: 165037 - DNA, 2387 bp, Homo sapiens
  Payload ID: 12502
  Gene Symbol: PIGG
  Gene Name: phosphatidylinositol glycan anchor biosynthesis, class G
  ENST ID: ENST00000506402
  CDS Start-End: 79-1470
cctggagccggaagcgcggctgcagcagggcgaggctccaggtggggtcggttccgcatccagcctagcgtgtccacgatgcggctgggctccgggactttcgctacctgttgcgtagcgatcgaggtgctagggatcgcggtcttccttcggggattcttcccggctcccgttcgttcctctgccagagcggaacacggagcggagcccccagcgcccgaaccctcggctggagccagttctaactggaccacgctgccaccacctctcttcagtaaagttgttattgttctgatagatgccttgagagatgattttgtgtttgggtcaaagggtgtgaaatttatgccctacacaacttaccttgtggaaaaaggagcatctcacagttttgtggctgaagcaaagccacctacagttactatgcctcgaatcaaggcattgatgacggggagccttcctggctttgtcgacgtcatcaggaacctcaattctcctgcactgctggaagacagtgtgataagacaagcaaaagcagctggaaaaagaatagtcttttatggagatgaaacctgggttaaattattcccaaagcattttgtggaatatgatggaacaacctcatttttcgtgtcagattacacagaggtggataataatgtcacgaggcatttggataaagtattaaaaagaggagattgggacatattaatcctccactacctggggctggaccacattggccacatttcagggcccaacagccccctgattgggcagaagctgagcgagatggacagcgtgctgatgaagatccacacctcactgcagtcgaaggagagagagacgcctttacccaatttgctggttctttgtggtgaccatggcatgtctgaaacaggaagtcacggggcctcctccaccgaggaggtgaatacacctctgattttaatcagttctgcgtttgaaaggaaacccggtgatatccgacatccaaagcacgtccaacagacggatgtggctgcgacactggcgatagcacttggcttaccgattccaaaagacagtgtagggagcctcctattcccagttgtggaaggaagaccaatgagagagcagttgagatttttacatttgaatacagtgcagcttagtaaactgttgcaagagaatgtgccgtcatatgaaaaagatcctgggtttgagcagtttaaaatgtcagaaagattgcatgggaactggatcagactgtacttggaggaaaagcattcagaagtcctattcaacctgggctccaaggttctcaggcagtacctggatgctctgaagacgctgagcttgtccctgagtgcacaagtggcccagttctcaccctgctcctgctcagcgtcccacaggcactgcgcagaaaggctgagctggaagtcccactgtcatctcctgggttttctctgctcttttatttggtgatcctggttctttcggccgttcacgtcattgtgtgcacctcagctgaaagttcgtgctacttctgtggcctctcgtggctggcggcaggctgcctttcgtttaccagactctggttgaacacctggtgtgtgccacgtgctggcagtgccctggacagggggcctcagggaaggacgtggagcagccttatcccaggcctctgggtgtcccgacacaggtgttcacatctgtgctgtcaggtcagatgcctcagttcttggaaagctaggttcctgcgactgttaccaaggtgattgtaaagagctggcggtcacagaggaacaagcccccccgctgagggggtgtgtgaatcggacagcctcccagcagaggtgtgggagctgcagctgagggaagaagagacaatcggcctggacactcaggagggtcaaaaggagacttggtcgcaccactcatcctgccacccccagaatgcatcctgcctcatcaggtccagatttctttccaaggcggacgttttctgttggaattcttagtccttggcctcggacaccttcattcgttagctggggagtggtggtgaggcagtgaggaagaggcggatggtcacactcagatccacagagcccaggatcaagggacccactgcagtggcagcaggactgttgggcccccaccccaaccctgcgcagccctcatcccctcttggcttgagccgtcagaggccctgtgctgagtgtctgaccgagacactcacagctttgtcatcagggcacaggcttcctcggagccaggatgatctgtgccacgcttgcacctcgggcccatctgggctcatgctctctctcctgctattgaattagtacctagctgcacgcagtatgtagttaccaaaagaataaacggcaataattgag

SEQ ID NO: 165038 - DNA, 3019 bp, Homo sapiens
  Payload ID: 12502
  Gene Symbol: PIGG
  Gene Name: phosphatidylinositol glycan anchor biosynthesis, class G
  ENST ID: ENST00000504346
  CDS Start-End: 176-2860
gttattgcttagaggcggctacctggagccggaagcgcggctgcagcagggcgaggctccaggagccagttctaactggaccacgctgccaccacctctcttcagtaaagttgttattgttctgatagatgccttgagagatgattttgtgtttgggtcaaagggtgtgaaatttatgccctacacaacttaccttgtggaaaaaggagcatctcacagttttgtggctgaagcaaagccacctacagttactatgcctcgaatcaaggcattgatgacggggagccttcctggctttgtcgacgtcatcaggaacctcaattctcctgcactgctggaagacagtgtgataagacaagcaaaagcagctggaaaaagaatagtcttttatggagatgaaacctgggttaaattattcccaaagcattttgtggaatatgatggaacaacctcatttttcgtgtcagattacacagaggtggataataatgtcacgaggcatttggataaagtattaaaaagaggagattgggacatattaatcctccactacctggggctggaccacattggccacatttcagggcccaacagccccctgattgggcagaagctgagcgagatggacagcgtgctgatgaagatccacacctcactgcagtcgaaggagagagagacgcctttacccaatttgctggttctttgtggtgaccatggcatgtctgaaacaggaagtcacggggcctcctccaccgaggaggtgaatacacctctgattttaatcagttctgcgtttgaaaggaaacccggtgatatccgacatccaaagcacgtccaacagacggatgtggctgcgacactggcgatagcacttggcttaccgattccaaaagacagtgtagggagcctcctattcccagttgtggaaggaagaccaatgagagagcagttgagatttttacatttgaatacagtgcagcttagtaaactgttgcaagagaatgtgccgtcatatgaaaaagatcctgggtttgagcagtttaaaatgtcagaaagattgcatgggaactggatcagactgtacttggaggaaaagcattcagaagtcctattcaacctgggctccaaggttctcaggcagtacctggatgctctgaagacgctgagcttgtccctgagtgcacaagtggcccagtacgacatctattcgatgatggtggggactgtcgtggttttggaggttctcaccctgctcctgctcagcgtcccacaggcactgcgcagaaaggctgagctggaagtcccactgtcatctcctgggttttctctgctcttttatttggtgatcctggttctttcggccgttcacgtcattgtgtgcacctcagctgaaagttcgtgctacttctgtggcctctcgtggctggcggcaggtggggtgatggtgctggcctcggcgctgctgtgtgtgattgtgtctgttctgaccaacgtgctcgtgggtggaaacaccccaaggaagaaccccatgcatcccagctcaaggtggtcagagctagaccttcttattctgttggggacggcgggccacgtcttgagcctgggcgccagcagcttcgtggaggaggagcaccagacctggtacttccttgtgaacaccctgtgtctagctctgagccaagaaacctacagaaactactttctgggagatgacggtgagcctccgtgtggcctctgtgtggaacaagggcatgacggggccacagcagcgtggcaggacgggcctggctgtgatgtcctggagcgagacaaaggccacggaagcccctctacctccgaagtgctcagaggccgcgagaagtggatggtgctggccagtccgtggctaatactggcctgctgccggctgctgcgctccctaaaccagacaggtgtgcagtgggctcaccggcctgacctcggccactggctcaccagctctgaccacaaagccgagctctctgtcctggctgccctctccctcctcgtagtttttgtgctggtgcagagggggtgctcccctgtgtccaaggctgccctggcgctggggctgctgggcgtctactgctaccgggcggccatcgggagtgtccggttcccgtggcggccggacagcaaggacatttccaagggtattattgaagctcgttttgtttatgtctttgtccttggcattctgttcacgggcaccaaagacttacttaaatctcaagtcattgctgcagacttcaaactcaagactgtaggtttatgggagatatatagtggattagttcttctggcagccttgctctttagaccacataatcttccggtcttagcatttagcctcttgattcagactctaatgactaaattcatctggaagcccctgagacacgatgcagctgagattactgtgatgcattattggtttggtcaagcattcttctattttcagggcaactccaacaacattgccaccgtggacatctccgcaggcttcgtgggcttagacacctacgtggaaatcccagccgtgctcctgacagcgtttgggacgtacgcagggcctgtgctgtgggccagccacttagtgcacttcctgagctcagaaacacgcagtggttcagcactgagtcatgcttgcttctgctacgcactgatttgttctattccagttttcacgtacatcgttttggtgacatctctgcgttatcatttatttatatggagtgtattttctccaaaacttctctacgagggaatgcacctgctcattacagctgctgtctgtgtattcttcacggcaatggatcaaaccagactcacacagtcttagactaagctgaacactggaaaaataatacatgcttaaagtctgctgttattctaaaatgaaagatatgaattcaacaaagttgatggataactttctttgactgctctacctgaatttagactaagcagtaaatagtttaataaaagatcactttaatat

SEQ ID NO: 165039 - DNA, 2629 bp, Homo sapiens
  Payload ID: 12502
  Gene Symbol: PIGG
  Gene Name: phosphatidylinositol glycan anchor biosynthesis, class G
  Uniprot ID: Q5H8A4
  ENST ID: ENST00000503111
  CDS Start-End: 600-1499
attgcttagaggcggctacctggagccggaagcgcggctgcagcagggcgaggctccaggtggggtcggttccgcatccagcctagcgtgtccacgatgcggctgggctccgggactttcgctacctgttgcgtagcgatcgaggtgctagggatcgcggtcttccttcggggattcttcccggctcccgttcgttcctctgccagagcggaacacggagcggagcccccagcgcccgaaccctcggctggtacggacccctccccggcgtctccgctcccctgaccccacatcccctagaagaccttttttctgagcctcgctgctcggatttcttctcggcgctccccggtggtctcttccattatggtccccacctcagaaattttttttaaccgctccagcgtctcttttctgtattcttacaactttgtggcaaccacctctactggccccacttcgaccttccttcctgatcaccacaaagagccagttctaactggaccacgctgccaccacctctcttcagtaaagttgttattgttctgatagatgccttgagagatgattttgtgtttgggtcaaagggtgtgaaatttatgccctacacaacttaccttgtggaaaaaggagcatctcacagttttgtggctgaagcaaagccacctacagttactatgcctcgaatcaaggcattgatgacggggagccttcctggctttgtcgacgtcatcaggaacctcaattctcctgcactgctggaagacagtgtgataagacaagcaaaagcagctggaaaaagaatagtcttttatggagatgaaacctgggttaaattattcccaaagcattttgtggaatatgatggaacaacctcatttttcgtgtcagattacacagaggtggataataatgtcacgaggcatttggataaagtattaaaaagaggagattgggacatattaatcctccactacctggggctggaccacattggccacatttcagggcccaacagccccctgattgggcagaagctgagcgagatggacagcgtgctgatgaagatccacacctcactgcagtcgaaggagagagagacgcctttacccaatttgctggttctttgtggtgaccatggcatgtctgaaacaggaagtcacggggcctcctccaccgaggaggtgaatacacctctgattttaatcagttctgcgtttgaaaggaaacccggtgatatccgacatccaaagcacgtccaacagacggatgtggctgcgacactggcgatagcacttggcttaccgattccaaaagacagtgtagggagcctcctattcccagttgtggaaggaagaccaatgagagagcagttgagatttttacatttgaatacagtgcagcttagtaaactgttgcaagagaatgtgccgtcatatgaaaaaggttctcaccctgctcctgctcagcgtcccacaggcactgcgcagaaaggctgagctggaagtcccactgtcatctcctgggttttctctgctcttttatttggtgatcctggttctttcggccgttcacgtcattgtgtgcacctcagctgaaagttcgtgctacttctgtggcctctcgtggctggcggcaggtggggtgatggtgctggcctcggcgctgctgtgtgtgattgtgtctgttctgaccaacgtgctcgtgggtggaaacaccccaaggaaggtacgtacggctggttcctgggagtgtgacgtagtccttctgctcaggttgttcttgttatttcaggctgcctttcgtttaccagactctggttgaacacctggtgtgtgccacgtgctggcagtgccctggacagggggcctcagggaaggacgtggagcagccttatcccaggcctctgggtgtcccgacacaggtgttcacatctgtgctgtcaggtcagatgcctcagttcttggaaagctaggttcctgcgactgttaccaaggtgattgtaaagagctggcggtcacagaggaacaagcccccccgctgagggggtgtgtgaatcggacagcctcccagcagaggtgtgggagctgcagctgagggaagaagagacaatcggcctggacactcaggagggtcaaaaggagacttggtcgcaccactcatcctgccacccccagaatgcatcctgcctcatcaggtccagatttctttccaaggcggacgttttctgttggaattcttagtccttggcctcggacaccttcattcgttagctggggagtggtggtgaggcagtgaggaagaggcggatggtcacactcagatccacagagcccaggatcaagggacccactgcagtggcagcaggactgttgggcccccaccccaaccctgcgcagccctcatcccctcttggcttgagccgtcagaggccctgtgctgagtgtctgaccgagacactcacagctttgtcatcagggcacaggcttcctcggagccaggatgatctgtgccacgcttgcacctcgggcccatctgggctcatgctctctctcctgctattgaattagtacctagctgcacgcagtatgtagttaccaaaagaataaacggcaataattgagtcctc

SEQ ID NO: 165040 - DNA, 1784 bp, Homo sapiens
  Payload ID: 12502
  Gene Symbol: PIGG
  Gene Name: phosphatidylinositol glycan anchor biosynthesis, class G
  ENST ID: ENST00000504187
  CDS Start-End: 127-687
actgtcgctgcgacgataaggcctggcgttattgcttagaggcggctacctggagccggaagcgcggctgcagcagggcgaggctccaggtggggtcggttccgcatccagcctagcgtgtccacgatgcggctgggctccgggactttcgctacctgttgcgtagcgatcgaggtgctagggatcgcggtcttccttcggggattcttcccggctcccgttcgttcctctgccagagcggaacacggagcggagcccccagcgcccgaaccctcggctggagccagttctaactggaccacgctgccaccacctctcttcagtaaagttgttattgttctgatagatgccttgagagatgattttgtgtttgggtcaaagggtgtgaaatttatgccctacacaacttaccttgtggaaaaaggagcatctcacagttttgtggctgaagcaaagccacctacagttactatgcctcgaatcaaggtgtccagcctactgacagcagctttgaagtacatagtgcatttcccaagaaccgtgggtaaagaaaaaagcattgatgacggggagccttcctggctttgtcgacgtcatcaggaacctcaattctcctgcactgctggaagacagtgtgataagacaagcaaaagcagctggaaaaagaatagtcttttatggagatgaaacctgggttaaattattcccaaagcattttgtggaatatgatggaacaacctcatttttcgtgtcagattacacagaggtggataataatgtcacgaggcatttggataaagtattaaaaagaggagattgggacatattaatcctccactacctggggctggaccacattggccacatttcagggcccaacagccccctgattgggcagaagctgagcgagatggacagcgtgctgatgaagatccacacctcactgcagtcgaaggagagagagacgcctttacccaatttgctggttctttgtggtgaccatggcatgtctgaaacaggaagtcacggggcctcctccaccgaggaggtgaatacacctctgattttaatcagttctgcgtttgaaaggaaacccggtgatatccgacatccaaagcacgtccaacagacggatgtggctgcgacactggcgatagcacttggcttaccgattccaaaagacagtgtagggagcctcctattcccagttgtggaaggaagaccaatgagagagcagttgagatttttacatttgaatacagtgcagcttagtaaactgttgcaagagaatgtgccgtcatatgaaaaagatcctgggtttgagcagtttaaaatgtcagaaagattgcatgggaactggatcagactgtacttggaggaaaagcattcagaagtcctattcaacctgggctccaaggttctcaggcagtacctggatgctctgaagacgctgagcttgtccctgagtgcacaagtggcccagttctcaccctgctcctgctcagcgtcccacaggcactgcgcagaaaggctgagctggaagtcccactgtcatctcctgggttttctctgctcttttatttggtgatcctggttctttcggccgttcacgtcattgtgtgcacctcagctgaaagttcgtgctacttctgtggcctctcgtggctggcggcaggtggggtgatggtgctggcctcggcgctgctgtgtgtgattgtgtctgttctgaccaacgtgctcgtgggtggaaacaccccaaggaaggtacgtacggctggttcctg

SEQ ID NO: 165041 - DNA, 1420 bp, Homo sapiens
  Payload ID: 12503
  Gene Symbol: PIGH
  Gene Name: phosphatidylinositol glycan anchor biosynthesis, class H
  Uniprot ID: Q14442
  ENST ID: ENST00000216452
  CDS Start-End: 85-651
aagcgggtctggagcgggcgagacggccagggccggcgagcgcagtgcagcgccgcgcggtgcgggcggccgagtgggggcgtcatggaggatgagcggagcttttcggatatctgcggcggccgcctggcgctgcagcgccgctactactccccgtcctgccgggaattctgcctcagctgccctcggctctcgctgcgttcgctcaccgctgtcacctgcacggtgtggctggcggcctacggactcttcaccctctgcgagaacagcatgatcctctctgctgccatcttcatcaccctcttaggtctgcttggttatctccattttgtgaagattgatcaggagactctgttaatcattgattcccttggcattcagatgacttcatcttatgcttcaggcaaagaaagcactaccttcatagaaatgggcaaggtcaaggatattgtcatcaatgaggccatttacatgcagaaggtgatttactacctctgcatcttattgaaagatccagtggaaccacatgggatatcccaagtagtacccgtcttccagagtgccaagccccggctggactgcttgattgaagtatacaggagctgccaggagatcctggcacaccagaaagccacatcaacaagcccatgagccccagcgttcagaaggccagcattgtcttccatgggagatgactcttaagccataggggctggttttccgtactccaaaccatcaggtggacacagtcctaggaaccattatggatgtagtgcatcttagagccatagagcaggtgactggaaatctaactcagtatatttccgtgtattatagtgttttccttgtaaggttttgcctactttaccaaaggaggggagaccttaagaattttgacacagtatgtcaaaagtaatgtcagcaaagaacactttcggaaattgctaagcatgttcaggtttactttgttgatgtttgtgaagcaaaacaatgggaaactgacatcagatgtcttgagaaagctatattttccaatagtaccccttgtgtaaagttacgaaaaaaacaagcccttcagtactggttagcaggaagaaatgtcctacaaaagacgagtctgtcaacctagtgcctgtgttctgtacagggcttatttatttactgttaataaacagatcttccaaaacacacagttacctggttcacagatagctgctttttattgacaaacaagatcatagtatttcagtcatggtgtcaagcacattaatacttttctgttactcagcatttttttttatatcagttcaaaagctacttttgccaagaaggatgagacaaaaggccagacagaaattggactttggttttcagacatgggactctcatgttaacaaagaataaataagcaaatattgaa

SEQ ID NO: 165042 - DNA, 841 bp, Homo sapiens
  Payload ID: 12503
  Gene Symbol: PIGH
  Gene Name: phosphatidylinositol glycan anchor biosynthesis, class H
  ENST ID: ENST00000558987
  CDS Start-End: 1-410
ccctcttaggtctgcttggttatctccattttgtgaagattgatcaggagactctgttaatcattgattcccttggcattcagatgacttcatcttatgcttcaggcaaagaaagcactaccttcatagaaatgggcaaggtcaaggatattgtcatcaatgaggccatttacatgcagaaggtgatttactacctctgcatcttattgaaagatccagtggaaccacatgggatatcccaagtagtacccgtcttccagagacagagtctcactttgtcacctaggctggagtgcagtgacaatcaccactcattgcagcctccacctcccaggctcaagaaatcctcctgcctcagcctcctgagaacttgggactacagagtgccaagccccggctggactgcttgattgaagtatacaggagctgccaggagatcctggcacaccagaaagccacatcaacaagcccatgagccccagcgttcagaaggccagcattgtcttccatgggagatgactcttaagccataggggctggttttccgtactccaaaccatcaggtggacacagtcctaggaaccattatggatgtagtgcatcttagagccatagagcaggtgactggaaatctaactcagtatatttccgtgtattatagtgttttccttgtaaggttttgcctactttaccaaaggaggggagaccttaagaattttgacacagtatgtcaaaagtaatgtcagcaaagaacactttcggaaattgctaagcatgttcaggtttactttgttgatgtttgtgaagcaaaacaatgggaaactgacatcagatgtcttga

SEQ ID NO: 165043 - DNA, 583 bp, Homo sapiens
  Payload ID: 12503
  Gene Symbol: PIGH
  Gene Name: phosphatidylinositol glycan anchor biosynthesis, class H
  ENST ID: ENST00000558198
  CDS Start-End: 63-314
acggccagggccggcgagcgcagtgcagcgccgcgcggtgcgggcggccgagtgggggcgtcatggaggatgagcggagcttttcggatatctgcggcggccgcctggcgctgcagcgccgctactactccccgtcctgccgggaattctgcctcagctgccctcggctctcgctgcgttcgctcaccgctgtcacctgcacggtgtggctggcggcctacggactcttcaccctctgcgagcatgatcctctctgctgccatcttcatcaccctcttaggtctgcttggttatctccattttgtgaagattgatcaggagactctgttaatcattgattcccttggcattcagatgacttcatcttatgcttcaggcaaagaaagcactaccttcatagaaatgggcaaggtcaaggatattgtcatcaatgaggccatttacatgagtgccaagccccggctggactgcttgattgaagtatacaggagctgccaggagatcctggcacaccagaaagccacatcaacaagcccatgagccccagcgttcagaaggccagcattgtcttccatgggagatg

SEQ ID NO: 165044 - DNA, 593 bp, Homo sapiens
  Payload ID: 12503
  Gene Symbol: PIGH
  Gene Name: phosphatidylinositol glycan anchor biosynthesis, class H
  ENST ID: ENST00000561303
  CDS Start-End: 44-445
gcagtgcagcgccgcgcggtgcgggcggccgagtgggggcgtcatggaggatgagcggagcttttcggatatctgcggcggccgcctggcgctgcagcgccgctactactccccgtcctgccgggaattctgcctcagctgccctcggctctcgctgcgttcgctcaccgctgtcacctgcacggtgtggctggcggcctacggactcttcaccctctgcgagaacagcatgatcctctctgctgccatcttcatcaccctcttaggtctgcttggttatctccattttgtgaagattgatcaggagactctgttaatcattgattcccttggcattcagatgacttcatcttatgcttcaggcaaagaaagcactaccttcatagaaatgggcaaggtcaaggatattgtcatcaatgaggccatttacatggtaagtatttaaaagcagaaggtgatttactacctctgcatcttattgaaagatccagtggaaccacatgggatatcccaagtagtacccgtcttccagagtgccaagccccggctggactgcttgattgaagtatacaggagctgccaggagatcctgg

SEQ ID NO: 165045 - DNA, 476 bp, Homo sapiens
  Payload ID: 12503
  Gene Symbol: PIGH
  Gene Name: phosphatidylinositol glycan anchor biosynthesis, class H
  ENST ID: ENST00000559415
  CDS Start-End: 66-476
gagacggccagggccggcgagcgcagtgcagcgccgcgcggtgcgggcggccgagtgggggcgtcatggaggatgagcggagcttttcggatatctgcggcggccgcctggcgctgcagcgccgctactactccccgtcctgccgggaattctgcctcagctgccctcggctctcgctgcgttcgctcaccgctgtcacctgcacggtgtggctggcggcctacggactcttcaccctctgcgagaacagcatgatcctctctgctgccatcttcatcaccctcttaggcaaagaaagcactaccttcatagaaatgggcaaggtcaaggatattgtcatcaatgaggccatttacatgcagaaggtgatttactacctctgcatcttattgaaagatccagtggaaccacatgggatatcccaagtagtacccgtcttccagagacagagtctcactttgtcacctaggctggag

SEQ ID NO: 165046 - DNA, 499 bp, Homo sapiens
  Payload ID: 12503
  Gene Symbol: PIGH
  Gene Name: phosphatidylinositol glycan anchor biosynthesis, class H
  ENST ID: ENST00000558493
  CDS Start-End: 1-412
gtcctgccgggaattctgcctcagctgccctcggctctcgctgcgttcgctcaccgctgtcacctgcacggtgtggctggcggcctacggactcttcaccctctgcgagaacagcatgatcctctctgctgccatcttcatcaccctcttaggtctgcttggttatctccattttgtgaagattgatcaggagactctgttaatcattgattcccttggcattcagatgacttcatcttatgcttcaggcaaagaaagcactaccttcatagaaatgggcaaggtcaaggatattgtcatcaatgaggccatttacatgagtgccaagccccggctggactgcttgattgaagtatacaggagctgccaggagatcctggcacaccagaaagccacatcaacaagcccatgagccccagcgttcagaaggccagcattgtcttccatgggagatgactcttaagccataggggctggttttccgtactccaaaccatca

SEQ ID NO: 165047 - DNA, 903 bp, Homo sapiens
  Payload ID: 12503
  Gene Symbol: PIGH
  Gene Name: phosphatidylinositol glycan anchor biosynthesis, class H
  ENST ID: ENST00000560722
  CDS Start-End: 66-629
gagacggccagggccggcgagcgcagtgcagcgccgcgcggtgcgggcggccgagtgggggcgtcatggaggatgagcggagcttttcggatatctgcggcggccgcctggcgctgcagcgccgctactactccccgtcctgccgggaattctgcctcagctgccctcggctctcgctgcgttcgctcaccgctgtcacctgcacggtgtggctggcggcctacggactcttcaccctctgcgagaacagcatgatcctctctgctgccatcttcatcaccctcttaggtctgcttggttatctccattttgtgaagattgatcaggagactctgttaatcattgattcccttggcattcagatgacttcatcttatgcttcaggcaaagaaagcactaccttcatagaaatgggcaaggtcaaggatattgtcatcaatgaggccatttacatgaaggtgatttactacctctgcatcttattgaaagatccagtggaaccacatgggatatcccaagtagtacccgtcttccagagtgccaagccccggctggactgcttgattgaagtatacaggagctgccaggagatcctggcacaccagaaagccacatcaacaagcccatgagccccagcgttcagaaggccagcattgtcttccatgggagatgactcttaagccataggggctggttttccgtactccaaaccatcaggtggacacagtcctaggaaccattatggatgtagtgcatcttagagccatagagcaggtgactggaaatctaactcagtatatttccgtgtattatagtgttttccttgtaaggttttgcctactttaccaaaggaggggagaccttaagaattttgacacagtatgtcaaaagtaatgtcagcaa

SEQ ID NO: 165048 - DNA, 1049 bp, Homo sapiens
  Payload ID: 12503
  Gene Symbol: PIGH
  Gene Name: phosphatidylinositol glycan anchor biosynthesis, class H
  ENST ID: ENST00000559581
  CDS Start-End: 65-616
agacggccagggccggcgagcgcagtgcagcgccgcgcggtgcgggcggccgagtgggggcgtcatggaggatgagcggagcttttcggatatctgcggcggccgcctggcgctgcagcgccgctactactccccgtcctgccgggaattctgcctcagctgccctcggctctcgctgcgttcgctcaccgctgtcacctgcacggtgtggctggcggcctacggactcttcaccctctgcgagatgacttcatcttatgcttcaggcaaagaaagcactaccttcatagaaatgggcaaggtcaaggatattgtcatcaatgaggccatttacatgcagaaggtgatttactacctctgcatcttattgaaagatccagtggaaccacatgggatatcccaagtagtacccgtcttccagagacagagtctcactttgtcacctaggctggagtgcagtgacaatcaccactcattgcagcctccacctcccaggctcaagaaatcctcctgcctcagcctcctgagaacttgggactacaggtgtgcaccatctcgcctggctaattttttttttttatttttagtagagatgaggtcttgccatgttgcctaggctgatcttgaactcctgagttcaagcaattctcctgcctcagcctcccaaagtgttgggattacaagcatgagccagcatacctggcctcatgcacattttaaagaacacaatcaaatatatagcaacttctgcctataaatcaccattcatctactttgactctgtcagtctactactgtacactttttttagatagaggtaattgatcttacattgtacactattgtgtgtcttgctttgtaaataatttaatatgtatgtatcctacaaaggccattatatttattattttaaataattgtataatatattgaaatatcagtttatttagccactcttgccagcttttaaaatcatgcctgggtttttttgttttgctcttacaaaaaaaaaaaaacacttatcagctggtgcagtggctcatgcctgt

SEQ ID NO: 165049 - DNA, 760 bp, Homo sapiens
  Payload ID: 12503
  Gene Symbol: PIGH
  Gene Name: phosphatidylinositol glycan anchor biosynthesis, class H
  ENST ID: ENST00000561272
  CDS Start-End: 1-548
gcggccgcctggcgctgcagcgccgctactactccccgtcctgccgggaattctgcctcagctgccctcggctctcgctgcgttcgctcaccgctgtcacctgcacggtgtggctggcggcctacggactcttcaccctctgcgagaacagcatgatcctctctgctgccatcttcatcaccctcttaggtctgcttggttatctccattttgtgaagattgatcaggagactctgttaatcattgattcccttggcattcagatgacttcatcttatgcttcaggcaaagaaagcactaccttcatagaaatgggcaaggtcaaggatattgtcatcaatgaggccatttacatgcagaaggtgatttactacctctgcatcttattgaaagatccagtggaaccacatgggatatcccaagtagtacccgtcttccaggctgcatggtgcattcattctaagctggcaacccgaccctcctgcttcctgaacagaaccttacctgggccatcagggcagccatctcaagagccaattccttgttgataggaaacctccctgccactatctctctactggtttgagaggcaaggagcagccgttctcggtccgtctcccctttgacttgactgcgaaagtacagcctacaaagaagagaataagaaaccaggactcagcagggattccaaacagggatggggctttctctgggtctgttacctttatttccaaaaagataaagtactcttttcccacta

SEQ ID NO: 165050 - DNA, 594 bp, Homo sapiens
  Payload ID: 12503
  Gene Symbol: PIGH
  Gene Name: phosphatidylinositol glycan anchor biosynthesis, class H
  ENST ID: ENST00000558001
  CDS Start-End: 80-331
ggtctggagcgggcgagacggccagggccggcgagcgcagtgcagcgccgcgcggtgcgggcggccgagtgggggcgtcatggaggatgagcggagcttttcggatatctgcggcggccgcctggcgctgcagcgccgctactactccccgtcctgccgggaattctgcctcagctgccctcggctctcgctgcgttcgctcaccgctgtcacctgcacggtgtggctggcggcctacggactcttcaccctctgcgagcatgatcctctctgctgccatcttcatcaccctcttaggtctgcttggttatctccattttgtgaagattgatcaggagactctgttaatcattgattcccttggcattcagatgacttcatcttatgcttcaggcaaagaaagcactaccttcatagaaatgggcaaggtcaaggatattgtcatcaatgaggccatttacatgcagaaggtgatttactacctctgcatcttattgaaagatccagtggaaccacatgggatatcccaagtagtacccgtcttccagagtgccaagccccggctggactgcttgattgaagtatacaggagct

SEQ ID NO: 165051 - DNA, 1926 bp, Homo sapiens
  Payload ID: 12504
  Gene Symbol: PIGK
  Gene Name: phosphatidylinositol glycan anchor biosynthesis, class K
  ENST ID: ENST00000359130
  CDS Start-End: 28-1026
ggtgcgggaagtctgaagccggtaaacatggccgtcaccgacagcctcagccgggctgcgactgtcttggcaactgtgttgctcttgtccttcggcagcgtggccgctagtcatatcgaggatcaagcagaacaattctttagaagtggccatacaaacaactgggctgttctggtgtgtacatcccgattctggtttaattatcgacatgttgcaaataccctttctgtttatagaagtgtcaagaggctaggtattcctgacagtcacattgtcctaatgcttgcagatgatatggcctgtaatcctagaaatcccaaaccagctacagtgtttagtcacaagaatatggaactaaatgtgtatggagatgatgtggaagtggattatagaagttacgaggtaactgtggagaattttttacgggtattaactgggaggatcccacctagtactcctcggtcaaaacgtcttctttctgatgacagaagcaatattctaatttatatgacagggcatggtggaaatggtttcttaaaatttcaagattctgaagaaattaccaacatagaactcgcggatgcttttgaacaaatgtggcagaaaagacgctacaatgagctactgtttattattgatacttgccaaggagcatccatgtatgaacgattttattctcctaacataatggctctagctagtagtcaagtgggagaagattcactctcgcatcaacctgatcctgcaattggagtccatcttatggatagatacacattttatgtcttggaatttttggaagaaattaacccagctagccaaactaatatgaatgacctttttcaggtatgtcccaaaagtctgtgtgtgtctactcctggacatcgcactgatctttttcagagggatcctaaaaatgtactgataactgatttctttggaagtgtacggaaagtggaaattacaacagagactattaaattgcaacaggattcagaaatcatggaaagcaggtattcatcttaaaccattatttgaatagaatactagtctcacagtttgtacatttttttgaaacattgtattaagaggcaaaagttggtgtttgtaaataaaattacacatttatacccagtcttcactttatgtaggctgtatgcttttcagatttatatgtaaaaactatcaatattagtggaaactaagatcatcgttaggattatgttggagctccaaaagacaatcttgctagtggttcagtttgatacttgccacaaaggcctaaaacttttcccataactggctatcccagcgccataattttctgttaggcctcctggtaacattagggaaaggaatgagaagtgtaaaccaggtactgccttggggagtgaattgtatgtgagtgagcagtgagtgagtacagacatttgtaagagagaggaagttgggagacattggttcactttgggtatgtgaattttagaaatacttataatttgttttattttctctgtaaccatttttaaaggtaaaatactttattagaaataaataatgggtcagtcaatagctactttcttgaaatatataatggcatatgttgttagccatgaaactttgttatttgtgattatctgttgctatctattagaaactcatactatagggaacttttttggattgaaaaatggcaatatatacaattacagcaattttcaaaatttcaaagatttgtaattgagcttatgaatgttgtaggaataaattcaaacactggcacaagatgcttttctttgattctagttacaacagtttctttttttttaattgatgtataatatttgtacatatttttggggtacatgtgatattttgatacctgtgtacagtgtttaatgattaaatcagggtaactggaatatc

SEQ ID NO: 165052 - DNA, 4596 bp, Homo sapiens
  Payload ID: 12504
  Gene Symbol: PIGK
  Gene Name: phosphatidylinositol glycan anchor biosynthesis, class K
  Uniprot ID: Q92643
  ENST ID: ENST00000370812
  CDS Start-End: 25-1212
gcgggaagtctgaagccggtaaacatggccgtcaccgacagcctcagccgggctgcgactgtcttggcaactgtgttgctcttgtccttcggcagcgtggccgctagtcatatcgaggatcaagcagaacaattctttagaagtggccatacaaacaactgggctgttctggtgtgtacatcccgattctggtttaattatcgacatgttgcaaataccctttctgtttatagaagtgtcaagaggctaggtattcctgacagtcacattgtcctaatgcttgcagatgatatggcctgtaatcctagaaatcccaaaccagctacagtgtttagtcacaagaatatggaactaaatgtgtatggagatgatgtggaagtggattatagaagttacgaggtaactgtggagaattttttacgggtattaactgggaggatcccacctagtactcctcggtcaaaacgtcttctttctgatgacagaagcaatattctaatttatatgacagggcatggtggaaatggtttcttaaaatttcaagattctgaagaaattaccaacatagaactcgcggatgcttttgaacaaatgtggcagaaaagacgctacaatgagctactgtttattattgatacttgccaaggagcatccatgtatgaacgattttattctcctaacataatggctctagctagtagtcaagtgggagaagattcactctcgcatcaacctgatcctgcaattggagtccatcttatggatagatacacattttatgtcttggaatttttggaagaaattaacccagctagccaaactaatatgaatgacctttttcaggtatgtcccaaaagtctgtgtgtgtctactcctggacatcgcactgatctttttcagagggatcctaaaaatgtactgataactgatttctttggaagtgtacggaaagtggaaattacaacagagactattaaattgcaacaggattcagaaatcatggaaagcagctataaggaagaccagatggatgagaaactaatggaacctctgaaatatgctgaacaacttcctgtagctcagataatacaccagaaaccgaagctgaaagactggcatcctcctgggggctttattctgggattatgggcacttattatcatggttttcttcaaaacttatggaattaagcatatgaagttcattttttagacttgatgatgaatgaagaatgcatggaggactgcaaacttggataataatttatgtcattatatatttttaaaaatgtgtttctcttgtatgaattggaaataagtataaggaaactaaatttgaatcaactattaattttataacttaaagaaaaataattgttaatgcaactgcttaatggcactaaatatattccagttttgtattttgtgtattataaaagcgaatgagacagagatcagaatacattgactgtttttgaaaatagtaatttccccttatccccttttcatttggaaaagaaacaattgtgaagacattaaattctcactaacagaagtaactttggttaattattttttgtatatcctcccaatcttttgacttatgcacatattttttcccaatatggagatcatatggaatgtactattttgtaatgtcttttttcattttacaatgtattatcaaccttttccctctcaaaaatacattgtgaatgactgcatagtattcactttatgaatatttaattcatttcacagtcttctattgttggaccacttacattgtaccaaatgttttcctttggtttattctttaatgtattaatattttactgctggtcactcatggaatcctgcagctttaattaaaagcaaagatgaaaaattggttttttaatctatggcactgacaatctccaggaccttatatgtttgttgtcagtttatttgggaaattttagacctttgataatttcacgtactgactgctcaagagaaacataccccattgtttttcatttgtaagcgttctgtgatcttctacaattggtcacgtcctcttcattttccatcttgaaagagagagccaacaaggactttatttcattctgttttaggtaaacctccttgcccactggctgtatctatactttccttgagaaaaatcccataaagtggatggacctgtgaagaaaatgtatgcttatggcctagccttcatgtctggctgatgtatcctataaggcagtaagccccttttctagtctctggtaagatgcaagagctcatatccccatcactgacattttagtttggaaataatattgagactgtgctatgaccaacccctgatgttgttttttcttttcaaacttttgcatatgagtagaggaaaagcctaaaagttaagtatttatgtctggggggataccttcaggtgtcttatctgttttatgcaagaatttatgtgttcatctttattcagtgcaaagatttttttttaaattttgtttataattgtaggtaacattaagacaactcttcctccacaagaaaacctcctaaaattaatattccttaagatttgtttttccttttgcacttataatattaccttttaattgcatgcaagattgtcatacttttcaaaaggcaaaggattgactgtgttatctccctagttagaacaaatgatattgaggctttttgccagctctgaatctttattttaattgatctttttattgatgtgttatataaatgaggaagaaaaattttgtctgattatgtgaaggatctttctgtacatgaaaagaagggaaaataaacttgcaattgaatagactgattatagtagcactgagacacaaaaagattgaccatgttgccctccagacactcatacaaggtcgtggacaccacggtgaggcggagctatttagggtggtaaaggaattatgattgttcttgagccaaagtaatttagtttgaatataatgaaacataccctgtaaagactgctagaaagtaaaaggattcgtcttcagaggttgtagaaggtgcccttcttagttaaaaccaaactgggaaaagtaatactggataaaatattcaggataaattttgcctcagcagaatttcaaagggcagttgttcctctgtttcattattgaatcttcagaatatagttaaagccaaaagcttaaaatatgttaaatgtttcacttataaccataatctttttacatagagcatactctgccttcataataactaaatcctctgcatgtggtagatgagtacgtttaggaaatattgtcagtgcaattaaatggcctacactttaaacagtatcataaaaacaaatccttaaatatattctacttgagtcacaaaagctgaacaacagaaaggtgttttgtttttgcctttctcacagtgttgtggtgagaatcagatgagatagtattttgactaaacacttctgaaattgtaaatatatggtggcattattgttcttatgtcggcttaggaggataccaaaggggaagttaatggtcacagtgcacttatgtagctttctaagctactcaatgtgattcttgttctctttgctgttctttttctcctcccccatggtgtccttcagagagaaaaggaatgtagataaatgaatccctgcagatgtgtcctgacatttcagggagggacagggtataatgatgccatcctgcaaaggcagcctgtgtgagaaaaagaaatcaaataatgtggattttaaaattacgaaagacattcatttgcagtttatgaaaggaaaatgtagtttggatacaaagctgattaaattggatcaagaaatattagaattaaatgcaaaaaataatccatgcatttatggttttgatttttatatattcccagctagttgaaaatgatgattcccacaagaagcataactcagcttgtttctgcttactgagtattttctactatggtatatattgataacatttcttccattatgtatgttgtataccagagttacagttactgtgggaatcataatttgaaattttgactcctgtgtttctggaatctttacaacaaatgttgcattaacatataacttttttcagttgactttaccaaaattaagcccatctttagtagatactgttttaacatgtgaaagaaatacgttataaacataccacaagatatggctataaaacaatgagatcagtatccatttttgctttaaagaattggccttattgcttcagtgtcacatctcatactcaagggcatttactacaaagaaagagttctccaatattgctgttctgttgctgcctgccctatttacacatgtacctgctacttaaataggaaagcctttcaattcatggacaatacaccttggtggtaaccaggcttttatttttatttttttttcttagtgtaaaaactgtactgttttggaaatgtgctgtgaaatattaggtttaactgtgtagatcctagaataaggggatttatatagatgaagttgtaaccaagaaactggttattaaaaatttatttactccaa

SEQ ID NO: 165053 - DNA, 4318 bp, Homo sapiens
  Payload ID: 12504
  Gene Symbol: PIGK
  Gene Name: phosphatidylinositol glycan anchor biosynthesis, class K
  ENST ID: ENST00000445065
  CDS Start-End: 29-934
aggtgcgggaagtctgaagccggtaaacatggccgtcaccgacagcctcagccgggctgcgactgtcttggcaactgtgttgctcttgtccttcggcagcgtggccgctagtcatatcgaggtaactgtggagaattttttacgggtattaactgggaggatcccacctagtactcctcggtcaaaacgtcttctttctgatgacagaagcaatattctaatttatatgacagggcatggtggaaatggtttcttaaaatttcaagattctgaagaaattaccaacatagaactcgcggatgcttttgaacaaatgtggcagaaaagacgctacaatgagctactgtttattattgatacttgccaaggagcatccatgtatgaacgattttattctcctaacataatggctctagctagtagtcaagtgggagaagattcactctcgcatcaacctgatcctgcaattggagtccatcttatggatagatacacattttatgtcttggaatttttggaagaaattaacccagctagccaaactaatatgaatgacctttttcaggtatgtcccaaaagtctgtgtgtgtctactcctggacatcgcactgatctttttcagagggatcctaaaaatgtactgataactgatttctttggaagtgtacggaaagtggaaattacaacagagactattaaattgcaacaggattcagaaatcatggaaagcagctataaggaagaccagatggatgagaaactaatggaacctctgaaatatgctgaacaacttcctgtagctcagataatacaccagaaaccgaagctgaaagactggcatcctcctgggggctttattctgggattatgggcacttattatcatggttttcttcaaaacttatggaattaagcatatgaagttcattttttagacttgatgatgaatgaagaatgcatggaggactgcaaacttggataataatttatgtcattatatatttttaaaaatgtgtttctcttgtatgaattggaaataagtataaggaaactaaatttgaatcaactattaattttataacttaaagaaaaataattgttaatgcaactgcttaatggcactaaatatattccagttttgtattttgtgtattataaaagcgaatgagacagagatcagaatacattgactgtttttgaaaatagtaatttccccttatccccttttcatttggaaaagaaacaattgtgaagacattaaattctcactaacagaagtaactttggttaattattttttgtatatcctcccaatcttttgacttatgcacatattttttcccaatatggagatcatatggaatgtactattttgtaatgtcttttttcattttacaatgtattatcaaccttttccctctcaaaaatacattgtgaatgactgcatagtattcactttatgaatatttaattcatttcacagtcttctattgttggaccacttacattgtaccaaatgttttcctttggtttattctttaatgtattaatattttactgctggtcactcatggaatcctgcagctttaattaaaagcaaagatgaaaaattggttttttaatctatggcactgacaatctccaggaccttatatgtttgttgtcagtttatttgggaaattttagacctttgataatttcacgtactgactgctcaagagaaacataccccattgtttttcatttgtaagcgttctgtgatcttctacaattggtcacgtcctcttcattttccatcttgaaagagagagccaacaaggactttatttcattctgttttaggtaaacctccttgcccactggctgtatctatactttccttgagaaaaatcccataaagtggatggacctgtgaagaaaatgtatgcttatggcctagccttcatgtctggctgatgtatcctataaggcagtaagccccttttctagtctctggtaagatgcaagagctcatatccccatcactgacattttagtttggaaataatattgagactgtgctatgaccaacccctgatgttgttttttcttttcaaacttttgcatatgagtagaggaaaagcctaaaagttaagtatttatgtctggggggataccttcaggtgtcttatctgttttatgcaagaatttatgtgttcatctttattcagtgcaaagatttttttttaaattttgtttataattgtaggtaacattaagacaactcttcctccacaagaaaacctcctaaaattaatattccttaagatttgtttttccttttgcacttataatattaccttttaattgcatgcaagattgtcatacttttcaaaaggcaaaggattgactgtgttatctccctagttagaacaaatgatattgaggctttttgccagctctgaatctttattttaattgatctttttattgatgtgttatataaatgaggaagaaaaattttgtctgattatgtgaaggatctttctgtacatgaaaagaagggaaaataaacttgcaattgaatagactgattatagtagcactgagacacaaaaagattgaccatgttgccctccagacactcatacaaggtcgtggacaccacggtgaggcggagctatttagggtggtaaaggaattatgattgttcttgagccaaagtaatttagtttgaatataatgaaacataccctgtaaagactgctagaaagtaaaaggattcgtcttcagaggttgtagaaggtgcccttcttagttaaaaccaaactgggaaaagtaatactggataaaatattcaggataaattttgcctcagcagaatttcaaagggcagttgttcctctgtttcattattgaatcttcagaatatagttaaagccaaaagcttaaaatatgttaaatgtttcacttataaccataatctttttacatagagcatactctgccttcataataactaaatcctctgcatgtggtagatgagtacgtttaggaaatattgtcagtgcaattaaatggcctacactttaaacagtatcataaaaacaaatccttaaatatattctacttgagtcacaaaagctgaacaacagaaaggtgttttgtttttgcctttctcacagtgttgtggtgagaatcagatgagatagtattttgactaaacacttctgaaattgtaaatatatggtggcattattgttcttatgtcggcttaggaggataccaaaggggaagttaatggtcacagtgcacttatgtagctttctaagctactcaatgtgattcttgttctctttgctgttctttttctcctcccccatggtgtccttcagagagaaaaggaatgtagataaatgaatccctgcagatgtgtcctgacatttcagggagggacagggtataatgatgccatcctgcaaaggcagcctgtgtgagaaaaagaaatcaaataatgtggattttaaaattacgaaagacattcatttgcagtttatgaaaggaaaatgtagtttggatacaaagctgattaaattggatcaagaaatattagaattaaatgcaaaaaataatccatgcatttatggttttgatttttatatattcccagctagttgaaaatgatgattcccacaagaagcataactcagcttgtttctgcttactgagtattttctactatggtatatattgataacatttcttccattatgtatgttgtataccagagttacagttactgtgggaatcataatttgaaattttgactcctgtgtttctggaatctttacaacaaatgttgcattaacatataacttttttcagttgactttaccaaaattaagcccatctttagtagatactgttttaacatgtgaaagaaatacgttataaacataccacaagatatggctataaaacaatgagatcagtatccatttttgctttaaagaattggccttattgcttcagtgtcacatctcatactcaagggcatttactacaaagaaagagttctccaatattgctgttctgttgctgcctgccctatttacacatgtacctgctacttaaataggaaagcctttcaattcatggacaatacaccttggtggtaaccaggcttttatttttatttttttttcttagtgtaaaaactgtactgttttggaaatgtgctgtgaaatattaggtttaactgtgtagatcctagaataaggggatttatatagatgaagttgtaaccaagaaactggttattaaaaatttatttactccaa

SEQ ID NO: 165054 - DNA, 933 bp, Homo sapiens
  Payload ID: 12504
  Gene Symbol: PIGK
  Gene Name: phosphatidylinositol glycan anchor biosynthesis, class K
  ENST ID: ENST00000487906
  CDS Start-End: 1-84
aagaatatggaactaaatgtgtatggagatgatgtggaagtggattatagaagttacgagggcatggtggaaatggtttcttaaaatttcaagattctgaagaaattaccaacatagaactcgcggatgcttttgaacaaatgtggcagaaaagacgctacaatgagctactgtttattattgatacttgccaaggagcatccatgtatgaacgattttattctcctaacataatggctctagctagtagtcaagtgggagaagattcactctcgcatcaacctgatcctgcaattggagtccatcttatggatagatacacattttatgtcttggaatttttggaagaaattaacccagctagccaaactaatatgaatgacctttttcaggtatgtcccaaaagtctgtgtgtgtctactcctggacatcgcactgatctttttcagagggatcctaaaaatgtactgataactgatttctttggaagtgtacggaaagtggaaattacaacagagactattaaattgcaacaggattcagaaatcatggaaagcagctataaggaagaccagatggatgagaaactaatggaacctctgaaatatgctgaacaacttcctgtagctcagataatacaccagaaaccgaagctgaaagactggcatcctcctgggggctttattctgggattatgggcacttattatcatggttttcttcaaaacttatggaattaagcatatgaagttcattttttagacttgatgatgaatgaagaatgcatggaggactgcaaacttggataataatttatgtcattatatatttttaaaaatgtgtttctcttgtatgaattggaaataagtataaggaaactaaatttgaatcaactattaattttataacttaaagaaaaataattgttaatgca

SEQ ID NO: 165055 - DNA, 1137 bp, Homo sapiens
  Payload ID: 12505
  Gene Symbol: PIGL
  Gene Name: phosphatidylinositol glycan anchor biosynthesis, class L
  Uniprot ID: Q9Y2B2
  ENST ID: ENST00000225609
  CDS Start-End: 18-776
agtgctgcttacccatcatggaagcaatgtggctcctgtgtgtggcgttggcggtcttggcatggggcttcctctgggtttgggactcctcagaacgaatgaagagtcgggagcagggaggacggctgggagccgaaagccggaccctgctggtcatagcgcaccctgacgatgaagccatgttttttgctcccacagtgctaggcttggcccgcctaaggcactgggtgtacctgctttgcttctctgcaggaaattactacaatcaaggagagactcgtaagaaagaacttttgcagagctgtgatgttttggggattccactctccagtgtaatgattattgacaacagggatttcccagatgacccaggcatgcagtgggacacagagcacgtggccagagtcctccttcagcacatagaagtgaatggcatcaatctggtggtgactttcgatgcagggggagtaagtggccacagcaatcacattgctctgtatgcagctgtgagggccctgcactcagaagggaagttacctaaagggtgctctgtgctcacgcttcagtctgtgaatgtgctgcgcaagtacatctcccttctggatctgcccttgtctctgcttcatacgcaggatgtcctcttcgtgctcaacagcaaagaagtggcacaggccaagaaagccatgtcctgccaccgcagccagctcctctggttccgccgcctctacattatcttctcccggtacatgagaatcaactcactgagcttcctctgaagccttgaagggttttcagatccaaggaacaaaggggaaaatagacaaaggagtgcagaggacctggcctggcactggcttatttacctgagctcaaggagatccccgctggagcagcctctgcaaaagggagcccatgtaggccaggggctgtccaaactccagcttcttcccctgggaaaaaacccaaagaaccaaaaacaaaccaccccaaggataataatagctacactgctagcttctcaagttcttgtgaaaaacaatttacataatgacacagtagatgtggaacacctagcccagtgcctgggcaggtccctattatcataaatgaacataaaagtgctctaaaaacactcca

SEQ ID NO: 165056 - DNA, 1257 bp, Homo sapiens
  Payload ID: 12505
  Gene Symbol: PIGL
  Gene Name: phosphatidylinositol glycan anchor biosynthesis, class L
  ENST ID: ENST00000395844
  CDS Start-End: 18-752
agtgctgcttacccatcatggaagcaatgtggctcctgtgtgtggcgttggcggtcttggcatggggcttcctctgggtttgggactcctcagaacgaatgaagagtcgggagcagggaggacggctgggagccgaaagccggaccctgctggtcatagcgcaccctgacgatgaagccatgttttttgctcccacagtgctaggcttggcccgcctaaggcactgggtgtacctgctttgcttctctgcaggaaattactacaatcaaggagagactcgtaagaaagaacttttgcagagctgtgatgttttggggattccactctccagtgtaatgattattgacaacagggatttcccagatgacccaggcatgcagtgggacacagagcacgtggccagagtcctccttcagcacatagaagtgaatggcatcaatctggtggtgactttcgatgcagggggagtaagtggccacagcaatcacattgctctgtatgcagctgtgagggtgctctgtgctcacgcttcagtctgtgaatgtgctgcgcaagtacatctcccttctggatctgcccttgtctctgcttcatacgcaggatgtcctcttcgtgctcaacagcaaagaagtggcacaggccaagaaagccatgtcctgccaccgcagccagctcctctggttccgccgcctctacattatcttctcccggtacatgagaatcaactcactgagcttcctctgaagccttgaagggttttcagatccaaggaacaaaggggaaaatagacaaaggagtgcagaggacctggcctggcactggcttatttacctgagctcaaggagatccccgctggagcagcctctgcaaaagggagcccatgtaggccaggggctgtccaaactccagcttcttcccctgggaaaaaacccaaagaaccaaaaacaaaccaccccaaggataataatagctacactgctagcttctcaagttcttgtgaaaaacaatttacataatgacacagtagatgtggaacacctagcccagtgcctgggcaggtccctattatcataaatgaacataaaagtgctctaaaaacactccacagatgtgacttttacattgtttccaaagcaggttcaccaaaaacacatacacaaaatgcaacagtgtgtgttgaattggttcaatcataattcctttgatttttcttgtatcagaatgtgggtctaggaaaaacttgctctatttaacagg

SEQ ID NO: 165057 - DNA, 554 bp, Homo sapiens
  Payload ID: 12505
  Gene Symbol: PIGL
  Gene Name: phosphatidylinositol glycan anchor biosynthesis, class L
  ENST ID: ENST00000581006
  CDS Start-End: 19-471
cagtgctgcttacccatcatggaagcaatgtggctcctgtgtgtggcgttggcggtcttggcatggggcttcctctgggtttgggactcctcagaacgaatgaagagtcgggagcagggaggacggctgggagccgaaagccggaccctgctggtcatagcgcaccctgacgatgaagccatgttttttgctcccacagtgctaggcttggcccgcctaaggcactgggtgtacctgctttgcttctctgcaggaaattactacaatcaaggagagactcgtaagaaagaacttttgcagagctgtgatgttttggggattccactctccagtgtaatgattattgacaacagggatttcccagatgacccaggcatgcagtgggacacagagcacgtggccagagtcctccttcagcacatagaagtgaatggcatcaatctgaaagacagagcaaattccagattgtgagcagccacctgcatcctctatgcctgagcggcccagccatgagagccagccgaccccacagatgatgcccctttcagcaccat

SEQ ID NO: 165058 - DNA, 582 bp, Homo sapiens
  Payload ID: 12505
  Gene Symbol: PIGL
  Gene Name: phosphatidylinositol glycan anchor biosynthesis, class L
  ENST ID: ENST00000584797
  CDS Start-End: 18-582
agtgctgcttacccatcatggaagcaatgtggctcctgtgtgtggcgttggcggtcttggcatggggcttcctctgggtttgggactcctcagaacgaatgaagagtcgggagcagggaggacggctgggagccgaaagccggaccctgctggtcatagcgcaccctgacgatgaagccatgttttttgctcccacagtgctaggcttggcccgcctaaggcactgggtgtacctgctttgcttctctgcaggaaattactacaatcaaggagagactcgtaagaaagaacttttgcagagctgtgatgttttggggattccactctccagtgtaatgattattgacaacagggatttcccagatgacccaggcatgcagtgggacacagagcacgtggccagagtcctccttcagcacatagaagtgaatggcatcaatctggtggtgactttcgatgcagggggagtaagtggccacagcaatcacattgctctgtatgcagctgtgagggccctgcactcagaagggaagttacctaaagagagctgccctcagccgagcagaggcagtggttggggag

SEQ ID NO: 165059 - DNA, 550 bp, Homo sapiens
  Payload ID: 12505
  Gene Symbol: PIGL
  Gene Name: phosphatidylinositol glycan anchor biosynthesis, class L
  ENST ID: ENST00000470116
  CDS Start-End: 12-449
gcttacccatcatggaagcaatgtggctcctgtgtgtggcgttggcggtcttggcatggggcttcctctgggtttgggactcctcagaacgaatgaagagtcgggagcagggaggacggctgggagccgaaagccggaccctgctggtcatagcgcaccctgacgatgaagccatgttttttgctcccacagtgctaggcttggcccgcctaaggcactgggtgtacctgctttgcttctctgcaggaaattactacaatcaaggagagactcgtaagaaagaacttttgcagagctgtgatgttttggggattccactctccagtgtaatgattattgacaacagattgtcatatctcagactgatgtgtctatcagaggcacagggacctcaacagcacacgccagtgagtcagtcatcagattatagtagcctgggaatggggtgaatacaggcttgaagtggactagtatctatttccaaggaggcccaatctattgggttggagtgcaacggtgcgatctcggctcactgcaacctccgcttccc

SEQ ID NO: 165060 - DNA, 1345 bp, Homo sapiens
  Payload ID: 12505
  Gene Symbol: PIGL
  Gene Name: phosphatidylinositol glycan anchor biosynthesis, class L
  ENST ID: ENST00000585034
  CDS Start-End: 8-313
acccatcatggaagcaatgtggctcctgtgtgtggcgttggcggtcttggcatggggcttcctctgggtttgggactcctcagaacgaatgaagagtcgggagcagggaggacggctgggagccgaaagccggaccctgctggtcatagcgcaccctgacgatgaagccatgttttttgctcccacagtgctaggcttggcccgcctaaggcactgggtgtacctgctttgcttctctgcagggatttcccagatgacccaggcatgcagtgggacacagagcacgtggccagagtcctccttcagcacatagaagtgaatggcatcaatctggtggtgactttcgatgcagggggagtaagtggccacagcaatcacattgctctgtatgcagctgtgagggccctgcactcagaagggaagttacctaaaggtaaggcttgttccttttgcaaagggccacaagatactgtccctctgagaaacttatgagggggaaatttgcaaatccacagagagctgccctcagccgagcagaggcagtggttggggaggccgccacactcttcctgactcacctcaaggtacctggcaggttgtatctaccagcaagtgcctgcctgcagggccacctctggatgagtggggaggccaggtttgcccctcaacctgtctagctttttcacagggtggatgttttacacctctggtattcttccagtctgaactcaatcccatcccccaaccaattaggcaggttgtaaatgactgctgggtgcttgatgaaccaatctgcctgagttaggaactcttcctaacccacataaagtatttgaccctacctgaccatttactgcatgacccccatgcttagcctctctggaccagtttctggtctgtcatacctcaccggcgcaatacgaagattcaatgaatgaaaacgtaagtagtttgtgccctttctatgtgggatgactgaaaggagcttaccaagccatgatgactttggaacatgactatagtttgtttgattcttatatcaatcctgtgagacaggcaggtctcacactatcaacaccaatttacagattagaaaactgagactgagagtggttaagggactttgccaagtctgtcaattcttgactgacagagctggaaccaggtctctaaactcccaatacagtaattcctgtctcctttacttcctttggctttgaggtagccagatctcaacctctagcagccaacctttttctggtagggcacaccgcagggtagagggtagccagccaggtcttctatggcccttttactcgttctagctgcaagaatcatgggcaca

SEQ ID NO: 165061 - DNA, 518 bp, Homo sapiens
  Payload ID: 12505
  Gene Symbol: PIGL
  Gene Name: phosphatidylinositol glycan anchor biosynthesis, class L
  ENST ID: ENST00000596678
  CDS Start-End: 1-309
gtggtgactttcgatgcagggggagtaagtggccacagcaatcacattgctctgtatgcagctgtgagggtgctctgtgctcacgcttcagtctgtgaatgtgctgcgcaagtacatctcccttctggatctgcccttgtctctgcttcatacgcaggatgtcctcttcgtgctcaacagcaaagaagtggcacaggccaagaaagccatgtcctgccaccgcagccagctcctctggttccgccgcctctacattatcttctcccggtacatgagaatcaactcactgagcttcctctgaagccttgaagggttttcagatccaaggaacaaaggggaaaatagacaaaggagtgcagaggacctggcctggcactggcttatttacctgagctcaaggagatccccgctggagcagcctctgcaaaagggagcccatatcacacaaaagttgggaagagaaggatgtcaattagactacatcaaaatctgggcagagggaggacaaagagctgcct

SEQ ID NO: 165062 - DNA, 888 bp, Homo sapiens
  Payload ID: 12505
  Gene Symbol: PIGL
  Gene Name: phosphatidylinositol glycan anchor biosynthesis, class L
  ENST ID: ENST00000463810
  CDS Start-End: 1-278
tgtgtgtggcgttggcggtcttggcatggggcttcctctgggtttgggactcctcagaacgaatgaagagtcgggagcagggaggacggctgggagccgaaagccggaccctgctggtcatagcgcaccctgacgatgaagccatgttttttgctcccacagtgctaggcttggcccgcctaaggcactgggtgtacctgctttgcttctctgcagttttccgtagggagctaagtgaatacaccgaaggtcttacctctgaacccctcacagcctagggacaggagcggccggcttacctggtgggttgggggacgtcggcagctcgcgtactacgccagcaggattgaggagcagagaaacagttgcagttggttgtattcagtacctgcatttccgttgggaactccacctgtacttgttattctgtggaacttttttttatttgtagaaggagcaagaatattgaccttactatatagcacacgaaacaatctatgctgtatcgtgcctgctcaatccttaaagttaacttctaatgatagtaaaagaccttcctgctgcctttaaaatgcagcttgtgctagtaacatgcatgtgtcaaattgaagaattagacatagatgactagatagaaagtaattttgtaggtaattttagagttcaactccacccagctttcagtgaaggaacctttcaaataatagatttttgcttaccatagagaaaagatcaaatgacaaagcaaatattgaccattaagctggaatatggtgataattgaacagttgtataaatgaagtaattgaattgtacacatacaatgggtgaattttatggcatgtcaaagtatacctcaataaagctatttttttaaattgcccatga

SEQ ID NO: 165063 - DNA, 4319 bp, Homo sapiens
  Payload ID: 12506
  Gene Symbol: PIGM
  Gene Name: phosphatidylinositol glycan anchor biosynthesis, class M
  Uniprot ID: Q9H3S5
  ENST ID: ENST00000368090
  CDS Start-End: 253-1524
cggaagcgagaccgtccatccagaggaaggcaagtttttggctcgggcggctgagaagaccgcgcggggctggagacaggtagcagtacgggggcggggcttcatgccggatgtgatagtctgcagtcgtttcggttggcagcctggcgggtgggagatgcggcggccacctgctgcaaagaaccgaagggaaggttagaagtacgaaggcagtttggagctggggctaagcagctgtcgcacggtcagatcatgggctccaccaagcactggggcgaatggctcctgaacttgaaggtggctccagccggcgtctttggtgtggcctttctagccagagtcgccctggttttctatggcgtcttccaggaccggaccctgcacgtgaggtatacggacatcgactaccaggtcttcaccgacgccgcgcgcttcgtcacggaggggcgctcgccttacctgagagccacgtaccgttacaccccgctgctgggttggctcctcactcccaacatctacctcagcgagctctttggaaagtttctcttcatcagctgcgacctcctcaccgctttcctcttataccgcctgctgctgctgaaggggctggggcgccgccaggcttgtggctactgtgtcttttggcttcttaaccccctgcctatggcagtatccagccgcggtaatgcggactctattgtcgcctccctggtcctgatggtcctctacttgataaagaaaagactcgtcgcgtgtgcagctgtattctatggtttcgcggtgcatatgaagatatatccagtgacttacatccttcccataaccctccacctgcttccagatcgcgacaatgacaaaagcctccgtcaattccggtacactttccaggcttgtttgtacgagctcctgaaaaggctgtgtaatcgggctgtgctgctgtttgtagcagttgctggactcacgttttttgccctgagctttggtttttactatgagtacggctgggaatttttggaacacacctacttttatcacctgactaggcgggatatccgtcacaacttttctccgtacttctacatgctgtatttgactgcagagagcaagtggagtttttccctgggaattgctgcattcctgccacagctcatcttgctttcagctgtgtctttcgcctattacagagacctcgttttttgttgttttcttcatacgtccatttttgtgacttttaacaaagtctgcacctcccagtactttctttggtacctctgcttactgcctcttgtgatgccactagtcagaatgccttggaaaagagctgtagttctcctaatgttatggtttatagggcaggccatgtggctggctcctgcctatgttctagagtttcaaggaaagaacacctttctgtttatttggttagctggtttgttctttcttcttatcaattgttccatcctgattcaaattatttcccattacaaagaagaacccctgacagagagaatcaaatatgactagtgtatgttccacaccctctgctactgtgttacattctgattgtcttgtatggaccagaagagagctttgggacattttttctgaacattctaagcattctagtgaaagttcccatgttccaacagaacttaaaagcaatgtttgccttatatataaaagggacacaataattgaggtccaccttctaggaaatcctaggactcgtttatttgggacatggtgggaataaaggtcacatattggaaaatggaaaggctgatgaaactatcagatactaaaacattcttaaaatagaggaatatagttagagacatcaggtttaagccagtatttgttcctgttttacaatgcttctgtcttaagctgtgtcttaacttttaacacccatcttttctttctaaagctttcctgacagctgtgaaaatccaaaaaatattcttaaactgtgtatggtggcccttgcctgtagtctcagcactttgggaggctgaggtgggagggtcgcttgagttcaggagttctagacccacctggggcaagatggtgagacctagtctcaaaaaaaaaaaaaaaaattagccaggtgttgtggtgcacccctgtagtcatagctgcatgggaggctgaggtgggagaattgcttgagcccagagcaagaccctgtctcaaaaaaaaaaaaaaaaaaaaaaaggaaaggacaactttttagatagaaaagtattaaataatactaagatgcttagtagtattattttagagagttttaaacttctatattaaatgtggggtcttacaagataatccaaagactttgggaggccaaggcgggcagatcacgaggtcaggagattgagaccatcctggctaacacggtgaaacccctctctactaaaaatacaaaaaattagccgggcgtggtgggtgcctgtagtcccagctactcctcgggaggctgaggcaggagaatggcgtgaactccggaggtggagcctgtagtgagccgagatggcaccactgcgctccagcctgggcgacagagcaagactccatatcaaaaaaaaaaaaaaaaaaagataatccaaagaatttaaattgtaatcatgtttcatgtatttgttttattacttacttttatagcacttagtcccagtggtattagactgctatttggtttcatacaaaaaggattaaatttaaattcattcatgtttagacttgagttattacatttttaaaactatcatcttgcctttaatgtttgtggtcctacacaaactattagtacatttcagtatcctcttacccctttgtttttaagtttttgattgctaaagcaagacttttttcttctagaatttaagtcaaccaagtgttatctatgttgtaaaaatggataatagtagattttaggtgataaaacaacttgttagtaagacatttcctagcttaaaaaaaaaaatcaaaaattccatgatagaaatgcagacctgtgagggaaactcctgaaaagcataagaagcatcccagagagccatgggttttctagaccagagaatttagagggagattgtggaactgaggcttaggtggtcagatcgtttcccttatcactgtaatatttctgggggaaaaatgctttctgagttgtttaaacaagcatccttacatttttttttttaattaaacagcctgtctaggcttgggattccctaatactacagtagcagtatatgaatatgattttgtgattgtgttttttaaaagataagtaatttgatgaactgttcttttgcagtcagaaaacactcacaaaaagacaaaaaaagttccacagtattatatttcatgtcagttcaggcctaaaatcctttgcaaataagatgtttataggctggtcacaattaacaatgttattattggcagcacttcttggatggataccttttgggacctttcattagaaagagggaaagaatggggtggttttgtatgggctcctgtttggggtaaaaatagcagagtcagttgctgaggacaatgaccttccttataacatttagtttcatacccatattaggtcttgtcttgaggaccctttatatgtgcttgtttactagtggccttccagccatagcattcttacctttttttcctattctaagaattaaaaaaaaaaattatagagccagcaagggaggaggcaggaaacagaaatcgaatttcatcattccagtatagttgtccctttttttgtatttctgacttggttttataattatatttacttactaattattgttttttaacattctttattgtggcttactcttcatacttagaattgaaattgttggacatcacatgtatattcacattataaatacatcattcttccactgttagacctttagattgcttccagtttttaatattctaaataagactttcaacattttctgtgttttagctcattctcttaggacattcttagaagttagaaacatttctgctgggatcgttggagggaacttcaaactttggaatctttcctgcaagaaattctttaccaaagaaaggcaggtgtttcttaaagggatgcaaaagatattttgcactttgtatgttccaaaacatttagtaagttaactaaaaaaatgagttaatttggtttcttgggggattttaattttttaatttgttttctggttatgtaaaaaaaatgttttttttttgcttcttatcacaatccttttgtttcctttttaatcctttaataacaccttcaaattttataa

SEQ ID NO: 165064 - DNA, 5501 bp, Homo sapiens
  Payload ID: 12507
  Gene Symbol: PIGN
  Gene Name: phosphatidylinositol glycan anchor biosynthesis, class N
  Uniprot ID: O95427
  ENST ID: ENST00000357637
  CDS Start-End: 417-3212
aggtattgggggcgttccggaattgaggggtggttgtagtggtggcttaggaataccctcccggctatcgcttcagtgggtagaggggaccactgcccgagagctttaatggagctgggtcctgccttcgcgctgaggagccctcgttttcgagatcaggcctgaccgggataagctccagaaacagtattatgtctcagtcctgtgcaaagtgagatgagctgtagcctttggagacctataattttgaacatagatgttccttaaaagctaaatctttttgaacagatgatgataaacctggaagagattcaccaacaatagcaaattacacactggcttggaaagtactcccatgttccgtttgatcttggcaatttaatgctgttcttgaagactaattagttacactggatatgctgctgttctttactttgggattgcttatacattttgtgttcttcgcctccatctttgacatttattttacatctcctttggttcatggaatgactcctcagtttacaccattgcctcctccagcgagaagattagtgttgtttgttgctgatggccttcgagcagatgcactttacgaattagatgaaaatggaaactctagagcaccgtttattaggaatatcataatgcatgaaggcagctggggcatatctcatacacgtgtgccaacagaatctcggccaggtcatgtagctctgatagctgggttttatgaagatgtcagtgcagttgccaaaggatggaaggaaaatcctgtagagtttgattctctttttaatgaaagtaaatacacatggagctggggaagcccagatatcctgcctatgtttgccaaaggtgctagtggagaccacgtttatacatatagttatgatgctaaaagagaggattttggtgctcaagatgcaacaaaactggatacgtgggtttttgataatgttaaggacttctttcatcatgccagaaacaaccagtctttgttttctaaaataaatgaagagaaaatagtttttttcttacatttattaggaatagatacaaacggacatgctcatcgaccatcctcgagagactacaagcacaatattaaaaaagttgatgatggagttaaagaaatcgtgtctatgtttaaccacttctatggaaatgatgggaaaacaacatttatctttacctctgaccatggaatgacagactggggttcccatggggctggtcatccttcagagactttaactcctttagtcacttggggagctggaatcaagtatccccaaagagtatcagctcagcaatttgatgatgcatttttgaaagagtggagattggagaattggaagaggctagatgtcaatcaggctgatattgcaccattgatgacttcccttattggagttccctttcctcttaactcagtgggaatccttcctgtggattatcttaacaacactgatctcttcaaagcagagagcatgtttacaaatgcagtacagattcttgaacagttcaaggtgaaaatgactcagaagaaagaagttactttaccatttttgtttacaccatttaaactgctttctgattccaaacagttcaacattttaagaaaagcaagatcttatataaaacacagaaagtttgatgaagtggtctccctttgcaaggagctaattcatcttgcattgaaaggattgtcctattatcacacatatgacagattctttttgggcgtcaatgttgttattggttttgtgggatggatatcttatgcctctttgttgatcatcaagtctcattccaaccttataaaaggtgttagtaaagaagtgaagaaaccaagccatctcctgccttgtagttttgtagctattggcattttagtagcattttttctgctgattcaagcctgtccctggacatattatgtatatggtttgttgccactgccaatatggtatgcggttctaagagaatttcaagttattcaggaccttgttgtatcagtgttgacctatcctctgagccattttgttgggtacctgttagcctttaccctgggaattgaagtattagttctcagttttttctaccgctatatgcttaccgctggacttactgcctttgcagcttggccatttctcactcggctgtggactcgagcaaagatgacctcactgagttggactttcttctctttgctcctggcagtgttcccactgatgccggttgtaggtcgaaagccagacatctctctagtgatgggtgcaggcttgctggttcttctgttatccctgtgtgttgtaacatctctcatgaaaagaaaagatagctttataaaggaagagctattggtacatctgttacaggtgctgagcacagtgctctccatgtatgttgtgtatagcactcagagtagtctactcaggaagcaaggactgcctctcatgaatcaaattattagctgggcaacattagcctcttccttggttgtgccactactgagttctccagttctctttcagcgattgttcagcatacttctttcattgatgtcaacctacctacttctaagcacagggtatgaagctctctttccactagtgttgtcttgtttgatgtttgtctggataaacatagaacaagaaactctacaacaatctggtgtttgctgtaaacaaaagctcaccagtatccagttctcttataatactgatataactcagtttcgacagctatatctggatgacatccgtagggcctttttccttgttttcttcttagtgacagcattttttggaactggaaatatagcttctattaacagctttgatcttgcctctgtctattgctttctgactgtgttcagtccttttatgatgggagccctgatgatgtggaagattttaatcccctttgttcttgttatgtgtgcttttgaagcagttcagttgactactcagttatcgtcaaaaagcctttttctcattgttctcgtcatatcagacattatggctttgcattttttcttcttggtcaaggattatggcagctggcttgatattgggacaagcatcagccactatgtgattgtcatgtccatgaccatctttttggtgttcctcaatggcctggcccagctgctcacaacgaagaaactcagactatgtggcaaacccaaaagtcacttcatgtgaggttgctgaagcaccattcagcatctggatcctgattctccttttaagctaaaatctcatcaaggcttcaataagaagatggatatggatatatagtatattctactcctgtaaggaaaatggtatttggaattccgaattgacaggttatctggaacaaaggagcttctttttttttctaggttttgcaggcatgaaatagtgattatatctgtggaaaagcataggaaggcattctcctttttcatttttttcctttggctggcagctcttcccagtgatgttgagagcacctgcagcaatctggtccccagtcgcacaacttcccacatacccagaggagagcatatgcctgtgggggcagtgctgatggcatccagagtcattgctgtggctgagctggaaggaaatcaccaggtgccaccgtcaatatttatcagctttcagcactggttttgttagacagtcagggtgtattatttcaagagcttcaataaaaaaagtgtttgcaggtatttgtcatatttctttagtatgcaataatgctatcttatcctttttagtgctatttctcaggttttctcagtcaaccagctagatgcatgtgatgcatgtctatccttcactttttttttttcatttctggattttcctgggatttctgacaacacaaaagtagaaagtgcttggtatttctgtcttatacataggaaaacatttaaaataaatagtttttaattgtaggctcaacatctgttaccccatagctttttcgtatattgtttctttccctttgaatttctttttactgtcatctattattttaacaggagttaaaataactcctgttaaactttctgacaatatcataagaattcatattaaaggtgttattctttctggttgtgagattctagcacaaaggcctaaaatcatcaaattagatttccatttgtaaacaaattctaatgggcaaaatatcttgagagcagtttttatatggattatccataaaatgacctttacatatccctgcagagttggccttttgcccgtggtgtgctagtagctttggctgatgctaagctttcctggtatgcgccctatttttaagaagtaattgcttttgaattaagttatagcattactaattcatgttaatgactaggaaaccctctgtaatttacaagatttttcaaattggtggggagtgaataaatacaatttaaaagtcagaaatcagtttggcaaagtgtactttcttaatttctatttatgatgaagtatagtcataatttatttgtaatactactttatggtataccagtgaaagaactgtagtataaaaaagaggtattaatgttttatgaaatctcatgcatcagttcatagcataaaatctagctggacaactaagaagctatggtagcaaacagtgatgttgatggaatgagaatcatgaactttcatattacctcaaaggatttttttatcagtttttttcacacatcagaaaaaactgactgtataaacacttatcactgacctttttctatgtgtagttttgccttttatcttttcccaaatttttataaagagaaattaataaatattttattacaacattgtaaagggtgctcagtttttttatctttctttattttgctctttgaggcatatctttttcttaattttgtcctttcaggtcagtgtgagtctgtagaataggttgaacttccttctgacagtatcatagagtttgtggagtttgtgttgtgtgcctgcagccacaggctcgccttgctgcaccgtaactggccccttcagactcacatgggaacaagccttttctgttgcagtttcccagatatctttaaatgttttgaaatgtatatttttatgttgcaaaacagaaaaaagaaacgagttagggaaaaagtatttctatttaaggtatttattttttcattctacctatgccatagatttctgaatcaagacttaggacatttgctgattaacaatgtttaaattaggaattgttataagaattaaaataggcagaacaagttgtgaaaatattgaaccaaaaaaaggccatgctatcatcttagagggcccatgaataaaccttagagggaatcctaaggctttaggaaaccgctgcagcttgtctgtcattttccaatatgttaattattatacttagtgtacagtatttagaatacaaaatgcttttttattttttaggaaaataatgttataaatgattgtatattttcatagtaa

SEQ ID NO: 165065 - DNA, 4456 bp, Homo sapiens
  Payload ID: 12507
  Gene Symbol: PIGN
  Gene Name: phosphatidylinositol glycan anchor biosynthesis, class N
  Uniprot ID: O95427
  ENST ID: ENST00000400334
  CDS Start-End: 354-3149
agcagcggccgggcaggtattgggggcgttccggaattgaggggtggttgtagtggtggcttaggaataccctcccggctatcgcttcagtgggtagaggggaccactgcccgagagctttaatggagctgggtcctgccttcgcgctgaggagccctcgttttcgagatcaggcctgaccgggataagctccagaaacagtattatgtctcagtcctgtgcaaagtgagatgagctgtagcctttggagacctataattttgaacatagatgttccttaaaagctaaatctttttgaacagatgatgataaacctggaagctgttcttgaagactaattagttacactggatatgctgctgttctttactttgggattgcttatacattttgtgttcttcgcctccatctttgacatttattttacatctcctttggttcatggaatgactcctcagtttacaccattgcctcctccagcgagaagattagtgttgtttgttgctgatggccttcgagcagatgcactttacgaattagatgaaaatggaaactctagagcaccgtttattaggaatatcataatgcatgaaggcagctggggcatatctcatacacgtgtgccaacagaatctcggccaggtcatgtagctctgatagctgggttttatgaagatgtcagtgcagttgccaaaggatggaaggaaaatcctgtagagtttgattctctttttaatgaaagtaaatacacatggagctggggaagcccagatatcctgcctatgtttgccaaaggtgctagtggagaccacgtttatacatatagttatgatgctaaaagagaggattttggtgctcaagatgcaacaaaactggatacgtgggtttttgataatgttaaggacttctttcatcatgccagaaacaaccagtctttgttttctaaaataaatgaagagaaaatagtttttttcttacatttattaggaatagatacaaacggacatgctcatcgaccatcctcgagagactacaagcacaatattaaaaaagttgatgatggagttaaagaaatcgtgtctatgtttaaccacttctatggaaatgatgggaaaacaacatttatctttacctctgaccatggaatgacagactggggttcccatggggctggtcatccttcagagactttaactcctttagtcacttggggagctggaatcaagtatccccaaagagtatcagctcagcaatttgatgatgcatttttgaaagagtggagattggagaattggaagaggctagatgtcaatcaggctgatattgcaccattgatgacttcccttattggagttccctttcctcttaactcagtgggaatccttcctgtggattatcttaacaacactgatctcttcaaagcagagagcatgtttacaaatgcagtacagattcttgaacagttcaaggtgaaaatgactcagaagaaagaagttactttaccatttttgtttacaccatttaaactgctttctgattccaaacagttcaacattttaagaaaagcaagatcttatataaaacacagaaagtttgatgaagtggtctccctttgcaaggagctaattcatcttgcattgaaaggattgtcctattatcacacatatgacagattctttttgggcgtcaatgttgttattggttttgtgggatggatatcttatgcctctttgttgatcatcaagtctcattccaaccttataaaaggtgttagtaaagaagtgaagaaaccaagccatctcctgccttgtagttttgtagctattggcattttagtagcattttttctgctgattcaagcctgtccctggacatattatgtatatggtttgttgccactgccaatatggtatgcggttctaagagaatttcaagttattcaggaccttgttgtatcagtgttgacctatcctctgagccattttgttgggtacctgttagcctttaccctgggaattgaagtattagttctcagttttttctaccgctatatgcttaccgctggacttactgcctttgcagcttggccatttctcactcggctgtggactcgagcaaagatgacctcactgagttggactttcttctctttgctcctggcagtgttcccactgatgccggttgtaggtcgaaagccagacatctctctagtgatgggtgcaggcttgctggttcttctgttatccctgtgtgttgtaacatctctcatgaaaagaaaagatagctttataaaggaagagctattggtacatctgttacaggtgctgagcacagtgctctccatgtatgttgtgtatagcactcagagtagtctactcaggaagcaaggactgcctctcatgaatcaaattattagctgggcaacattagcctcttccttggttgtgccactactgagttctccagttctctttcagcgattgttcagcatacttctttcattgatgtcaacctacctacttctaagcacagggtatgaagctctctttccactagtgttgtcttgtttgatgtttgtctggataaacatagaacaagaaactctacaacaatctggtgtttgctgtaaacaaaagctcaccagtatccagttctcttataatactgatataactcagtttcgacagctatatctggatgacatccgtagggcctttttccttgttttcttcttagtgacagcattttttggaactggaaatatagcttctattaacagctttgatcttgcctctgtctattgctttctgactgtgttcagtccttttatgatgggagccctgatgatgtggaagattttaatcccctttgttcttgttatgtgtgcttttgaagcagttcagttgactactcagttatcgtcaaaaagcctttttctcattgttctcgtcatatcagacattatggctttgcattttttcttcttggtcaaggattatggcagctggcttgatattgggacaagcatcagccactatgtgattgtcatgtccatgaccatctttttggtgttcctcaatggcctggcccagctgctcacaacgaagaaactcagactatgtggcaaacccaaaagtcacttcatgtgaggttgctgaagcaccattcagcatctggatcctgattctccttttaagctaaaatctcatcaaggcttcaataagaagatggatatggatatatagtatattctactcctgtaaggaaaatggtatttggaattccgaattgacaggttatctggaacaaaggagcttctttttttttctaggttttgcaggcatgaaatagtgattatatctgtggaaaagcataggaaggcattctcctttttcatttttttcctttggctggcagctcttcccagtgatgttgagagcacctgcagcaatctggtccccagtcgcacaacttcccacatacccagaggagagcatatgcctgtgggggcagtgctgatggcatccagagtcattgctgtggctgagctggaaggaaatcaccaggtgccaccgtcaatatttatcagctttcagcactggttttgttagacagtcagggtgtattatttcaagagcttcaataaaaaaagtgtttgcaggtatttgtcatatttctttagtatgcaataatgctatcttatcctttttagtgctatttctcaggttttctcagtcaaccagctagatgcatgtgatgcatgtctatccttcactttttttttttcatttctggattttcctgggatttctgacaacacaaaagtagaaagtgcttggtatttctgtcttatacataggaaaacatttaaaataaatagtttttaattgtaggctcaacatctgttaccccatagctttttcgtatattgtttctttccctttgaatttctttttactgtcatctattattttaacaggagttaaaataactcctgttaaactttctgacaatatcataagaattcatattaaaggtgttattctttctggttgtgagattctagcacaaaggcctaaaatcatcaaattagatttccatttgtaaacaaattctaatgggcaaaatatcttgagagcagtttttatatggattatccataaaatgacctttacatatccctgcagagttggccttttgcccgtggtgtgctagtagctttggctgatgctaagctttcctggtatgcgccctatttttaagaagtaattgcttttgaattaagttatagcattactaattcatgttaatgactaggaaaccctctgtaatttacaagatttttcaaattggtggggagtgaataaatacaatttaaaagtcagaaatcagtttggcaaagtgtactttcttaatttctatttatgatgaagtatagtcataatttatttgtaat

SEQ ID NO: 165066 - DNA, 558 bp, Homo sapiens
  Payload ID: 12507
  Gene Symbol: PIGN
  Gene Name: phosphatidylinositol glycan anchor biosynthesis, class N
  ENST ID: ENST00000590765
  CDS Start-End: 139-558
aattatcgcgatagcagcagcggccgggcagaaacagtattatgtctcagtcctgtgcaaagtgagatgagctgtagcctttggagacctataattttgaacatagatgttccttaaaagctaaatctttttgaacagatgatgataaacctggaagcgagaagattagtgttgtttgttgctgatggccttcgagcagatgcactttacgaattagatgaaaatggaaactctagagcaccgtttattaggaatatcataatgcatgaaggcagctggggcatatctcatacacgtgtgccaacagaatctcggccaggtcatgtagctctgatagctgggttttatgaagatgtcagtgcagttgccaaaggatggaaggaaaatcctgtagagtttgattctctttttaatgaaagtaaatacacatggagctggggaagcccagatatcctgcctatgtttgccaaaggtgctagtggagaccacgtttatacatatagttatgatgctaaaagagaggattttggtgctcaagatgcaacaaaactggatacg

SEQ ID NO: 165067 - DNA, 582 bp, Homo sapiens
  Payload ID: 12507
  Gene Symbol: PIGN
  Gene Name: phosphatidylinositol glycan anchor biosynthesis, class N
  ENST ID: ENST00000590948
  CDS Start-End: 1-431
tgccttgtagttttgtagctattggcattttagtagcattttttctgctgattcaagcctgtccctggacatattatgtatatggtttgttgccactgccaatatggtatgcggttctaagagaatttcaagttattcaggaccttgttgtatcagtgttgacctatcctctgagccattttgttgggtacctgttagcctttaccctgggaattgaagtattagttctcagttttttctaccgctatatgcttaccgctggacttactgcctttgcagcttggccatttctcactcggctgtggactcgagcaaagatgacctcactgagttggactttcttctctttgctcctggcagtgttcccactgatgccggttgtaggtcgaaagccagacatctctctagtgattctcaaagagtgtatttgaagcatcacaaccaaccatcaagcatttttctggggattcctgctttgcattcttcttaggatgggtgcaggcttgctggttcttctgttatccctgtgtgttgtaacatctctcatgaaaagaaaagatagctttataaaggaagagctat

SEQ ID NO: 165068 - DNA, 559 bp, Homo sapiens
  Payload ID: 12507
  Gene Symbol: PIGN
  Gene Name: phosphatidylinositol glycan anchor biosynthesis, class N
  ENST ID: ENST00000589339
  CDS Start-End: 280-559
gcgttccggaattgaggggtggttgtagtggtggcttaggaataccctcccggctatcgcttcagtgggtagaggggaccactgcccgagagctttaatggagctgggtcctgccttcgcgctgaggagccctcgttttcgagatcaggcctgaccgggataagctccagagattcaccaacaatagcaaattacacactggcttggaaagtactcccatgttccgtttgatcttggcaatttaatgctgttcttgaagactaattagttacactggatatgctgctgttctttactttgggattgcttatacattttgtgttcttcgcctccatctttgacatttattttacatctcctttggttcatggaatgactcctcagtttacaccattgcctcctccagcgagaagattagtgttgtttgttgctgatggccttcgagcagatgcactttacgaattagatgaaaatggaaactctagagcaccgtttattaggaatatcataatgcatgaaggcagctggggcatatctcatacacgtgtgccaacagaat

SEQ ID NO: 165069 - DNA, 597 bp, Homo sapiens
  Payload ID: 12507
  Gene Symbol: PIGN
  Gene Name: phosphatidylinositol glycan anchor biosynthesis, class N
  ENST ID: ENST00000585344
  CDS Start-End: 332-597
acgactcctccatgattggtcagagaaggaaggcgtggagcggactgacgggagactggcccgagaattatcgcgatagcagcagcggccgggcagaaacagtattatgtctcagtcctgtgcaaagtgagatgagctgtagcctttggagacctataattttgaacatagatgttccttaaaagctaaatctttttgaacagatgatgataaacctggaagagattcaccaacaatagcaaattacacactggcttggaaagtactcccatgttccgtttgatcttggcaatttaatgctgttcttgaagactaattagttacactggatatgctgctgttctttactttgggattgcttatacattttgtgttcttcgcctccatctttgacatttattttacatctcctttggttcatggaatgactcctcagtttacaccattgcctcctccagcgagaagattagtgttgtttgttgctgatggccttcgagcagatgcactttacgaattagatgaaaatggaaactctagagcaccgtttattaggaatatcataatgcatgaaggcagctggggcatatctcatacacg

SEQ ID NO: 165070 - DNA, 565 bp, Homo sapiens
  Payload ID: 12507
  Gene Symbol: PIGN
  Gene Name: phosphatidylinositol glycan anchor biosynthesis, class N
  ENST ID: ENST00000588571
  CDS Start-End: 216-565
gcggactgacgggagactggcccgagaattatcgcgatagcagcagcggccgggcagaaacagtattatgtctcagtcctgtgcaaagtgagatgagctgtagcctttggagacctataattttgaacatagatgttccttaaaagctaaatctttttgaacagatgatgataaacctggaagctgttcttgaagactaattagttacactggatatgctgctgttctttactttgggattgcttatacattttgtgttcttcgcctccatctttgacatttattttacatctcctttggttcatggaatgactcctcagtttacaccattgcctcctccagcgagaagattagtgttgtttgttgctgatggccttcgagcagatgcactttacgaattagatgaaaatggaaactctagagcaccgtttattaggaatatcataatgcatgaaggcagctggggcatatctcatacacgtgtgccaacagaatctcggccaggtcatgtagctctgatagctgggttttatgaagatgtcagtgcagttgccaaaggatggaa

SEQ ID NO: 165071 - DNA, 674 bp, Homo sapiens
  Payload ID: 12507
  Gene Symbol: PIGN
  Gene Name: phosphatidylinositol glycan anchor biosynthesis, class N
  ENST ID: ENST00000587134
  CDS Start-End: 575-674
agcagcggccgggcaggtattgggggcgttccggaattgaggggtggttgtagtggtggcttaggaataccctcccggctatcgcttcagtgggtagaggggaccactgcccgagagctttaatggagctgggtcctgccttcgcgctgaggagccctcgttttcgagatcaggcctgaccgggataagctccagaaacagtattatgtctcagtcctgtgcaaagtgagatgagctgtagcctttggagacctataattttgaacatagatgttccttaaaagctaaatctttttgaacagatgatgataaacctggaaggttattttgccatcctttccttccatgatgtgattcttcaggccaagaagaaaaagatgtgtctgtagctaaaattacctcatccttggtgtttttcagcctaggatcactatatgtagctaatgccgttacattacaactaagacaagttccaatacttttttttttctcctcgatctgcagagattcaccaacaatagcaaattacacactggcttggaaagtactcccatactaattagttacactggatatgctgctgttctttactttgggattgcttatacattttgtgttcttcgcctccatctttgacatttattttacatctcctttggttcatggaatgactc

SEQ ID NO: 165072 - DNA, 576 bp, Homo sapiens
  Payload ID: 12507
  Gene Symbol: PIGN
  Gene Name: phosphatidylinositol glycan anchor biosynthesis, class N
  ENST ID: ENST00000591238
  CDS Start-End: 211-576
agcaaattcatgctgctgcattcagctggtagatgctaggaatgggctcacctggaatttgaaaaattcctttccttcttaagttttgacttaagttttttgcttttgattccttctgtaataatcttatgtttctaaagctttatgtgagagtatctaatcatagtctgtgttaactatttgtctttaatatcttttaggaatatcataatgcatgaaggcagctggggcatatctcatacacgtgtgccaacagaatctcggccaggtcatgtagctctgatagctgggttttatgaagatgtcagtgcagttgccaaaggatggaaggaaaatcctgtagagtttgattctctttttaatgaaagtaaatacacatggagctggggaagcccagatatcctgcctatgtttgccaaaggtgctagtggagaccacgtttatacatatagttatgatgctaaaagagaggattttggtgctcaagatgcaacaaaactggatacgtgggtttttgataatgttaaggacttctttcatcatgccagaaacaaccagtctttgttttctaaaata

SEQ ID NO: 165073 - DNA, 538 bp, Homo sapiens
  Payload ID: 12507
  Gene Symbol: PIGN
  Gene Name: phosphatidylinositol glycan anchor biosynthesis, class N
  ENST ID: ENST00000585458
  CDS Start-End: 286-538
aggtattgggggcgttccggaattgaggggtggttgtagtggtggcttaggaataccctcccggctatcgcttcagtgggtagaggggaccactgcccgagagctttaatggagctgggtcctgccttcgcgctgaggagccctcgttttcgagatcaggcctgaccgggataagctccagcgagaagattagtgttgtttgttgctgatggccttcgagcagatgcactttacgaattagatgaaaatggaaactctagagcaccgtttattaggaatatcataatgcatgaaggcagctggggcatatctcatacacgtgtgccaacagaatctcggccaggtcatgtagctctgatagctgggttttatgaagatgtcagtgcagttgccaaaggatggaaggaaaatcctgtagagtttgattctctttttaatgaaagtaaatacacatggagctggggaagcccagatatcctgcctatgtttgccaaaggtgctagtggagaccacgtttatacatatagttatgatgcta

SEQ ID NO: 165074 - DNA, 446 bp, Homo sapiens
  Payload ID: 12507
  Gene Symbol: PIGN
  Gene Name: phosphatidylinositol glycan anchor biosynthesis, class N
  ENST ID: ENST00000592803
  CDS Start-End: 1-89
ggatacgtgggtttttgataatgttaaggaatagatacaaacggacatgctcatcgaccatcctcgagagactacaagcacaatattaaaaaagttgatgatggagttaaagaaatcgtgtctatgtttaaccacttctatggaaatgatgggaaaacaacatttatctttacctctgaccatggaatgacagactggggttcccatggggctggtcatccttcagagactttaactcctttagtcacttggggagctggaatcaagtatccccaaagagtatcagctcagcaatttgatgatgcatttttgaaagagtggagattggagaattggaagaggctagatgtcaatcaggctgatattgcaccattgatgacttcccttattggagttccctttcctcttaactcagtgggaatccttcctgtggattatcttaacaa

SEQ ID NO: 165075 - DNA, 335 bp, Homo sapiens
  Payload ID: 12507
  Gene Symbol: PIGN
  Gene Name: phosphatidylinositol glycan anchor biosynthesis, class N
  ENST ID: ENST00000586566
  CDS Start-End: 1-335
cagaagaaagaagttactttaccatttttgtttacaccatttaaatttcaagttattcaggaccttgttgtatcagtgttgacctatcctctgagccattttgttgggtacctgttagcctttaccctgggaattgaagtattagttctcagttttttctaccgctatatgcttaccgctggacttactgcctttgcagcttggccatttctcactcggctgtggactcgagcaaagatgacctcactgagttggactttcttctctttgctcctggcagtgttcccactgatgccggttgtaggtcgaaagccagacatctctctagtgatggg

SEQ ID NO: 165076 - DNA, 584 bp, Homo sapiens
  Payload ID: 12507
  Gene Symbol: PIGN
  Gene Name: phosphatidylinositol glycan anchor biosynthesis, class N
  ENST ID: ENST00000588748
  CDS Start-End: 36-584
aaattcatgctgctgcattcagctggaatatcataatgcatgaaggcagctggggcatatctcatacacgtgtgccaacagaatctcggccaggtcatgtagctctgatagctgggttttatgaagatgtcagtgcagttgccaaaggatggaaggaaaatcctgtagagtttgattctctttttaatgaaagtaaatacacatggagctggggaagcccagatatcctgcctatgtttgccaaaggtgctagtggagaccacgtttatacatatagttatgatgctaaaagagaggattttggtgctcaagatgcaacaaaactggatacgtgggtttttgataatgttaaggacttctttcatcatgccagaaacaaccagtctttgttttctaaaataaatgaagagaaaatagtttttttcttacatttattaggaatagatacaaacggacatgctcatcgaccatcctcgagagactacaagcacaatattaaaaaagttgatgatggagttaaagaaatcgtgtctatgtttaaccacttctatggaaatgatgggaaaacaacatttatctttacc

SEQ ID NO: 165077 - DNA, 447 bp, Homo sapiens
  Payload ID: 12507
  Gene Symbol: PIGN
  Gene Name: phosphatidylinositol glycan anchor biosynthesis, class N
  ENST ID: ENST00000589098
  CDS Start-End: 1-312
ccaggtcatgtagctctgatagctgggttttatgaagatgtcagtgcagttgccaaaggatggaaggaaaatcctgtagagtttgattctctttttaatgaaagtaaatacacatggagctggggaagcccagatatcctgcctatgtttgccaaaggtgctagtggagaccacgtttatacatatagttatgatgctaaaagagaggattttggtgctcaagatgcaacaaaactggatacgtgggtttttgataatgttaaggtttgtgctattgagtggttaatatacaaaaagcatatttttacctgaagtattggagactgtatcccacgttttttctgttttcatgagctttgaaagttctatgttgtagcacactgttctgaattctaagatttaattctaaaaaattacacattctaaataaataagagaagttttaaa

SEQ ID NO: 165078 - DNA, 635 bp, Homo sapiens
  Payload ID: 12507
  Gene Symbol: PIGN
  Gene Name: phosphatidylinositol glycan anchor biosynthesis, class N
  ENST ID: ENST00000585923
  CDS Start-End: 58-635
cgcgatagcagcagcggccgggcagctgttcttgaagactaattagttacactggatatgctgctgttctttactttgggattgcttatacattttgtgttcttcgcctccatctttgacatttattttacatctcctttggttcatggaatgactcctcagtttacaccattgcctcctccagcgagaagattagtgttgtttgttgctgatggccttcgagcagatgcactttacgaattagatgaaaatggaaactctagagcaccgtttattaggaatatcataatgcatgaaggcagctggggcatatctcatacacgtgtgccaacagaatctcggccaggtcatgtagctctgatagctgggttttatgaagatgtcagtgcagttgccaaaggatggaaggaaaatcctgtagagtttgattctctttttaatgaaagtaaatacacatggagctggggaagcccagatatcctgcctatgtttgccaaaggtgctagtggagaccacgtttatacatatagttatgatgctaaaagagaggattttggtgctcaagatgcaacaaaactggatacgtgggtttttgataatgttaaggacttctttcatcatgccagaaacaacca

SEQ ID NO: 165079 - DNA, 549 bp, Homo sapiens
  Payload ID: 12507
  Gene Symbol: PIGN
  Gene Name: phosphatidylinositol glycan anchor biosynthesis, class N
  ENST ID: ENST00000585926
  CDS Start-End: 300-549
actttgggaggccgagccgggcggatcacgaggtcgggagttcgagaccagcctgaccaacatgaaacagtattatgtctcagtcctgtgcaaagtgagatgagctgtagcctttggagacctataattttgaacatagatgttccttaaaagctaaatctttttgaacagatgatgataaacctggaagagattcaccaacaatagcaaattacacactggcttggaaagtactcccatgttccgtttgatcttggcaatttaatgctgttcttgaagactaattagttacactggatatgctgctgttctttactttgggattgcttatacattttgtgttcttcgcctccatctttgacatttattttacatctcctttggttcatggaatgactcctcagtttacaccattgcctcctccagcgagaagattagtgttgtttgttgctgatggccttcgagcagatgcactttacgaattagatgaaaatggaaactctagagcaccgtttattaggaatatcataatgcatgaaggcagctggg

SEQ ID NO: 165080 - DNA, 811 bp, Homo sapiens
  Payload ID: 12507
  Gene Symbol: PIGN
  Gene Name: phosphatidylinositol glycan anchor biosynthesis, class N
  ENST ID: ENST00000589720
  CDS Start-End: 246-811
gagaattatcgcgatagcagcagcggccgggcaggtattgggggcgttccggaattgaggggtggttgtagtggtggcttaggaataccctcccggctatcgcttcagtgggtagaggggaccactgcccgagagctttaatggagctgggtcctgccttcgcgctgaggagccctcgttttcgagatcaggcctgaccgggataagctccagctgttcttgaagactaattagttacactggatatgctgctgttctttactttgggattgcttatacattttgtgttcttcgcctccatctttgacatttattttacatctcctttggttcatggaatgactcctcagtttacaccattgcctcctccagcgagaagattagtgttgtttgttgctgatggccttcgagcagatgcactttacgaattagatgaaaatggaaactctagagcaccgtttattaggaatatcataatgcatgaaggcagctggggcatatctcatacacgtgtgccaacagaatctcggccaggtcatgtagctctgatagctgggttttatgaagatgtcagtgcagttgccaaaggatggaaggaaaatcctgtagagtttgattctctttttaatgaaagtaaatacacatggagctggggaagcccagatatcctgcctatgtttgccaaaggtgctagtggagaccacgtttatacatatagttatgatgctaaaagagaggattttggtgctcaagatgcaacaaaactggatacgtgggtttttgataatgttaaggacttctttcatcatgc

SEQ ID NO: 165081 - DNA, 2588 bp, Homo sapiens
  Payload ID: 12508
  Gene Symbol: PIGO
  Gene Name: phosphatidylinositol glycan anchor biosynthesis, class O
  Uniprot ID: Q8TEQ8
  ENST ID: ENST00000298004
  CDS Start-End: 166-2184
cctgcggcttcgatccctttccactgggtattgagattggcgaggggagaggcgcagaaacggcgtactctagtgcagtggttcaatctcggctcactgcaacctccgcctccccgattcaagcgattctcctgcgtcagcctccccagtagctgagactacaggatgcagaaagcctcagtgttgctcttcctggcctgggtctgcttcctcttctacgctggcattgccctcttcaccagtggcttcctgctcacccgtttggagctcaccaaccatagcagctgccaagagcccccaggccctgggtccctgccatgggggagccaagggaaacctggggcctgctggatggcttcccgattttcgcgggttgtgttggtgctgatagatgctctgcgatttgacttcgcccagccccagcattcacacgtgcctagagagcctcctgtctccctacccttcctgggcaaactaagctccttgcagaggatcctggagattcagccccaccatgcccggctctaccgatctcaggttgaccctcctaccaccaccatgcagcgcctcaaggccctcaccactggctcactgcctacctttattgatgctggtagtaacttcgccagccacgccatagtggaagacaatctcattaagcagctcaccagtgcaggaaggcgtgtagtcttcatgggagatgatacctggaaagaccttttccctggtgctttctccaaagctttcttcttcccatccttcaatgtcagagacctagacacagtggacaatggcatcctggaacacctctaccccaccatggacagtggtgaatgggacgtgctgattgctcacttcctgggtgtggaccactgtggccacaagcatggccctcaccaccctgaaatggccaagaaacttagccagatggaccaggtgatccagggacttgtggagcgtctggagaatgacacactgctggtagtggctggggaccatgggatgaccacaaatggagaccatggaggggacagtgagctggaggtctcagctgctctctttctgtatagccccacagcagtcttccccagcaccccaccagaggagccagaggtgattcctcaagttagccttgtgcccacgctggccctgctgctgggcctgcccatcccatttgggaatatcggggaagtgatggctgagctattctcagggggtgaggactcccagccccactcctctgctttagcccaagcctcagctctccatctcaatgctcagcaggtgtcccgatttcttcatacctactcagctgctactcaggaccttcaagctaaggagcttcatcagctgcagaacctcttctccaaggcctctgctgactaccagtggcttctccagagccccaagggggctgaggcgacactgccgactgtgattgctgagctgcagcagttcctgcggggagctcgggccatgtgcatcgagtcttgggctcgtttctctctgagcttccttctcctacatctgcttgctgctgggatacccgtcaccacccctggtccttttactgtgccatggcaggcagtctcggcttgggccctcatggccacacagaccttctactccacaggccaccagcctgtctttccagccatccattggcatgcagccttcgtgggattcccagagggtcatggctcctgtacttggctgcctgctttgctagtgggagccaacacctttgcctcccacctcctctttgcagtaggttgcccactgctcctgctctggcctttcctgtgtgagagtcaagggctgcggaagagacagcagcccccagggaatgaagctgatgccagagtcagacccgaggaggaagaggagccactgatggagatgcggctccgggatgcgcctcagcacttctatgcagcactgctgcagctgggcctcaagtacctctttatccttggtattcagattctggcctgtgccttggcagcctccatccttcgcaggcatctcatggtctggaaagtgtttgcccctaagttcatatttgaggctgtgggcttcattgtgagcagcgtgggacttctcctgggcatagctttggtgatgagagtggatggtgctgtgagctcctggttcaggcagctatttctggcccagcagaggtagcctagtctgtgattactggcacttggctacagagagtgcttgagaacagtgtagcctggcctgtacaggtactggatgatctgcaagacaggctcagccatactcttactatcatgcagccaggggccgctgacatctaggacttcattattctataattcaggaccacagtggagtatgatccctaactcctgatttggatgcatctgagggacaaggggggcggtctccgaagtggaataaaataggccgggcgtggtgacttgcacctataatcccagcactttgggaggcagaggtgggaggattgcttggtcccaggagttcaagaccagcctgtggaacataacaagaccccgtctctactatttaaaaaaaagtgtaataaaatgataatataatta

SEQ ID NO: 165082 - DNA, 2464 bp, Homo sapiens
  Payload ID: 12508
  Gene Symbol: PIGO
  Gene Name: phosphatidylinositol glycan anchor biosynthesis, class O
  Uniprot ID: Q8TEQ8
  ENST ID: ENST00000361778
  CDS Start-End: 43-2061
cgcaggcgccgccgccgccgcacttccgggtgccattgcaggatgcagaaagcctcagtgttgctcttcctggcctgggtctgcttcctcttctacgctggcattgccctcttcaccagtggcttcctgctcacccgtttggagctcaccaaccatagcagctgccaagagcccccaggccctgggtccctgccatgggggagccaagggaaacctggggcctgctggatggcttcccgattttcgcgggttgtgttggtgctgatagatgctctgcgatttgacttcgcccagccccagcattcacacgtgcctagagagcctcctgtctccctacccttcctgggcaaactaagctccttgcagaggatcctggagattcagccccaccatgcccggctctaccgatctcaggttgaccctcctaccaccaccatgcagcgcctcaaggccctcaccactggctcactgcctacctttattgatgctggtagtaacttcgccagccacgccatagtggaagacaatctcattaagcagctcaccagtgcaggaaggcgtgtagtcttcatgggagatgatacctggaaagaccttttccctggtgctttctccaaagctttcttcttcccatccttcaatgtcagagacctagacacagtggacaatggcatcctggaacacctctaccccaccatggacagtggtgaatgggacgtgctgattgctcacttcctgggtgtggaccactgtggccacaagcatggccctcaccaccctgaaatggccaagaaacttagccagatggaccaggtgatccagggacttgtggagcgtctggagaatgacacactgctggtagtggctggggaccatgggatgaccacaaatggagaccatggaggggacagtgagctggaggtctcagctgctctctttctgtatagccccacagcagtcttccccagcaccccaccagaggagccagaggtgattcctcaagttagccttgtgcccacgctggccctgctgctgggcctgcccatcccatttgggaatatcggggaagtgatggctgagctattctcagggggtgaggactcccagccccactcctctgctttagcccaagcctcagctctccatctcaatgctcagcaggtgtcccgatttcttcatacctactcagctgctactcaggaccttcaagctaaggagcttcatcagctgcagaacctcttctccaaggcctctgctgactaccagtggcttctccagagccccaagggggctgaggcgacactgccgactgtgattgctgagctgcagcagttcctgcggggagctcgggccatgtgcatcgagtcttgggctcgtttctctctgagcttccttctcctacatctgcttgctgctgggatacccgtcaccacccctggtccttttactgtgccatggcaggcagtctcggcttgggccctcatggccacacagaccttctactccacaggccaccagcctgtctttccagccatccattggcatgcagccttcgtgggattcccagagggtcatggctcctgtacttggctgcctgctttgctagtgggagccaacacctttgcctcccacctcctctttgcagtaggttgcccactgctcctgctctggcctttcctgtgtgagagtcaagggctgcggaagagacagcagcccccagggaatgaagctgatgccagagtcagacccgaggaggaagaggagccactgatggagatgcggctccgggatgcgcctcagcacttctatgcagcactgctgcagctgggcctcaagtacctctttatccttggtattcagattctggcctgtgccttggcagcctccatccttcgcaggcatctcatggtctggaaagtgtttgcccctaagttcatatttgaggctgtgggcttcattgtgagcagcgtgggacttctcctgggcatagctttggtgatgagagtggatggtgctgtgagctcctggttcaggcagctatttctggcccagcagaggtagcctagtctgtgattactggcacttggctacagagagtgcttgagaacagtgtagcctggcctgtacaggtactggatgatctgcaagacaggctcagccatactcttactatcatgcagccaggggccgctgacatctaggacttcattattctataattcaggaccacagtggagtatgatccctaactcctgatttggatgcatctgagggacaaggggggcggtctccgaagtggaataaaataggccgggcgtggtgacttgcacctataatcccagcactttgggaggcagaggtgggaggattgcttggtcccaggagttcaagaccagcctgtggaacataacaagaccccgtctctactatttaaaaaaaagtgtaataaaatgataatataatt

SEQ ID NO: 165083 - DNA, 4066 bp, Homo sapiens
  Payload ID: 12508
  Gene Symbol: PIGO
  Gene Name: phosphatidylinositol glycan anchor biosynthesis, class O
  Uniprot ID: Q8TEQ8
  ENST ID: ENST00000378617
  CDS Start-End: 396-3665
ctcccgagaacctcaccccccggtattcccctcaccctgaagtaagggagtctccctcttcccctcagctcctaaccaaggtgctcagtaccgcggctagggtgcccagcgggaggctgggtagttaccggaggaggcagagccggtcgcacgcctgggtcccagcggaggcccagtcgactctcgacccgggccccagcctccttgcgtggcgaaggtcgtgcctcaggtctcctggcgaacctggccgcccggaagcggagagtgactcctccccttcgtcccctcggtgcccgccaggcggcgccgtcggctgggcccggattcccctgcggcttcgatccctttccactgggtattgagattggcgaggggagaggcgcagaaacggcgtgatgcagaaagcctcagtgttgctcttcctggcctgggtctgcttcctcttctacgctggcattgccctcttcaccagtggcttcctgctcacccgtttggagctcaccaaccatagcagctgccaagagcccccaggccctgggtccctgccatgggggagccaagggaaacctggggcctgctggatggcttcccgattttcgcgggttgtgttggtgctgatagatgctctgcgatttgacttcgcccagccccagcattcacacgtgcctagagagcctcctgtctccctacccttcctgggcaaactaagctccttgcagaggatcctggagattcagccccaccatgcccggctctaccgatctcaggttgaccctcctaccaccaccatgcagcgcctcaaggccctcaccactggctcactgcctacctttattgatgctggtagtaacttcgccagccacgccatagtggaagacaatctcattaagcagctcaccagtgcaggaaggcgtgtagtcttcatgggagatgatacctggaaagaccttttccctggtgctttctccaaagctttcttcttcccatccttcaatgtcagagacctagacacagtggacaatggcatcctggaacacctctaccccaccatggacagtggtgaatgggacgtgctgattgctcacttcctgggtgtggaccactgtggccacaagcatggccctcaccaccctgaaatggccaagaaacttagccagatggaccaggtgatccagggacttgtggagcgtctggagaatgacacactgctggtagtggctggggaccatgggatgaccacaaatggagaccatggaggggacagtgagctggaggtctcagctgctctctttctgtatagccccacagcagtcttccccagcaccccaccagaggagccagaggtgattcctcaagttagccttgtgcccacgctggccctgctgctgggcctgcccatcccatttgggaatatcggggaagtgatggctgagctattctcagggggtgaggactcccagccccactcctctgctttagcccaagcctcagctctccatctcaatgctcagcaggtgtcccgatttcttcatacctactcagctgctactcaggaccttcaagctaaggagcttcatcagctgcagaacctcttctccaaggcctctgctgactaccagtggcttctccagagccccaagggggctgaggcgacactgccgactgtgattgctgagctgcagcagttcctgcggggagctcgggccatgtgcatcgagtcttgggctcgtttctctctggtccgcatggcggggggtactgctctcttggctgcttcctgctttatctgcctgctggcatctcagtgggcaatatccccaggctttccattctgccctctactcctgacacctgtggcctggggcctggttggggccatagcgtatgctggactcctgggaactattgagctgaagctagatctagtgcttctaggggctgtggctgcagtgagctcattcctcccttttctgtggaaagcctgggctggctgggggtccaagaggcccctggcaaccctgtttcccatccctgggcccgtcctgttactcctgctgtttcgcttggctgtgttcttctctgatagttttgttgtagctgaggccagggccacccccttccttttgggctcattcatcctgctcctggttgtccagcttcactgggagggccagctgcttccacctaagctactcacaatgccccgccttggcacttcagccacaacaaaccccccacggcacaatggtgcatatgccctgaggcttggaattgggttgcttttatgtacaaggctagctgggctttttcatcgttgccctgaagagacacctgtttgccactcctctccctggctgagtcctctggcatccatggtgggtggtcgagccaagaatttgtggtatggagcttgtgtggcggcgctggtggccctgttagctgccgtgcgcttgtggcttcgccgctatggtaatctcaagagccccgagccacccatgctctttgtgcgctggggactgcccctaatggcattgggtactgctgcctactgggcattggcgtcgggggcagatgaggctcccccccgtctccgggtcctggtctctggggcatccatggtgctgcctcgggctgtagcagggctggctgcttcagggctcgcgctgctgctctggaagcctgtgacagtgctggtgaaggctggggcaggcgctccaaggaccaggactgtcctcactcccttctcaggcccccccacttctcaagctgacttggattatgtggtccctcaaatctaccgacacatgcaggaggagttccggggccggttagagaggaccaaatctcagggtcccctgactgtggctgcttatcagttggggagtgtctactcagctgctatggtcacagccctcaccctgttggccttcccacttctgctgttgcatgcggagcgcatcagccttgtgttcctgcttctgtttctgcagagcttccttctcctacatctgcttgctgctgggatacccgtcaccacccctggtccttttactgtgccatggcaggcagtctcggcttgggccctcatggccacacagaccttctactccacaggccaccagcctgtctttccagccatccattggcatgcagccttcgtgggattcccagagggtcatggctcctgtacttggctgcctgctttgctagtgggagccaacacctttgcctcccacctcctctttgcagtaggttgcccactgctcctgctctggcctttcctgtgtgagagtcaagggctgcggaagagacagcagcccccagggaatgaagctgatgccagagtcagacccgaggaggaagaggagccactgatggagatgcggctccgggatgcgcctcagcacttctatgcagcactgctgcagctgggcctcaagtacctctttatccttggtattcagattctggcctgtgccttggcagcctccatccttcgcaggcatctcatggtctggaaagtgtttgcccctaagttcatatttgaggctgtgggcttcattgtgagcagcgtgggacttctcctgggcatagctttggtgatgagagtggatggtgctgtgagctcctggttcaggcagctatttctggcccagcagaggtagcctagtctgtgattactggcacttggctacagagagtgcttgagaacagtgtagcctggcctgtacaggtactggatgatctgcaagacaggctcagccatactcttactatcatgcagccaggggccgctgacatctaggacttcattattctataattcaggaccacagtggagtatgatccctaactcctgatttggatgcatctgagggacaaggggggcggtctccgaagtggaataaaataggccgggcgtggtgacttgcacctataatcccagcactttgggaggcagaggtgggaggattgcttggtcccaggagttcaagaccagcctgtggaacataacaagaccccgtctctactatttaaaaaaaagtgtaataaaatgataatataa

SEQ ID NO: 165084 - DNA, 6998 bp, Homo sapiens
  Payload ID: 12509
  Gene Symbol: PIGP
  Gene Name: phosphatidylinositol glycan anchor biosynthesis, class P
  Uniprot ID: P57054
  ENST ID: ENST00000360525
  CDS Start-End: 182-586
cacgcccgcccccgcgctcgctggctcccacccggggagggtcgttgtgcgcctgcgccagggtgggggttgccgtcgcgcctaggcctttccctcaggttttcctcttccccactgcggctccccagtcggcgcttgcgcggagaactcagcgctgagattgtctaaagccccaggaaaaatggtggaaaattcaccgtcgccattgccagaaagagcgatttatggctttgttcttttcttaagctcccaatttggcttcatactttacctcgtgtgggcctttattcctgaatcttggctaaactctttaggtttaacctattggcctcaaaaatattgggcagttgcattacctgtctacctccttattgctatagtaattggctacgtgctcttgtttgggattaacatgatgagtacctctccactcgactccatccatacaatcacagataactatgcaaaaaatcaacagcagaagaaataccaagaggaggccattccagccttaagagatatttctattagtgaagtaaaccaaatgttctttcttgcagccaaagaactttacaccaaaaactgaactgtgtgtaaccatagtaacaccaagcacgtatttatttataagtttttgccattataattttgaccataaattaatttgaccatctctcttattaatagagaagtaaaaaatgtaagttgaccttctcttagattatgttcaatgaatattgtaaatgttcaagtattgttaatgaatagaataaatacaatattgcattcccatatagcagacttaaaaaaaaaaatcaatgtcagtataatcaagaagttcctccagagaggcatttatattgtaatttgcaaagggcaatgatgtccttcctcctgtttgtcctgaggggcccagaattcaaacccttagtttttgggaagggtacagttagtacttgtgccatcagattcatgtctaagacacaaatatttgttgagtactcactgtgtaccaggtatttttctaggcactgaggatgaagtaatggtaagattctctctcaaagagcttatagttttagaagcagggtgaggcaactaagcaaataaacaaggaaatataatttgatgagtgctatgcaaagaattaagataatgtattctagaatgcaaagggatgactagttcacattgggtggtcaaggaaggcctctcagagagaggctgttgggatctaagtataaagcaggtgaggcaaagaccataaggtgggaaggaacttggtttgtcctaagaacagagagaagactggcattgggcatagagcataccaaacaagagagaatgtggtcccaggtgagcctggagagaccgggcccagattgtgaagggctttgtaggctggtgtaggaagtgtggatttaagtgtaagtgtgatgagtttgaggcactttaggatcaagctgttgggagtcttgaaggaaaggaatgacatggcctgatttctgtttttaaaagtcatcctgattggtgaatgaagaatagattcagaggaggagctgggaaggggacaataaccatatccttacccagtaagcatgagatggataacatgaatctgcttttcctgttccctagtttgtcccagttcctgttattttatggtgagagcatgtcaccacacttaagagcagtataaggggactggatgtggtggttcatgcctgtaatcccagcactttgggaggttgaggcagctggatcacctgaggtcaggagttggagaccagcctggccaacatggcaaaacctcatatctactaaaaatacaaaaattagtcaggcgtggtggcaggcgtctgtaatcccagctactcgggaggctgaggcaggagaattgcttgagcctgggaggcagagattgcagtgagccgagatcatgccactgcactccagccttagcaacagagcgagacggttaccttggcaaccgtctcaaaaaaaaaagaaacaaaaaaaagcagtgtaagggaaccagcgaactccaccaagtatagaatgataaataaatcatggtctgtttctacaattgaacactacacagccatgcaaacaagaatgcattacttctctacctaataatatgaattaatatggccataacattgggcaaaaaaagccagacacaaaagagtaaactactgcgtggttccctttatttgaagttcaaaatcaggaaaaactaatctatggtggcaaatattagaataatggttacctttggagaagagtattatctaggaggaggcatgaaggagcctgctggtgaattgaaaatgccctacatcttgatctgggtggtggttatggttacatggaggtaatacatgtttttaaaaaatcattaagttattaagatttctgcttctgatgcaagttacacctcaataaaaaggggaaaaaaaaacagtgcctatgcctacctccagaaaatgttgattcattggtctggagtagagcacaggcaggggtaattttttaacatcttccagatgcttccaatatgcagccagggtcgagaatgactcccttacatgattggactcccttacatgattggactcccttacatgattggactcccttacatgattggactcccttacatgattagacttaactgagttttggtcaagcagggcagtagctgtaagctttggaagagaaagccagcagttatccgagcggttccctcccatctgtgagactcttgctcatgtcagcagtattcccttgtcttcccctcggacaggtgatgggcctgagacgggtttgaaataggtcaggatagaaccttcatggactctagtgttctattgcacattaagcctcaaattaacttttcattctggtttccaaccactctgtccttacaggtcatgaaaggaacaccaatgttttgcaaactatgggcagcagtgtttttgagggtcatgatcagtttagtgtagcaattctctatcttttcttaagatcttaggacccctttattcttgtaaagagtgagagccccaaagaccttttgtgtatgtagatatatttaaaaattaaaatagaaaatttttaaatatttgtttataaataatacgttaccttttagatataaaattaactcatcacataatgagaaacaaaatttctgttacagaaacatttcacccaaatcattgtagtaatactaagctgattctaaaaggacaaatttaacataaacatattcatgagaaataactattttctaaaacaaaaaaattcagtgagacaagtagaattgttttacatttctccaagtctctttaatgtctggcttcatggaacacagccgtttctcatatctgcttgtgcattcagtctgtgacattagcgcctgtcacgaagcctctggaaagctccgctgcatagtcatgagagaacgaggatgaaaaagacaaaacatctcagcagtattaggaaaatagttttgacctcataggccccctgaaatatggtcttgggacccccggactttgagaaccactggttagtgggcctccactagtgtgtgtgtgatgaactagaatagaatatgtcagtgcattgcactcagtaagggtgaatattttgactgaacgtctgtttcaaccacttcagagcctctctgttcacctcttactccagccactgatgccccaaacagttcatgcaaatttaaccacatccacataggtgcctcttatagtacactctggaaggagaggggttaacacccacaggaccagcctggagcccaacctgggagaggtatcagtggatatacacatccttctttcagcccggaggagacagttctgcactgcattccatgagctcctcagaaggtctcatgggattgaactgcggttgccacgatggtggtggactcagcccacgtgcttgtctgtctgatgtgttttgcaccctctgccacttggccctgctctctgtggtcactttcccagtaaattgcctgcacacaagcctttgtcccagtctctgctttcagaactccagctgagatgttttttgtttttggtatttttgagacaggatcaaagctggaatgcagtggtgccatcatggctcactgcagccttgaactcccaggctcaagcgatcctcccacctcagcctcccaagtagctatgaccacaggcatgcaccgctatgcctagctaatctttttattttttttttttttgtagtgacagggtctccctgtgttgcccaggctgtgagatgtttttgttttgtaaaaattgtgcttctgccatgatgtataatgcatgtcctaatttaagaaaaaagtttgaaagacactgttctgcaatgagcccaaataatagcctaaaatactccaaatagaaagtgtcaataatataaaaatttccatatattaacaaaaccttctccagtgattcaactcccagggagaaataaaagcccaagtatgaaatcacctaatgaaaagccaacataatttaaatccaaaattctgctccccctaatttcttgacctgccctgttttagttaaaaggatctcaatcagatgtttgggtttcctcaggaagctgctgcctaggctgtcataagaatgggagtcattccttaagcacattgacccaacccaaaatttcttgcatctcccagttttttaaagattcagtaggctatatgaaaatgtcatattaacagtcccatgcccatggaactttgaaaatccaaataaatcaactcctacagcaatagtgatggaacccagtacattgtatagtacagacccaccagccagtaactagaacagacttgatgggacatggggaaaggaagacagaaaacggaagaggaaagagagattcttcttgattcatcgtgctggggtgcaggtcaggctatggcagttttcatgggtctcagtcactcagtttaacacaattaggttcatggtggcactatttactattttgggttgggaggaaatgtacttatcccaccttttctagtcaggagagtttgtcattccatggtaaaataaataaataaataataatcctaaattgtcaatggcttaacataacagtttagttttcaaagaactgcactttgaggtagccaccaaatctgaacagggccacatggacaagcacagtggatgtttcagtgattacctatctggacctatgactgaggaccagatattcttttcctctctgtgcctcatcaccacttaagtctcagaggtcagaaatgcaatggaaatctcaattagggaccaaaggactcacagagtgagaaatgatggcattgtggaaaatacagtcttgaacaagggcatttgtggaccaagatttatattttcacacaatgcaggggaagttaatgtccaataattcaatacctgcctaaggttatttctgcaaatccagcatgcccaagctctgcttgtataggttacagtcacaggggaccctatggccagggctggaagaagccagctagagcctcacagtgactcagatgccacactccaattgcactgtagtcagcccacttgtgtcataaagcctgtttacacaaagcctagcatattagaagcagctgtgagtcagcctgcttcagctgctgctgctgccccaagaggcccatctctccctgtgatactttggtttctaaggcaacctcttttgaatgttctcagtgaatgcaccatgggtgggcacatcctggggaaagttcagtcactcactcctcaccaccattctgtgaaggacttacgcacctggcaagaattaaaatgcagtgtctaccttattgctgatggagcccgattttcaagtgctgcataagcctgaagccaaaatcatgctttcttccctaaatctagacttggggactgatgtgaggaggactgggcctgcagacctggagacatggcctgaccagctgcatgctcaggaggtggcagggccaggtggatagcagacaactccatgcagtcactcttggctcgttttcacccatcggctaagtcacagctcttcccaggggtataaagaatatggggggttgggcgcggtggctcacacctgtaatctcagcaatttgggaggctgaggcaggtggatcacctgaggtcggaagtttgagaccagcctgaccaacatggagaaaccctgtctctactaaaaacacaaaattagccgggcgtggaggtgggcgcctataatcccagctactcaggaggctgaggcaggacaatcgcttgaacccgggaggtggaggttgcagtgagccgagattgctccattgcactccagcctgggcaacaagagtgaaactccatctcaaaaaataaaaaagaatatagggaagacagagtggcagaagtggcttcctcactactaccccaaaaagactgaagtgttgcaattgttgaggcaaaaacatgatggctcccagacactagccacttgggctgtctcctgttttcccctattttaaacaatgagtacaacaaacatcttttgtggataaactttatgaaattgtgtccttgggctaggcttcttgtattggaattactacagggtcaaagagcttgaatgttgatatggttcagctctgtgtccccacccaaatctcatctcgaattttaatccccacgtgttgagggagggacctggtgggaggtgactggatcatgggagtggtttccccaaagctgttctcctgaaagtgagggaggcctcacgagatctgatgatttaaaagtggcagtttcccctgcattctatctctgtctctccttccactatgtaagacacgccttgcttccccttcaccttctgccgtgaatgtaagtttcctgaggcctccccagccatgtggaactgtgagtcaattaaacctcttgtttataaat

SEQ ID NO: 165085 - DNA, 972 bp, Homo sapiens
  Payload ID: 12509
  Gene Symbol: PIGP
  Gene Name: phosphatidylinositol glycan anchor biosynthesis, class P
  Uniprot ID: P57054
  ENST ID: ENST00000399098
  CDS Start-End: 438-764
gagccgcgggatcacgcccgcccccgcgctcgctggctcccacccggggagggtcgttgtgcgcctgcgccagggtgggggttgccgtcgcgcctaggcctttccctcaggttttcctcttccccactgcggctccccagtcggcgcttgcgcggagaactcagcgctgagattgtctaaagccccaggaaaaatggtggaaaattcaccgtcgccattgccagaaagagcgatttatggctttgttcttttcttaagctcccaatttggcttcaaaaatctgaagggatctcgtgtttgctgagtgttccgtgtgccagcactagcctaggaggttttagtctctacaaatatttatacagcaccagacgcgatggcaaagtggataaagcctggtccctgcccttaaggaggtcgtggtcttgtggaggagacagatggtactttacctcgtgtgggcctttattcctgaatcttggctaaactctttaggtttaacctattggcctcaaaaatattgggcagttgcattacctgtctacctccttattgctatagtaattggctacgtgctcttgtttgggattaacatgatgagtacctctccactcgactccatccatacaatcacagataactatgcaaaaaatcaacagcagaagaaataccaagaggaggccattccagccttaagagatatttctattagtgaagtaaaccaaatgttctttcttgcagccaaagaactttacaccaaaaactgaactgtgtgtaaccatagtaacaccaagcacgtatttatttataagtttttgccattataattttgaccataaattaatttgaccatctctcttattaatagagaagtaaaaaatgtaagttgaccttctcttagattatgttcaatgaatattgtaaatgttcaagtattgttaatgaatagaataaatacaatattgcattcccata

SEQ ID NO: 165086 - DNA, 688 bp, Homo sapiens
  Payload ID: 12509
  Gene Symbol: PIGP
  Gene Name: phosphatidylinositol glycan anchor biosynthesis, class P
  Uniprot ID: P57054
  ENST ID: ENST00000399102
  CDS Start-End: 76-480
gaatgggcagggcccggggcctgggcgccgcgacctagtaggcccgcatgctgattgtctaaagccccaggaaaaatggtggaaaattcaccgtcgccattgccagaaagagcgatttatggctttgttcttttcttaagctcccaatttggcttcatactttacctcgtgtgggcctttattcctgaatcttggctaaactctttaggtttaacctattggcctcaaaaatattgggcagttgcattacctgtctacctccttattgctatagtaattggctacgtgctcttgtttgggattaacatgatgagtacctctccactcgactccatccatacaatcacagataactatgcaaaaaatcaacagcagaagaaataccaagaggaggccattccagccttaagagatatttctattagtgaagtaaaccaaatgttctttcttgcagccaaagaactttacaccaaaaactgaactgtgtgtaaccatagtaacaccaagcacgtatttatttataagtttttgccattataattttgaccataaattaatttgaccatctctcttattaatagagaagtaaaaaatgtaagttgaccttctcttagattatgttcaatgaatattgtaaatgttcaagtattgttaatgaatagaataaatacaatattgcattcccata

SEQ ID NO: 165087 - DNA, 656 bp, Homo sapiens
  Payload ID: 12509
  Gene Symbol: PIGP
  Gene Name: phosphatidylinositol glycan anchor biosynthesis, class P
  Uniprot ID: P57054
  ENST ID: ENST00000399103
  CDS Start-End: 44-448
ctcagcgctgaggtggccgagattgtctaaagccccaggaaaaatggtggaaaattcaccgtcgccattgccagaaagagcgatttatggctttgttcttttcttaagctcccaatttggcttcatactttacctcgtgtgggcctttattcctgaatcttggctaaactctttaggtttaacctattggcctcaaaaatattgggcagttgcattacctgtctacctccttattgctatagtaattggctacgtgctcttgtttgggattaacatgatgagtacctctccactcgactccatccatacaatcacagataactatgcaaaaaatcaacagcagaagaaataccaagaggaggccattccagccttaagagatatttctattagtgaagtaaaccaaatgttctttcttgcagccaaagaactttacaccaaaaactgaactgtgtgtaaccatagtaacaccaagcacgtatttatttataagtttttgccattataattttgaccataaattaatttgaccatctctcttattaatagagaagtaaaaaatgtaagttgaccttctcttagattatgttcaatgaatattgtaaatgttcaagtattgttaatgaatagaataaatacaatattgcattcccata

SEQ ID NO: 165088 - DNA, 803 bp, Homo sapiens
  Payload ID: 12509
  Gene Symbol: PIGP
  Gene Name: phosphatidylinositol glycan anchor biosynthesis, class P
  ENST ID: ENST00000430792
  CDS Start-End: 727-803
ggccgaggtgtcgggaggggcctgggtgggcgtatgaaggacccgaggtcgagggcccccccataccccgcctcgaatgagaaatagaagtctccacgaatgggcagggcccggggcctgggcgccgcgacctagtaggcccgcatgctggtgggcgccgcgcgagccttgttccctgccctcccctcccacagggaggccacgcttgcagagctggagcgcgcgtctatcgccccagaacccccctccctgccctatcctccgccaccccttctgttgcggggcgcgcgccagcctgggtgtctgtatgcgctcgaggcgggggcgcgggttgcggacggaggcgcgggaggcggttctgcgcggcgggggccgtacccgcggcggagcgaggaggcgagaatggatcaatggtgccacggagcacatcgctgacgctgattgtgttccttttccacagattgtctaaagccccaggaaaaatggtggaaaattcaccgtcgccattgccagaaagagcgatttatggctttgttcttttcttaagctcccaatttggcttcaaaaatctgaagggatctcgtgtttgctgagtgttccgtgtgccagcactagcctaggaggttttagtctctacaaatatttatacagcaccagacgcgatggcaaagtggataaagcctggtccctgcccttaaggaggtcgtggtcttgtggaggagacagatggtactttacctcgtgtgggcctttattcctgaatcttggctaaactctttaggtttaacctattggcctcaaaa

SEQ ID NO: 165089 - DNA, 3437 bp, Homo sapiens
  Payload ID: 12509
  Gene Symbol: PIGP
  Gene Name: phosphatidylinositol glycan anchor biosynthesis, class P
  ENST ID: ENST00000464265
  CDS Start-End: 225-701
tcccacagggaggccacgcttgcagagctggagcgcgcgtctatcgccccagaacccccctccctgccctatcctccgccaccccttctgttgcggggcgcgcgccagcctgggtgtctgtatgcgctcgaggcgggggcgcgggttgcggacggaggcgcgggaggcggttctgcgcggcgggggccgtacccgcggcggagcgaggaggcgagaatggatcaatggtgccacggagcacatcgctgacgctgattgtgttccttttccacagattgtctaaagccccaggaaaaatggtggaaaattcaccgtcgccattgccagaaagagcgatttatggctttgttcttttcttaagctcccaatttggcttcatactttacctcgtgtgggcctttattcctgaatcttggctaaactctttaggtttaacctattggcctcaaaaatattgggcagttgcattacctgtctacctccttattgctatagtaattggctacgtgctcttgtttgggattaacatgatgagtacctctccactcgactccatccatacaatcacagataactatgcaaaaaatcaacagcagaagaaataccaagaggaggccattccagccttaagagatatttctattagtgaagtaaaccaaatgttctttcttgcagccaaagaactttacaccaaaaactgaactgtgtgtaaccatagtaacaccaagcacgtatttatttataagtttttgccattataattttgaccataaattaatttgaccatctctcttattaatagagaagtaaaaaatgtaagttgaccttctcttagattatgttcaatgaatattgtaaatgttcaagtattgttaatgaatagaataaatacaatattgcattcccatatagcagacttaaaaaaaaaaatcaatgtcagtataatcaagaagttcctccagagaggcatttatattgtaatttgcaaagggcaatgatgtccttcctcctgtttgtcctgaggggcccagaattcaaacccttagtttttgggaagggtacagttagtacttgtgccatcagattcatgtctaagacacaaatatttgttgagtactcactgtgtaccaggtatttttctaggcactgaggatgaagtaatggtaagattctctctcaaagagcttatagttttagaagcagggtgaggcaactaagcaaataaacaaggaaatataatttgatgagtgctatgcaaagaattaagataatgtattctagaatgcaaagggatgactagttcacattgggtggtcaaggaaggcctctcagagagaggctgttgggatctaagtataaagcaggtgaggcaaagaccataaggtgggaaggaacttggtttgtcctaagaacagagagaagactggcattgggcatagagcataccaaacaagagagaatgtggtcccaggtgagcctggagagaccgggcccagattgtgaagggctttgtaggctggtgtaggaagtgtggatttaagtgtaagtgtgatgagtttgaggcactttaggatcaagctgttgggagtcttgaaggaaaggaatgacatggcctgatttctgtttttaaaagtcatcctgattggtgaatgaagaatagattcagaggaggagctgggaaggggacaataaccatatccttacccagtaagcatgagatggataacatgaatctgcttttcctgttccctagtttgtcccagttcctgttattttatggtgagagcatgtcaccacacttaagagcagtataaggggactggatgtggtggttcatgcctgtaatcccagcactttgggaggttgaggcagctggatcacctgaggtcaggagttggagaccagcctggccaacatggcaaaacctcatatctactaaaaatacaaaaattagtcaggcgtggtggcaggcgtctgtaatcccagctactcgggaggctgaggcaggagaattgcttgagcctgggaggcagagattgcagtgagccgagatcatgccactgcactccagccttagcaacagagcgagacggttaccttggcaaccgtctcaaaaaaaaaagaaacaaaaaaaagcagtgtaagggaaccagcgaactccaccaagtatagaatgataaataaatcatggtctgtttctacaattgaacactacacagccatgcaaacaagaatgcattacttctctacctaataatatgaattaatatggccataacattgggcaaaaaaagccagacacaaaagagtaaactactgcgtggttccctttatttgaagttcaaaatcaggaaaaactaatctatggtggcaaatattagaataatggttacctttggagaagagtattatctaggaggaggcatgaaggagcctgctggtgaattgaaaatgccctacatcttgatctgggtggtggttatggttacatggaggtaatacatgtttttaaaaaatcattaagttattaagatttctgcttctgatgcaagttacacctcaataaaaaggggaaaaaaaaacagtgcctatgcctacctccagaaaatgttgattcattggtctggagtagagcacaggcaggggtaattttttaacatcttccagatgcttccaatatgcagccagggtcgagaatgactcccttacatgattggactcccttacatgattggactcccttacatgattggactcccttacatgattggactcccttacatgattagacttaactgagttttggtcaagcagggcagtagctgtaagctttggaagagaaagccagcagttatccgagcggttccctcccatctgtgagactcttgctcatgtcagcagtattcccttgtcttcccctcggacaggtgatgggcctgagacgggtttgaaataggtcaggatagaaccttcatggactctagtgttctattgcacattaagcctcaaattaacttttcattctggtttccaaccactctgtccttacaggtcatgaaaggaacaccaatgttttgcaaactatgggcagcagtgtttttgagggtcatgatcagtttagtgtagcaattctctatcttttcttaagatcttaggacccctttattcttgtaaagagtgagagccccaaagaccttttgtgtatgtagatatatttaaaaattaaaatagaaaatttttaaatatttgtttataaataatacgttaccttttagatataaaattaactcatcacataatgagaaacaaaatttctgttacagaaacatttcacccaaatcattgtagtaatactaagctgattctaaaaggacaaatttaacataaacatattcatgagaaataactattttctaaaacaaaaaaattcagtgaga

SEQ ID NO: 165090 - DNA, 2846 bp, Homo sapiens
  Payload ID: 12510
  Gene Symbol: PIGQ
  Gene Name: phosphatidylinositol glycan anchor biosynthesis, class Q
  Uniprot ID: Q9BRB3
  ENST ID: ENST00000026218
  CDS Start-End: 89-2371
gtctgcccgggcccgcccatcggggtccccaaccccatccggaccccgccgcccgagcgcgcggccccggaagcacccgcctcccggcatggtgctcaaggccttcttccccacgtgctgcgtctcgacggacagcgggctgctggtgggacggtgggtgccggagcagagcagcgccgtggtcctggcggtcctgcactttcccttcatccccatccaggtcaagcagctcctggcccaggtgcggcaggccagccaggtgggcgtggccgtgctgggcacctggtgccactgccggcaggagcccgaggagagcctgggccgcttcctggagagcctgggtgctgtcttcccccatgagccctggctgcggctgtgccgggagagaggcggcacgttctggagctgcgaggccacccaccggcaagcgcccactgcccccggtgcccctggtgaggaccaggtcatgctcatcttctatgaccagcgccaggtgttgctgtcacagctacacctgcccaccgtcctgcccgaccgccaggctggagccaccactgccagcacggggggcctggctgccgtcttcgacacggtagcacgcagtgaggtgctcttccgcagtgaccgctttgatgagggccccgtgcggctgagccactggcagtcggagggcgtggaggccagcatcctcgcggagctggccaggcgagcctcgggacccatttgcctgctgttggccagcctgctgtcgctggtctcagctgtcagtgcctgccgagtgttcaagctctggcccctgtccttcctcgggagcaaactctccacgtgcgaacagctccggcaccggctggagcacctcacgctaatcttcagtacacggaaggcggagaaccctgcccagctgatgaggaaggccaacacggtggcctctgtgctgctggacgtggccctgggcctcatgctgctgtcctggctccacgggagaagccgcatcgggcatctggccgacgccctcgttcctgtggctgaccacgtggccgaggagctccagcatctgctgcagtggctgatgggtgctcccgccgggctcaagatgaaccgtgcactggaccaggtgctgggccgcttcttcctctaccacatccacctgtggatcagctacatccacctcatgtcccccttcgtggagcacatcctttggcacgtgggcctctcggcctgcctgggcctgacggtggccctgtccctcctctcggacattatcgccctcctcaccttccacatctactgcttttacgtctatggagccaggctgtactgcctgaagatccatggcctgtcctcactgtggcgtctgttccgggggaagaagtggaacgttctgcgccagcgcgtggactcctgttcctatgacctggaccagctgttcatcgggactctgctcttcaccatcctgctcttcctcctgcctaccacagccctgtactacctggtgttcaccctgctccggctcctggtggtcgccgtgcagggcctgatccatctgctcgtggacctcatcaactccctgccgctgtactcactgggtcttcggctctgccggccctacaggctggcggataaacccactgccctacagccgcgtggtgcacacctaccgcctccccagctgtggctgccaccccaagcactcctggggcgccctgtgccgcaagctgttccttggggagctcatctacccctggaggcagagaggggacaagcaggactgagggaactgctggctcgcctggcaccaccacacggccacagccagccatctgctctgccagggtggcaccagctcagctggcgcatgtcctgtgctttgtggacgctgctgtgtgctcctgaacacggcaggccctgctatcacaccttgggcttggaggtcattgggagtgagcagatgtgggggtggccagccaggctggccgcactccatcactggcactgcctgccttgggacccgcttcccacctgctgcggtcaccatggtggcgagcacagcaaccccaggtgtccagagcactgccccatgcccaccctgtgtacccaggtccagagggtccgtccaccacagcagccccaggtggagggctggtctccctgggggctccccagtggctctgccctggctgtgggggtggagggaccttgccaggatgaaccccccagtcccaggcaccctctagctccctcagccgaacagcaccctgcatctgggggattgaagcagtcgctgacccccgtccccagcgggcccgggccctcactccctgaaccacacggggtttatttgcggatgttccctggagaggtcgctttgtgaagaaaccatcagcaggctgtgagcatcgccaggctgctgtgggggcgggagcagcctcagtgtcaagggcccgcccactgacccagccgtacctattcgtccacggtgccccgtagcagcaggtcctgcggccaaatctgtctcccttcatgggcctcccagggaaggaggaagccctgctgtgcagacacctctgtggccccccaggagtgtgagtggcctggggagggggccgtggcactgaggccgaaagtgcctgccagacggcacggtctgggtgcgggtgttccctgtgagcccgagtccgcttcaggaggggagcctgcaggtgccggctggtgaggggatgacgcgctgtgggtgggaggaggcagcgcccatctcagcagcaccaggactgcctgggactccctggcaacccagcaccggggaagccgtcagctgctgtgacaataaaacctgccccgtgtctgga

SEQ ID NO: 165091 - DNA, 603 bp, Homo sapiens
  Payload ID: 12510
  Gene Symbol: PIGQ
  Gene Name: phosphatidylinositol glycan anchor biosynthesis, class Q
  ENST ID: ENST00000293874
  CDS Start-End: 159-603
cacttcctccagttctagtttccaacaacagaggctgcagccacccagccccgaagcagggcccagcgagacagggcccagccccaagcgtgacccagctgcagagaagctgagacggtgattcggactgactggactctggcctccagcctcccggcatggtgctcaaggccttcttccccacgtgctgcgtctcgacggacagcgggctgctggtgggacggtgggtgccggagcagagcagcgccgtggtcctggcggtcctgcactttcccttcatccccatccaggtcaagcagctcctggcccaggtgcggcaggccagccaggtgggcgtggccgtgctgggcacctggtgccactgccggcaggagcccgaggagagcctgggccgcttcctggagagcctgggtgctgtcttcccccatgagccctggctgcggctgtgccgggagagaggcggcacgttctggagctgcgaggccacccaccggcaagcgcccactgcccccggtgcccctggtgaggaccaggtcatgctcatcttctatgaccagcgccaggtgttgctgtcacagctacacctgcccaccgtcctgcccg

SEQ ID NO: 165092 - DNA, 3006 bp, Homo sapiens
  Payload ID: 12510
  Gene Symbol: PIGQ
  Gene Name: phosphatidylinositol glycan anchor biosynthesis, class Q
  Uniprot ID: Q9BRB3
  ENST ID: ENST00000321878
  CDS Start-End: 160-1905
gcggcaacgcgcggagccggcggaagtggggctcgggtcccgcggcggggctggaggcagcgagcgccgtcgtctgcccgggcccgcccatcggggtccccaaccccatccggaccccgccgcccgagcgcgcggccccggaagcacccgcctcccggcatggtgctcaaggccttcttccccacgtgctgcgtctcgacggacagcgggctgctggtgggacggtgggtgccggagcagagcagcgccgtggtcctggcggtcctgcactttcccttcatccccatccaggtcaagcagctcctggcccaggtgcggcaggccagccaggtgggcgtggccgtgctgggcacctggtgccactgccggcaggagcccgaggagagcctgggccgcttcctggagagcctgggtgctgtcttcccccatgagccctggctgcggctgtgccgggagagaggcggcacgttctggagctgcgaggccacccaccggcaagcgcccactgcccccggtgcccctggtgaggaccaggtcatgctcatcttctatgaccagcgccaggtgttgctgtcacagctacacctgcccaccgtcctgcccgaccgccaggctggagccaccactgccagcacggggggcctggctgccgtcttcgacacggtagcacgcagtgaggtgctcttccgcagtgaccgctttgatgagggccccgtgcggctgagccactggcagtcggagggcgtggaggccagcatcctcgcggagctggccaggcgagcctcgggacccatttgcctgctgttggccagcctgctgtcgctggtctcagctgtcagtgcctgccgagtgttcaagctctggcccctgtccttcctcgggagcaaactctccacgtgcgaacagctccggcaccggctggagcacctcacgctaatcttcagtacacggaaggcggagaaccctgcccagctgatgaggaaggccaacacggtggcctctgtgctgctggacgtggccctgggcctcatgctgctgtcctggctccacgggagaagccgcatcgggcatctggccgacgccctcgttcctgtggctgaccacgtggccgaggagctccagcatctgctgcagtggctgatgggtgctcccgccgggctcaagatgaaccgtgcactggaccaggtgctgggccgcttcttcctctaccacatccacctgtggatcagctacatccacctcatgtcccccttcgtggagcacatcctttggcacgtgggcctctcggcctgcctgggcctgacggtggccctgtccctcctctcggacattatcgccctcctcaccttccacatctactgcttttacgtctatggagccaggctgtactgcctgaagatccatggcctgtcctcactgtggcgtctgttccgggggaagaagtggaacgttctgcgccagcgcgtggactcctgttcctatgacctggaccagctgttcatcgggactctgctcttcaccatcctgctcttcctcctgcctaccacagccctgtactacctggtgttcaccctgctccggctcctggtggtcgccgtgcagggcctgatccatctgctcgtggacctcatcaactccctgccgctgtactcactgggtcttcggctctgccggccctacaggctggcggctggcgtgaagttccgtgtcctccggcacgaggccggcaggcccctccgcctcctgatgcagataaacccactgccctacagccgcgtggtgcacacctaccgcctccccagctgtggctgccaccccaagcactcctggggcgccctgtgccgcaagctgttccttggggagctcatctacccctggaggcagagaggggacaagcaggactgagggaactgctggctcgcctggcaccaccacacggccacagccagccatctgctctgccagggtggcaccagctcagctggcgcatgtcctgtgctttgtggacgctgctgtgtgctcctgaacacggcaggccctgctatcacaccttgggcttggaggtcattgggagtgagcagatgtgggggtggccagccaggctggccgcactccatcactggcactgcctgccttgggacccgcttcccacctgctgcggtcaccatggtggcgagcacagcaaccccaggtgtccagagcactgccccatgcccaccctgtgtacccaggtccagagggtccgtccaccacagcagccccaggtggagggctggtctccctgggggctccccagtggctctgccctggctgtgggggtggagggaccttgccaggatgaaccccccagtcccaggcaccctctagctccctcagccgaacagcaccctgcatctgggggattgaagcagtcgctgacccccgtccccagcgggcccgggccctcactccctgaaccacacggggtttatttgcggatgttccctggagaggtcgctttgtgaagaaaccatcagcaggctgtgagcatcgccaggctgctgtgggggcgggagcagcctcagtgtcaagggcccgcccactgacccagccgtacctattcgtccacggtgccccgtagcagcaggtcctgcggccaaatctgtctcccttcatgggcctcccagggaaggaggaagccctgctgtgcagacacctctgtggccccccaggagtgtgagtggcctggggagggggccgtggcactgaggccgaaagtgcctgccagacggcacggtctgggtgcgggtgttccctgtgagcccgagtccgcttcaggaggggagcctgcaggtgccggctggtgaggggatgacgcgctgtgggtgggaggaggcagcgcccatctcagcagcaccaggactgcctgggactccctggcaacccagcaccggggaagccgtcagctgctgtgacaataaaacctgccccgtgtctggagcgcaggctcggtcccgggtccatgtg

SEQ ID NO: 165093 - DNA, 1915 bp, Homo sapiens
  Payload ID: 12510
  Gene Symbol: PIGQ
  Gene Name: phosphatidylinositol glycan anchor biosynthesis, class Q
  Uniprot ID: Q9BRB3
  ENST ID: ENST00000409527
  CDS Start-End: 170-1915
ctagtttccaacaacagaggctgcagccacccagccccgaagcagggcccagcgagacagggcccagtggggccttattctctctcttgcagccccaagcgtgacccagctgcagagaagctgagacggtgattcggactgactggactctggcctccagcctcccggcatggtgctcaaggccttcttccccacgtgctgcgtctcgacggacagcgggctgctggtgggacggtgggtgccggagcagagcagcgccgtggtcctggcggtcctgcactttcccttcatccccatccaggtcaagcagctcctggcccaggtgcggcaggccagccaggtgggcgtggccgtgctgggcacctggtgccactgccggcaggagcccgaggagagcctgggccgcttcctggagagcctgggtgctgtcttcccccatgagccctggctgcggctgtgccgggagagaggcggcacgttctggagctgcgaggccacccaccggcaagcgcccactgcccccggtgcccctggtgaggaccaggtcatgctcatcttctatgaccagcgccaggtgttgctgtcacagctacacctgcccaccgtcctgcccgaccgccaggctggagccaccactgccagcacggggggcctggctgccgtcttcgacacggtagcacgcagtgaggtgctcttccgcagtgaccgctttgatgagggccccgtgcggctgagccactggcagtcggagggcgtggaggccagcatcctcgcggagctggccaggcgagcctcgggacccatttgcctgctgttggccagcctgctgtcgctggtctcagctgtcagtgcctgccgagtgttcaagctctggcccctgtccttcctcgggagcaaactctccacgtgcgaacagctccggcaccggctggagcacctcacgctaatcttcagtacacggaaggcggagaaccctgcccagctgatgaggaaggccaacacggtggcctctgtgctgctggacgtggccctgggcctcatgctgctgtcctggctccacgggagaagccgcatcgggcatctggccgacgccctcgttcctgtggctgaccacgtggccgaggagctccagcatctgctgcagtggctgatgggtgctcccgccgggctcaagatgaaccgtgcactggaccaggtgctgggccgcttcttcctctaccacatccacctgtggatcagctacatccacctcatgtcccccttcgtggagcacatcctttggcacgtgggcctctcggcctgcctgggcctgacggtggccctgtccctcctctcggacattatcgccctcctcaccttccacatctactgcttttacgtctatggagccaggctgtactgcctgaagatccatggcctgtcctcactgtggcgtctgttccgggggaagaagtggaacgttctgcgccagcgcgtggactcctgttcctatgacctggaccagctgttcatcgggactctgctcttcaccatcctgctcttcctcctgcctaccacagccctgtactacctggtgttcaccctgctccggctcctggtggtcgccgtgcagggcctgatccatctgctcgtggacctcatcaactccctgccgctgtactcactgggtcttcggctctgccggccctacaggctggcggctggcgtgaagttccgtgtcctccggcacgaggccggcaggcccctccgcctcctgatgcagataaacccactgccctacagccgcgtggtgcacacctaccgcctccccagctgtggctgccaccccaagcactcctggggcgccctgtgccgcaagctgttccttggggagctcatctacccctggaggcagagaggggacaagcaggactga

SEQ ID NO: 165094 - DNA, 586 bp, Homo sapiens
  Payload ID: 12510
  Gene Symbol: PIGQ
  Gene Name: phosphatidylinositol glycan anchor biosynthesis, class Q
  ENST ID: ENST00000439574
  CDS Start-End: 252-586
ggaagtggggctcgggtcccgcggcggggctggaggcagcgagcgccgtcgtctgcccgggcccgcccatcggggtccccaaccccatccggaccccgccgcccgagcgcgcggccccggaagcacccgtagagacttggtttcacccccatcgaggctggtcttaagctcctgacctcaagtgatccgcccgcctcggcctcccaaagtgctgggattacaggcgtgagccaccgcgccagcctcccggcatggtgctcaaggccttcttccccacgtgctgcgtctcgacggacagcgggctgctggtgggacggtgggtgccggagcagagcagcgccgtggtcctggcggtcctgcactttcccttcatccccatccaggtcaagcagctcctggcccaggtgcggcaggccagccaggtgggcgtggccgtgctgggcacctggtgccactgccggcaggagcccgaggagagcctgggccgcttcctggagagcctgggtgctgtcttcccccatgagccctggctgcggctgtgccgggagagaggcggcacgttctggagctgcgaggccacccaccg

SEQ ID NO: 165095 - DNA, 932 bp, Homo sapiens
  Payload ID: 12510
  Gene Symbol: PIGQ
  Gene Name: phosphatidylinositol glycan anchor biosynthesis, class Q
  ENST ID: ENST00000420990
  CDS Start-End: 1-715
gctgcagtggctgatgggtgctcccgccgggctcaagatgaaccgtgcactggaccaggtgctgggccgcttcttcctctaccacatccacctgtggatcagctacatccacctcatgtcccccttcgtggagcacatcctttggcacgtgggcctctcggcctgcctgggcctgacggtggccctgtccctcctctcggacattatcgccctcctcaccttccacatctactgcttttacgtctatggagccaggctgtactgcctgaagatccatggcctgtcctcactgtggcgtctgttccgggggaagaagtggaacgttctgcgccagcgcgtggactcctgttcctatgacctggaccagctgttcatcgggactctgctcttcaccatcctgctcttcctcctgcctaccacagccctgtactacctggtgttcaccctgctccggctcctggtggtcgccgtgcagggcctgatccatctgctcgtggacctcatcaactccctgccgctgtactcactgggtcttcggctctgccggccctacaggctggcgggttcagaaccctggagacctgaggccacaggcctttgttcttctgccttgggattttctgggcttgggagtctgaactgcaggccaggggccaagcgcggcaaagtcagaggcactaggagccagcagggcggccaccatccactggcgtgaagttccgtgtcctccggcacgaggccggcaggcccctccgcctcctgatgcagggcctgaggacactggtgtggtcctgtggatggggcccattctgccctgtgtcggaggcgcccttggctggctggggctgccctgggccccacagggctcaagttctgggtggaacagaaccgactgagtgagtcctggggtggggtgtgcgtccctgtggcac

SEQ ID NO: 165096 - DNA, 2054 bp, Homo sapiens
  Payload ID: 12510
  Gene Symbol: PIGQ
  Gene Name: phosphatidylinositol glycan anchor biosynthesis, class Q
  ENST ID: ENST00000443147
  CDS Start-End: 64-1788
agaggacttacaggtcacaccaccccgacgtgtgcatcctgctctgttccctcgtccctaaggatgtggtgggctctgagacctccaggcatcctgcctcccggcatggtgctcaaggccttcttccccacgtgctgcgtctcgacggacagcgggctgctggtgggacggtgggtgccggagcagagcagcgccgtggtcctggcggtcctgcactttcccttcatccccatccaggtcaagcagctcctggcccaggtgcggcaggccagccaggtgggcgtggccgtgctgggcacctggtgccactgccggcaggagcccgaggagagcctgggccgcttcctggagagcctgggtgctgtcttcccccatgagccctggctgcggctgtgccgggagagaggcggcacgttctggagctgcgaggccacccaccggcaagcgcccactgcccccggtgcccctggtgaggaccaggtcatgctcatcttctatgaccagcgccaggtgttgctgtcacagctacacctgcccaccgtcctgcccgaccgccaggctggagccaccactgccagcacggggggcctggctgccgtcttcgacacggtagcacgcagtgaggtgctcttccgcagtgaccgctttgatgagggccccgtgcggctgagccactggcagtcggagggcgtggaggccagcatcctcgcggagctggccaggcgagcctcgggacccatttgcctgctgttggccagcctgctgtcgctggtctcagctgtcagtgcctgccgagtgttcaagctctggcccctgtccttcctcgggagcaaactctccacgtgcgaacagctccggcaccggctggagcacctcacgctaatcttcagtacacggaaggcggagaaccctgcccagctgatgaggaaggccaacacggtggcctctgtgctgctggacgtggccctgggcctcatgctgctgtcctggctccacgggagaagccgcatcgggcatctggccgacgccctcgttcctgtggctgaccacgtggccgaggagctccagcatctgctgcagtggctgatgggtgctcccgccgggctcaagatgaaccgtgcactggaccaggtgctgggccgcttcttcctctaccacatccacctgtggatcagctacatccacctcatgtcccccttcgtggagcacatcctttggcacgtgggcctctcggcctgcctgggcctgacggtggccctgtccctcctctcggacattatcgccctcctcaccttccacatctactgcttttacgtctatggagccaggctgtactgcctgaagatccatggcctgtcctcactgtggcgtctgttccgggggaagaagtggaacgttctgcgccagcgcgtggactcctgttcctatgacctggaccagctgttcatcgggactctgctcttcaccatcctgctcttcctcctgcctaccacagccctgtactacctggtgttcaccctgctccggctcctggtggtcgccgtgcagggcctgatccatctgctcgtggacctcatcaactccctgccgctgtactcactgggtcttcggctctgccggccctacaggctggcgggttcagaaccctggagacctgaggccacaggcctttgttcttctgccttgggattttctgggcttgggagtctgaactgcaggccaggggccaagcgcggcaaagtcagaggcactaggagccagcagggcggccaccatccactggcgtgaagttccgtgtcctccggcacgaggccggcaggcccctccgcctcctgatgcagataaacccactgccctacagccgcgtggtgcacacctaccgcctccccagctgtggctgccaccccaagcactcctggggcgccctgtgccgcaagctgttccttggggagctcatctacccctggaggcagagaggggacaagcaggactgagggaactgctggctcgcctggcaccaccacacggccacagccagccatctgctctgccag

SEQ ID NO: 165097 - DNA, 2052 bp, Homo sapiens
  Payload ID: 12510
  Gene Symbol: PIGQ
  Gene Name: phosphatidylinositol glycan anchor biosynthesis, class Q
  ENST ID: ENST00000422307
  CDS Start-End: 131-1321
ggctcgggtcccgcggcggggctggaggcagcgagcgccgtcgtctgcccgggcccgcccatcggggtccccaaccccatccggaccccgccgcccgagcgcgcggccccggaagcacccgcctcccggcatggtgctcaaggccttcttccccacgtgctgcgtctcgacggacagcgggctgctggtgggacggtgggtgccggagcagagcagcgccgtggtcctggcggtcctgcactttcccttcatccccatccaggtcaagcagctcctggcccaggtgcggcaggccagccaggtgggcgtggccgtgctgggcacctggtgccactgccggcaggagcccgaggagagcctgggccgcttcctggagagcctgggtgctgtcttcccccatgagccctggctgcggctgtgccgggagagaggcggcacgttctggagctgcgaggccacccaccggcaagcgcccactgcccccggtgcccctggtgaggaccaggtcatgctcatcttctatgaccagcgccaggtgttgctgtcacagctacacctgcccaccgtcctgcccgaccgccaggctggagccaccactgccagcacggggggcctggctgccgtcttcgacacggtagcacgcagtgaggtgctcttccgcagtgaccgctttgatgagggccccgtgcggctgagccactggcagtcggagggcgtggaggccagcatcctcgcggagctggccaggcgagcctcgggacccatttgcctgctgttggccagcctgctgtcgctggtctcagctgtcagtgcctgccgagtgttcaagctctggcccctgtccttcctcgggagcaaactctccacgtgcgaacagctccggcaccggctggagcacctcacgctaatcttcagtacacggaaggcggagaaccctgcccagctgatgaggaaggccaacacggtggcctctgtgctgctggacgtggccctgggcctcatgctgctgtcctggctccacgggagaagccgcatcgggcatctggccgacgccctcgttcctgtggctgacgtgagtggactggggtggagcccggtgtcccgggtgggcgtggggacccctcctgggcagcagagccttcccgggccagagccaccgccccacaaagccagttctaccttctccatgctctggagacacggccctcccctgaaccagaagcaggaactccaggggcgctggggcctgggcagggcaggcctcgcaggtacacccccctttccttctgaaggggctgtgtgcaggagccagccgggctgaggctctggggagcccgcctctccctgtgggcccagcgtcctggtatctcccttgtggtccctgagatcagcgttgccctcctggctctctggggccctctgcagagccagggtcatgaaacctttcctgtccagggaggcccatgtgcagcccagctgggacttcctgccctgcccctgtgctgattctgtaactcctgtgctgagagccagaggcacagcttgtctcccatctcccaccttccctgcatggtctgtgccccgtttccagccgggtgcagccccctcctctgcagatctagtgcatttccatgctgcctctgggccttcagcttctctgtcttcctccctcagcaccaaagccccgtctcttccattaggagcttgtcttcctgctgggggtggtacctgactctttggcccaccctcgggcctctgtggaggcctccttgaggcctgactgggtgggtcttgtgtgggctgcaggtgtgcactgggcctgcttgtggccaggccaggcctctgggggcagcatcaggcacgtctgtgtggctgtgggggtgcagggagctccagcccagaaggaaggaggggcggggctggggaaggggctcggcagctttgcctgtggtcgtccgcacctgccaccggcctactttgtcctagacctcccttttgcaaaagtgctcagaaatataaatatttaatttaaaaatgaaagtctcttcctgc

SEQ ID NO: 165098 - DNA, 608 bp, Homo sapiens
  Payload ID: 12510
  Gene Symbol: PIGQ
  Gene Name: phosphatidylinositol glycan anchor biosynthesis, class Q
  ENST ID: ENST00000540241
  CDS Start-End: 1-420
ggcctgtcctcactgtggcgtctgttccgggggaagaagtggaacgttctgcgccagcgcgtggactcctgttcctatgacctggaccagctccggctcctggtggtcgccgtgcagggcctgatccatctgctcgtggacctcatcaactccctgccgctgtactcactgggtcttcggctctgccggccctacaggctggcggctggcgtgaagttccgtgtcctccggcacgaggccggcaggcccctccgcctcctgatgcagataaacccactgccctacagccgcgtggtgcacacctaccgcctccccagctgtggctgccaccccaagcactcctggggcgccctgtgccgcaagctgttccttggggagctcatctacccctggaggcagagaggggacaagcaggactgagggaactgctggctcgcctggcaccaccacacggccacagccagccatctgctctgccagggtggcaccagctcagctggcgcatgtcctgtgctttgtggacgctgctgtgtgctcctgaacacggcaggccctgctatcacaccttgggcttggaggtcattgggagtgagcagatgtgggggtgg

SEQ ID NO: 165099 - DNA, 2112 bp, Homo sapiens
  Payload ID: 12510
  Gene Symbol: PIGQ
  Gene Name: phosphatidylinositol glycan anchor biosynthesis, class Q
  Uniprot ID: Q9BRB3
  ENST ID: ENST00000470411
  CDS Start-End: 45-944
cccgccgcccgagcgcgcggccccggaagcacccgcctcccggcatggtgctcaaggccttcttccccacgtgctgcgtctcgacggacagcgggctgctggtgggacggtgggtgccggagcagagcagcgccgtggtcctggcggtcctgcactttcccttcatccccatccaggtcaagcagctcctggcccaggtgcggcaggccagccaggtgggcgtggccgtgctgggcacctggtgccactgccggcaggagcccgaggagagcctgggccgcttcctggagagcctgggtgctgtcttcccccatgagccctggctgcggctgtgccgggagagaggcggcacgttctggagctgcgaggccacccaccggcaagcgcccactgcccccggtgcccctggtgaggaccaggtcatgctcatcttctatgaccagcgccaggtgttgctgtcacagctacacctgcccaccgtcctgcccgaccgccaggctggagccaccactgccagcacggggggcctggctgccgtcttcgacacggtagcacgcagtgaggtgctcttccgcagtgaccgctttgatgagggccccgtgcggctgagccactggcagtcggagggcgtggaggccagcatcctcgcggagctggccaggcgagcctcgggacccatttgcctgctgttggccagcctgctgtcgctggtctcagctgtcagtgcctgccgagtgttcaagctctggcccctgtccttcctcgggagcaaactctccacgtgcgaacagctccggcaccggctggagcacctcacgctaatcttcagtacacggaaggcggagaaccctgcccagctgatgaggtgtgggcctgccctggtctctgcagggctgggtgcgtgccctctggccccttctccatccccctctgcaccacgctgacccctccggccaggcaggcctcctcctgcggccccaggctgtgctggccaccctcatgccggccgggccggacctcccttccaggaaggccaacacggtggcctctgtgctgctggacgtggccctgggcctcatgctgctgtcctggctccacgggagaagccgcatcgggcatctggccgacgccctcgttcctgtggctgacgtgagtggactggggtggagcccggtgtcccgggtgggcgtggggacccctcctgggcagcagagccttcccgggccagagccaccgccccacaaagccagttctaccttctccatgctctggagacacggccctcccctgaaccagaagcaggaactccaggggcgctggggcctgggcagggcaggcctcgcaggtacacccccctttccttctgaaggggctgtgtgcaggagccagccgggctgaggctctggggagcccgcctctccctgtgggcccagcgtcctggtatctcccttgtggtccctgagatcagcgttgccctcctggctctctggggccctctgcagagccagggtcatgaaacctttcctgtccagggaggcccatgtgcagcccagctgggacttcctgccctgcccctgtgctgattctgtaactcctgtgctgagagccagaggcacagcttgtctcccatctcccaccttccctgcatggtctgtgccccgtttccagccgggtgcagccccctcctctgcagatctagtgcatttccatgctgcctctgggccttcagcttctctgtcttcctccctcagcaccaaagccccgtctcttccattaggagcttgtcttcctgctgggggtggtacctgactctttggcccaccctcgggcctctgtggaggcctccttgaggcctgactgggtgggtcttgtgtgggctgcaggtgtgcactgggcctgcttgtggccaggccaggcctctgggggcagcatcaggcacgtctgtgtggctgtgggggtgcagggagctccagcccagaaggaaggaggggcggggctggggaaggggctcggcagctttgcctgtggtcgtccgcacctgccaccggcctactttgtcctagacctcccttttgcaaaagtgctcagaaatataaatatttaatttaaaaa

SEQ ID NO: 165100 - DNA, 936 bp, Homo sapiens
  Payload ID: 12510
  Gene Symbol: PIGQ
  Gene Name: phosphatidylinositol glycan anchor biosynthesis, class Q
  ENST ID: ENST00000635205
  CDS Start-End: 1-310
cgtgggcctctcggcctgcctgggcctgacggtggccctgtccctcctctcggacattatcgccctcctcaccttccacatctactgcttttacgtctatggagccaggctgtactgcctgaagatccatggcctgtcctcactgtggcgtctgttccgggggaagaagtggaacgttctgcgccagcgcgtggactcctgttcctatgacctggaccagctgttcatcgggactctgctcttcaccatcctgctcttcctcctgcctaccacagccctgtactacctggtgttcaccctgctggcgtgaagttccgtgtcctccggcacgaggccggcaggcccctccgcctcctgatgcagataaacccactgccctacagccgcgtggtgcacacctaccgcctccccagctgtggctgccaccccaagcactcctggggcgccctgtgccgcaagctgttccttggggagctcatctacccctggaggcagagaggggacaagcaggactgagggaactgctggctcgcctggcaccaccacacggccacagccagccatctgctctgccagggtggcaccagctcagctggcgcatgtcctgtgctttgtggacgctgctgtgtgctcctgaacacggcaggccctgctatcacaccttgggcttggaggtcattgggagtgagcagatgtgggggtggccagccaggctggccgcactccatcactggcactgcctgccttgggacccgcttcccacctgctgcggtcaccatggtggcgagcacagcaaccccaggtgtccagagcactgccccatgcccaccctgtgtacccaggtccagagggtccgtccaccacagcagccccaggtggagggctggtctccctgggggctccccagtggctctgccctggctgtgggggtggagg

SEQ ID NO: 165101 - DNA, 2397 bp, Homo sapiens
  Payload ID: 12511
  Gene Symbol: PIGS
  Gene Name: phosphatidylinositol glycan anchor biosynthesis, class S
  ENST ID: ENST00000268758
  CDS Start-End: 33-158
ccccacggtggccggagcagccggaagctagcatggcggccgccggggctgcggctacacacctagctccgcctcatggtgcctgtcactgtcgtgtttacgcgggagtcagtgcccctggacgaccaggagaagctgcccttcaccgttgtgcatgaaagagagattcctctgaaatacaaaatgaaaatcaaatgccgtttccagaaggcctatcggagggctttggaccatgaggaggaggccctgtcatcgggcagtgtgcaagaggcagaagccatgttagatgagcctcaggaacaagcggagggctccctgactgtgtacgtgatatctgaacactcctcacttcttccccaggacatgatgagctacattgggcccaagaggacagcagtggtgcgggggataatgcaccgggaggcctttaacatcattggccgccgcatagtccaggtggcccaggccatgtctttgactgaggatgtgcttgctgctgctctggctgaccaccttccagaggacaagtggagcgctgagaagaggcggcctctcaagtccagcttgggctatgagatcaccttcagtttactcaacccagaccccaagtcccatgatgtctactgggacattgagggggctgtccggcgctatgtgcaacctttcctgaatgccctcggtgccgctggcaacttctctgtggactctcagattctttactatgcaatgttgggggtgaatccccgctttgactcagcttcctccagctactatttggacatgcacagcctcccccatgtcatcaacccagtggagtcccggctgggatccagtgctgcctccttgtaccctgtgctcaactttctactctacgtgcctgagcttgcacactcaccgctgtacattcaggacaaggatggcgctccagtggccaccaatgccttccatagtccccgctggggtggcattatggtatataatgttgactccaaaacctataatgcctcagtgctgccagtgagagtcgaggtggacatggtgcgagtgatggaggtgttcctggcacagttgcggttgctctttgggattgctcagccccagctgcctccaaaatgcctgctttcagggcctacgagtgaagggctaatgacctgggagctagaccggctgctctgggctcggtcagtggagaacctggccacagccaccaccacccttacctccctggcgcagcttctgggcaagatcagcaacattgtcattaaggacgacgtggcatctgaggtgtacaaggctgtagctgccgtccagaagtcggcagaagagttggcgtctgggcacctggcatctgcctttgtcgccagccaggaagctgtgacatcctctgagcttgccttctttgacccgtcactcctccacctcctttatttccctgatgaccagaagtttgccatctacatcccactcttcctgcctatggctgtgcccatcctcctgtccctggtcaagatcttcctggagacccgcaagtcctggagaaagcctgagaagacagactgagcagggcagcacctccataggaagccttcctttctggccaaggtgggcggtgttagattgtgaggcacgtacatggggcctgccggaatgacttaaatatttgtctccagtctccactgttggctctccagcaaccaaagtacaacactccaagatgggttcatcttttcttcctttcccattcacctggctcaatcctcctccaccaccaggggcctcaaaaggcacatcatccgggtctccttatcttgtttgataaggctgctgcctgtctccctctgtggcaaggactgtttgttcttttgccccatttctcaacatagcacacttgtgcactgagaggagggagcattatgggaaagtccctgccttccacacctctctctagtccctgtgggacagccctagcccctgctgtcatgaaggggccaggcattggtcacctgtgggaccttctccctcactcccctccctcctagttggctttgtctgtcaggtgcagtctggcgggagtccaggaggcagcagctcaggacatggtgctgtgtgtgtgtgtgtgtgtgtgtgtgtgtgtgtgtgtcagaggttccagaaagttccagatttggaatcaaacagtcctgaattcaaatccttgtttttgcacttattgtctggagagctttggataaggtattgaatctctctgagcctcagtttttcatttgttcaaatggcactgatgatgtctcccttacaagatggttgtgaggagtaaatgtgatcagcatgtaaagtgtctggcgtgtagtaggctcttaataaacactggctgaatatgaattggaatgatacaaa

SEQ ID NO: 165102 - DNA, 2877 bp, Homo sapiens
  Payload ID: 12511
  Gene Symbol: PIGS
  Gene Name: phosphatidylinositol glycan anchor biosynthesis, class S
  Uniprot ID: Q96S52
  ENST ID: ENST00000308360
  CDS Start-End: 377-2044
tccattttcagatgagcctcggagctgcctgtagttgcccagctagtatttaaggactgcagaggttgcgctcttgattgcggggctagaagtgtgttctacagggaagcggggaacttcgttccagcagcgccgaaacccgcacggcccctaggctgtccctccgcgcccgggtgacttcctttcagatccccagcgaagctcccagcggagccctcccacccctcgcccgcttgctcccgtctgcgggtctggagtagcgctcgcgattggccccgatcaccgccgcggtcctgccccctcgttgcagagattccgattgggtgaggctcacgaagctctgcccccacggtggccggagcagccggaagctagcatggcggccgccggggctgcggctacacacctagaggtggcccggggcaagcgcgccgccctcttcttcgctgcggtggccatcgtgctggggctaccgctctggtggaagaccacggagacctaccgggcctcgttgccttactcccagatcagtggcctgaatgcccttcagctccgcctcatggtgcctgtcactgtcgtgtttacgcgggagtcagtgcccctggacgaccaggagaagctgcccttcaccgttgtgcatgaaagagagattcctctgaaatacaaaatgaaaatcaaatgccgtttccagaaggcctatcggagggctttggaccatgaggaggaggccctgtcatcgggcagtgtgcaagaggcagaagccatgttagatgagcctcaggaacaagcggagggctccctgactgtgtacgtgatatctgaacactcctcacttcttccccaggacatgatgagctacattgggcccaagaggacagcagtggtgcgggggataatgcaccgggaggcctttaacatcattggccgccgcatagtccaggtggcccaggccatgtctttgactgaggatgtgcttgctgctgctctggctgaccaccttccagaggacaagtggagcgctgagaagaggcggcctctcaagtccagcttgggctatgagatcaccttcagtttactcaacccagaccccaagtcccatgatgtctactgggacattgagggggctgtccggcgctatgtgcaacctttcctgaatgccctcggtgccgctggcaacttctctgtggactctcagattctttactatgcaatgttgggggtgaatccccgctttgactcagcttcctccagctactatttggacatgcacagcctcccccatgtcatcaacccagtggagtcccggctgggatccagtgctgcctccttgtaccctgtgctcaactttctactctacgtgcctgagcttgcacactcaccgctgtacattcaggacaaggatggcgctccagtggccaccaatgccttccatagtccccgctggggtggcattatggtatataatgttgactccaaaacctataatgcctcagtgctgccagtgagagtcgaggtggacatggtgcgagtgatggaggtgttcctggcacagttgcggttgctctttgggattgctcagccccagctgcctccaaaatgcctgctttcagggcctacgagtgaagggctaatgacctgggagctagaccggctgctctgggctcggtcagtggagaacctggccacagccaccaccacccttacctccctggcgcagcttctgggcaagatcagcaacattgtcattaaggacgacgtggcatctgaggtgtacaaggctgtagctgccgtccagaagtcggcagaagagttggcgtctgggcacctggcatctgcctttgtcgccagccaggaagctgtgacatcctctgagcttgccttctttgacccgtcactcctccacctcctttatttccctgatgaccagaagtttgccatctacatcccactcttcctgcctatggctgtgcccatcctcctgtccctggtcaagatcttcctggagacccgcaagtcctggagaaagcctgagaagacagactgagcagggcagcacctccataggaagccttcctttctggccaaggtgggcggtgttagattgtgaggcacgtacatggggcctgccggaatgacttaaatatttgtctccagtctccactgttggctctccagcaaccaaagtacaacactccaagatgggttcatcttttcttcctttcccattcacctggctcaatcctcctccaccaccaggggcctcaaaaggcacatcatccgggtctccttatcttgtttgataaggctgctgcctgtctccctctgtggcaaggactgtttgttcttttgccccatttctcaacatagcacacttgtgcactgagaggagggagcattatgggaaagtccctgccttccacacctctctctagtccctgtgggacagccctagcccctgctgtcatgaaggggccaggcattggtcacctgtgggaccttctccctcactcccctccctcctagttggctttgtctgtcaggtgcagtctggcgggagtccaggaggcagcagctcaggacatggtgctgtgtgtgtgtgtgtgtgtgtgtgtgtgtgtgtgtgtcagaggttccagaaagttccagatttggaatcaaacagtcctgaattcaaatccttgtttttgcacttattgtctggagagctttggataaggtattgaatctctctgagcctcagtttttcatttgttcaaatggcactgatgatgtctcccttacaagatggttgtgaggagtaaatgtgatcagcatgtaaagtgtctggcgtgtagtaggctcttaataaacactggctgaatatgaattggaatgata

SEQ ID NO: 165103 - DNA, 2815 bp, Homo sapiens
  Payload ID: 12511
  Gene Symbol: PIGS
  Gene Name: phosphatidylinositol glycan anchor biosynthesis, class S
  Uniprot ID: Q96S52
  ENST ID: ENST00000395346
  CDS Start-End: 339-1982
agctctgcccccacggtggccggagcagccggaagctagcatggcggccgccggggctgcggctacacacctaggtgcggtgggcttcgggtggggggcctgcagctagctgatggcaagggaggaatagcaggggtggggattgtggtgtgcgagaggtcccgcggacggggggctcgggggtctcttcagacgagattcccttcaggcttgggccgggtcccttcgcacggagatcccaatgaacgcgggcccctggaggccggtggttggggcttctccgcgtcggggatggggccggtaccctagcccgtttccagcgcctcagtcggttccccatgccctcagaggtggcccggggcaagcgcgccgccctcttcttcgctgcggtggccatcgtgctggggctaccgctctggtggaagaccacggagacctaccgggcctcgttgccttactcccagatcagtggcctgaatgcccttcagctccgcctcatggtgcctgtcactgtcgtgtttacgcgggagtcagtgcccctggacgaccaggagaagctgcccttcaccgttgtgcatgaaagagagattcctctgaaatacaaaatgaaaatcaaatgccgtttccagaaggcctatcggagggctttggaccatgaggaggaggccctgtcatcgggcagtgtgcaagaggcagaagccatgttagatgagcctcaggaacaagcggagggctccctgactgtgtacgtgatatctgaacactcctcacttcttccccaggacatgatgagctacattgggcccaagaggacagcagtggtgcgggggataatgcaccgggaggcctttaacatcattggccgccgcatagtccaggtggcccaggccatgtctttgactgaggatgtgcttgctgctgctctggctgaccaccttccagaggacaagtggagcgctgagaagaggcggcctctcaagtccagcttgggctatgagatcaccttcagtttactcaacccagaccccaagtcccatgatgtctactgggacattgagggggctgtccggcgctatgtgcaacctttcctgaatgccctcggtgccgctggcaacttctctgtggactctcagattctttactatgcaatgttgggggtgaatccccgctttgactcagcttcctccagctactatttggacatgcacagcctcccccatgtcatcaacccagtggagtcccggctgggatccagtgctgcctccttgtaccctgtgctcaactttctactctacgtgcctgagcttgcacactcaccgctgtacattcaggacaaggatggcgctccagtggccaccaatgccttccatagtccccgctggggtggcattatggtatataatgttgactccaaaacctataatgcctcagtgctgccagtgagagtcgaggtggacatggtgcgagtgatggaggtgttcctggcacagttgcggttgctctttgggattgctcagccccagctgcctccaaaatgcctgctttcagggcctacgagtgaagggctaatgacctgggagctagaccggctgctctgggctcggtcagtggagaacctggccacagccaccaccacccttacctccctggcgcagcttctgggcaagatcagcaacattgtcattaaggacgacgtggcatctgaggtgtacaaggctgtagctgccgtccagaagtcggcagaagagttggcgtctgggcacctggcatctgcctttgtcgccagccaggaagctgtgacatcctctgagcttgccttctttgacccgtcactcctccacctcctttatttccctgatgaccagaagtttgccatctacatcccactcttcctgcctatggctgtgcccatcctcctgtccctggtcaagatcttcctggagacccgcaagtcctggagaaagcctgagaagacagactgagcagggcagcacctccataggaagccttcctttctggccaaggtgggcggtgttagattgtgaggcacgtacatggggcctgccggaatgacttaaatatttgtctccagtctccactgttggctctccagcaaccaaagtacaacactccaagatgggttcatcttttcttcctttcccattcacctggctcaatcctcctccaccaccaggggcctcaaaaggcacatcatccgggtctccttatcttgtttgataaggctgctgcctgtctccctctgtggcaaggactgtttgttcttttgccccatttctcaacatagcacacttgtgcactgagaggagggagcattatgggaaagtccctgccttccacacctctctctagtccctgtgggacagccctagcccctgctgtcatgaaggggccaggcattggtcacctgtgggaccttctccctcactcccctccctcctagttggctttgtctgtcaggtgcagtctggcgggagtccaggaggcagcagctcaggacatggtgctgtgtgtgtgtgtgtgtgtgtgtgtgtgtgtgtgtgtcagaggttccagaaagttccagatttggaatcaaacagtcctgaattcaaatccttgtttttgcacttattgtctggagagctttggataaggtattgaatctctctgagcctcagtttttcatttgttcaaatggcactgatgatgtctcccttacaagatggttgtgaggagtaaatgtgatcagcatgtaaagtgtctggcgtgtagtaggctcttaataaacactggctgaatatgaattggaatgata
